United States Patent Application Publication US 2013/0332133 A1 - sequence listing, part 26

SEQ ID NO: 218380 - DNA, 634 bp, Unknown
  Bacterial polypeptide expressing nucleotide sequence isolated from the Sargasso Sea
aggagttaatttttcgaaagtttatggaaaattccctaaagaattccagaaaaatattccaggtgcaagcaaagatcctaaattttgggcgtcgggaatatcaatagtaatgcatatgcaaaatcctcatattcctgcaatgcattttaatactagatttatttgtacaactaagaattggtttggtggaggtatggatgtgacaccaacaattaaagatgaaaaagaaaagaaaaattttcataaaattttaaaaacaatgtgcgatagacataataaaaattattataaaaaatataaaaagtggtgtgatgaatacttttatttacctcaccgaaaagaggcaagaggaattgggggaatttttttcgattataagaataataattttgaaaatgactttaagtttgtaagggatattggggttacatttcaaatgttatttaatgaaataattagaaaaaaaataaaaagaaaatggactttaaaagacaaggagcttcagtatattaaaagaggtcgatatgcagaatttaatttgctctatgataggggaacaaaatttggactacaaactggtggtaatgttgagggaattttaatgtcattacctccaattgcaaaatggaaatga

SEQ ID NO: 218381 - DNA, 667 bp, Unknown
  Bacterial polypeptide expressing nucleotide sequence isolated from the Sargasso Sea
tatgtcgaaaataaaagggccagttattgaaaaaggtggtgtcaatatttcgactgtttatggtgaatttaatagcgaaatgcaaaataaaatacctggagctaaaaaagatcctaaatataaggctacaggaattagtgttgtattacacccagtgtcgccgaaaataccatcaatgcattttaatactcgttttttaatgacttctgaaaaatggtttggtggggggatggacataaccccttgtttaacttttagtaagatagatgattatcataatggtttaaaaaaaatatgtaatgaatatgatccaaataaatattcagaatttaaaaaatggtgtgatgaatatttttatcttcctcatagagatgagccaagaggggtaggaggtattttttttgattatttaaaaaataattgggaaaatgattttgaatttataaaaaatattggaaattactttcgagattttgttgaaacaactctcatagatttaaaaaatgaaaaatggaatcataaagaaaaaaatattcaacttattaaaagaggtcgttatgctgagtttaacttactacatgatagagggacaaaatttggtttagagacaggaggtaatattgatgctattttaatgtcaatgccacctcttgcaaaatgggattaa

SEQ ID NO: 218382 - DNA, 763 bp, Unknown
  Bacterial polypeptide expressing nucleotide sequence isolated from the Sargasso Sea
aatgttaaataagaaaaagataactaaactatggttcaagaaattacagactttaatctgtaaaactgtgatcgaactcgaaaaaggaagcggatcaaaagcaagattcaaatctcataaatggaaaaaaggtgaattcagaataattaagggaaatgtaatcgaaaaaggcggtatagcattttcaaatgtaacgggtacctttccaaaagaatttgcgaaacaaattccaggaactgaaaagaataaaactttttggtcctcaggggtatctgtggtgcttcacccagtaaatccaaaagttcctgcattacattttaatactcggcatataataactgataaaaattggtttggcggaggtatagacgccactccatgttttagagatgctaaattaaagagtcagtttcactctaaattaaaaacaatgtgtgaaaatcataataaatcttattacaaaaaatataaaaaatggtgtgatgaatatttctatttacctcacagaaacgaaatgagaggtattggcggaatattttttgactataaaatggatgattggaaaaaagattttgattttgtaaaggatgttggattaacgtttaatgatattgtaagagatattataagtcaaaaaatgagcgaaaagttcacaaaaaaagataaagaaattcagttattgaaacgtggaagatacgtggaatataatcttttatacgatcgaggaacaaaatttggtttaaacacgggtggtaatatttga

SEQ ID NO: 218383 - DNA, 589 bp, Unknown
  Bacterial polypeptide expressing nucleotide sequence isolated from the Sargasso Sea
tgcggaaaaaactggtcgtttttgggcgtctggtatttctgtggttgctcacatgtgtaatccaaagatccctgccgcacatatgaatactagatttcttgtaactggagaaggttcaaaaatgaaaacttggtttggtgggggatgtgatcttaccccaatgacaaatgataaaaaagcagaaaaattgtttcatagcgatattaaaaaaatgtgtgatagatacaataaaaattattatgaagactacaaattatggtgtgatgaatatttttttttacctcacagaaatgaaccaagaggtataggaggcattttttttgattacttgaattctctggattgggataaagacctagagtttgttaaagatgttggattaacatttagtaaagtatattcaaatataattaaagaaagaatgtttctagattattcaaaaaaagataaattagaacaattagaaaaaagaggcagatatgtagaatttaatctgttatatgatagaggaactgtttttgggttaaaaacagggggtaatcctgaagcaatattgatgagtttaccgcctcaagtttcatggaagtaa

SEQ ID NO: 218384 - DNA, 349 bp, Unknown
  Bacterial polypeptide expressing nucleotide sequence isolated from the Sargasso Sea
atgcaaaatataaaaaatgtgtgtgatgaatatttttatttacctcatcgaaaagaatctagaggaattggtgggattttttttgattataaaaaaaataattttgaaaaagactttaaatttgtaagggatgttggaataacatttcaattaatttttcaaaaaataatcagaaaaaaaataaaaaaaagatggtccgttagtgataaagaaatgcaatatattaaaagaggtagatatactgaattcaatttattatatgatagaggaactaaatttggattacaaacaggtggaaatattgatggtattttaatgtcattacctcctttggctaagtggaaataaa

SEQ ID NO: 218385 - DNA, 753 bp, Unknown
  Bacterial polypeptide expressing nucleotide sequence isolated from the Sargasso Sea
aaaaattagagaaatcatctgtgaagtttgtatatacaaaatggaaaaaaaataaaaaaagaaatgaaggtggtggagagtatagaattctaaaaaatggtaagatctttgaaaaagtaggtgtaaatttttctgaagttaaaggaaaattttccaaagagattgctggtaaaataccaggaacaaaaagagatagaagcttctgggcatcaggaatttcagtagttatgcatatgaaaaatccaaaaataccagctatgcattttaatactagatatatttatacttcctttggatggtttggaggaggaatggatataacaccctgtattaaagactcgaaagaaaaaaattggttccatagagaacttaaaaaaacctgtgatattcatgataaaaaatattacaaaaaatataagaaatggtgcgataaatacttttatctaccccatagaaaagaaagaagaggtataggtggtattttttttgactataaaaaaaatgattgggaaaaagattttgcttttgtacgagacgtaggaataacttttaaaaatatatttaaaacaattatattaaaaaaatataaaaaaaaatggaatataaaacaaaaagaattacaacttcttaaaagaggtaaatatgttgagtttaacttaatatatgatagaggaactaaatttggattacagacaggtggaaatgtagatgcaatattaatgtctttgcctcctatcgtaaaatggaaataat

SEQ ID NO: 218386 - DNA, 754 bp, Unknown
  Bacterial polypeptide expressing nucleotide sequence isolated from the Sargasso Sea
atgaatttagaaattaaaaaagacttagttagcaattggtttcaaaccctccaagatgctttttgtgatgatataatcaaaattgaaagaaataaaactaagtttaaatctactaattggaaaagaaacgaaaaaaaagatgaaggtggtggtcagtatagaatacttcaaaatggaaatgtattcgataaagttggggtaaatttttctaaagtttatggaaaatttccaaaagaatttcaaaaaaatatacccggggcctataaagatccaaaattttgggcaacaggaatttctgttgtcatgcatatgaaaaatccattaatcccagctatgcacttcaacacaagatatatttgtacgacgcatgcttggtttggtggtggaatggatgtaacaccttcgaaggtagatgatgcagaaaaaaaggaattccataagatattaaaaaatatgtgcaatcgacataacaaaaatttttatagaaaatataaaaaatggtgtgatgaatacttttatttacctcatagaaaagaagccagaggtatagggggaattttttttgattataaaaaagataattttgaaaaagattttagatttgtaagagatgttggcatcactttccaattaattttcaacaagataattacaaaaaaaataaaaagaaaatggactgctagagataaagaaatgcagtacgttaaaagaggtagatatgcagagtttaatttattatatgacagaggaacaa

SEQ ID NO: 218387 - DNA, 516 bp, Unknown
  Bacterial polypeptide expressing nucleotide sequence isolated from the Sargasso Sea
taaatcccaaaattccagcgatgcattttaatactagatttatttgtacaaaaaaaaattggtttggaggaggtatggacataactcccagtataaaagataataatgaaaaaaaatattttcataatgaattaaaaaagatgtgcgatacacataataaaaaatattacacaaaatataaaaaatggtgtgatagatatttttatataaagcatagaaatgaaattagaggtataggtggtatattttttgactacaaaatgaatgaatgggaacaagatttttcttttgttaaagatgtgggtaaatttttcgtatatattttaaaaaaaattattagaaaaaaaatgtttaaaaaatggacaaaaatagaaaaagaaattcaattattaaaaagaggaagatatgtggaattcaatttaatgtatgatcgtggtacaaaatttggattaaatagcggaggcaatactgaagcaattttgatgtcgatgccaccaacggcaaaatggaaataat

SEQ ID NO: 218388 - DNA, 298 bp, Unknown
  Bacterial polypeptide expressing nucleotide sequence isolated from the Sargasso Sea
tatggttatgaagaagacgccgtccattggcacgccacggcgaaagccgcttgcgacccctttggtgaggatgtttaccctcgcctaaagaaatggtgtgacgactatttctatctgccccaccgccaggagccgcgcggcgtgggcgggcttttttatgacgacctcaatgagtggggttttgacaagacgttctcgttcatgtgcagcgtgggagacgggtttctcaaggcctatgcgcccatattggagcggagcatggacaggccctggacggagccgcagcgccaatggcagc

SEQ ID NO: 218389 - DNA, 403 bp, Unknown
  Bacterial polypeptide expressing nucleotide sequence isolated from the Sargasso Sea
agaaaactttcataaaatattaaaggtaatgtgcgatagacataataaaaattattataaaaaatataaaaagtggtgtgatgaatatttttatctacctcacagaaaagaagccagaggtataggtggaatattttttgactataaaaatgataattttgaaaatgactttaaatttgtcagagatgctggtgttacatttcaaatgctatttcatgaaataattaaaaaaaaattaaaaagaaaatggactttaaaagataaagagtttcagtatattaaaagaggtcaatacgcagaatttaatttgctatacgatagaggaacaaaatttgggctacaaactggtggtaatgttgaaggaattttgatgtcattacctccggttgcaaaatggaaataa

SEQ ID NO: 218390 - DNA, 599 bp, Unknown
  Bacterial polypeptide expressing nucleotide sequence isolated from the Sargasso Sea
ggaattccggaagaacatacccggcgcggacgaggacccgcggttttgggcatccggcatttccctggtcgcgcacatgcgatcgcccctggtaccggctgcccacatgaacacccggttcatcgtgaccaccaaaccttggttcggcggcggcggcgatctgacaccgatgtatccgaacgatgacgacacggcggccttccacagtgcgttcgaggatgcctgcgaccgccacgatccggcctactatccgaagttcaagaaatggtgcgacgaatacttccatctgccgcatcgggacgagccgcggggtgtaggcggtatcttctatgactatttggatacgtgcgactgggacgccgattttgctttcactcaggatgtgggcgaagcgtttctcgaaatttacccgaagatcgtcgccgcacacatgaacgaaacctggaccaacaaccaacgcgaacaccagctgttccggcggggtcgttacgtggaatacaacctgctgcacgaccggggcacaatcttcggcctcaagaccggcggcaacgtggatgcgatcctgatgtccttgcctcctgaggtgaagtggccgtgat

SEQ ID NO: 218391 - DNA, 784 bp, Unknown
  Bacterial polypeptide expressing nucleotide sequence isolated from the Sargasso Sea
cggtggaggaagaccatcgtaattgcagatgggagtttttttgataattgtgcaattaattactcatcaatttatggtaaaaaattacctaaggcagctcttgcaagctccctaaataaaagtacaaaatatggttaccaggcaatgggcatttcagttatctcccatccaaaaaatccacacatcccaactagccatatgaatataagattttttgggattttagataaaaacaaggatataaaagattggtggattggaggcggttatgacttaactccatttataccttacaaagaagatattttgagctggcatcgttcagcaaaagataatttggatgcttggaacacgaatttttacaaaaatttttcagataattgtaataattactttaacatccctcacagaaatgaaagaagaggtattggcggcattttctttgataatttctcagacttaaatgttgaagatagttttaattttcttaaatcagtcgccctttgctatctagactcatatttaaaaatcattgataaaagaaagatgcttaaatttacaaaagatgaaaaaaattttcaacttattagaagaggaagatatgttgagtttaatttgatctatgatagaggaacagcttttggccttcaatcaaatggaagaatagaatcaattttggcttcactaccatctaacgttaaatggtcttacaaaaaaaataaagaatacaaatctttagaaaagaaattgattaatgtaataaagagagattggaatgtctaag

SEQ ID NO: 218392 - DNA, 676 bp, Unknown
  Bacterial polypeptide expressing nucleotide sequence isolated from the Sargasso Sea
atggctgatagttggttttcatatttacaaattcaaatttgtaaagaattttctcaactcgaaaaaaataaagttaaatttactaaacgagattggaataaaaagagaaaaaaagagggtggtggaacttcatacctattatccgggggaaaaatatttgataaggtcggagtgaataaatctactgtttctggtatttttcctaagcaatttagatcaaagatacttggagcagaaaaaaatggaaagtactgggcatcaggtatttctgtagttgctcatatgaaaaatccaaaaataccagcaatacattttaatactagattcatagttacatcaaaagaatggtttggtggaggtatcgacgtaacaccatgtttcaaagactctaaagaaaaaaaaatattacataatgatttaaaaaaagtatgtgttcaaaataaaaagaattataaaaaatataaaaaattgtgtgataggtatttttatttaccacatagaaaagaagcaagagggataggtggaattttcttcgattatgaaactaatgattggattaaaaattttaaatttgtgagagaacttggcatctcttttattgaaatttcaaaaaaaattattaagagaaaagaaaaattaaaatggtcttcgaaagataaagaaaaacaattttaaa

SEQ ID NO: 218393 - DNA, 464 bp, Unknown
  Bacterial polypeptide expressing nucleotide sequence isolated from the Sargasso Sea
ttatggttggtttggtggtggtatggatattaccccatgtaagaaagatgataatttaaaaaaatggtatcataaagaattaaagtacatgtgtgatcaacataataaaaactattacaaaatatataaaaaatggtgtgatgaatatttttatttacctcacagaaaggaaatgagaggaatcgggggaattttttttgattataaaaaagaaaattgggaaaaagacttttattttgtaagagatgtaggaattacttttaaaaatattttcagacaaataatatttaaaaaaaataaagttaagtggaatagtaaggataaagaaatccaatatcttaaaagaggaagatatgtagaatttaacttattgtatgatagaggaaccaaatttggactacaaacaggtggaaatgttgaaggaatactaatgtctcttccaccattagcaaaatggaaataaa

SEQ ID NO: 218394 - DNA, 676 bp, Unknown
  Bacterial polypeptide expressing nucleotide sequence isolated from the Sargasso Sea
atggacccaataactaaaaaaaaattagcaagaaattggtttaaaactttacaagaagttttgtgtcaagaaatagaagaattagaaggtagttcaaatttatttatatataaagactgggaaagaggaaaaaaatcaagtgaaggtggaggccaattcagaatacatgaaaatggaaaaatatttgaaaaagttggagtcaatttctcagaagtctatggaaaattttctaaacaatttagaaataaaattcctggtacaaacaaaaattctaaattttgggcctcaggaatatctatagttatgcacatgaagaatccacatgttcctgctatgcactttaatactcgatatatatatacctctcatggatggtttgggggaggtatggatattacgccatgcattaaagataaaaaaaccgaaaaatggttccatgctgagctaaaaaaatcctgcaacaaacataataaaaattattacaaaaagtataaaaaatggtgtgaccaatatttctatttacctcatagaaatgagccaagaggtataggtggaattttttttgattacaaaaaagataattgggaaaaagatttttcttttgtaagagaagttgggataagctttaaaaatatatttagagaaataatattgaggaaaaataaaaaaaaatgac

SEQ ID NO: 218395 - DNA, 728 bp, Unknown
  Bacterial polypeptide expressing nucleotide sequence isolated from the Sargasso Sea
ttttaaaaagacaacatggagaaaatcacaaaagcgcgaggaaggaggaggcaaatacgctattatgaaaaatggtttggttttcgatagtgtaggagtaaatttttctgaagtctctggaaagttccataaaaaatttagatctcaaatcttaggagcaaagaaaaatccaaattactgggcttcgggaatttcagtggttgcacatatgaagaatccgaaaattcctgcaatgcattttaatacaagatttattgtaacttcaaaaagttggtttgggggaggtatggatgctaccccatcagttaaagatgattttgaaaaaaaatttttccataaaaaaattaaaagtacttgtgacagatataataaaaagtattacccaaaatataaaaaatggtgtgataattatttttacttacctcatagaaaagaaacacgaggtataggaggaatattttttgattataaaaatgataattgggaaaaggattttagttttgtaatgaatataggattatgtttcctagactgtgcaaagaaaatgataataaaaaaaataaattataattggtcaaagaaagaaaaagatgcacaactttataaaagaggaagatacattgagttcaacttattgtatgatcgaggaacaaaatttggtttaaataccggtggtaatgttgaagctattttgatgtcgctgccgccaatggcaaaatggaaataaa

SEQ ID NO: 218396 - DNA, 313 bp, Unknown
  Bacterial polypeptide expressing nucleotide sequence isolated from the Sargasso Sea
tatttaccccacagaaaagaagctagaggaattggtggaattttttttgattacaaagatgataatttcgaaaaagattttaaatttgtaagagatgttgggattacctttcaaatgatctttaatgaaattattagaaaaaaaattaagaaaaaatggtctttaaaagaaaaagagaagcagtatattaagagaggtcgttacgcagaatttaatttactgtatgacagaggaactaaatttggattacaaactggcggtaatgttgaaggaattttaatgtctttacctcctttagcaaaatggaaataaa

SEQ ID NO: 218397 - DNA, 547 bp, Unknown
  Bacterial polypeptide expressing nucleotide sequence isolated from the Sargasso Sea
ggcagcaggcatatcagtagtaatgcatatgaaaaaccctcatgttcctgctatgcattttaatactagatatatttatacttctcatggatggtttggtggaggaatggatgttactccttgcctgaaagataaaagtttagaaaaatggtttcataatgaattaaagaaatcttgtaataaacataataaaaatttttacaaaaaatataaaaaatggtgtgatgaatatttttacttgccgcataggaaagaacctagaggtatagggggaattttttttgattataaaaaagaaaattgggaaaaagattttagttttgtaagagaagtaggaataagtttcaaaaatatttttagagaaattatattaaaaaaatataagaaaaaatggtcaaataaacaaagagaaattcaattagaaaaaagaggtcgatatgttgaatttaacttactttatgatagaggtacaaaatttggtttacaaacgaacggtaatgttgaggctattttaatgtcactaccacctgtcgctaaatggaaataa

SEQ ID NO: 218398 - DNA, 706 bp, Unknown
  Bacterial polypeptide expressing nucleotide sequence isolated from the Sargasso Sea
atggaaattgatattaaaaaaaaattggcgagaaattggtttaaagttctacaagatatgatttgttttgaaattgaagaaattgagaagaataaaaaaaaatttatttcaaatcattgggaaaaaaataaaaaaaaagatgagggaggtggagaatatagaattttagaaaacggcaaagtatttgaaaaagttggtgtaaatttttcagaagtttatggaaaattttcaaaagaatttagaaaaaaaatacctggagcaaattctgatccaaatttttgggcttcaggaatatcaatcgtaatgcatatgcaaaatccgcatgttcctgctatgcatttcaatactagatatatttatacttcatttggttggtttggtggtggcatggatgtaacgcccagtattgaggataaaaaattaaaaaattggtttcacaaagaacttaaattaacatgtgatagacacaataaaagcttttataaaaaatataaaaaaaattgtgatgaatatttttatcttcctcatcgtaaagaaactagaggaattggagggatattttttgattataaaaaagaaaactgggaaaaagattttagttttgtgcgtgatgttgggcttacattcaaaaaaatatctagagaaattataaataaaaaaaataataaaaaatggaataataaagaaaaagaagttcaatattaaa

SEQ ID NO: 218399 - DNA, 355 bp, Unknown
  Bacterial polypeptide expressing nucleotide sequence isolated from the Sargasso Sea
aattattattcaaaatataaaaaatggtgtgataaatatttttatctaccacacagaaatgaaccaagaggtattggtggaatattttttgattacaaaaaggaaaattgggaaaaagattttgcttttgtgagagaagtaggattatgttttaaaaatatttttagagagataatattaaaaaaagcaaaaaaaaaatggactaataaagaaaaagaaattcaatatttgaagagaggtagatatgttgaattcaatttattatatgatagaggtacaaaatttggactacaaacaggtggcaatgttgaaggtatattaatgtctctaccaccaattgctaaatggaaataaa

SEQ ID NO: 218400 - DNA, 823 bp, Unknown
  Bacterial polypeptide expressing nucleotide sequence isolated from the Sargasso Sea
atgaaaatagaaaaaaaacaaaaactggttaaaagttggtttatggatcttcaagagataatttgtgacaccattgaaaagatagaaaaagattatggttcaaatgtaaaatttaaaaaaaatagatggaagcatggcgaatttagaacaattaaaggtcaagtaattgaaaaaggtggtgttgcttattcaaatgttaaaggaaaactatccaaagaattagctaaaaaagtacccggagcaaaaaataaattgagtttttggtcttccggtgtttctgtagtattacatcctaaaaatcctaaaattcctgctatgcattttaatactagatttatttgtactaaaaaaaattggtttgggggtggcatggatgccactccttgccttaccgataatagagaaaaaaagtatttccataacgaattaagaaaaatgtgtgattctcataacaaaaaatattattcaaattataaaaaatggtgtgatagatatttttatttaccacacagaaaagaaacccgagggataggtggaattttctttgactataaaatggatgattgggaaaaagattttttatttgttaaagatgctggtgtgacctttaactacttagctagaaatattataaggaaaaaaatgtttttaaaatggaaaaaaaaagaaaaagatcttcaattaattaaaagaggtagatatgtagaatttaatttattatacgatagaggtacaaaatttggattaaatagcggaggtaatccaaaagcaatattaatgtctatgcctccaatagcaagtggaaataacttaggaaaaagag

SEQ ID NO: 218401 - DNA, 708 bp, Unknown
  Bacterial polypeptide expressing nucleotide sequence isolated from the Sargasso Sea
aaaagtcttcgaatccaaaagaaggcggaggaatctattacataattaaaaatggagctatttttgatagtgttggtataaatttttcagaggtatctggaaaatttaataaaaaatttagatcgcaaatcttgggtgcaaataaaaatccaaattattgggcatctggaatatctgttgtggctcatatgaaaaatccaaaaatcccagctatgcactttaatactcgatatattgttacatcaaaaaactggtttggaggaggtatggacgcgactccctctatgaaagacgttgaagaaaaaaaattcttccataaaaaaattaaatttacatgtgataagtataataaaaaatattatccgaaatataaaaaatggtgtgataggtatttctatttgccccacagaaaagaaagtcgtggaattgggggtatattttttgattataaaaaagatgattggaaaaaagatttcagttttgtaagaaatataggactatgttttttagactgtgcaaaaagtataatagaaagaaaaatgaatacaagatggtctaaaaaacaaaaaaatgaacaactgtataaaagaggtagatatatagagtttaacttattgtatgataaaggaacgaaatttggattgaacactggtggaaacgtcgaggcaattttaatgtcgcttccaccctcagcaaaatggaaatgat

SEQ ID NO: 218402 - DNA, 682 bp, Unknown
  Bacterial polypeptide expressing nucleotide sequence isolated from the Sargasso Sea
tggaggagaatatagaattcttaaaaacggaaaagtatttgataaagttgggataaatttttctaaagtttatggcaaatttccaaaaaaatttcaaaataatatcccaggagctcaaaaagatcctagattttgggcttctggtatatctgttgtaatgcatatgaaaaatcccttggttcctgcgatgcactttaacactagatttatttgtactactcaaaaatggtttggtggaggtatagacgtaacaccatcaaaaaaagataattatgaaagaaaaaactttcatcaaactttaaaaaacatgtgtaatcgtcataataataattattttaaaaaatataaaaaatggtgtgatgaatatttttatctgcctcatcgaaatgagcctaggggtataggtggaattttttttgattataaaaatgacaattttgaaaatgattttaaatttgttagagatgttggaattacctttcagtatttatttaatgaaataattaaaaaaaaaatgaaaaagaaatggactattgaggataaagaagcacaatatattaaaagaggaagatatgcggaatttaatttgctttatgatagaggaaccaaatttggtttacaaactggtggaaatgttgagggaattttgatgtcacttcctcctatagctaaatggaaataa

SEQ ID NO: 218403 - DNA, 449 bp, Unknown
  Bacterial polypeptide expressing nucleotide sequence isolated from the Sargasso Sea
tggtggtgggatggatgtaactccgagttttgaagacaataaagaaaaaaaattgttacatcacgatttaaaaaaagtttgcatacaaaataaaaaaaactataaaaagtataaaaagtggtgtgatgaatatttttatttaccacacagaggagaattaagaggtataggtggtattttctttgattacgaaactaaagattggacaaaaaactttaaatttgtaagagaacttggtctttctttcattcaaatatcaaaaaaaattattaaaagaaaagaaaaacttaagtggtcaaaaatagataaagaaaaacagttgctcaagcgtggaagatacgtagagtttaatcttttgtatgatagaggtacaaggtttgggcttaactcaggtggtaatattgactcaatattgatgtcactgcctcctgaggcaaggtggaaataat

SEQ ID NO: 218404 - DNA, 564 bp, Unknown
  Bacterial polypeptide expressing nucleotide sequence isolated from the Sargasso Sea
tatggacgaaataataaaaaaaaaattggctagaaattggttcaaaaccctacaggaagttatttgtcaagaaattgaggaattagagggtaagaaaaagatttttaaaattaaaaattgggaaaggggaataaagtctaatgaaggtggaggccaatttagaatactagaaaatggaaaaatttttgaaaaagtaggagtaaatttttctgaagtttacggaaaattttcaaaagaatttagaaaaaaaataccgggaggagaaaaaaaaccaaaattttgggcgtcaggtatatcaatagtaatgcatatgcaaaaccctcacgttccagcaatgcattttaatactagatatatttatacctcacatggatggtttggtggaggtatggatgttacaccttgtcttaaagataacagtttagaaaaatggtttcataaagaactaaaagtttcatgtgataaacataataaaaaatattacaaaaaatataaaaaatggtgcgatgaatatttttacttaccccatagaaaagagccaagaggaattggaggtatcttctt

SEQ ID NO: 218405 - DNA, 799 bp, Unknown
  Bacterial polypeptide expressing nucleotide sequence isolated from the Sargasso Sea
atgactgatagttggttttcttatttacaaatccaaatttgtaaagaatttgaatttcttgaaaaaggaaagacaaaatttataagaagagagtggaataaaaaaaataaaaatgaaggtggaggaacatcttttttactatctaaaggaaatttatttgaaaaagttggagtgaataaatctacagtttcaggaacattcccaaaaaattttagagataaaatattaggtgcagaaaaaaatgggaaatattgggcatcaggcatctcagttgttgctcatatgaaaaatcccaaaatacctgcaatacattttaacacaagatttatagtaacgaataaagagtggttcggtggaggaatggatgtaactccaagtcatcaagatgcaaaagaaaaaaagttagtaaacaatatgttaaaaaaaacatgtcttaaaaataaaaaaaattataaaaagtataaaaaatggtgtgatgaatatttttatttacctcatagaaaagaaattagaggaattggaggaatattttttgattatgaaactggtaattggattaaaaactttaagtttgtaagagaacttgggttgtcttttataaacatatctagaaaaattattgaaagaaaaaaaaattcaaaatggagtcaaaaagataaagaaaaacaactaatgaaaagaggaaggtatgtcgagtttaaccttttatatgatagaggtacaaaatttggattaaattcagggggaaatatagattcaatattaatgtctctgccccctcatgctaaatggaaataaa

SEQ ID NO: 218406 - DNA, 376 bp, Unknown
  Bacterial polypeptide expressing nucleotide sequence isolated from the Sargasso Sea
aatgtgtgatcaacataataaaaattattatataaaatataaaaaatggtgtgatgaatatttttatttaccccacagaaaagaagctagaggaattgggggaattttttttgattacaaagatgataattttgaaaaagattttaaatttgtaagggatgttgggattacttttcaaatgatttttaatgaaattattagaaaaaaaattaagaaaaaatggtctttaaaagaaaaagagatgcagtatattaaaagaggtcattacgcagaattcaatttactatatgacagaggaacaaaatttggattacaaactggtggtaatgttgaaggaattttaatgtcgttgcctcccttagcaaagtggaaataa

SEQ ID NO: 218407 - DNA, 336 bp, Unknown
  Bacterial polypeptide expressing nucleotide sequence isolated from the Sargasso Sea
aaaatggtgtgataactatttttattttgccacacagaaaagaaaccagaggcattggaggaattttttttgattacaaaaaagaagattgggtcaaagatttttcttttgttagagaggtaggaataaattttaaaaatttattcagacatataattatgaaaaaaaataaaaaaaaatggacaaaacatcaaaaaaatattcaaaatgaaaaaagaggaagatatgttgagtttaatctactttatgatagaggaacaaagtttggtttgcaaacaaatggaaatgttgaagcaatattaatgtcattaccaccagtggcaaaatggaaataaa

SEQ ID NO: 218408 - DNA, 360 bp, Unknown
  Bacterial polypeptide expressing nucleotide sequence isolated from the Sargasso Sea
tcggcggcatcttcttcgacgatcagaacgaccgcgaccccgagaagatcttcgccttctcgaaggagtgcctcgactcgctcgtgcccgcgtacctgccgctggtggccaagcacaaggacgactcgtacacgcagaagcagaaggagtggcagcagatgcgccgtgggcgttacgtcgagttcaacctcgtttacgaccgaggcaccgtcttcggcctcaagaccggcggccgcatcgagagcatcctcatgtcgctcccagaaacggcgaggtgggagtacaaccatcaggttgagcctggcacgcccgaggccgacatcttggacgcgttcaagaacccccgtgagtggtgctgag

SEQ ID NO: 218409 - DNA, 745 bp, Unknown
  Bacterial polypeptide expressing nucleotide sequence isolated from the Sargasso Sea
attgaaaaaaactctaagttcttagttaatagatggaataaaaatgaagaaaaagacgagggaggtggagaatacagaattttaaaggatggtaaaatttttgataaaatcggagtaaatttttctgaagtctatggaaaatttagtaataattttagaggcaaaattcctggaaccagcaaaagtgcaaaatattgggcatctggaatatcgattgtaatgcatttaagaaatcctcatgttccagcaatgcactttaatactaggtacatacaaactgaaaaagaatggtttggtggaggaatggatttcactccttgccttaatgatagaatggaaaaaaaatggatacacaatgaactaagaaaaatgtgcaatagtcataacaaaaaatattaccaaaaatataaaacttggtgtgataaatatttttacttaaaccatagaaaagaaactagaggtataggaggaatcttttttgattataaaaaagataattggaacaatgattttaaatttgtaagagatgtaggattaacatttcaacacatatttagaaccgttataagcaaaaaagctaataaaaaatggagtattaaagataaagaaaaacaatttcttaaaagaggaaggtatgtagaatttaatttattatacgatagaggaactagatttggtttggacactggaggaaatactgaagcaattttaatgtctttaccacctttagcaaagtggaaataaa

SEQ ID NO: 218410 - DNA, 718 bp, Unknown
  Bacterial polypeptide expressing nucleotide sequence isolated from the Sargasso Sea
atgagtaaaaataaaaataattataaccaatataaatttatagaaaaaaatttttttaatctcagaaatcagatttgttcagagtttgaatctattgaaaataacctatcaagcaataataaaaataatttaaatcctggaaaatttaaaaaaactacttggcaaagaaaaccagataaaggattctcatcaggcggcggaggcgtcatgtccattatgtatggaagagtttttgaaaaagtaggagtaaatatttcaactgtaatgggttcttttaccaaagagatgagagataaaataccaggtgctaaatctaaccctaatttttatgctactggtatttcactagttgcacatatgcattctcctttaattccagcagcgcatttcaatactagatttatcagaactactaaaaactggtttggaggtggagcagacttaacgcctacttacctaaataaatcaaaaattgtaagcaagttatttcatgctgacttaaaaaatacatgtgataaatacaatacattattttatccaaaatataaaaaatggtgcgatgaatatttctacttaccccatagaaaagaaaaaagagggttgggtggaatattttttgattacttagaagacgattttgaacgtgattataaatttgtaaaagatataggccaaacatttttaaaatcctattctaaaataatctctaagaaaatga

SEQ ID NO: 218411 - DNA, 742 bp, Unknown
  Bacterial polypeptide expressing nucleotide sequence isolated from the Sargasso Sea
atggaaattagtacaaagaaaagtattgttaaaaactggtttttaattttacaagacattattacaaatgatattgaaaaattagagaataaaaaaaatgttttcaaaattaaaaattggtcaagaggcccagatggaggtggtggacaatttcgaatttttgaaaatggtaagctttttgaaaaagttggtgtaaatttttcagaggtttacggtaagtttcctaaaaaatttaagggacaagttcctggaacaaaaaaaaattcaaatttttgggcatcaggtatatcggtagtcatgcatatgaagaatcctcatatacctgctatgcatttcaatacaagatatattgttacctctcatggatggtttgggggaggcatagacgtaacgccatgtttaagagatgaaattttaaaaaaatggcttcataatgaacttaaaaaagcatgtaacaagcataacaaaaattattacaaaaaatataaaaagtggtgtgaaaaatatttttttttacctcacagaaatgaagagagaggaattggtggtattttttttgattacaaaaaaagtaattgggagaaagattttgcatttattagagatgttggattatcatttacaaaaatatttaatgaaataataaaaaaaaaaagaaaaaagaaatggacaacaaaacaaaaagagctacaatacttaaaaagaggtagatacgttgagttcaatcttttatatgatagag

SEQ ID NO: 218412 - DNA, 348 bp, Unknown
  Bacterial polypeptide expressing nucleotide sequence isolated from the Sargasso Sea
caaagttcaagaaagcttgtgatgagtatttttaccttgcgcaccgagaagaaccgcgcggagtcggcggcatcttcttcgattaccatgacacgggtgactggatgtctgatttcgccctcacacgagacatcgggctcgcctttctggaggtctatccccggataattcgtcgcagcatgaacaagagctggaccgacgatgagcgcgaacaccagctcattcgacgaggacgctacgtcgagttcaaccttctttacgaccgtgggacacagttcggcttgaagactggcggcaacgtggaggccatcctgatgtcactcccaccagaagtgagatggccatagg

SEQ ID NO: 218413 - DNA, 406 bp, Unknown
  Bacterial polypeptide expressing nucleotide sequence isolated from the Sargasso Sea
aaaagaagaattctattttcataataagctaaagaaagtttgtaaagaaaaccaaaaaaattattatagatttaaaaactggtgtgataaatattttttcttaaaacatagaaatgaaccacggggaatcggtggtattttttttgattatgaaaataaaaattgggaaaaagattttaaatttgtaagagaagttggtatgagttttctcgaaatatcaaaaaatattattaacaaaaaaaagagtttaaaatataatgataatgataaagagaaacagtttttaaaacgaggtagatacgtagaatttaatttattatatgatagaggtacaaaatttggattaaattctggaggcaacaccgaggcaattttaatgtccttacctcctaaagcaaaatggtaa

SEQ ID NO: 218414 - DNA, 665 bp, Unknown
  Bacterial polypeptide expressing nucleotide sequence isolated from the Sargasso Sea
atcttttaaaaaaattcaatcattaattattaaaaattttaaacttctagagggttcatcttctgcagaaatttcgtctgatgtatggaaaaggcctgaaggtggcggaggaaaaacctttgtaatatctaatggtaatttctttgataattgtgctgtaaatttctcgtcaatatatggtaaaaatatgcctacaagtgcacttggaaaaaaattagcaaaaaaaattgatcatggctatcaagccatgggtgtttctgtgatctctcacccaaaaaatccatatgttccaactagtcatatgaatgttcgtctatttggaatattagacaagaataaaaacataaaagattggtggattggaggtggctatgatttaacgccttatatatctttttcagaagataatattagttggcataactcagcaaaagaaactcttgataaatataacaaaaatttttataagttattttctgagaattgtaataaatatttttatatacctcatagaaaagaaagaaggggtattggaggtatcttttttgataatctatctagcttaagcctcgatgatagtttaaaaatgctaaattctattgcaagcacctatttaaattcatatttagatattgtttctaaaagacagaaaataaagtattcct

SEQ ID NO: 218415 - DNA, 679 bp, Unknown
  Bacterial polypeptide expressing nucleotide sequence isolated from the Sargasso Sea
atgaagataagtcaggaaattgaaaaaaaactaactggtcagtggtttgcgtttttgcaagaaaaaatagtagaagaatttcaaaatctcgagtctgaattttcaataaaaaataggacaaaagtcacgtatttcaaaaaaaagctttggaaaaagaaggatcctaaagatggagggggacaatattatattttaagaaatggccaaattttcgataaggtaggagttaatcactcaactgttgaaggtgtatttcaaaaaaattataaatcaaatatacctggaactaaaaaaaatcaaaattattgggcatcaggggtatcggtagtagcgcatatgagaaatccaaaaatccctgctgttcattttaatacaagatttgttgttacatctaaaaagtggtttggtggtggaatggatgttacaccaagtctagaagattcgaatgaaaaaaaactggttcataaaaacttaaaacttgtgtgtaataataataaaaaaagttacaaaaattataaaaaatggtgcgatgattactttttaataaaacatagagaggaaaccaggggtattggagggattttttttgattatctttataaagattgggaaaaaaattttaaatttgtaagagatgttggtattggttttattgatatcaccaaaaatgttgattgaa

SEQ ID NO: 218416 - DNA, 709 bp, Unknown
  Bacterial polypeptide expressing nucleotide sequence isolated from the Sargasso Sea
ttacaaaatgcaatatgcgacgacattttaaaaattgaaaaaaacaaagtaaattttgaatcaacttcttggaaaagaagtattaaaaaggacgaaggaggtggtgaatatagaattcttaaaaatggaaaaatttttgaaaaagtaggagtaaatttttcaaaagtttatggaaaatttcctaagcaatttcaaaaaaaaataccaggagcaagcaaggatccaaaattttgggcttcaggaatatcaatagttatgcacatgcaaaatcctcatattcctgcaatgcatttcaataccagatttatttgcacaaaaaaaaattggtttggtggtgggatggatgtaaccccagcagtcaaagatgaaacagaaaaaaaaaattttcataaaatattaaaagcaatgtgcgatagacataataagaattattataaaaaatataaaaagtggtgtgatgaatatttttatctacctcacagaaaagaggcaagaggtataggtggaatcttttttgattataaaaataataattttgaaaatgacttcaaatttgtgagagatgttggtgttacatttcaaatgctatttaatgaaataattaaaaaaaaaattaaaaaaaaatggactttaaaagataaagagtttcaatatattaaaagaggtcgatacgcagaatttaatttgctctatgatagaggaacaaagt

SEQ ID NO: 218417 - DNA, 544 bp, Unknown
  Bacterial polypeptide expressing nucleotide sequence isolated from the Sargasso Sea
atctggaatctcagttgtaatgcatatgaaaaatccattaattcctgcaatgcatttaatacgagatatatttgcactacacaatgctggtttggtggtggaatggatgtaacaccttctaaaatagataaaactgaaacaaaagattttcataaaattttaagcaatatgtgcaatcgtcacgataaaaattattataaaaaatataaaaaatggtgtgatgaatatttttatttacctcatagaaaagaatcaagaggtatagggggtattttctttgattataaaaaagataattttaataaggattttaaatttgtaagagatgttggtgtaactttccaaattatatttaataaaattatttctaataaaataaagaaaaaatggaccatcaaagataaagaggatcaatatattaaaaggggtagatatactgaatttaatttattatatgacagaggaacaaaatttggactacaaacaggtggaaacgtagaagggatacttatgtcgttaccacctttggcaaaatggaaataaa

SEQ ID NO: 218418 - DNA, 713 bp, Unknown
  Bacterial polypeptide expressing nucleotide sequence isolated from the Sargasso Sea
tatggaattgaacctagaaacacaaaaaaaaatagctagtgaatggtttaaatttttacagctaaaaatccttgaagaatttcaatatcttgaaaaggaactttctaaaaaaaaaagagttcctccgaaacgttttaaaaaaaatcattggaaaaaagggaaatttggtgaaggtgggggcacatactacattctaaaaaatggtcaactctttgaaaaagttggcatcaatcattcaacagttatgggtatttttccaaaaaaatttagaggaagtattcctggaacaaaaaaaaataattcttattgggcttctggcatatcgatagtagttcatatgaaaaatcccaaaatacctgccatgcatttcaacacaagatttgttgtaacttcaaagagttggtttggaggaggaatggatgttacaccaagttttaaggatttaaatgagaaaaaattatttcatagagaattaaaaatcttatgtaaaaataacaaaaaaaattataataaatataagaattggtgcgataattatttctatcttggacacagaaaagaggccagaggtattggtggaattttttttgattacttatataaagattggaaaaaaaattttaaatttatcagagaggttggaatttgttttctcaatatttctaaagctattatagataaaaaaattttttctgaatggtcaaataagcaaa

SEQ ID NO: 218419 - DNA, 784 bp, Unknown
  Bacterial polypeptide expressing nucleotide sequence isolated from the Sargasso Sea
atgataagaaatttagaaaatatatttaaaaagattcaagaaaatattcttctaaaatttgaggaacttgaggggaattccaccaatgaaaagtcgttagattcttggattagaaaagagggcggaggtggaaagacagcagtcatagctaatggaaatttttttgataattgtgcagtaaattactcatctattgttggcaagaaacttcctgaggctgcacttaaaaataaaaaaaagctatcaaatggtaaattttcagccatgggagtatcagtaatttctcatcctaaaaatcctcatgttcctactagccatatgaatgttcgtcttttttgtttatttgatagcgatgacaatataaaagattggtggattgggggtggatatgatttaacaccctacctaccatacagtgatgatataaaagattggcacaaacaagccaaacatttcttagactcttttgatgaaacctactacaaaaacttttcaaaagaatgtaatgattatttctatattcctcacagaaaagaaagaagaggagttggcggtattttttttgataatgaaaaagacctatcaatagaaaatagtttaagctttttagaaaatgtagctaaacagtatttaaattcttatcttaagatagcaagtaaaagaaaagatacagaatattcacaagcggaaaaggagtttcagttaatacgcagaggtagatatgtggaatttaatcttgtatatgataggggcacagctttcgggcttcaatcagatggaagaa

SEQ ID NO: 218420 - DNA, 478 bp, Unknown
  Bacterial polypeptide expressing nucleotide sequence isolated from the Sargasso Sea
tttatttgcaccaaaaaaaactggtttggaggtggcatagatttaactccgtgtttaaaagacgaaaaagagaaaaattttttccatgaaaaattaaaaaaaatgtgtgatcttcataataaagagtattacactaaatataaaaaatggtgtgatgaatatttttttttaccgcatagaaatgaaccacgtggaatcggtggtatattctttgattataaaatgaacaattgggaaaaagattttttatttgttaaacatgcgggatatgtgtttaatgaaattattcatgaggtaataagtaaaaaaatgttttcaaaatggtcaaaaaaacaaaaaaaaatccaagcttataaaagaggaaggtatgtagagtttaatttactttacgaccgaggtacaaaatttggtttaaatagtggaggaaatccaagtgctatattggtatccttacctccttcgccaaaatggaaataat

SEQ ID NO: 218421 - DNA, 467 bp, Unknown
  Bacterial polypeptide expressing nucleotide sequence isolated from the Sargasso Sea
aaataaattaccagactcatctatcgccaacaaaataaaaactaaatcaaagaagtttcatgctatgggagtttcggtaatcgctcatccaatgaatccattatgcgctactagtcatatgaatgtcaggatatttatggaacttgaaacagataattcaattcaaaattggtgggttggaggcggctttgacttaacaccctttttcccaacttccaaagaatcaagaagctggcattcaagcgcaaagaaatgtttgaataattttaactcaaattattataagaaatttgccaaggattgtgataattacttttatttgccacacagaaatgaaaaaagaggaattggaggaatattttttgatcagcttcaacataaaaatatttcagatagcctgatttttcttgatgaaattgctaattgttatatcgaaacttacgcaaagctagtaagcgccaaataaa

SEQ ID NO: 218422 - DNA, 670 bp, Unknown
  Bacterial polypeptide expressing nucleotide sequence isolated from the Sargasso Sea
agaattttaaaaaatggtaaaatttttgataaggtcggagttaattattcaaaagtgtatggaaaatttcctaaacaatttcaaaaaaatatccccggggcaaaacaaaatcctagattttgggcgtcaggaatatcggttgtaatgcatatgaaaaatcctttaatacctgctatgcattttaacactagatatatatgtactactcatgaatggtttgggggaggaatggatgttacaccatcaaaaatagacgaagatgaaaaaaaacaatttcatagtactcttaaaaagatgtgtgataggcataataaaaagtattatcatagatacaaaaaatggtgtgatgaatatttttatcttcctcacagaaaagaaacgagaggtataggagggatcttctttgattataaaaaaaataattttgaaaaagattttaaatttgtaagagatgttggaataacttttcaagtaatattcgaaaagattattcgaaaaaaaattaaaaaaaaatggagtcttaaagataaagaaaaacaatacctcaaaagaggtagatatacagaatttaatttgttgtatgatagaggaacaaaatttgggttacaaactggtggtaatgttgaaggtatacttatgtctttacctccgctagcaaaatggaaatagc

SEQ ID NO: 218423 - DNA, 541 bp, Unknown
  Bacterial polypeptide expressing nucleotide sequence isolated from the Sargasso Sea
agggatatcaattgtaatgcatatgcaaaatcctcatattccagcaatgcattttaatactaggttcatttgcacaaaaaagaattggtttggaggtggcatggatgttaccccagctattaaagatatgagtgaaaaaaataattttcataaaaaactaaaacttatgtgtgaccaacatgataaaaaatattatgccaaatacaaaaaatggtgcgatgaatatttttatttaccacatagaagtgaggcaagaggaataggtggtattttttttgattataaaaaagataactttgaaaaagattttaaatttgtaagagatgtaggtgtaacatttcaaatgttatttaataatattataagaaaaaaaatttcaaaaaaatggactttaaaagaaaaagagaagcagtatattaaaagaggacgttatgcagaatttaacttattgtatgacagaggaacaaaatttggacttcaaactggtggtaatgtagagggaatactaatgtccttacctccaattgcaaaatggaaataa

SEQ ID NO: 218424 - DNA, 531 bp, Unknown
  Bacterial polypeptide expressing nucleotide sequence isolated from the Sargasso Sea
ttgtcatgcatatgaagaattcacatgttcccgctatgcactttaatactagatatattcatacttctcatgggtggtttggtggaggaatggacataacaccatgtattaaagataaaaaattagaaagatggtttcatgctgaactaaaaaaatcctgtgacaaacataataaagattattacaaaaaatataaaaaatggtgtgatgaatatttctatttgccacatagaaatgagccaagaggtataggtgggattttttttgactataaaaaaaacaattgggaaaaagatttttcttttgtaagagaagttgggataacctttaaaaatatagctagagaaataatattaaaaaaatataaaaaaaagtggacaaaaaaagaaaaagaaattcaatatgagaaaagaggaagatacgtagaatttaatttactatatgacagaggtacaaaatttggcttgcaaactggcggcaatgtagaagctatattaatgtctttgcctcctttagctaagtggaaataaa

SEQ ID NO: 218425 - DNA, 640 bp, Unknown
  Bacterial polypeptide expressing nucleotide sequence isolated from the Sargasso Sea
tatgcctactagtgcacttggaaaaaaattagcaaaaaaaattgatcatggctatcaagccatgggtgtttctgtgatctctcacccaaaaaatccatatgttccaactagtcatatgaatgttcgtctatttggaatattagacaagaaaaaaaacataaaagactggtggattggaggtggctatgacttaactccttatatatctttttcagaagataatattagttggcataactcagcaaaagaaactcttgataaatataacaaaaatttttataggtcattttccgagaattgtaataaatatttttatatacctcatagaaaagaaagaaggggtattggaggtatcttttttgataatctatctagcttaagcctcgacgatagcgtaaaaatgctaaattctattgcaagtacctatttaaattcatatttagatattgtttctaaaagaaagaaaataaagtattcctcagatgagaaagattttcagctaattaggagaggaagatatgctgaatttaatctaatatatgacagaggaacgtcatttgggcttcaatcaaatggaagaattgaatcaatcttagcttcacttccaacagaagttaaatggaagtataaaaaaaaataa

SEQ ID NO: 218426 - DNA, 571 bp, Unknown
  Bacterial polypeptide expressing nucleotide sequence isolated from the Sargasso Sea
atggaaactaacataaaaaaaaaattagcaaaaaattggttcaagacacttcaagatatggtctgttttgaaattgaagaaattgaaaataataaaaaaaaatttatttcaaatcgttggaaaaaaaataaaaaaaaagatgagggaggtggagaatatagaattttaaaaaatggtaaagtatttgaaaaagttggggtcaatttttcagaagtttatggaaaattttcaaaggaatttagtaaaaaaatacctggtacaagtgctgatccaagcttttgggcttctggaatatcaattgtaatgcatatggaaaatccacatgttcctgcaatgcattttaatacaagatatattcatacttcatttggttggtttggaggaggaatggatgtaacgccttgtattgaagataaaaaacttaaaaaatggtttcataaagaaattaaattaacatgcgataaacataataaaaaatattataaaaaatataaaaaaaaatgtgatgaatatttttatcttcctcatcgaaatgaaactagaggtattggaggaatattttttgattata

SEQ ID NO: 218427 - DNA, 667 bp, Unknown
  Bacterial polypeptide expressing nucleotide sequence isolated from the Sargasso Sea
atggaatcgttcatccaacaactgcaggatgagatctgtcaagcactagaaaaaaaagactcccgaaaattccaagaagattgctggaaacgtaaggaaggaggtggaggacgaacccgagtcttggaaaatggtagttttctggaaaaaggaggagtcaatatttcaagtgtacatggttcaatgtctgatgaattagcgaaacaattgggtacgaaagcatctttttttggagcatgtggcatatctctggttttacacccacggtctccaaaaataccaacagtccatatgaatctccgatatttcgaaaccctctcaggggattgctggtatggtggaggtatcgacctgactccctatttcccttatccagaggatttccgtcattttcaccacacccttcagcaagtatgcgaaagatgtattccaaattcatacgatgaatacaagaaaaactgtgatgagtattttagcctccctcaccgtcaggagatgaggggaattggtgggattttttttgatcatctgaaaggttcagaagaaaaatattatggtctggttcatgaagtaggtgaagaatttctgaatgcctatctgccgctggttgatcgaagaatgaatgaagaatggaacgacgaggatgttgaattcatcactacagaag

SEQ ID NO: 218428 - DNA, 580 bp, Unknown
  Bacterial polypeptide expressing nucleotide sequence isolated from the Sargasso Sea
aatggacatttcaattaaaaaagacttagcgagtaactggtttaagctattacaaaatgcaatatgcgacgacattttaaaaattgaaaaaaacaaagtaaattttaaatcaacttcttggaatagaagcaataaaaaagatgagggtggtggtgaatatagaattcttaaaaatggaaaaatttttgaaaaagtaggagtaaatttttcaaaagtttatggaaaatttcccaaacaatttcaaaagaatataccaggcgtaagtaaggatcctagattttgggcatcagggatatcgatagttatgcatatgcaaaatcctcacattcctgcaatgcattttaataccaggtttatttgtacaacaaagaattggtttggtggaggaatggatgtaaccccagcaataaaagatgaaaaagagaggaataaatttcataaaatactaaaagcaatgtgcgatagacataataaaaattattataaaaaatataaaaaatggtgtgatgaatatttttatctacctcatagaaaagaggcaagaggtataggtggaatcttttttgattataaaaatgat

SEQ ID NO: 218429 - DNA, 600 bp, Unknown
  Bacterial polypeptide expressing nucleotide sequence isolated from the Sargasso Sea
caaaagaatttagaaaaaaaatacctggtacaaattccaatccaaatttttgggcttcaggaatatcgatcgtaatgcatatgaaaaatcctcacattcctgcaatgcattttaatactagatatgttcatacttcatttggatggtttgggggaggtatggatgtaacaccgtgtattgaagataaaaaattaaaaaattggttacacaaacaactaaagttaacatgtgataggcataataaaaattattataaaaaatataaaaaaaattgtgatgaatatttttatattcctcatcgtaaagaaatgagaggaataggtggaatattttttgattataaaaaaaaaaattgggaaaaagattttaattttgtacaagatgttggattaacatttaaaaaagtttttaaagaaattataaataaaaaaaaaaataaaaaatggtcaaataaagaaaaggaaattcaatattataaaagaggtagatatgttgaatttaatttaatttacgatagaggaactaggttcggtttacaaaccggaggaaatacaaatgcaattttaatgtcccttccccctattgcaaaatggaaataaa

SEQ ID NO: 218430 - DNA, 766 bp, Unknown
  Bacterial polypeptide expressing nucleotide sequence isolated from the Sargasso Sea
tgaaggtaaaactatggtgatgtctgatggaagcttttttgataattgcgcagtaaattattcatcaatatacggaaaagatcttcctcaagcagctttagctaattctcttaataaagatacaaaatttggttataaagtaatgggagtttcagttatttctcatccaaaaaacccccacgtaccgacaagtcatatgaatgtaagattttttggtattttagacaagaaaggtaagataacagattggtggattggaggaggatatgatttaaccccatttataccatatgaagaagatattttaagttggcatagttctgcaaaagataatttagatccttggagtacttttttttacgagatcttttccgaaggttgtaatagttacttcaatattcctcacaggaatgaaagaaggggtgtgggaggcattttttttgatgatttatctctagggagtattgataaaagtattgattttctcaaatcggtagcccaaacctatttagattcatatttaaaaataatagataaaaggaaaatgctcaaatttacaaaaaatgaaaaagattttcagcttataagaagaggaagatatgttgaatttaatttaatttatgacagaggcacagcatttggccttcagtcaaatggaagaatagaatcaatattagcctctctaccaggtaacgttaagtggtcatataaaaagagtaaagaatataaatctttagaaaaaaaattacttaaagttattaacaga

SEQ ID NO: 218431 - DNA, 376 bp, Unknown
  Bacterial polypeptide expressing nucleotide sequence isolated from the Sargasso Sea
ggaatttttttcgatgattttaatgaacttggattcaatagaagttttgagatggttcaacaagtaggaaactcttttttgccagcttatttaccaattgtccaacggaggaagaacttgcaatgggggcagagagaaaagacgtttcaagagtaccgcagaggccgttacgtagagtttaatttagtttatgatcgaggcactctctttggtctccagtctggtggcagaattgaaagtatcctcatgtctatgcctccagttgcaaattggtcttatgcattcaagcctgaagagggaaccccagaaagtcatctataccggcacctcaaacctttcgattggataaattttgaaaaagactcttcatcctaag

SEQ ID NO: 218432 - DNA, 602 bp, Unknown
  Bacterial polypeptide expressing nucleotide sequence isolated from the Sargasso Sea
attttcaaatgaatttaaaaataaagttccaggcactaaaaagagttctaaattttgggcatctggaatatcagttgttatgcatatgaaaaatcctcatgtgcctgcgatgcattttaacacaaggtatatagtaacttcatttggttggtttggaggtggaatggatgttacaccttgtgtgaaagataagaaattagaaaattggtttcattcagaactaaaaaaatcatgtgacaagcacaacaaaaattattacaaaaaatataaaaagtggtgtgatgaatatttttatttaccgcataggaaagagccaagaggtattggcggaattttttttgattataaaaaaaataattgggaagaagatttttcttttgttagagaagtaggcataagttttaaaaacatttctaatgaaataattgagaaaaaaaataaattaaaatggacaattaaagataaagaaatccaatacaaaaaaagaggtagatatgttgaatttaatttattacatgatagggggacaaaatttggtttacaaactggtggaaatgttgaagctatactcatgtcattaccaccaacagctaaatggtaaa

SEQ ID NO: 218433 - DNA, 556 bp, Unknown
  Bacterial polypeptide expressing nucleotide sequence isolated from the Sargasso Sea
tagattttgggcatcaggaatatcaatagttatgcacatgcaaaatccccatattcctgcaatgcattttaataccagatttatttgcacaacaaagaattggtttggtggaggtatggatgtaaccccagcaataaaagatgaaaaagagaaaaaaaactttcataaaatattaaaggcaatgtgcgatagacataataaaaattattataaaaaatataaaaagtggtgtgatgaatatttctatctacctcacagaaaagaagccagaggtataggcggaatattttttgactataaaaatgataattttgaaaatgactttaaatttgttagagatgttggtgttacatttcaaatgctatttaatgaaataattaaaaaaaaattaaaaagaaaatggactttaaaagataaagagtttcagtatattaaaagaggtcgatacgcagaatttaatttgctctacgatagaggaacaaaatttgggctacaaactggtggtaatgttgaaggaattttgatgtcattacctccggttgcaaaatggaaataa

SEQ ID NO: 218434 - DNA, 592 bp, Unknown
  Bacterial polypeptide expressing nucleotide sequence isolated from the Sargasso Sea
atggatcaaataataaaaaaaaaattaacaaaaaattggttcaaaactttacaagaagttttttgtaaagaaattgaagaattagaaggaaagtctaacttgtttaaaataactaattgggaaagaggaaataaatcaaaagaaggaggtggacagttccgaattttagagaatggtaaaatattcgacaaagttggtgtgaatttttcagaagtatatggaaagtttaataaaaaatttaaaaataaaattcctggtggaaacaaaagtacgaagttttgggcctcgggaatatctgtagttatgcatatgaaaaatccacatgttcctgcaatgcattttaatacgagatatatttatacatcacacggctggtttggaggtggaatggatgtaactccatgtattaaagataaaaaattagagagatggtttcatgctgaattaaaaaagtcatgtgacaaacataacagaagttattacaaaaaatataaaaaatggtgtgataattatttttatttacctcacagaaatgagccaagaggcattggtggaattttttttgattataaaaaagatgactgggaaaaag

SEQ ID NO: 218435 - DNA, 589 bp, Unknown
  Bacterial polypeptide expressing nucleotide sequence isolated from the Sargasso Sea
caaaaaaatattctaggtgcagaaaaagatccaagtttttgggcatcaggcatatcaattgtaatgcatatgaaaaatcctcatatacctgcaatgcattttaatacgaggttcatttgtacaaaaaagaattggtttggaggtggtatggatgtaactccagctatcaaagatgtgaatgaaaaaaaaaattttcataaaaaactaaaacttatgtgtgaccaacatgataagaaatattatgccaaatacaaaaaatggtgtgacgaatatttttatttaccacatagaggtgaagcaagaggaataggtggcatattttttgattataaaaaagataactttgaaaaagattttaaatttgtaagagatgtgggtgtaacatttcaaatgttatttaataatattataagaaaaaaaatttcgaaaaaatggactttaaaagaaaaggagaaacagtatattaaaagaggccgttatgcagaatttaacttactttatgataggggaacaaaatttggacttcaaacaggtggtaatgtagaggggatattgatgtcattacctccaattgcaaaatggaaataag

SEQ ID NO: 218436 - DNA, 301 bp, Unknown
  Bacterial polypeptide expressing nucleotide sequence isolated from the Sargasso Sea
tagacaagaagctagaggaatcggaggtattttttttgactatgaaactgaaaactgggtaaaaaactttaaattcataagagatcttggcttgacatttatagaagtttcaaaaaaaattattgaaagaaaaaaaaaattaagatggacaaaaaaagataaagagaaacaattgttaaaacgtggaagatatgttgagtttaatcttttatatgacagaggtaccaaatttgggttgtattctggaggaaatattgattcaatattaatgtctcttcctccaaaagctaaatggaaataa

SEQ ID NO: 218437 - DNA, 546 bp, Unknown
  Bacterial polypeptide expressing nucleotide sequence isolated from the Sargasso Sea
catcaggtgtttcagttgtgctccatccagtaaatccaaaagttccggcattgcactttaatacgcgacatattattaccagcaaaagttggtttgggggaggaattgacgctactccatgcttagaagataaaatattaaaaaagaactttcactctaaacttaaaaatacatgtgatatgcacagcaagagttattatcctaaatataaaaaatggtgcgatgagtacttttatttgccgcacagaaaagaaataagaggcatcggcggtattttcttcgattacaaaatggataattgggataatgattttgaatttgtaaaagacgtaggattaacctttgtagaaattattaaagatgttgttcgcagaaaaatgtttgaaaaattcacaaaaaaacagaaagaaattcagttgttgaaacgaggccgttacgtagaatataatcttttgtacgaccgaggaaccaaatttggactaaatagtggtggtaatatagatgcgattttaatgtcaatgccgcctaatgcaaaatggaagtaaa

SEQ ID NO: 218438 - DNA, 552 bp, Unknown
  Bacterial polypeptide expressing nucleotide sequence isolated from the Sargasso Sea
gttgatagaaaatgtatttaaaaaacttcagaataatatattagatagttttttaagtatagataatcaggctaaatctgataatacaagatggcgctataagcatggaggcggagggctaagctgtgaaatatttaatggtaaggtaatagaaaaaggaatggtcaacttttcctcaattagaggcgatgtcttaccaaatagtgccctgtctaaaaaatcgagtggttctatcaaaaaatttttggccactggtatatctgtggttattcatcctctaaatccatttgttccatgctcacatcttaatgttagatattttgaaacagatagaaaagatcgatggtggtttggcggcgggtatgatcttaccccttactttgtttataaggatgacgtaaaactttggcatgcgaacactgaaaaaatgtgtgataagtatgatacaaactactacactaagtttagtaaacaatgtgatgactatttttatttaacacatagaaaagagaatagaggagtcggtggtattttttatgacaatctacacaa

SEQ ID NO: 218439 - DNA, 724 bp, Unknown
  Bacterial polypeptide expressing nucleotide sequence isolated from the Sargasso Sea
atggacaaagatataaaaaagaaattaactaggaattggtttataaacctgcaggagatgatctgtaatacgatacagcaagttgaaggtggaaaaataaaatttttaaagaagagctggagaagaagtataaaaaaggatgaaggaggtggctgctattatattctggaaaatgggaaagtatttgacaaagttggtgtcaatttttcagaagtttatggaaaactgactgaagaattcaaaaagaaaattcctggtacaaaaaataataaagatttttgggcatctggcgtatccgtggtaatgcacatgaaaaatcctcatgtaccagctatgcattttaataccagatatatttatacaaatcacggctggtttggaggaggaatggatgttactccatgttttaatgatccaactattaaaaaactattatttaaaaaattaaaaaaaatgtgtgatagacataacaaaaaatattttaaaaaatataaaaaatggtgtgatgaatatttttatttatcacaccgaaaagagccaagaggaattggtggaattttttttgattataaaaaaaaaaattgggaaaaagattttggatttgtaagggacctaggaataaattttattcaaatctttaatcaaattattagtcttagaaaaagcaaaaaatggaacttgaaacaaaaaaatattcaatatttaaaaagaggtagatatgtgg

SEQ ID NO: 218440 - DNA, 294 bp, Unknown
  Bacterial polypeptide expressing nucleotide sequence isolated from the Sargasso Sea
agcctagaggaataggtggaatattttttgattacgagcaaaataattggattaaagatttcaaatttgtgagagatgtaggtctgacattcatagatatgtctaataaaattattaacagaaaaattaatattaattggaataaaagagacaaagaaaaacagttaattaaaagaggaaggtatgttgaatttaatcttttatatgacagaggtaccaaatttggtttaaactctggaggaaatatcgagtctatattaatgtctttacctccagaagttaaatggaaataaa

SEQ ID NO: 218441 - DNA, 301 bp, Unknown
  Bacterial polypeptide expressing nucleotide sequence isolated from the Sargasso Sea
aggaaagaagctagaggtattggtggtattttttttgactatgaaactaaagattggataaaaaactttaaatttgtaagagaacttggtctttcttttattgatatttcaaaaaaaattgtaaagaggaaagaaaaatttaaatggacaaaaaaagacaaagaaaaacagttcttcaaacgaggaagatacgtagagtttaatcttttatatgatagaggcacaaggtttggattaaactcgggaggaaatattgactcaatattaatgtcacttcctcctgaagcaaagtggaaataat

SEQ ID NO: 218442 - DNA, 679 bp, Unknown
  Bacterial polypeptide expressing nucleotide sequence isolated from the Sargasso Sea
ggtgaatatagaatattagtaaatgggaaagtatttgataaggttggagttaatttttctgaagtttatggaaaattttctaaggaatttagaaaaaaaatacctggaacaaaatcaaatgcaaatttttgggcttctggaatatcaattgtaatgcacatgaaaaatccacatgtccctgcaattcattttaatacaagatatatttatactacatatggatggtttggaggtgggatggatgttacgccttgcatagaagataaaaatttaaaaaagtggttccataaagaattaaaaatattgtgcaataaacataacaaaaactattataaaaaatataaaaaaaattgtgatgaatatttttatttaccacatcgaaatgaacctagaggaataggaggaatattttttgattataaaaaagataattggcagaaagattttgattttgtaagagatgctggaactacttttaagaaaatatttaaagagattatagataaaaaaaattacaaaaaatggacaaaaaaagaaaaagaaattcagtatttaaaaagaggaaggtatgtagagttcaatttactttatgacagaggaacaagatttggaatacaaacaggaggtaacactaatgcaattttaatgtctcttccacctatagcaaaatggaaataat

SEQ ID NO: 218443 - DNA, 283 bp, Unknown
  Bacterial polypeptide expressing nucleotide sequence isolated from the Sargasso Sea
atgaacgaattcgagcgcgttcgcgcctacctcaccgagctgcaggaccgcatctgtgcggcgatcgaggccgtcgatggccgggcccgcttccaggaagacctgtggcagcgtgccgagggcggtggcgggcgtacccgcgtgctgcgcgacggcgcggtgttcgagcaggccggcatcggcttctccgacgtcgctggcagccgcctgccgccgtcggcctcggccaaccgcccggaactggcgggcgcctcctggcgcgccaccggcgtgtcgctggtgt

SEQ ID NO: 218444 - DNA, 733 bp, Unknown
  Bacterial polypeptide expressing nucleotide sequence isolated from the Sargasso Sea
ggaggttcacaaaagtttttagcaacgaaatggtctaaaagtaaaaaatcagagggtggaggaaactacagaattctaaaagcgggtaaggtatttgacaaagtgggtgttaataagtccacagtctctggcaagttttctaaaaaatttagaacaaatattctaggtgcccaaaaagatggaaactactgggcttcaggaatttccgtagttgcgcatatgaaaaacccaaagatacctgcaatgcatttcaatactagatttatagttactaaaaaaagttggtttggtggagggattgatttaactccaagttttaaagacaaaaaagaagaaatatattttcattctaaacttaaagaactttgcaataataatagaaaaaattataataagtataaaatttggtgtgataaatacttttttttaaaacatagaaatgaaaaaagaggtataggtggtattttttttgactatgagaaaaaaaattgggaaaaagactttcaatttgtgagagagatcggaattggatttatagaattatcatctcacattataaataataaaattaaattaaaatataataaaagagataaagaaagacaatatttgaaaagaggaaggtatattgagtttaatttactttatgacagaggaacaaaatttggattaaattctggcggaaacactgaggctatacttatgtcgttacctccaaaggcaaaatggtaaa

SEQ ID NO: 218445 - DNA, 679 bp, Unknown
  Bacterial polypeptide expressing nucleotide sequence isolated from the Sargasso Sea
ggtgaatatagaattttaaaagatggaaaaatttttgacaaagtgggtgttaatttttcgaaagtttatggaaaatttccaaaaaaatttcaacaaaatataccaggtgctcaaaaagatcctaggttctgggcatctggtatatctgtggtaatgcatatgaaaaaccctttaattcccgcaatgcattttaacactagatatatttgtacgacttttgactggttcggtggaggtattgatgttacgccttcaaaaaaagataaaaaagaaaaagaggtgtttcataaaacacttagagatatgtgtaatcgacatgacaaaaattattataaaaaatataaaaagtggtgtgatgaatatttttatctaccccatagaaaagaacctcgtggaataggtggtattttttttgattataaaaaagataattttgaaaaaaattttaaatttgtcagagatgttggtgttacttttgagtctatttttcaaaaaatcataagtaaaaaaattaaaaaaaaatggacttctaaagataaagaaaatcaatatattaaaagaggaagatatgcagaatttaatttactatatgacagaggtacaaaatttggattacaaacaggtggtaatgtcgaaggaatattgatgtcattacctcctcatgcaaaatggaaataaa

SEQ ID NO: 218446 - DNA, 664 bp, Unknown
  Bacterial polypeptide expressing nucleotide sequence isolated from the Sargasso Sea
aatggatatttcaatcaaaaaagacttagcgagtaattggtttaagctattacaaaatgcaatatgtgacgacattttaaaaattgaaaaaaacaaagtaaattttcaatcaaattcttggaaaagaagcaataaaaaagatgagggtggtggtgaatatagaattcttaaaaatggaaaaatttttgaaaaagtaggagtaaattattcaaaggtttatggaaaatttcctaagcaatttcaaaagaatatacccggcgcaaataaagatcctagattttgggcatcaggaatatcaatagttatgcacatgcaaaatccccatattcctgcaatgcattttaataccagatttatttgtacaacaaagaattggtttggtggaggtatggatataaccccaacaataaaagatgaaaaagaaaagaaaaactttcataaaatattaaaagcaatgtgcgatagacataataagaattattataaaaaatataaaaagtggtgtgatgaatatttttatctacctcacagaaaagaggcaagaggtataggtggaatcttttttgattataaaaataataattttgaaaatgactttaaatttgtcagagatgttggtgttacatttcaaatgctatttaatgaaataataaaaaaaaaataa

SEQ ID NO: 218447 - DNA, 580 bp, Unknown
  Bacterial polypeptide expressing nucleotide sequence isolated from the Sargasso Sea
aattttaggtgctaaaagaaatccaaattattgggcatctggaatttctgtagttgctcacatgaaaaaccctaagattccagctatgcactttaataccaggtttatcgtaacatcaaaaaattggtttggagggggaatggacgctaccccatctattaaagacgacaaagaaaaaaaattttttcacaaaaaaataaaaaaaacatgtgatcaatataataaaaaatattatcctaagtataaaaaatggtgcgataaatatttttatttaccacatagaaaagaaactcgtggtatcggtgggatctttttcgattacaaaaaaggtgattgggaaaaagattttagctttgtaagaaatttaggtttgtgttttttagattgtgcaaaaaatataattgaaaaaaaaatgtatgctaaatggtcaaaaaaacaaaaaaatgaacaactttataaaagaggtaggtatgttgagtttaacttgttgtacgatagaggtacaaaatttggtttgaatacaggtggtaatgttcaagcaattttgatgtctctgccccctatggcaaaatggaaataa

SEQ ID NO: 218448 - DNA, 459 bp, Unknown
  Bacterial polypeptide expressing nucleotide sequence isolated from the Sargasso Sea
aaaactggtttggtggaggaatggacgctacaccatctttaattgataaaaaagagaaaaattactttcataataaaattaaaaggatatgtaatcaaaatcaaaagaactacaaaagatatatgaagtggtgtgataattacttctttttacctcataggaatgaagcgaggggaattggtggagttttttttgattatgaaacaaaagattggaaaagaaattttaaatttgtaagagaactaggtatatgttttattaatatctcatctgatataattagtaaaaaaattaatactaagtggagtttaaaagataaagaaaagcaatatatcaaaagaggtagatacgttgaatttaaccttttgtatgatagaggaacgaagttcggtttaaattcaggaggaaatattgaatcaattttaatgtctctacctccaaaagcgaaatggaattaaa

SEQ ID NO: 218449 - DNA, 829 bp, Unknown
  Bacterial polypeptide expressing nucleotide sequence isolated from the Sargasso Sea
tatggatataaaagataaaaaaatgttttccgaaaaatggtttgcgtacttacaaactcaaatttgcaaagactttgaggatcttgaaaaaaaggcaaacagtaataaaaaatttatatccacgaattggcaaaagaaaaaagtttctgaggggggtggaacatataagattcttaaagatggaaaaatttttgataaagttggagtgaacaagtcaactgtttcaggagtattttcaaaagaatttcgaaaaaaaattcctggtgcaaaaaaaaacggaaaatactgggcatcgggaatttctgtagtagcgcatatgaaaaacccaaaggttccagctattcattttaatacaaggtttatcgttactacagaccagtggtttggaggcggtatagatttaactccatgtataaaagatagaaaagaagaagtttattttcattctcaattaaaaaaagtttgtaaccaaaataataaaaattatactaaatttaaaaaatggtgcgataaatacttttttttaacacatagaaatgaaccaaggggaataggtggaattttttttgattatcaaaataaaaattgggaaaaagactttaaatttgtaagagaaacaggattaacatttctaaaaatatctagatcggttataaaaaataaatttaaaaaaaaatatagtataaaagataaagagaaacagttttttaaaagaggaagatacgttgagtttaacttattatatgatagaggaactaaatttggattaaattcgggaggtaacccaaaagcaattttaatgtcattgcctcctaaagcgaaatggtag

SEQ ID NO: 218450 - DNA, 673 bp, Unknown
  Bacterial polypeptide expressing nucleotide sequence isolated from the Sargasso Sea
aatggatctagaaataaaacaaaaattaacaagtaattggtttaaatctttgcaggagatgttttgtaaaactattggtgattttgaaaaaaacaagatcagtttcaagtcgactacatggaaaagaaatttaaagaaagatgaaggtggtggtgaatatagaattttaaaaaatggaaaaatttttgataaagtaggtgttaatttttcgaaagtttacggaaaatttccaaaaaaatttcaacaaaacataccgggtgctcaaaaagatcctaggttctgggcatctggtatatctgtagtaatgcatatgaaaaaccctttaattcccgcgatgcattttaacactagatatatttgtacgacttttgattggttcggtggaggtatagacgttacgccttcaaaaaaagataacaaagaaaaagaggtatttcataaaacacttagagatatgtgcaatcgacatgacaaaaattattataaaaaatataaaaagtggtgtgatgaatatttttatctacctcatagaaaagaacctcgtggaataggtggtattttttttgattataaaaaagataattttgaaaaaaattttaaatttgtcagagatgttggtgttacttttgaaactatttttcaaaaaattataagtaaaaaaattaaaaaaaaa

SEQ ID NO: 218451 - DNA, 328 bp, Unknown
  Bacterial polypeptide expressing nucleotide sequence isolated from the Sargasso Sea
tgtgataattatttttatcttcctcatagaaaagaaaatagaggaattggaggaatattttttgattataaaaaagaaaattggcagaaagattttgattttgttagagatgtaggcattacattcaaaaaaatttttagagaaataattaaaaaaaaaaataaaaaaaaatggacaaagaaagataaagaaattcaatattttaaaagaggaagatatgttgaatttaatttattgtatgataggggaacaaagtttggtttgcaaactggaggaaatactgaagcaatattaatgtcattaccacctttggctaaatggaaataat

SEQ ID NO: 218452 - DNA, 576 bp, Unknown
  Bacterial polypeptide expressing nucleotide sequence isolated from the Sargasso Sea
aatgataaatttagaatttagaaaaaaaataacagatagttggttctcttacttacaaatgcagatatgcaaagaatttgaaaatttggaaaaaggaaaaattaaatttaaaaaaagaaattggaaaaaacaaaatcataaagaaggaggcgggacttcttttttattgacaaatggaaatatatttgaaaaagttggtgttaataagtccacagtatctggaaaatttaaaaaaaattttagatcaaaaatacttggtgctaaaaaagatggtaaatattgggcctctggagtatcagttgttgcgcacatgaaaaatccaaaaattcccgcgttgcattttaacacaagatttattgttaccacaaaggagtggtttggtggtgggatggatgtaacaccaagtcataaagacaaacgagaaaaattatttgttcattcaatgttaaaaaaaatttgtaaacaaaatggtaaaaattatagtaagtacaaaaaatggtgcgatgaatatttctttttaccacacagaaatgagtcaagaggtataggtggtattttttttgattatgaaaaaaa

SEQ ID NO: 218453 - DNA, 935 bp, Unknown
  Bacterial polypeptide expressing nucleotide sequence isolated from the Sargasso Sea
gaatctagagcaattattagagaataatatgttaataaatttagaaaaatcttttaaaaaaattcaatcattaatcattaaaaattttaaacttctagagggttcatcttctgcagaaatttcatctgatgtatggaaaaggcctgaaggtggcggaggaaaaacctttgtaatatctaacggtaatttctttgataattgtgctgtaaatttctcgtcaatatatggtaaaagtatgcctacaagtgcacttggaaaaaaattagcaaaaaaaattgatcatggctatcaagccatgggtgtttctgtgatctctcacccaaaaaatccatatgttccaactagtcatatgaatgttcgtctatttggaatattagacaagaataaaaacataaaagattcgtggattggaggtggctatgatttaacaccttatatatctttttcagaagataatattcgttggcataactcagcaaaagaaactcttgataaatataacaaaaatttttataagtcattttctgagaattgtaataaatatttttatatacctcatagaaaagaaagaaggggtattggaggtatcttttttgataatctatctagctttagccttgacgatagcttaaaaatgctaaattctattgcaagcacctatttaaattcatatttagatattgtttctaaaagaaagaaaataaagtattcctcagatgagaaagattttcagctaattaggagaggaagatatgctgaatttaatctaatatatgacagaggaacgtcatttgggcttcaatcaaacggaagaattgaatcaatcttagcttcacttccaacagaagttaaatggaagtataaaaaaaataaaaaatacaaaataatggaaagagccctacttaaaaatcttaatagagattggaatgaataaa

SEQ ID NO: 218454 - DNA, 709 bp, Unknown
  Bacterial polypeptide expressing nucleotide sequence isolated from the Sargasso Sea
gatggttactgaaaaccagacgaaaactgagatccaaaaaaagcgtgcaaccgattggtttgcgcggctgcgcgatgacatctgcagtgcctttgaagtgattgaagatgatcataaaggggccttggccaatcagtcagctggccgttttgaacggacgccatggacgcgggaaactgacgatgaggcaggtgaggaaacaggcgtgatgcaaggcggcggtgaaatgtccgtaatgcgaggtcgtgtgttcgaaaaggtcggtgtaaatatttctaccgtgcaaggcacattctcggaaaaatttgcaaaagaaattccaggggccgcggaagatggacgtttttgggcagcagggatttcattggtcgcgcacatgcaatctccattggtacctgctgttcatatgaatacccgctatatcgtaacgacgaagagctggtttggcggcggcacggatcttacgccaatgatacccgacgaaaccgatacgcgggattttcacgcagcattaaaaaaagtttgtgatgctcactcggtagcggaccacaaacgttataaagaatggtgcgaccagtatttcttcctaaaacatcgaggagaggcgcgcggtgttggggggattttctacgattatctggaaagtggcgattgggacgcagattttgcattcactcaagatgtaggcaggacctttttggaaatctac

SEQ ID NO: 218455 - DNA, 592 bp, Unknown
  Bacterial polypeptide expressing nucleotide sequence isolated from the Sargasso Sea
atggatactataataaaaaaaaagctcgttaaaaattggtttaaagtattacaagatataatttgtaaagatattgaagaacttgaaggtaaaaaagatatatttagatcaaaaacatggttcagaaacaaaaataaaaatgaaggtggtggagaatttagaattcttgaaaatggaaaaatatttgaaaaagttggagtaaacttttcagaagtttatggaaaattatcaaagaaatttaaaaaaaaaattcctggaacaaataaaaattctaatttttgggcttctggtatttctgtagtaatgcatatgaaaaatccacatataccggcaatgcattttaatactagatatatttacacctcacatggatggtttggaggtggtatggatataacgccctgtataaatgataatattttaaaaaaatggtttcataatgaattaaaaaaaatctgcaataaacataataagaattattacaaaaaatataaaaaatggtgtgataattatttttacctacctcatagaaacgaaccaagaggcatagggggtatattttttgactataaaaaaaataatgggaaaaaga

SEQ ID NO: 218456 - DNA, 772 bp, Unknown
  Bacterial polypeptide expressing nucleotide sequence isolated from the Sargasso Sea
atgagtttagaaattaaaaaagatttagctagtaattggtttaaaactttacaggatgcattctgtgatgacatccgtaaaatagaaaaaaataagattcagtttaaatcaaagacatggaaaagaaatactaaaaaagatgaaggtggtggagaatataggatattaaaaaatggtaaaatatttgaaaaagttggggtaaacttttcaaaagtttatggaaaatttccaaaacaatttcaaaaaagtatacctggagctagaaaagatcctagattttgggcatcaggaatttctgttgttatgcatatgaaaaatcctttaatcccggcaatgcattttaatacaaggtatattgtaactactcagagttggtttggtggtggaatggatgtaacaccatcaaaaattgataaaaccgaaaaaaaagaattccataatattttaagaaatatgtgtaatcgccataataaaaattattataaaaaatacaaaaaatggtgtgatgaatatttttacttaccccatagaaaagagccaagaggtattggtggtattttttttgattacaaaaaaggtaattttgaaaaagattttaaatttgtaagagatgtaggtgttactttccaattaatttttaataaaataatttcaaaaaaaattaaaaagaaatggaattctaaagataaagaaaaacaatatattaaacgtggtagatatactgaatttaacttattatatgatagaggaacaaaatttggattacaaacca

SEQ ID NO: 218457 - DNA, 691 bp, Unknown
  Bacterial polypeptide expressing nucleotide sequence isolated from the Sargasso Sea
tatggaagaaaatattaaaaaaaagttagcacgaaattggtttttaacaattcaagaattaatttgtcacgaaattgaaaatattgaaaatggatcctcttattttaaaacgaaggtgtggtctagaagcgaaacaaaagatgagggaggtggaaaatcaaagcttcttaaaaacggaaatatttttgagaaagtaggtgtaaatttttctgaagtacatggcaatttttcaaatgaatttaaaaaaaaaatacctagatttaacaacagtaaaaatttttgggcatcaggaatatcaattgttatgcatatgaaaaatccttatatcccggcaatgcattttaatacgagatacataattacagatcatggatggtttggtggaggtatggattttactccttgctttaaagactcagcgctaaaaaaaattgttgagaaaaaattaaaaatgatgtgcaataaacatggcaaaaactattacaaaaaatataaaaaatggtgtgatgattacttttatttgcatcataggaatgaaccgagaggaattggaggaatattttttgattacaagaaggaaaattgggaaagagattttgcttttgtaagagacgtaggtataactttttcatatttatttaaagaaataattgcaaagaaatttaaaaaaagatggaaaaaaaaggacaaa

SEQ ID NO: 218458 - DNA, 898 bp, Unknown
  Bacterial polypeptide expressing nucleotide sequence isolated from the Sargasso Sea
aaatcttgatctagtcggcgataaggaaaaagaacttgcttctgaatggtttcaatctctaagaaatcagatttgcaatgcatttgaaaaattagaaattgagcagtctacaggaccttattctgacttaaaccctggacaatttgaaagaaaagaaacacataggagcagtgaaacgggggacgatggcggtggcggggtcatgtctgtaatgcgatcaggtcgtctttttgaaaaagttggtgtaaatatttcaactgtttatggaacacttggtgaagctgctcaaaaatctatttctgcaagaaataatattcctgacctagataaagatccaagattttgggcctccggaatttctttagtagcccatatgagatcgcccaaatgcccggccgtacatatgaacacaagaatgttctggacttcaaaaggatggtggtttggaggtggtaccgatttaaacccaatggttgaagaaattgaagataccagattctttcataaaactttagaaaaagcttgtgatggacacgacaaatcgtactacccacgatttaaaaaatgggcagatgaatattttatgattaaacattggaaagaacctaggggtgtggggggaatatttttcgatgatcactgtaccggaaactggcatgctgactttaattttaccaaagaagtggggaaggcttttctcgatgcatacctaccattgacaaaaaaacatagagatgagggatggactgaagaagaaagagaatggcaactcataaaaagaggtaggtacgctgaatttaatcttgtatatgaccgaggcactcagtttggccttcaaacgggacataatccggaagcagtactaatgagcttaccgcccgaagcaaaatggccttaa

SEQ ID NO: 218459 - DNA, 361 bp, Unknown
  Bacterial polypeptide expressing nucleotide sequence isolated from the Sargasso Sea
taataaaaattattatccaaagtacaaaaaatggtgcgatgaatatttttttcttcctcatagaaacgagcctagaggtattggtggaatattttttgattataaaaaagataattgggaaaaaaattttaattttgttaaggatgtaggtttagaatttattgatatttttaaatcttcaattttaaaaaaaaataagttgaagtggaaaaaaaaacataaagaagctcagtttattaagagaggaaggtatgttgagtttaatttactttacgacagaggtacaaaatttggattacaaaccggagggaatgttgaaggtatttttatgtctcttcctccaacaacaaaatggaaataa

SEQ ID NO: 218460 - DNA, 553 bp, Unknown
  Bacterial polypeptide expressing nucleotide sequence isolated from the Sargasso Sea
ttttgggcttcaggaatttcaattgtaatgcatatgcaaaaccctcacattcctgctatgcattttaatacaagatatatatatacttcgcatggttggtttggtggtggagtcgatattacaccatgttttaaagataaaaaattaaagcaatggtttcataatgaaataaaaaaaagttgtgatagacataataaaaattattacagcaagtataaaaaatggtgtgatgaatatttctatttaccgcataggaaagaagctagaggcattggaggaatattttttgattacaaaaaagacagttggaataaggattttgaattcataagagatattggagtaacatttaaaaatatttttagggaaataataattaaaaaaaaaaaattaaaatggacaaaaaaagacaaagagattcaatataaaaagagaggaagatatattgaatttaatttactttatgacagaggaacaaagtttggtttgcaaactggaggaaatgttgaagcaatattaatgtctttacctccaattgctaaatggaattaac

SEQ ID NO: 218461 - DNA, 397 bp, Unknown
  Bacterial polypeptide expressing nucleotide sequence isolated from the Sargasso Sea
ttttttcttccccatagaaatgaaaacagaggaataggaggcatcttttttgatcaattacagcataaagatatcgataccagcttatatttactagaaaaaacttctgaatcctatattaatgcctatgaaaaaattatcttggatcacagaaacaataaattttctaatgatgaaaaagattttcagctatatcgaagagggcgatacgttgaatttaatcttttgtttgataggggcacaaagtttggaatcgagtctaatggaagggcagaatctatattggcctccttgcccccgttcgtttcatggcttccattaaaatcatcgcgcctaaaaaataaagataaaaacttaataaaatttattaataaaagttggagtgagcgtctctaat

SEQ ID NO: 218462 - DNA, 742 bp, Unknown
  Bacterial polypeptide expressing nucleotide sequence isolated from the Sargasso Sea
aaaaacaaagtaaattttcaatcaacttcttggaatagaagcagtaaaagagatgagggaggtggtgaatatagaattcttaaaaatggaaaaatttttgaaaaagtaggagtaaatttttcaaaagtttatggaaaatttcctaagcaatttcaaaagaatataccaggcgcaagtaaagatcctagattttgggcatcaggaatatcaatagttatgcacatgcaaaatccccatattcctgcaatgcattttaataccagatttatttgcacaacaaagaattggtttggtggaggtatggatgtaaccccggcaataaaagatgaaaaagagaagaaaaactttcataaaatattaaaggcaatgtgcgatagacataataaaaattattataaaaaatataaaaagtggtgtgatgaatatttttatctacctcacagaaaagaagccagaggtataggtggaatattttttgactataaaaatgataattttgaaaatgactttaaatttgtcagagatgttggtgttacatttcaaatgctatttaatgaaataattaaaaaaaaattaaaaagaaaatggactttaaaagataaagagtttcagtatattaaaagaggtcgatacgcagaatttaatttgctctatgatagaggaacaaaatttgggctacaaacaggtggcaatgttgaaggaattttgatgtcattgcctccgattgcaaaatggaaataga

SEQ ID NO: 218463 - DNA, 711 bp, Unknown
  Bacterial polypeptide expressing nucleotide sequence isolated from the Sargasso Sea
gggaaagaaataaaaaaaaagatgaaggtggtggtgagtatagaatactagaaaatggaagagtatttgaaaaagttggagtaaatttttctgaagtttatggaaaattttctaaagctttcagaaataaaataccaggtacaaattataattcaaatttttgggcatctggaatatcgattgtaatgcatatgaaaaatcctcatgttccggcaatgcattttaataccagatatatttatacatcatttggttggtttggtggaggtatggacttaaccccgtgtataaaagatgataattttaaaaaatggttccacaaagagcttaaattatcatgtgataaacataataaaaactattataaaaaatataaaaaaaattgtgatgaatatttctatcttcctcatcgtaaagaaacaagaggaataggaggaatattttttgactataaaaaagaaaattgggaaaaagattttaattttgttagagatgttggcttgacatttaaaaaaatttttagagaaactataaataaaaaaaacaataaaaaatggaataaaaaacaaaaagaaattcaatatttaaaaagaggtagatatgttgaatttaacttactttatgacagaggaacaagatttggtttgcaaacaggtggaaacacaaatgcaattttaatgtcccttccacctactgcgaaatggaaataaa

SEQ ID NO: 218464 - DNA, 795 bp, Unknown
  Bacterial polypeptide expressing nucleotide sequence isolated from the Sargasso Sea
tatgttaataaatttagaaaaatcttttaaaaaaattcaatcattaatcattaaaaattttaaacttctagagggttcatcttctgcagaaatttcatctgatgcatggaaaagacctgagggtggtggagggaaaaccttcgtaatatctaatggtaatttctttgataattgtgctgtaaatttctcgtcaatatatggtaaaaatatgcctacaagcgcacttggaaaaaaattagccaaaaaaattgatcatggctatcaagccatgggtgtttctgtgatctctcacccaaaaaatccatatgttccaactagtcatatgaatgttcgtctattcggaatattagacaaaaataaaaacataaaagattggtggattggaggcgggtatgatttaacgccttatttatctttttcagaagacaatattaattggcataactcagcaaaagaaacccttgataaatataacaaaaatttttataggtcattttctgagaattgtaataaatatttttatatacctcatagaaaagaaagaaggggtgttggaggtatcttttttgataatctatctagcttaagcttagacgatagtttgaaaatgctaaattctattgcaagcacctatttaaattcatatttagatattgttactaaaagaaagaaaataaagtattcctcagatgagaaagattttcagctaattaggagaggaagatatgctgaatttaatctaatatatgacagaggaacgtcatttgggcttcaatcaaacggaagaattgaatc

SEQ ID NO: 218465 - DNA, 696 bp, Unknown
  Bacterial polypeptide expressing nucleotide sequence isolated from the Sargasso Sea
aaaaagatgaaggtggtggtgaatatagaattttagaaaatggcaaagtatttgaaaaagttggagtaaatttttctgaagtttatggaaaattttctagcgagtttagaaaaaaaatacctggtacaaattctgatccaaatttttgggcctcaggaatttcaattgtaatgcacatgaaaaatcctcacattccagcaatgcattttaacacaagatatatccacacttcttttggttggtttggtggaggtatggacgtaacaccttcttttaaagataaaagacttaaaaattggtttcataaagaattaaggctagcatgtaataaacataataaaaactattataaaaaatataaaaagaagtgtgatgagtatttttatcttcctcatcgtaaagaaactagaggaattggaggaatattttttgactacaaaaaaggaaactggaaaaaagattttgattttgtcagagatatggggttaacattcaaaaaaatttttagagaaattataaataaaaaaaagaacaaaagatggaataataaagaaaaagaagttcaatatttaaaaagaggtagatatgttgaatttaatttactttatgataggggaacgagatttggattacaaactggcggaaatacagatgcaatcttaatgtctcttccacccattgcgaaatggaaataaa

SEQ ID NO: 218466 - DNA, 631 bp, Unknown
  Bacterial polypeptide expressing nucleotide sequence isolated from the Sargasso Sea
tatggatcaaacaattaaaaaaaaattagcacgaaattggtttaagactttacaagaagtaatttgtcaagaaatagaagaattagagggaaagaaaaatatcttcaaaattaaaaattgggaaagaggaaaaaactcaaatgaaggtggtggccaatttagaatattagaaaatgggaaaatatttgaaaaagtaggagtaaatttttctgaagtttacggaaaattttcaaaacaatttagaaatagaattcctgggggagataaaaatccaaacttttgggcagcaggcatatcagtagtaatgcatatgaaaaaccctcatgttcctgctatgcattttaacactagatatatttatacttctcatggatggtttggtggagggatggatgttactccttgcctgaaagataaaagtttagaaaaatggtttcataatgaattaaagaaatcttgtaataaacataataaaaatttttacaaaaaatataaaaaatggtgtgatgaatatttttacttgccgcataggacagaaccaagaggtatagggggaattttttttgattataaaaaagaaaattgggaaaaagattttagttttgttagagaagtaggaataagtttttaa

SEQ ID NO: 218467 - DNA, 361 bp, Unknown
  Bacterial polypeptide expressing nucleotide sequence isolated from the Sargasso Sea
aataaaaattattataaaaaatacaaaaaatggtgcgataaatacttttatctatctcacagaaaagagcctaggggtataggtggaattttttttgattataaaaaaaaaaattgggtaaaagatttttcttttataagagatgttggtattacatttaaagaaatattttcatcaattataaaatcaaaatgtaaaaagaaatggacgaaaaaacaaaaagaaattcagtatatcaaaagaggtagatatgttgagtttaacttattgtacgatagaggaactagatttggtttacaaacaaatggaaatgctgaggcaatattaatgtccttgcctccaattgcaaaatggaaataga

SEQ ID NO: 218468 - DNA, 376 bp, Unknown
  Bacterial polypeptide expressing nucleotide sequence isolated from the Sargasso Sea
aatgtgtgatagacacaataaaaaatattataaaatgtatagtaaatggtgtgataaatatttttatttaaaccaccgaaaagaaacaagaggaataggtggtattttttttgattataaaaaagataattgggaaaaggattttcattttattaaggacgtaggattagaatttatgaaagtatttaatgaaattatttctaaaaaaaataaaattagatggtcaaaagctgacaaagaagttcaatattttaaaagaggtagatatgttgaatttaatcttttatatgatagaggaactaaatttggtttgcaaacaggtggtaacatagatgcgattttaatgtctttacctccattagcaaaatggaaataa

SEQ ID NO: 218469 - DNA, 472 bp, Unknown
  Bacterial polypeptide expressing nucleotide sequence isolated from the Sargasso Sea
cattttcaccaaacccttcagcaagtatgcgaaagatgtattccagattcatacgaagaatacaagaaaaactgtgatgagtattttagcctccctcaccgtcaggagatgaggggaattggtgggattttttttgatcatctgaatggttcagaagaaaaatatttcaatctggttcatgaagtgggtgaagaatttctgaatgcctatctgccgctggttgatcgaagaattaatgaagaatggaacgacgaggatgttgaatttcatcattaccgaagaggtagatacgtcgaattcaacctgatctatgacaagggcacactttttggaattaaatctaatggaaggattgaatcaatcttcatgtctttacctccaaaagtcgatttccgttataattgggaaccaagaaaaaatagtccgcaccacgaaatgaatggtttttatcaaccgcaaaattggtgttaaa

SEQ ID NO: 218470 - DNA, 784 bp, Unknown
  Bacterial polypeptide expressing nucleotide sequence isolated from the Sargasso Sea
atgttaataaatttagaaaaatcttttaaaaaaattcaatcattaatcattaaaaattttaaacttctagagggttcatcttctgcagaaatttcatctgatgtatggaaaaggcctgaaggtggcggaggaaaaacctttgtaatatctaatggtaatttctttgataattgtgctgtaaatttctcgtcaatatatggtaaaaatatgcctacaagtgcacttggaaaaaaattagcaaaaaaaattgatcatggctatcaagccatgggtgtttctgtgatctctcacccaaaaaatccatatgttccaactagtcatatgaatgttcgtctatttggaatattagacaagaataaaaacataaaagattggtggattggaggtggctatgatttaacgccttatatatctttttcagaagataatattagttggcataactcagcaaaagaaactcttgataaatataacaaaaatttttataagttattttctgagaattgtaataaatatttttatatacctcatagaaaagaaagaaggggtattggaggtatcttttttgataatctatctagcttaagcctcgatgatagtttaaaaatgctaaattctattgcaagcacctatttaaattcatatttagatattgtttctaaaagacagaaaataaagtattcctcagatgagaaagattttcagctaattaggagaggaagatatgctgaatttaatctaatatatgacagaggaacgtcatttgggcttcaatcaaacggaa

SEQ ID NO: 218471 - DNA, 309 bp, Unknown
  Bacterial polypeptide expressing nucleotide sequence isolated from the Sargasso Sea
tacctcacagaaaagaagccagaggcataggtggaatattttttgactataaaaatgataattttgaaaatgactttaaatttgtcagagatgttggtgttacatttcaaatgctatttaatgaaataattaaaaaaaaattaaaaagaaaatggactttaaaagataaagagtttcagtatattaaaagaggtcgatacgcagagtttaatttgctctacgatagaggaacaaaatttgggctacaaactggtggtaatgttgaaggaattttgatgtcattacctccggttgcaaaatggaaataaa

SEQ ID NO: 218472 - DNA, 662 bp, Unknown
  Bacterial polypeptide expressing nucleotide sequence isolated from the Sargasso Sea
aatggaaactaatataaaaaaaaagttagcaaaaaattggtttaggacacttcaagacatgatttgttttgaaattgaagaaattgaaaataataaaaaaaaatttatttcaaatcattggaaaaaaaataaaaaaaaagatgaaggtggtggagaatatagaattttagaaaacggtaaagtatttgaaaaagttggagtaaatttttccgaggtttatggaaaattttcggaagaatttagaaaaaaaataccaggtacaaattctaatccaaatttttgggcttctggaatatcaattgtaatgcatatgaaaaatccacatgttcctgcaatgcattttaatacaagatatattcatacttcatttggttggtttggtgggggtatggatgtaacgcctagcattgaagataaaaaattaaagaattggtttcacaaagaattgaaattaacatgtaataggcataataaaaattattataaaaaatataaaaaaaattgtgatgattatttttatcttcctcatcgtaaagaaaccagaggaattggaggaatattttttgattataaaaaagaaaactgggaaaaagattttagttttgtaagagatgttgggcttacatttaaaagaatatttaaagaaataataaacaaaaaaa

SEQ ID NO: 218473 - DNA, 307 bp, Unknown
  Bacterial polypeptide expressing nucleotide sequence isolated from the Sargasso Sea
cctcatagaaaagaggcaagaggtataggtggaatattttttgactataaaaatgataattttgaaaatgattttaaatttgttagagatgttggtgttacatttcaaatgctatttaatgaaataattaaaaaaaaaataaaaagaaaatggactttaaaagataaagagtttcagtatattaaaaggggacgatacgcagaatttaatttgctgtatgatagaggaacaaaatttgggctacaaactggtggtaacgttgaaggaattttaatgtcattacctccgattgcaaaatggaaataaa

SEQ ID NO: 218474 - DNA, 336 bp, Unknown
  Bacterial polypeptide expressing nucleotide sequence isolated from the Sargasso Sea
tttggtgtgatgattatttctatttgccacatagaaaagaacctcgtggagtaggtgggatctttcttgattatttatgccatgaagactgggaaaaagatttttctttcataagagatattggttcaatattcttgatctcttatttgaaaattattaaaagtagatcaaataaagaattcagccacaaagacagagactttcagttgatcaaaagaggtaggtatgtagagttcaatttactatatgacagaggcacaatttttggattaaaaactggtggaaatactgaagcagtgttaatgagtttacctccaaaagtaagttgggattaaa

SEQ ID NO: 218475 - DNA, 700 bp, Unknown
  Bacterial polypeptide expressing nucleotide sequence isolated from the Sargasso Sea
aatggatttagatacaaaaaaaaatttggcaagcaactggtttaaaacattacaaaatgcattttgtgaaagtataatcgagttagaaaatagtaagattgaatttaaatcaactacttggaaaaggaataaaaagaaagatgaaggtggaggtgagtatagaatattaaaaaatggaagtgtttttgacaaggtgggagtaaacttctctaaagtatacggaaaattccctaaaagatttcaaaaaaatattctaggagctaaaaaaaatcctaatttttgggcttcaggaatttcagtggttatgcatatgaaaaatcctttaattccagctatgcatttcaatactagatatatttgtactacgcaagattggtttggtggaggaatggatgtaacaccctcaaaaaaagatgagatagaaaaaaaagaattccacaaaatactaagaaatatgtgtaacagacataataaaacttattattcaaaatataaaaaatggtgtgatgaatatttttatttacctcatagaaaagaaccaaggggaataggaggcatcttttttgattacaaaaaagataatttttataaagattttaaatttgttagagatgttggtgttacatttcaatttattttcgaaaaaataataaaaagaaaaatgaaaaaaaaatggactgctaaggacaaagaaatgcag

SEQ ID NO: 218476 - DNA, 811 bp, Unknown
  Bacterial polypeptide expressing nucleotide sequence isolated from the Sargasso Sea
tatgaaattaaaagaaaaacaaaaattagctaaagaatggtttgttaaattacaaaatattatctgtaataatatagaaaaattagaaaaggaatgtggttctaaaacaaagtttaaaaaaaataaatggaaacatggtgaatttagaattataaaaggaaaagtaattgaaaaaggaggtgttgccttttcaaatgttataggaagatttcctaaagaatttgcaaaaaaaatcccgggaacaaaaaataatactaaattttggtcttctggtatttctgtggtacttcatccaaaaaatccaaaaatacccgctatgcattttaacacaagatttatttgcactaaaaagatttggtttgggggtggtatggatgcaacaccttgtcttcctgacaaaaatgagaaaaaatacttccatagaactttaaagcaaatgtgtgatcttcataataaaaaatattatcctgagtataaaaaatggtgtgataattatttcttcttaccacatagaaatgaaccgcgtggtataggtggtattttttttgattacaaaaaaggcaattgggaaaaagattttttatttattaaagatgttgggattactttcgcatacatggttaacaaaattataagaaaaaaaatgtttttgaaatggacaaagagagagaaaaaaattcaacaaataaaaagaggaagatatgttgaatttaacttgttatatgatagaggtacaaaatttggattaaatagtggaggtaatcctaaagcaatattaatgtcgttaccaccatcagctgactggaaataa

SEQ ID NO: 218477 - DNA, 873 bp, Unknown
  Bacterial polypeptide expressing nucleotide sequence isolated from the Sargasso Sea
agatgaatacttagatagagaaaaaatagctgatcatttcaaaagctttcaagcacaaatttacaaacgtattgaaggctttgaggataataagtcacttattaaagacggctgggaaaaacaaaaccttggttcaggtttatcaatagttgtagacgacgggctagtatttaataaggcaggaattaatttttctcaaatttctggagattcattgccagaatcttcgctagggattttaaatgaatcagagaagttaccctattttgcaacaggggtgtcagtagtctttcatccaaataacccaaatattccaactgcacacttgaatgtgcgctatttttgcacaacgaaggatggtgaaattcataatcattggtttggtggagggtttgaccttactccatatatattatttaaagaagattgctatgactggcataaatcagctaaaaatgcgtgcgatcaaacagaccctggtttttacaaaaccttcaaaaaaaattgtgatgaatacttttatattcctcaccgaaacgagcacagaggtgtaggtggcatattctatgaaaaacttgagatcccattggatcaaggtattcaattctcaaaggatgtttgtgcagcatttattgagacatacacaaaaattttagaaaaaagaaaagacctaaacttcactcaaagagatgttgattttcaaaaattcagaagaggaaggtatgtagagttcaacttaatacatgatcgtggtacattgtttggccttcaaacctcaggtaggatcgagtcaatccttatgtctcttccgaaagatgtaagctggcgttataaattcgatgacaacctcgaagagaaagaaaaaaacctgta

SEQ ID NO: 218478 - DNA, 794 bp, Unknown
  Bacterial polypeptide expressing nucleotide sequence isolated from the Sargasso Sea
tatgttaataaatttagaaaaatcttttaaaaaaattcaatcattaatcattaaaaattttaaacttctagagggttcatcttctgcagaaatttcatctgatgtatggaaaaggcctgaaggtggcggaggaaaaacctttgtaatatctaatggtaatttctttgataattgtgctgtaaatttctcgtcaatatatggtaaaaatatgcctacaagtgcacttggaaaaaaattagcaaaaaaaattgatcatggctatcaagccatgggtgtttctgtaatctctcacccaaaaaatccatatgttccaactagtcatatgaatgttcgtctatttggaatattagacaagaataaaaacataaaagattggtggattggaggtggctatgatttaacgccttatatatctttttcagaagataatattagttggcataactcagcaaaagaaactcttaataaatataacaaaaatttttataagttattttctgagaattgtaataaatatttttatatacctcatagaaaagaaagaaggggtattggaggtatcttttttgataatctatcaagcttaagcctcgatgatagtttaaaaatgctaaattctattgtaagcacctatttaaattcatatttagatattgtttctaaaagacagaaaataaagtattcctcagatgagaaagattttcagctaattaggagaggaagatatgctgaatttaatctaatatatgacagaggaacgtcatttgggcttcaatcaaaaggaagaattgaat

SEQ ID NO: 218479 - DNA, 613 bp, Unknown
  Bacterial polypeptide expressing nucleotide sequence isolated from the Sargasso Sea
ttgagagctaagctaatcaaaacaatcgaatcgcatgatgggaatcgatttaaacaaaaatcatggaaacattcaggcgaaggcggcggattgatgagtctgattaaaggtaatattattgaaaaaggtggagtaaacatctccactgtatccggaatattttctactgaaatgcagaaaaagatacccggagctgataaaaacccacaatattgggctactggcataagcgtggtacttcacccaatgaatcccaatataccctcaatacattttaatacacgtttcttgcaaaccgagaagtcttggtttggtggtgggatggatataaccccatgtttagagtttgtggaagaaaaaaatagtttccataatgatctgaaaagtatgtgcgataaacataataaaaactattacccaaagtataaaaaatggtgtgatgaatacttttttataaaacatagaaatgaacctcgtgggataggtggtatattttttgattatttaaaaactgatgatgtggaatcagactttctttttgtgcaagatactggaaaatttttcaaccattacatagatcaaattattgagaaatataaaaataaaaaatgac

SEQ ID NO: 218480 - DNA, 706 bp, Unknown
  Bacterial polypeptide expressing nucleotide sequence isolated from the Sargasso Sea
atggatactataataaaaaaaaagctcgtaaaaaattggtttaaagtattacaagatataatttgtaaagatattgaagaacttgaaggtaaaaaaaatatatttaaatcaaaaatatggttcagaaacaaaaataaaaatgaaggtggtggagaatttagaattcttgaaaatggaaaaatatttgaaaaagttggagtaaacttctcggaagtttatggaaaattatcaaagaaatttaaaaaaaaaattcctgggacaaataaaaatgctaatttttgggcttctggtatttctgtagtaatgcatatgaaaaatccacatataccggcaatgcattttaatactagatatatctacacctcacatggatggtttgggggtggcatggatataacgccctgtataaaagataatattttaaaaaaatggtttcataatgaattaaaaaaaacctgcaataaacacaataagaattattacaaaaaatataaaaaatggtgtgataattatttttacctacctcatagaaacgaaccaagaggtataggtggtatattttttgactataaaaaaaataattgggaaaaagatttttcttttgttagagatattggaattgcttttaaaaatatatccaaaaatattgtacttaaaaagaaaaagaagaaatggacaaaaaaacaaaaaaatttcaatatttaaa

SEQ ID NO: 218481 - DNA, 604 bp, Unknown
  Bacterial polypeptide expressing nucleotide sequence isolated from the Sargasso Sea
attttctaaaaaatttagaaacaaaattccgggtacaaacaaaaattctaatttttgggcttcaggaatttccgtagttatgcatatgaagaatccacatgttccagctatgcactttaacactcgatatatatatacttcttatggatggtttggaggaggtatggatgtaacaccttgtattaaagataaaaaactagaaaaatggtttcattctgaattaaaaaaatcttgcgataaatttaataaaaattattacaaaaaatataaaaaatggtgtgatgaatatttctatttaccacatagaaacgaaccaagggggataggtggaatattttttgattataaaaaagataattgggaaaaagattttgcttttgtgagagaaattggaataaactttacaaatttatttagagaaataatattaaaaaagcataaaaaaaaatggacaaaaaaagaaaaagaaatccagtatgagaagagaggaagatatgttgaatttaatttactctatgacagagggactaaatttggtttacaaactggcggcaatgtagatggtatcttaatgtcacttcctcctttagcaaaatggaaataa

SEQ ID NO: 218482 - DNA, 729 bp, Unknown
  Bacterial polypeptide expressing nucleotide sequence isolated from the Sargasso Sea
aatgaatttagaaattaaaaaagacttaacaagtaattggtttaaaacacttcaagagtctttttgtgatgacatagtcaaatttgaaaagaataaaactaaatttaaatcaacaaattggagaagaaacacaaaagttgatgaaggaggaggagaatatcgaatactgcaaggaggaaaaatttttgaaaaagtaggtgtaaacttttccaaagtttatggtaaatttccgaaacaatttcaaaaaaatatactaggggctaataaagatccaagattttgggcatcagggatttctgtagttatgcatatgaaaaatcctctgatccctgcaatgcattttaatacgagatatatttgcactacccaagagtggtttggtggaggaatggatgtgactccatcaaaaaaagatcttaaagaaaaaagagaatttcataagattttaaagaacatgtgtgatcgtcacaataaaagttattacacaaaatataaaaaatggtgtgatgaatatttttatttacctcatcgaaaagaatctagaggaattggtgggattttttttgattataaaaaagataattttgaaaaagactttaaatttgtaagagatattggaataacattccaattaatttttcaaaaaataatcagaaaaaaaatgaaaaaaaaatggtccattagtgataaagaaatgcaatatattaaaagaggtagatatacagaatt

SEQ ID NO: 218483 - DNA, 490 bp, Unknown
  Bacterial polypeptide expressing nucleotide sequence isolated from the Sargasso Sea
ttttaatacaagatatatcagcactcaaaaaaactggtttggaggaggaatggatgtaaccccagctatcaaagatgataatgaaaaaaataaatttcataaaactttgaagttaatgtgtgatcaacataataaaaattattataaaaaatataaaaaatggtgtgatgaatatttttatttaccccacagaaaagaagctagaggaattggaggaattttttttgattacaaaaattataattttgaaaaagattttaaatttgtaagagatgttgggattacttttcaaatgatctttaatgaaattattaaaaaaaaaattaggaaaaaatggtctttaaaagaaaaagagatacagtatattaaaaggggtcgttacgcagaatttaatttactttacgacagaggaactaaatttggattacaaactggtggtaatgttgaaggaattttaatgtcgttacctcccttagcaaagtggaaataa

SEQ ID NO: 218484 - DNA, 301 bp, Unknown
  Bacterial polypeptide expressing nucleotide sequence isolated from the Sargasso Sea
agaaaagaagccagaggtataggtggaatcttttttgactataaaaatgataattttgaaaatgactttaaatttgtcagagatgttggtgttacatttcaaatgttatttaatgaaataattaaaaaaaaattaaaaagaaaatggactttaaaagataaagagtttcagtatattaaaagaggtcgatacgcagaatttaatttgctctatgatagaggaacaaaatttgggctacaaactggtggtaatgttgaaggaattttgatgtcattacctccgattgcaaaatggaaataaa

SEQ ID NO: 218485 - DNA, 466 bp, Unknown
  Bacterial polypeptide expressing nucleotide sequence isolated from the Sargasso Sea
aatgtattcaaaaccaaacaattccaaagaacttattctagaatttttattaaactttcaaaacgatttaacatctaatttagaaaagcttgatggcaaagctaaatttattgaagataaatggactaaccctgagttgggcggtggtaaaactcgagttctttcaaatggagatttattcgagcaaggtggagtaaatttttcagaaatatcaaaagatcaggtgcctaagtcgttattagggcacaagcctgagcttaaggatcaaaaattttggggcgctggagtttcaatggttttacacccaaaaagcccgttttgcccaactgtacatttgaattatagatattttgaagcaggttctgttttttggtttggcggcggtgctgatttaacgccatattacccgtttgaagaagattgtattttgtggcacaaagcacataaagatgcgatggatagacat

SEQ ID NO: 218486 - DNA, 358 bp, Unknown
  Bacterial polypeptide expressing nucleotide sequence isolated from the Sargasso Sea
aaaaaatattttagaaaatataaaaaatggtgtgatgaatatttttatttatcacaccgaaaagagccaagaggaattggtggaattttttttgattataaaaaaaaaggttgggaaaaagattttagatttgtaagggatctgggtataagttttattcaaatttttagtgaaattattaatcttagaaaaaataaaaaatggaacttgaaacaaaaagatattcaatatttaaaaagaggtagatatgtagaattcaatttattatatgacagaggcacaaaatttggtttacaaactgatggtaatgtagaggctatattgatgtcactacctcctttagcaaaatggaaataaa

SEQ ID NO: 218487 - DNA, 409 bp, Unknown
  Bacterial polypeptide expressing nucleotide sequence isolated from the Sargasso Sea
gcttaaaaaatggtatcataaagaattaaagtatatgtgtgatcaacataataaagattattataaagattataaaaaatggtgtgatgaatatttttatttacctcatagaaaagaaatgagaggaatagggggtatattttttgattataaaaaaaataattgggagaaagattttgcttttgtaagagatgtaggaattacttttaaaaatatttttaaacaaataatattaaaaaaacaaaaaattaaatggaataatagagacaaagaaatgcaataccttaaaagaggaagatatgtagaatttaatttgttatatgacagaggaacgaaatttggacttaaaactggtggaaacgttgaaggaatattaatgtcacttccacccctagcaaaatggaaataa

SEQ ID NO: 218488 - DNA, 649 bp, Unknown
  Bacterial polypeptide expressing nucleotide sequence isolated from the Sargasso Sea
cattgaaaaaggaggtgtgaacatatccacagtttcaggcaagttcagtgataaaatgagacctagaattcctggcactgagaaaagtgctaaatactgggcgactggtataagcgttgtaatacacccattttcccctctcataccatcgatgcattttaattcaagatatcttaaaaccagtaaatcctggtttggcggcggtgttgatataacgcctgctactccctttaaagaagaaacaaagaactttcataataaactaaaatctatttgtgacatgcacgataaatcatattatgaaaaacataaaaagtggtgtgatgattatttctttttaaagcatcgaaatgaagcaagaggcgttggcggagtattctttgattatatagatactggagattatcaaagtgattttgcctatactagttccataggaagcttttttcttgaatacgttaaatatatttttgacaaatactctaagaaaacatggactaataatgataaaagattgcaaatggttaaaagaggtaggtatgttgaatttaatcttctctatgatagaggaactaagtttgggctagagactgggggaaatactgaagccattttaatgtcaatgcctccattagcatcatgggactag

SEQ ID NO: 218489 - DNA, 461 bp, Unknown
  Bacterial polypeptide expressing nucleotide sequence isolated from the Sargasso Sea
acaaaaagaatggtttggtggtgggatggatgtaactccaagtcatgaagataaaaaagaaaaatcatttgttcattcaatgttaaagaaaatttgtaaacaaaatggaaaaaattataataagtataaaaaatggtgcgatgaatatttttttttaccacacagaaatgaaccaagaggaataggtggtatcttttttgattatgaaaaaaaaaattggactaaaaattttaaatttgtaagagagcttggcataggatttatagatatttcaaaatccataattgataagaaaaaaaaattgaaatggacaaaaaaagataaacaaatacaactcataaaaagaggaagatatgttgaatttaatcttttatttgatagaggtacaaagtttgggttaaacagtggtggaaatgttgattctattttaatgtctctcccgcctcaagctaaatggtaaa

SEQ ID NO: 218490 - DNA, 829 bp, Unknown
  Bacterial polypeptide expressing nucleotide sequence isolated from the Sargasso Sea
atggatctagaaataaaacaaaaattgacaagtaattggtttaaatctttgcaggaaatgttctgcaaaactattagtgattttgaaaaaaacaagatcaattttaagtcgactacatggaaaagaaatttaaaaaaagatgaaggtggtggtgaatatagaattttaaaagatggaaaaatttttgataaagtaggtgttaatttctcaaaagtttatggaaaatttccaaaaaaatttcaacaaaatatacctggtgctcaaaaagatcctaggttctgggcatcagggatatctgttgtaatgcatatgaaaaatcctttaattcctgcgatgcattttaacactagatatatttgtacgacttttgattggttcggtggaggtattgatgttactccatcaaaaaaagataataaagaaaaagaacagtttcataaaactcttagagatatgtgtaatcgacatgatagaaactattataaaaaatataaaaagtggtgtgatgaatatttttatctacctcatagaaaagagccccgtgggataggtggtattttttttgattataaaaaaaataattttgaaaaaaattttaaatttgtcagagatgttggcattacctttgagaccatttttcaaaaaattataaataaaaaaattaaaaaaaaatggacttctaaagataaagaaaatcaatatattaaaagaggtagatatgcagaattcaatttactatatgacaggggtacaaaatttggattacaaacaggtggtaatgttgagggaatattaatgtcattacctcctcatgcaaaatggaaataat

SEQ ID NO: 218491 - DNA, 829 bp, Unknown
  Bacterial polypeptide expressing nucleotide sequence isolated from the Sargasso Sea
atgaaaatagatttgaaacaagagctagcaaaacaatggtttaaaaaccttcaagagatagtttgtaaaaatatcgaagagatagaaaataataaagttttatttaaaagtaaaaaatggactaggaataaaaagaaaaatgagggaggtggagagtctaaaatactagaaagtggaaaaatatttgacaaagttggagtaaatttttctgaagtttatggaaaattcccaaataaaatgaaagggaaaattccaggaacaaaaaaaaatacaaagttttgggcaacaggtatatcaattgttatgcacatgaaaaatcctcatgtacctgctatgcattttaatactcgatatataaatacttcacatggatggtttggaggaggtatggatgtaacaccatgttttaaagatgataaattaaaaaaatggttacataaaagtcttcaaactatgtgtaataggcacaataaaaaatattacaaaatttatagtaattggtgtgataaatatttttatctaccacacagaaaagaaacgcgaggcataggcggtattttttttgattacaaaaaaaataattgggaaaaagatttctatttcgtaaaagatgtgggtttagaatttattaaagtatttaatgaaataatttcaaaaaaaaataaaattaaatggtcaaaaaaagataaagaaattcaatatataaaaagaggtagatatatcgaatttaatcttttatatgatagaggaacgaaatttggtttgcaaactggtggcaacattgatgcgatcttaatgtctttaccccctattgcgaagtggaaataaa

SEQ ID NO: 218492 - DNA, 501 bp, Unknown
  Bacterial polypeptide expressing nucleotide sequence isolated from the Sargasso Sea
aggatgcaattcattttcacagaatatgtaaatcggtttgtgaaaaacattcggcttctttttataaaatatttaaagaaaaatgcgatttatatttttggaatcatcatagaaaggaagctagaggaattggaggtttattctttgattaccttagagcaaataacaaatatagtattgaaaaccgattttcatttgttacagatgttggagatagtttcctagatgcatacctgcctataataagaaaaagaaaagactataaatacaatttaagtcaaaaaaaatggcaggaaattagaagaggtcgctatgtagaatttaatttggttcatgataaagggactctgtttggtcttaaaacaaatggaagaattgaaagtattttaatgagtttgcctcctaaagtccaatgggtctatgatcatcttccagaaataggatcagaagaagagaagctaataaaggtattgcaaaatccaaggagctggacaagctaat

SEQ ID NO: 218493 - DNA, 829 bp, Unknown
  Bacterial polypeptide expressing nucleotide sequence isolated from the Sargasso Sea
tatggatttagaaataaaaaaagatttaacaagtaattggtttaaaatgttacaagatagtatttgtcatcaaataacggaattagaaaaaaatagcacaaaatttagattaaaaacttggagaaaaaatcaaaaaaaagatgaaggaggtggtgaatacagaattctaaaagatggtaaaatctttgataaagttggagtaaatttctctaaagtatatggaaaatttcctaaaaaatttgcaaaaaatattcctgggacaaaaaaaaatttgagattttgggcatctggaatttcagtagtaatgcatatgaaaaatcctttaattcctgcaatgcattttaatacaagatatatttgcacgagtcatgagtggtttggagggggcatggacgtaacaccctcaaaaaaagacaataaagaggaaaaagaaattcataaaatattaaaggatatgtgcgatcgacataataaaaattattatccaaaatataaaaaatggtgtgatgaatatttctatattcctcacagaaaagaaagtagaggaattgggggtattttctttgactataaaaaaaataattttgaaaaagattttaaatttgttcgagacttaggaattacttttcagattatttttcaaaaaattataaacaaaaaaattaaaaaaagatggactgtaaaagataaggaaatgcaatatataaaaagaggtcgatataccgaatttaatttattatatgatcgtggaacaaaatttggtttacaaactggtggtaatgtcgaaggtattcttatgtcattacctccgcttgcaaaatggaaatag

SEQ ID NO: 218494 - DNA, 922 bp, Unknown
  Bacterial polypeptide expressing nucleotide sequence isolated from the Sargasso Sea
aatgaatatatcagatagacaaaattatatttccaaaatctttaaagatgttcacaaaaatatttttgatcaaataaagatgtttgaagataaatcaaagatacaggatgatgtttggcataagaaagagcttggaagtggcaattcagtcgtaattgatgatggaaattttttcgataaagctggaatcaatttttcatctatatcaggaaaatcattacccgagtcttcggtgggaaataaaagcaaatcgatgggattgcctttttttgcaactggtgtatcagtagtttttcatccaaaaaacccccatatcccaacggcacatttaaatgtcagatatttttgcacttataaaaaaaatcaggtttctgaagagtggtttggaggagggtttgatcttacaccatatattctagatgaagaggattgtaagcgatggcataagggagcaaaggatgtttgtagtttggttgatgataatttttacaaagtttctaaaaaaaattgtgacgactatttctatataccgcatagaaaagagcatagaggtattggtggaatcttctatgaaaagaaaaaatttaaacaagttgatcagggtttaagtttttcacaaaaggttgctgaaagtttcattgaaaactatgtacagatagtaaataagcaaaaattgaaaaaatataacaaagaagaaaaaaaattccagagatttagaaggggccgatatgtagagtttaatcttacatacgatagaggtactctttttgggcttcaatctggaggtagaatcgagtctattttaatgtctttgcctaatgaggttgagtggcactataaatttgatgaaaaacttacagacgaacaacaaaagctttacgatgttttaaaaaaaccgaaaaattggaccgatgatgtttaa

SEQ ID NO: 218495 - DNA, 853 bp, Unknown
  Bacterial polypeptide expressing nucleotide sequence isolated from the Sargasso Sea
atgaaattaaatttagaaattcaaaagaaaatcgctagcaactggttcaaatttcttcaatctgaaatttataaagaatttgagcttttggagagaaaaaaatcaacaaaattccaaaagaatctatttataaagaggaactggaaaaagtctaaagataataatgatggtggaggaacttacataataatgaaggatggatctgtattcgatagtttaggtattaatttttcgcaagtttcaggaaagttccacaaaaaatttagatctcaaatcttaggtgcaaaaaagaatccaaattattgggcaactggaatatctgttgttgcacatatgaaaaatcctaaaattccagctttacattttaatacaagattcatagtaacctcaaaaagttggtttggtggaggaatggattgcacgccatctataaaagatattaaagaacaaaaattttttcacaaaaaaataaaagatatgtgtgataagcatagtaaaagcttttatccaaaatataaaaaatggtgtgataattatttttatttaccccaccgaaaagaagcgaggggtataggcgggatcttttttgattacaaaaaagaaaattgggaaaaagattttagctttgtaagagatgccggcatatgctttcttggtttggctaaagctattattgaaaaaaaaattaataagggatggtcaaaatggcaaaagaaccaacagctttataagagaggaagatatattgagtttaatttattatatgatagaggaacaaagtttggattaaatacgggtggaaatgttgaagcaatactaatgtcgctacccacaatagcaaaatggaaataaa

SEQ ID NO: 218496 - DNA, 859 bp, Unknown
  Bacterial polypeptide expressing nucleotide sequence isolated from the Sargasso Sea
aatgaaatttgaagaactagagtcttctaatgttgtaaatatttctagagatgagtgggaaagaccagatggcggcggtgggataactcatgtgttaacagacggaaatctttttgataattgcgctattaattattcatcgatatacggaaaaaatcttcctaatacagctttagcaaaaactctaaaaaaagaaactaaacatgggtatcgtgctatgggtatatcagtcatatcacatccaaagaatccaaatattccttctagccatatgaatgtcaggctgtttattatattagataaaaatggtgaaatatctgactggtggataggtggaggctatgacttaactccattcataccatacgaaaatgatattcttgattggcataataatgctaaagatcttttagagcctttcgggactggcttttacaaagaattttcagaaaattgcaataattactttaatattccacatagaaatgaaagaagaggtgttggaggtattttttttgataatttaaaagattttccatctataaataatgctacatccttcctacaagcagtagtagtttcatatgtttcatcatatttaaatatagtaaacaggagaaaagacacaaaatatgacgaaatgcagaaggaatttcaattattaagaagggggagatatgtagaatttaatcttgtctatgatagaggcacatcatttgggcttcagtctaatggtagagttgaatcaatactggcctcattaccaactaatgtaaaatggtcatataaaaaatccaaagaatataacttacttgaaaaagagttattagaatttattaatagagattggaatgtctaa

SEQ ID NO: 218497 - DNA, 769 bp, Unknown
  Bacterial polypeptide expressing nucleotide sequence isolated from the Sargasso Sea
aatggataaagaaattaaaaaaagacttgctcgaaactggttcaaattaattcaggatgtaatttgttttgaaatcgaaaacttagaaaaaaaaaataaaaagttttttaaaaaaaaatggcaacgaaacccagataaagatgaaggtggcggagaatatagaattttaaaaaatggaaaaatttttgaaaaggtaggtgttaatttttcagaagtttatggaaaatttcctaaagccacaggaaaaaatattcctggaataaatcaaaatggtaatttttgggcctctggcatatctgttgtgatgcacatgcaaaatcctcatatacctgcaatgcattttaatactcgttatattttcactaatcatggatggtttggtggtggagtggatttaaccccttgtataaaagataataaagaaaaaaaattttttcataataaactaaaacaaatgtgcgatggacataataagaaatattataaaaaatataaaaagtggtgtgatcaatatttttatcttcctcatagaaaagaaactagaggtatagggggaattttttttgattataaaaaaagtaattgggaaaaagattttgcatttgtgagggatttaggtttgacttttaaatttatttttagatctgtaatagaaaataaaataaataaaaattggaataataatgagaaggatttacaatatgttaaaagaggaagatacgctgaatttaatttaatttacgatagaggtacaaaatttggtctacaa

SEQ ID NO: 218498 - DNA, 805 bp, Unknown
  Bacterial polypeptide expressing nucleotide sequence isolated from the Sargasso Sea
tatgtcaaataataaaaagatttgtaaagactggtttatagaacttcaaaatttaatatgtaatgcagttcttgaacttgaaaaagaatatggatcaactgctaaattcaagaaaaataaatggttaaagggagaatatagaattattgaaggtgatgtaattgaaaaagggggcgttgcattctcaaatgttattggaaaatttccaaaagactttgcaaagcaaatacctggcactaaaaaaaataataatttctggtcatctggtgtttcagtggtgcttcatccagtaaatccaaaagttccagcactacactttaatacacgtcatattattactagcaaaagttggtttgggggaggaattgacgccactccatgcttagaagataaaatattaaaaaagaactttcactccaaacttaaaaatacatgtgataagcatagtaagaattattatcctaaatataaaaaatggtgtgatgagtacttttatatgccgcatagaaaagagataagaggtatcggtggtattttctttgattacaaaatggatgattgggataatgattttaattttgttaaagatataggattaaccttcgtagaaattataaaagaagttgtccgcagaaaaatgtttgaaaaattcacaaaaaaacagaaagaaattcagttgttgaaacgaggccgatacgtagaatataatctcttatacgaccgtggaactaaatttggacttaatagtggcggtaatactgatgcaatattaatgtctatgccaccaaacgcaaagtggaagtaa

SEQ ID NO: 218499 - DNA, 670 bp, Unknown
  Bacterial polypeptide expressing nucleotide sequence isolated from the Sargasso Sea
atgttaataaatttagaaaaatcttttaaaaaaattcaatcattaatcattaaaaattttaaacttctagagggttcatcttctgcagaaatttcatctgatgtatggaaaaggcctgaaggtggcggaggaaaaacctttgtaatatctaacggtaatttctttgataattgtgctgtaaatttctcgtcaatatatggtaaaaatatgcctacaagtgcacttggaaaaaaattagcaaaaaaaattgatcatggctatcaagccatgggtgtttctgtgatctctcacccaaaaaatccatatgttccaactagtcatatgaatgttcgtctatttggaatattagacaagaataaaaacataaaagattggtggattggaggtggctatgatttaacaccttatatatctttttcagaagataatattcgttggcataactcagcaaaagaaactcttgataaatataacaaaaatttttataagtcattttctgagaattgtaataaatatttttatatacctcatagaaaagaaagaaggggtattggaggtatcttttttgataatctatctagcttaaaccttgacgatagcttaaaaatgctaaattctattgcaagcacctatttaaattcatatttagatattgttctaaaagaaagaa

SEQ ID NO: 218500 - DNA, 817 bp, Unknown
  Bacterial polypeptide expressing nucleotide sequence isolated from the Sargasso Sea
atgagtgatcaaataaaaaatcaacaaactaaagcagaaaagtggtttcgagaacttcgaaatcaaatggttggatcaatacaaaagcttgatgggtctgaatttatagaaaaggagtggcaaagacctggtggtggtggaggtttgatgtccttactaaaaggagaaatatttgaaaaagtaggagtaaatatttcaacagtgcatggtaattttactgaagaatttaaaaaatcaatgccgggaaccgaagaggatccaagcttttgggccagtggtatctcagtcgtagctcacatgaaaaacccgaaaattgctgcagctcattttaacactaggtacataaccacaaaaggaaaacaatggtttggtggtggttgtgatttaacccctgcaatacctgaaaaattagaaacagataattttcatcaaggtctccaacgaacatgtgatcaacataattcaacttattatgaaaaatttaaaaaacaatgtgatgaatacttttatttagagcatcgaaaagaaagtagaggtataggagggattttttttgattatatcaatacagactttgataaggatttatcattcataaaagatgttgggcaattctttgttaattttgtaattgaaaactcaaaaagaaaaaaagattttaactttaatcaagatgacttagatgctctctcaaaaaaaagatctcgttacgtagaatttaatttgctttatgatagagggacattatttggattaaaaactggtggtaatattgatgctatattaatgtcaatgcctccagaggctaaatggtaac

SEQ ID NO: 218501 - DNA, 904 bp, Unknown
  Bacterial polypeptide expressing nucleotide sequence isolated from the Sargasso Sea
tatgttaaaacgacaacaaattggcgataacgaaaaatctcaagtcgaagaatggtttctcactcttagagaccagatatgtttggcctttgagtcggtggagaccgatcaaaagtctgggattttctctcagttaccacctggaaggtttcaaaggaaagaaacttcaagagaaagttcaacaaacgaggatgcaggcggtggagtaatgtcaataatgcgagaaggtcgggtatttgaaaaggttggagtaaatatttcaacagtttttggacaattgggaaaacaagcgcaagaaagtataagtgctagacgaaacgtccctggtctggagaaagatcctcgtttttgggcttcaggaattagcttggtcgcgcacatgcgctcacctaaaacccctgctgtacatatgaatacaagaatgttttggacaccgggggattggtggtttggtggaggtgctgacttgaatccaatgctggaaaactccgatgacacctcctttttccataatgagctgcgtaaagcatgtaaccttcacgacccttcatactatccaagattcaaaaaatgggcagatgagtacttcctaataaaacattggaacgaacctcgcggagttggtggcatttttttcgacgatcactgtacaaacaattgggaagaagatttcgctttcacaaaggatgttggaagggcttttttaaaagccttcgttccgctaacaagaaagcattgcaatgaagaatggactcaagaggaaagagaaatacagctaatcaaacggggtcgatacacagagtttaatcttgtatatgaccgaggaacgcaattcggcctccacactggtcacaatcctgaagctgttctaatgagtttgccaccaatcgccaaatggccctaa

SEQ ID NO: 218502 - DNA, 493 bp, Unknown
  Bacterial polypeptide expressing nucleotide sequence isolated from the Sargasso Sea
cattttaatacaagatatatcagcactcaaaaaaactggtttggaggtggaatggatgtaaccccggccatcaaagatgataatgaaaagaataaatttcataaaactttgaagttaatgtgtgatcaacataataaaaattattataaaaaatataaaaaatggtgtgatgaatatttttatttaccccacagaaaagaagctagaggaattgggggaattttttttgattacaaagatgataattttgaaaaagattttaaatttgtaagagatgttgggattacttttcaaatgatttttaatgaaattattagaaaaaaaattaagaaaaaatggtctttaaaagaaaaagagatgcagtatattaaaagaggtcgttacgcagaatttaatttactatatgacagaggaactaaatttggattacaaactggtggtaatgttgaaggaattttaatgtcgttgcctcccttagcaaagtggaaataaa

SEQ ID NO: 218503 - DNA, 829 bp, Unknown
  Bacterial polypeptide expressing nucleotide sequence isolated from the Sargasso Sea
aatggatagttttattaaaaaaaaattagcaagaaactggtttaaaattcttcaagatatgatttgttttgagattgaagaaattgaaaaaaaaaaaataaaatttatatcaacacaatggaatagaagtaacaaaaaagatgaaggtggaggtgaatatagaattttaaaaaatggtaaagtttttgaaaaagtaggtgtaaacttttctgaggtttacggaaaactatcaaaagaatttaaaaaaaaattacctggaacaaatttaaatcctagtttttgggcctcaggtatatcaattgtaatgcacatgaaaaatccgcatgttcccgcaatgcattttaatactagatatatttatacatcttatggatggtttggtggaggaatggacgtaacgccttgtatcaatgatgaacagttaaaaaattggtttcacaaagaacttaaatttacatgtgataaacacaacaaaaaatactataaaaaatataaaaaaaattgtgatgaatatttttatcttccacatagaaaagaaactagaggtattggtggaatattttttgattataaaaaagaaaattgggaaaaagattttagttttgttagagatgtaggactaacgtataagaaaatttttaaagagataattaataaaaaaaataaaatgaaatggaataaaaaacaaaaagaaatacaatatttaaaaagaggtagatatgttgaatttaatttactttatgatcgaggaacaaaattcggactacaaacaggcggtaatacagatgcaattttaatgtcacttccaccacttgcaaaatggaaataa

SEQ ID NO: 218504 - DNA, 904 bp, Unknown
  Bacterial polypeptide expressing nucleotide sequence isolated from the Sargasso Sea
catgactcaaacagtaatagaagcatctatagagcccattaaagattattttcaatctctccaagaacaaatatgctcgactctggaatcactagagatagacgaaaaattctcagtcgaaaacatatcaacgccaggtggaggactgtctaaaccccgggtactgagtgacggtgaacacattgagaaagcagcggtcatgttcactcactccattggtgactctcttcccccagcagctactgagagaaacccaaaattggcagaaaaaccatttcaagctgccgccatatcgttgatcgttcatccgagaaaccccttcgtgccgatgactcacatgaatctacggttctttattgtttccgcagacgagccctcttggcacttcggcggaggctacgacttgaccccttattacccttttgaacaagacattgtgcattggcattcgacagcatctctagctgcaggcaaacattaccgtcaattcaaagaccagtgtgatgattacttttatctaccccatagaaaggaagctcgaggcgttggcggtctcttttttgatgactggaaagaaggaggattcaacgaatcctacgacttaacaacaacgattggcgattcctttctgaaagcctatcaacccatattcgaaaaaaggaaaaacgaaaccttcacagaaaaacaaaaagattttcaactgtatcgccgaggccgatatgcagagttcaatttagctattgatagagggaccaaatacggactacagagcggtcggaggatagaatccgttttggcatcattaccccccttggctaagtggagctacaactatcctatcgatccagattccgacgaatcaaaactcacggattattatcttactcgtaaagattggatatga

SEQ ID NO: 218505 - DNA, 910 bp, Unknown
  Bacterial polypeptide expressing nucleotide sequence isolated from the Sargasso Sea
aatgattaatgaaatagaaaaaaatttcaaagacatacaggcttcaataataaataaatttgaaaaatttgaattatctaaaaatttaaataaagtacatgatgcatggaacaggcctgaaggtggaggaggcattacgcatataatttctgagggcaatgtttttgataattgcgctataaatttttcatcaatttatggggaaaggcttccagaatctgctttagcaaactccttaaatgttgaagcaaagaatggttatcaagctatgggaatatctgtaatatcacacccaaaaaatcctcatgttccttcaagccatatgaatataagattattttctattttagacaataataatgaaataaaggattggtggattggcgggggttatgacctaacgccatttttacctaataaaaacgatgttactgattggcacaatagcgccaaaaaacttttggagccttatggaaaaaatttttataaagatttctcagatgcttgtaataattatttcaacatcccgcatagaaaagaaagaagggggattggaggaatattttttgataatttaaaatgtttttcatctatagaagatgcagttaattttcttcaacaagttgcggatacctatttaaaatcatacataagaattctaaataaaagaaaagacacaaaatatgatcaaatgcacaaagaatttcaactaataagaaggggaagatacgttgagttcaaccttatatatgacagaggaacctctttcggaattcaatcaaacggaagaatcgaatcgatattagcctctctgccggcgtctgtaaaatggaaatacaataagtcagacgaatataaaacgctagaaaaaaaactactagagtttataaatagagattggaatgtctaa

SEQ ID NO: 218506 - DNA, 913 bp, Unknown
  Bacterial polypeptide expressing nucleotide sequence isolated from the Sargasso Sea
aatgataagaaaactagaaaatatatttaaaaagatccaagataatattcttgaaaaatttgaaaaatttgaagaatttgaggagacctctattaataataagtctttagattcttggataagaaaagagggtggaggtggaaaaacggctgttattgccaatggaacttttttcgataattgtgcagtaaatttttcatccattgtaggaaagaaacttcctgaggctgcccttaaaaataagaaaaaactatcaaattgtaaattttcagccatgggggtatcagtaatttctcatcctaaaaaccctcatgtacccaccagtcatatgaatgttcgtcttttttgtttatttgatagtaatgacaatataaaagattggtggattgggggcggttatgatttaacaccttacattccgtaccttgatgatattaaaaattggcacaaagaagcgaaacatttcttaaattcttttgatacagaatattacaaaaatttttccaaagaatgtaatgattatttctatattcctcatagaaaagaacgaagaggagttggtggaattttttttgacaatgttaaagatctatcaatagaaaatagtttaatctttttagaaaatgtagcgaatcagtatttaaattcttatgttgagatagcaagcaaaagaaaagacactaaatattcacaagtggaaaaggaatttcagttaattcgtagaggaagatatgtagagtttaatcttgtgtatgatagaggaacagcttttgggcttcaatcggatggaagaatagaatcaattttggcctcgttacccgctgaagtaaaatggtcttataaaaaagatgatgagtataaagctttagaaaaaaagctacttaaatatattaataaagattggaatgtctaa

SEQ ID NO: 218507 - DNA, 805 bp, Unknown
  Bacterial polypeptide expressing nucleotide sequence isolated from the Sargasso Sea
atgttaaataaaaaaaagataactaaagcatggttcaagggattgcaggatctaatctgtgagactgtacttgaactcgaaaaaaaaaatggatcaaaagcaaggttcaaaactaataaatggaaaaaaggtgaatatagaataattaagggaaatgtaatcgaaaaaggcggtatagcattttcaaatgtaacaggtacctttccaaaagaatttgcaaaacaaattccaggaactgaaaagaataaaaaattttggtccacaggagtatctgtagtgcttcacccagcaaatccaaaggttcctgcattacatttcaatactcggcacataataacgggtaaaaattggtttggtggcggtattgacgccactccatgttttaaagacgctaaattaaagaaacaatttcataataaattaaaaacaatgtgtgaaaatcataataaatcttattacaaaaattataaaaaatggtgtgatgaatatttctatttaccccacagaaaagaaataagaggaattggcggaatattttttgactataaaatggatgattggaaaaaagattttgattttgttaaggacgttggcttaacttttaatgatattgtaagagacataataagccaaaaaatgaatgaaaagttcacaaaaaaagataaagaaattcagttattgaaacgtgggaggtacgtggaatataatcttttatacgatcgaggaacaaaatttggcttaaacaccggtggtaatattgatgcaattttaatgtcaatgcctcctaatgctaaatggaaataaa

SEQ ID NO: 218508 - DNA, 844 bp, Unknown
  Bacterial polypeptide expressing nucleotide sequence isolated from the Sargasso Sea
atggttggcagtaaatataaggttacaaaagaagaaaaagtaagtgctgaaaattggttctctgaactgagagatgatatttgtaatgaatttcaaaatattgaaaagaatatttcgaacaatacttttcaaattaaaaattggaaaagagatggtggtggcggtggaaaaatgagtgttatgaaaggagatgtttttgaaaaagtaggtgtaaatatttcaactgtacatggaaagttttctgagcaatttagaaaaaacatccctggtgcagaagaagatggaaaattctgggcaagtggcatatcagtcgtagctcacccaaaaaacccatttgttcctgcagctcatatgaacacaaggcttatttccacatcaaagagttggtttggaggaggaggtgatattacgcctatgaaaccggcaccagaaatgtcaaagcttttccataatgacctaaaaaatgtatgtaataagtataataaagaatattatgaaaaatttaaagaatgggcggacaaatacttttttttagaacatcgtaatgagacaagaggggatggtggtatattttttgattatttaaataacggtaattggaaaaatgattttaactttgttaaagatattggtaaggcttttcttacatcttactcacatatagttaggaagaatttaagcacaccttggaatgaagatgaccggagagaacaattgataaaaagaggcagatacgttgaattcaacttgctttatgatagagggactatttttggattgaaaacaggtggtaatgttgaagcaattttaatgagtctgcctcctgaggtaaactggaattgat

SEQ ID NO: 218509 - DNA, 922 bp, Unknown
  Bacterial polypeptide expressing nucleotide sequence isolated from the Sargasso Sea
atgaatacagaagataaaacaaattacatagcagatttttttagtgagctgcacaaaaacttacattcaaagattaggccttatgaggattctaatttttttattgaagacgaatggaaaaaagagaatcttggtagcggcacatctattgttgttgatcaaggaagcttctttgataaagcaggaataaatttttctaaaatatcaggagagtctctcccaatatcctcagttggcaacaaagataattctgcagatatgcctttttttgctactggtgtatcggtagtctttcaccccaagaacccgaatataccgacagcgcacctaaatgtgcgatatttttgtacctttaaagatgggcaaatttttgaagaatggtttggcggcggttttgatctaactccatatgttctttttgaagaagactgtatcaactggcatcaagcagcaaaaaaagcgtgtgattccaccaatgaaaaattatataaagttttcaaaaagaactgtgatgattatttttttattaaacacagaaaagagcatagaggaattggaggaatattctatgagaagtataaagcagaaagtttagacgatgggcttaaactttctcaagatgtttgcaaagctttcactaattcctatatcgagataatagaaaaaagaaaaaatcttgagtttgaagaaagggataaggaatttcagaagtttagaagggggcgttacgtagaatttaatcttgtttatgacaggggcacactctttggcttacaaacgggcggaagaattgagtcaatattaatgtcactacctaatgatgtagcttggagatataagtttgacgataatcttacagacaaagaaaagaatctctataaatttgtaagagaacctaaggactggatagatgggacataaa

SEQ ID NO: 218510 - DNA, 776 bp, Unknown
  Bacterial polypeptide expressing nucleotide sequence isolated from the Sargasso Sea
tttacaggatataatttgtaatgatattgaagaacttgaagggaaaaaaaatatatttaaatcaaaatcttggtctagaggtaaaaaagaaggtggaggagaatttaggatttttgaaaatggaaatatatttgaaaaagttggagttaacttttccgaagtgtatggaaagttctcacaaaaatttagagaaaaaattcctggaacaaaaaaaagtcctaatttttgggcatctggtatttcggttgtaatgcatatgaaaaatccacacattcctgcaatgcatttcaacactagatatatttacacttcacatggttggttcggtggaggtatggatgtcacaccttgtataaaagataataatataaaaaaatggttccacaatgaactgcgaaaatcttgcgatagacataataaaagctattacaaaaaatataaaaaatggtgtgataagtatttttatttaccacatagaaatgagtcaagaggtataggaggaatattttttgactacaaaaaagataactgggaaaaagattttgcgtttgtaagagacgtaggaataacttttaaaaagattgcaaattatatcatacttagaaaaaaaaagaaaaaatggacaaaaaaacaaaaagagattcaatatttgaaaagaggtcgatatgtggaatttaacttactatatgatagaggaacaaagtttggattacaaacaggtggaaatgttgagggtatattaatgtcattacctcctttagctaagtggaaataat

SEQ ID NO: 218511 - DNA, 673 bp, Unknown
  Bacterial polypeptide expressing nucleotide sequence isolated from the Sargasso Sea
atggacatagatattaaaaaagatctaacaagtaattggtttaaactattacaaaatgcaatttgtgatgacattgtgaaacttgagagtaacaaatttaaatttaaatctacttcttggaaaagaaatactaaaaaagatgagggaggtggagaatacagaattctaagtaatggaaaaatatttgaaaaagtgggtgtaaattactcaaaagtatatggaaaatttcctaaaaaatttcaaaaaaatattttaggtgcagaaaaagatccaagtttttgggcatcaggaatatctgttgtaatgcatatgcaaaatcctcatatacctgcaatgcattttaatacgaggttcatttgtacaaaaaagaattggtttggaggtggtatggatgtcacgccagctatcaaagatgtaaatgaaaaaaataattttcataaaaaactaaaacttatgtgcgaccaacataataaaaaatattatgccaaatacaaaaaatggtgtgatgaatatttttatttaccacatagaggtgaggcaagaggaataggtggtattttttttgattataaaaaagataactttgaaaaagattttaaatttgtaagagatgtgggtgtaacatttcaaatgttatttaataatattataagaaaaaaaatttcaaaaaaat

SEQ ID NO: 218512 - DNA, 841 bp, Unknown
  Bacterial polypeptide expressing nucleotide sequence isolated from the Sargasso Sea
ctgatagataacttttatcgttatgaacaaaaagaaaagattattattgataaatgggaaaaagagtctcttggtcgtggcatttcagctgttgtagattgcggtagattttttgataaagcgggaatcaatttctcccaaatttctggcaattctttacctagatcatctgttggaagtgaggggtataaagacgctccatattttgcgactggagtttcagttgtatttcatcccaaaaatccaaatattccaactgcgcatttgaatgtaaggtactttgcgactttcaatgagaataataaaattaacgaagattggtttggaggaggttttgacctaacaccttacgttccatttaaagaggactgtaaatcttggcatcagcaagccaaaactgcatcaaaaaataaatatcaagaatggaaaaataattgtgatgattatttctatttaaaacacagaaatgagcacagaggtgttggtggtattttttatgaaaaacaaacatttgaaaaacctgaacaaggattaaagctgtccaaaagtgttgcagagtcttttttaaacggatacagcaatattttagataaaagaaaagatcttgagtttacagaaagacaaaaagagtttcagatatttagaaggggaagatatgtagaatttaaccttttgtatgacagaggaactttatttggactccaatctggtggaagaatagagtcaattttaatgtctctcccaagtgaagtttcatggcgatataaatttgatcaaaaccttaatagtgaggagcaaaatctttacaacctaatatccaaaaagcatcaatggatatgaa

SEQ ID NO: 218513 - DNA, 808 bp, Unknown
  Bacterial polypeptide expressing nucleotide sequence isolated from the Sargasso Sea
tatgaaaaataataataaaaagatttgtaaagactggtttatagaacttcaaaatttaatatgtaaggcagttcttgagcttgaaaaagaatatggatcaaccgctaagttcaagaagaataaatggtcaaagggagagtatagaattattgaaggtgatgtaattgaaaaaggtggcgttgcattttcaaacgttgttgggaaatttccaaaagactttgcaaagcaaatacccggtactgaaaaaaataatagtttctggtcatcaggtgtttcagtggtgcttcatccagtaaatcctaaagtaccagcactgcactttaatacgcgtcatattgttaccggcaaaagttggtttgggggaggaattgacgctactccatgcttagaagataaaatattaaaaaagaactttcactccacactaaaaaacgcatgtgatatgcacaacaagagttattatcctaaatataaaaaatggtgcgatgagtacttttatttgccgcacagaaaagaaataagaggcatcggcggtattttcttcgattacaaaatggataattgggataatgattttgaatttgtaaaagacgtaggattaacctttgtagaaattattaaagatgttgttcgcagaaaaatgtttgaaaaattcacaaaaaaacagaaagaaattcagttgttgaaacgaggccgttacgtagaatataatcttttgtacgaccgaggaactaaatttggactaaatagtggcggtaatatagatgctattttaatgtcaatgccgcctaatgcaaaatggaagtaa

SEQ ID NO: 218514 - DNA, 433 bp, Unknown
  Bacterial polypeptide expressing nucleotide sequence isolated from the Sargasso Sea
taccccaagtattaatgatggcttagaaaaaaaatggtaccataaggagctaaaaaaaatgtgtaataggcataataagaatttttataaaaaatataaaaaatggtgtgatgattatttctatctaccacatagatcagaaccaagaggagttggtggtattttttttgattataaaaatcaaaattgggaaaaagattttagatttgttaaagatgtaggtcttacctttaaatatatttttcaaaagataattaaaaataaaattaataaaaaatggaataaaaatgataaaaacaaacagtttataaaaagaggaaggtatgtggagtttaatttgctttatgatcgtggaacaaaatttggactagagactaaaggaaatatagatgcaattttaatgtcactacctcctattgcgaagtggaaataa

SEQ ID NO: 218515 - DNA, 829 bp, Unknown
  Bacterial polypeptide expressing nucleotide sequence isolated from the Sargasso Sea
aatggatatagatattaaaaaagatctatcaagtaattggttcaaacttttacagaatgcaatttgtgatgacatcatcaagcttgagaagaataaattaaaattcaagtctacctcttggaaaagaaataccaaaaaagatgaagggggtggagaatacagaattcttaaaaatggaaaaatttttgaaaaagtgggcgtcaatttttcaagagtatatggaaaatttcctaagaaattccaaaaaaatattccaggtgctgagaaaaatccaagtttctgggcttcagggatatctgtagttatgcatatgcaaaaccctcatatccctgctatgcattttaatacaagatatatttgtacacaaaaaaattggtttggtggaggaatggatgttacgccagctataaaagatataaatgaaaaaaataattttcataaaacgttaaagcttatgtgtgaccaacataataaaaattattattccaaatataaaaaatggtgtgatgaatatttttatttaccccatagacatgaagcaagagggattggtggtattttctttgattataaaaatgaaaactttgaaaatgattttaaatttgtaagggatgttggggtaacatttcagatgttatttaatgatattataagaaaaaaagtttcaaaaaaatggactttaaaagataaagagaaacagtatattaaaagaggtcgttacgcagaattcaacttattatatgatcgagggacgaaatttggtcttcaaacaggtgggaatgttgaggggatactaatgtcgttacctccaattgtaaaatggaaataa

SEQ ID NO: 218516 - DNA, 577 bp, Unknown
  Bacterial polypeptide expressing nucleotide sequence isolated from the Sargasso Sea
atggatcaaacaattaaaaaaaaattagctagaaactggtttaagactttgcaagaagtaatatgtcaagaaatagaagaattagagggtaaaaaaaatatctttagtattaaaaattgggaaagaggaaaaaactcaaacgaaggtggaggccaatttagaatattagaaaatggaaaaatttttgaaaaagtaggtgtaaatttttcagaagtatatggaaaattttcaaaagaatttagaaatagaatccctgggggagataaaaatccaaacttttgggcagcgggtatatcagtagtaatgcatatgaaaaatcctcatgttcctgctatgcattttaacactagatatatttacacttctcatggatggtttggtggagggatggatgttaccccttgcctgaaagataaaagtttagaaaaatggtttcataatgaattaaagaaatcttgtgacaaacataataaatatttttataaaaaatataaaaaatggtgtgatgaatatttttatttaccgcatagaaaagaaccaagaggtatagggggaattttttttgattataaaaaag

SEQ ID NO: 218517 - DNA, 301 bp, Unknown
  Bacterial polypeptide expressing nucleotide sequence isolated from the Sargasso Sea
atgttcaaagaacctcctaaaaactcgagagaaaaaactaaaaatctcttattaactttacaagacaaaatttgttcaggccttgagaatgtagatggcaaagggaaattcacagaagaatcttggctaagagacgaaggtggtggtgggagatcaagagtattgaaaaacggttctatctttgagcaagcaggagtaaatttctctgaagtacaggggaaagaattacctcaatcaataatctctcagaggcctgaagcaaaaggtcatgaatggtttgcgacaggaacttctatggtat

SEQ ID NO: 218518 - DNA, 408 bp, Unknown
  Bacterial polypeptide expressing nucleotide sequence isolated from the Sargasso Sea
ttaaaatatggtttcataaagaattaaaaaaatgctgcaataatcatgataaaaaatattataaaaaatataaaaattggtgcgataagtatttttatcttcctcacagaaaagaaccgagaggaataggtggcattttttttgattataaaaataaaaattgggaaaaagattttgcttttgttagagacgttggaataacttttaaaaaaatatttaagcatataataaaaataaaaaataaaaaaaagtggaataagaaacaaaaagaaattcaatatattaaaagaggaagatatgtagaatttaatctactttatgatagaggaacaaaatttggattaaaaactaacggaaatattgaagctatacttatgtcattaccaccaatagctaaatggaaataat

SEQ ID NO: 218519 - DNA, 526 bp, Unknown
  Bacterial polypeptide expressing nucleotide sequence isolated from the Sargasso Sea
atgcatatgcaaaatcctcatattcctgcaatgcattttaataccagatttatttctacaacaaagaattggtttggtggaggaatggatgtaaccccggcaataaaagatgagaaagagaggaaaaattttcataaaatattaaaagcaatgtgcgacagacataataaaaattattataaaaaatataaaaagtggtgtgatgaatatttttatttacctcacaggaaagaggcaagaggcattggtggaatcttttttgactataaaaatgataattttgaaaatgactttaaatttgtcagagatgttggtgttacatttcaaatgctatttaatgaaataattaaaaaaaaaataaaaagaaaatggactttaaaagataaagagtttcagtatattaaaagaggtcgatacacagaatttaatttgctctatgatagaggaacaaaatttgggtttcaaactggtggtaatattgaaggaattttaatgtcattacctccgattgcaaaatggaaataaa

SEQ ID NO: 218520 - DNA, 811 bp, Unknown
  Bacterial polypeptide expressing nucleotide sequence isolated from the Sargasso Sea
atgattagtgatccaaaatttaatactgcaaatgattggtttgaaaaattaagaaataatttggttgagataattcaaaacattgatgataacaaatttgaaattactcattgggatcacaaagatgaaggtggtggtaaaatgagtaagcttaaaggtaatattatagaaaaaggcggtgttaatatttcaacagtttcaggaaaatttaatgaaaatatgcaagaaaaaatccctggggcaaaggataatccaaattatagcgcaacaggcataagtgtagttttacatcctatttctcctaaaattccttcgatgcattttaatacaagatttatcaaaaccaatcaggagtggtttggtggaggcatagatattacaccttgtttagtttttaacgctgaagaaaaataccataaagatttagaagctttatgcaataaatatgacaaatcttattatcccaaatttaaaaaatggtgcgatgattatttttttcttaaacatagaaatgaatcaagaggaataggaggtattttttttgattatcttcaaactggtgattggggaaaagattttgaatttgttcaagatgtaggagtttattttcaaaaatttgtttcaaataccttagagaaattaaaagatgaaaaatggaatgacgatgataagaaaaaacaacttattaagagaagtagatatgcggaatttaatttgctatacgatagaggaacaaaatttggtttagaaactggtggaaatattgatgctatattaatgtcaatgccaccgctagcgaaatgggaataat

SEQ ID NO: 218521 - DNA, 796 bp, Unknown
  Bacterial polypeptide expressing nucleotide sequence isolated from the Sargasso Sea
atgacagatagttggttttcttatttgcaagcacaaatttgtaaagaatttgagtcttttgaaaaaaaaaagaaattcataagaagagattggagtaaaaaaaataaaaatgaaggaggtggtacttcttttatcttatctggaggaaatttattcgaaaaagtaggagttaacaaatcaactgtttcaggtaaatttgcaaaagaatataaaaataaaatattaggtgctggtaaaaatggaaaatattgggcatcgggagtctcagtagtggctcatatgaagaaccccaaaatacccgctatacatttcaatactagatttatagtaacaaaaaaagaatggtttggcggaggaatggatgtaaccccaagtcataaagatacaaaagaaaagagattagtacacaatatgcttagaaaagtatgtgttcaaaataaaaaaaattataaaaaatataagagatggtgtgacacatatttttatttacctcacagaaaagaggtaagaggaattggtggaatattttttgattatgaaactgataattggattaaaaactttaaattcgtaagagaactaggtttaacttttataaatatatctagggaaataattagaagaaaaaaaaaacttaagtggaaaaaaaaagataaagagaagcaattaattaaaagaggtagatatgttgaatttaaccttttatatgatagaggtacaaaatttggattaaattcaggaggaaatattgaatcgatattgatgtcacttcctccagaagctaagtggaaataaa

SEQ ID NO: 218522 - DNA, 808 bp, Unknown
  Bacterial polypeptide expressing nucleotide sequence isolated from the Sargasso Sea
aatgaataattcaaaaattgaaattgctaggaaatggtttgaagaattacgtgataaactaattttaaatatagaaaaaattgattcaacaaattttataattactgaatgggatcataagcatcaaggtggcggaaaaatgagtaagattaaaggacaggtaatagaaaagggtggggtcaacatttcaacagttgaaggaaaatttgaagaaaatatgataggaaaagtaccaggaactgaaaatgactcttcttatcaggctacaggtataagtgtagttcttcatcctcattctccttttataccctctatgcattttaacactagatttttaaaaacagaacaagaatggtttggaggaggaatagatgttactccatgtcttcctttcaaggatgaagaacaatatcattcatctttagaatctttatgtgataaatttgataaaaattattataaaaaatttaaaagttggtgtgatgaatatttttatttaacttatagaaaagagccaagaggtataggaggaattttttttgattatttaaagacagatgattggggtagagattttgagtttgttcaaaatgtgggaaatttctttaatgatttttcctccaaaactattttaaaatataaagatttaaattggagtgacgaagaaaaaaatatacaacttctaaaacgaagtaaatatgtagaatttaatttattacatgatagaggaacaaaatttggtctagaaacaggaggaaatattgatgcaattcttatgtctatgcctcctttagctaaatgggattga

SEQ ID NO: 218523 - DNA, 829 bp, Unknown
  Bacterial polypeptide expressing nucleotide sequence isolated from the Sargasso Sea
tatgaattcagaaattaaaaaaaatttagctagtaattggtttaaaacacttcaagaagctttttgtgaagatataaataaactcgaaaaaaataaagttaaatttaaatcaaacatctggaaaagaaatgccaaaaaagatgggggtggaggtgaatataaaattctacaaaatggaaaaatttttgaaaaagttggtgtaaacttttcaacagtttacggaaaatttccaaaacaatttcaaaaaaatatattaggtgctcataaagatccgagattttgggcatcaggggtttctgttgtcatgcatatgaaaaatccattaatccctgctatgcattttaatacgagatatgtttgcactacacaagattggtttgggggaggcatggatgtaactccatcaaaaatagatttaaatgaaaagcgtgaatttcataaaactttaaaaaatatgtgtaatcgtcataacaaaaaatattatacaaagtataaaaaatggtgtgatgaatatttttatttacctcacagaaaagaatctagaggcattggaggaattttctttgattataaaaagaataattttgaaaaggattttaaattcgtaagagacgtcggaattacttttcaattaatttttcaaaaaattattagaaaaaaaatgaaaaaaaaatggactactaaagataaagaaatgcaatatattaaaagaggaagatatgcagaatttaacttattatatgatagaggtacaaaatttggattacaaacaaatggaaatattgaaggaatactaatgtccttacctcccttagctaaatggaaataa

SEQ ID NO: 218524 - DNA, 829 bp, Unknown
  Bacterial polypeptide expressing nucleotide sequence isolated from the Sargasso Sea
atggacaattcaattaaaaaagacctagcaagcaattggttcaaattattacaagatacaatttgtaatgacatactcgaattggaaaataacaaaattaaattcgaatcaacttcttggaaaagaagctctaaaaaagatgaaggtggtggtgaatatagaattttaaaaaatggaaaaatttttgaaaaagttggagtaaatttttcaaaggtatatggaaaatttcctaaaaaatttcaaaaaaatataccaggagctgagaaaaatcctagattttgggcttcaggaatttcaatagttatgcatatgcaaaatccacacattccagctatgcattttaatacaagatatatcagcactcaaaaaaactggtttggaggtggaatggatgtaaccccggccatcaaagacgataatgaaaagaataaatttcataaaactttgaagttaatgtgtgatcagcataataaaaattattataaaaaatataaaaaatggtgtgatgaatatttttatttaccccacagaaaagaatctagaggaattgggggaattttttttgattacaaagatgataattttgaaaaaaattttaaatttgtaagggatgttgggattacttttcaaataatttttaatgaaattattagaaaaaaaattaagaaaaaatggtctttaaaagaaaaagagatgcagtatattaaaagaggtcgttacgcagaattcaatttactatatgacagaggaactaaatttggattacaaactggtggtaatgttgaaggaattttaatgtcgttgcctcccttagcaaagtggaaataaa

SEQ ID NO: 218525 - DNA, 727 bp, Unknown
  Bacterial polypeptide expressing nucleotide sequence isolated from the Sargasso Sea
atggatttagatatcaaaaaagatctggcaagtaattggtttaaattaatacaagacgcattctgttatgacatcagcgttttagaaaataataaaataaaatttagttctaaaacgtggaaaagaaatcaaaaaaaagatgaaggtggcggtgaatatagaatattaagaaatggaaaaatatttgacaaagttggtgtgaatttttctaaagtttatggaaaatttccaaaaaaatttcaaaaaaatattccaggagcaagcaaagatcctagattttgggcttcaggggtatcagtagtaatgcatatgaaaaatcctttaatacctgctatgcactttaacactagattcatttgtacaactcaacaatggtttggtggtggagtagatttaacaccatcaataaaagatgttccagaaaaaaatgattttcataaaactttagagaatatgtgtaaccggcataataaaaattattataaaaaatataaaaaatggtgtgatgaatatttctatcttcaacatcgaagagaagcaagaggtataggtggaattttctttgattataaaaaaaataattttgaaaaagattttaattttgtaagagatctaagtattacatttcagatactgtttaataagataattagaaaaaagttaaaaaaaaaatggagtattaaaaataaggaagctcaatatataaaagaggtagatatgcagaatt

SEQ ID NO: 218526 - DNA, 421 bp, Unknown
  Bacterial polypeptide expressing nucleotide sequence isolated from the Sargasso Sea
tccggatgagacagacacggtggattttcatgccgctctcgaaggcgcgtgcaagccctatggagaggagcgttacgcggaatataagaaatggtgtgatgagtacttctacctgccgcatcgtgaggaatcgcgcggtgtcggcggtattttttacgactacctcgataaagactgggagcgcgacttcgaatttacgcgcggtgttggcgaggcgtttcttgaggtctatcctcgaattgtacgccgccacatgaatgacgaatggaccaaagcacagcgagaacaacaacttgtccgccgtgggcgatatgttgagtttaatctgctgcacgacaggggaaccaaatttggcttgatgacgggtggcaatacagaggccatactgatgtcaatgccgcccgaagcgcgctggccgtag

SEQ ID NO: 218527 - DNA, 248 bp, Unknown
  Bacterial polypeptide expressing nucleotide sequence isolated from the Sargasso Sea
actggacggtaaaaatgccgctgaagtaatagaacaagtaaaaagctatttactagggctgcaagacaccatttgccaaacacttgaacttgccgatggtaagggccagtttgttgaagacagctggcagagagaagagggtggcggtggccgttctcgagtactaaaaaatggtgcggtgattgaacaaggcggcgttaacttttctcatgtatttggtagtcaaatgcctgcttcagcaacggcta

SEQ ID NO: 218528 - DNA, 829 bp, Unknown
  Bacterial polypeptide expressing nucleotide sequence isolated from the Sargasso Sea
atggatttagacattagaaaagatttagcaagtaattggtttaaaactttacaagactcaatatgtcatagcataagtgagctggaaaaaaataaaattaaatttaaatcaacaacatggaaaagaaatcaaaaaaaagatgaaggtggtggtgaatatagaatacttaaagatggaagaatatttgagaaagtaggtgtaaatttttcaaaagtttatggaaaatttccaaaacattttcaaaaacaaattccaggagctgagaaaaatccaaatttttgggcatcaggtatttctgtagttatgcatatgaaaaaccccctaattccagcgatgcactttaatactagatatatttgcacatctcatgattggtttggtggaggtatggatgttactccatccaaaaaagatgaaaatgagaaaaaggaatttcacaaaatattaaaaaacatgtgcaatcgtcataacaaaaaatattatccaaaatataaaaaatggtgtgacgaatatttttatttacctcaccgaaaagaagcaagaggtattgggggaattttttttgactacaaaaaaaatgattttgaaaaagattttaaatttgtcagggaagttggtaccacatttgaattaatatttaaaaaaattatcaaaaaaaagttaaaaaaaaaatggactttaaaagataaggaaatgcaatatataaaaagaggtaggtatacagaatttaatttgctttacgatagagggacaaaatttggtttacaaacaggtggaaacgttgaaggcattttaatgtcgctaccacctattgcaaaatggaaataaa

SEQ ID NO: 218529 - DNA, 907 bp, Unknown
  Bacterial polypeptide expressing nucleotide sequence isolated from the Sargasso Sea
tatgttaataaatttagaaaaatcttttaaaaaaattcaatcattaatcattaaaaattttaaacttctagagggttcatcttctgcagaaatttcatctgatgtatggaaaaggcctgaaggtggcggaggaaaaacttttgtaatatctaacggtaatttctttgataattgtgctgtaaatttctcgtcaatatacggtaaaaatatgcctacaagtgcacttggaaaaaaattagccaaaaaaattgatcatggctatcaagccatgggtgtttctgtgatctctcacccaaaaaatccatatgttccaactagtcatatgaatgttcgtctatttggaatattagataagaataaaaacataaaagattggtggattggaggtggctatgatttaacgccttatatatctttttcagaagacaatattaattggcataactcagcaaaagaaactcttgataaatataacaaaaatttttataggtcattttctgagaattgtaataaatatttttatatatcacatagaaaagaaagaaggggtgttggaggtatcttttttgataatctatctagcttaagcctggacgatagcttaaaaatgctaaattctattgcaagcacctatttaaattcatatttagatattgtttctaaaagaaagaaaataaagtattcctcagatgagaaagattttcagctaattaggagaggaagatatgctgaatttaatctaatatatgacagaggaacgtcatttgggcttcaatcaaacggaagaattgaatcaatcttagcttcacttccaacagaagttaaatggaagtataaaaaaaataaaaaatacaaaataatggaaagagctctacttaaaaatcttaatagagattggaatgaataa

SEQ ID NO: 218530 - DNA, 715 bp, Unknown
  Bacterial polypeptide expressing nucleotide sequence isolated from the Sargasso Sea
tacatggcaaagaaataaaaataaagatgagggtggtggtgaatatagaattattaaagatggtaagatttttgaaaaagttggagtaaatttttcaaaggtttacggaaagtttccaaaaaaatttcaaaaaaaaattcctggtgctactaaagatccaagattctgggcttctggaatttcagtagtaatgcatatgcaaaatccacatattccagcaatgcattttaatactagatatatttgtacaacacaaaattggtttggtggtggaatggatgttactccttcaataaaagatgctaatgaaaaaaataaatttcataaaactttaaaaataatgtgtgatcgtcacaataagaaattctataaaaaatataaaaaatggtgtgatgaatatttttatttaccacatagaaatgaatctagaggaattggtggaattttctttgattataaaaaagaaaattttgaaaaagattttaattttgttagagatgtgggagttacgtttcaaatgttatttaataaaattatagaaaaaaagattaaaaaaaaatggactttaaaagataaagaaactcaatatattaaaagaggtagatacgcagaatttaacttgctgtatgatagaggaacaaaattcggtttacaaacaggcggaaatgtagaaggaattttaatgtcattacctccaattgcaaaatggaaataa

SEQ ID NO: 218531 - DNA, 826 bp, Unknown
  Bacterial polypeptide expressing nucleotide sequence isolated from the Sargasso Sea
atggatatagaagataaaaaattatattccgataagtggttctcttatttgcatgcacagatatgcgatcacttcgaaaaaattgagaaagattcaaaaagctcaaaaaaatttatttcaacaaattggtctaaaaagaataatggtggtggtggaacttttaaaattttaaaagatggtaaagtattcgataaagtaggtgtgaacaaatcaacagttaaaggcaccttttccaaaaaatttcgccaaaatattttgggtgctgaaaaaaacggtaaatattgggcgtctggaatttcagtggtagctcatatgaaaaatcctaaggttccagcaattcattttaatacaagatttatagtaacatcaaaaaattggtatggaggtggaatagatttgactccttgcctgagagacagaaaagaagaaatctattttcacaataagctaaaaaaagtttgtaaagaaaaccacaaaaattattataaatttaaaaaatggtgtgataaatattttttcttaaaacatagaaatgagccacggggaataggcggaattttttttgattatgaaaacaaaaattgggaaaaagattttaaatttgtaagagaagttggtatgagtttcctcgaaatatcgaaaaatattattaacaaaaaaaagagtttaaaatataatggtaaagataaagagaagcagtttttaaaacgaggtagatacgtagaatttaatttattatatgatagaggaacaaaatttggattaaattctggaggcaacaccgaggcaattttaatgtccttacctcccaaagcaaaatggtaaa

SEQ ID NO: 218532 - DNA, 367 bp, Unknown
  Bacterial polypeptide expressing nucleotide sequence isolated from the Sargasso Sea
cagacataataaaaattattataaaaaatataaaaaatggtgcgatgattatttttatttgcctcatcgaaatgaatctaggggtataggtggaattttcttcgattataaaaatgatagcttcgaaaaagattttaaatttgttagagatgtaggaataacttttcaaacattatttaatcaaataataaaaaaaaaaattaaaaaaaaatggactttaaaagataaagagtcacaatatattaaaagaggtagatattcggaatttaatctactttacgatagaggcacaaaatttggattacaaacaggtggaaatgttgaaggaattttaatgtcacttccgccattagtaaaatggaaataa

SEQ ID NO: 218533 - DNA, 829 bp, Unknown
  Bacterial polypeptide expressing nucleotide sequence isolated from the Sargasso Sea
atggatatttcaattaaaaaagacttagcgagtaattggtttaagctattacaaaatgcaatatgtgacgacattttaaaaattgaaaaaaacaaagtaaattttcaatcaacttcttggaatagaagcagtaaaaaagatgagggtggtggtgaatatagaatacttaaaaatggaaaaatttttgaaaaagtaggagtaaatttttcaaaagtttatggaaaatttcctaagcaatttcaaaagaatataccgggcgcaagtaaagatcctagattttgggcatcaggaatatcaatagttatgcacatgcaaaatccccatattcctgcaatgcattttaataccagatttatttgtacaacaaagaattggtttggtggaggtatggatgtaaccccagcaataaaagatgaaaaagagaagaaaaactttcataaaatattaaaggcaatgtgcgatagacataataaaaattattataaaaaatataaaaagtggtgtgatgaatatttttatctacctcacagaaaagaagccagaggtataggtggaatattttttgactataaaaatgataattttgaaaatgactttaaatttgtcagagatgttggtgttacatttcaaatgctatttaatgaaataattaaaaaaaaattaaaaagaaaatggactttaaaagataaagagtttcagtatattaaaagaagtcgatacgcagagtttaatttgctctacgatagaggaacaaaatttgggctacaaactggtggtaatgttgaaggaattttgatgtcattacctccggttgcaaaatggaaataaa

SEQ ID NO: 218534 - DNA, 808 bp, Unknown
  Bacterial polypeptide expressing nucleotide sequence isolated from the Sargasso Sea
atgaatgataaccaacgaatggcaaaggattggttcttttcactaaggaataacctggtcgatactctggaaaaaatagatggaaataagtttggttttaaggattggacacactcgggatctgggggtggaaccatgggcagtattagaggtaaaattgtagaaaaaggtggtgtcaatatatccacggtatctggtcagttttcagaagagatgagacaaagaattccgggtgcgaaaaaggatcctcaatactgggcaactgggataagtgttgtgatccacccgacctccccccttataccatctatgcattttaattctcgctttctaaaaacctctaaaacatggttcggaggcggtatagatataactccagctatcccatttaaaaaagagacagagcacttccactccattttgaatgaagcctgctcgaagcatagtaaaacatattatgacgaacataaaaaatggtgtgatgagtattttttcttaaaacacagaaatgaagctcgtggagcagggggtattttctttgactatttagatagcggcgatattaataatgatctagaatatgtgaaagaagtaggaaacttcttccttagttatatccagtatatcttcaataaatacgcagaaaaagagtggacagatcaggaaaagcatatgcagttaaaaaagagaggtcgctatgtggagttcaatctactttatgatagaggaacaaaattcggacttgaaacaggcggtaacacagaggcaattcttatgtccatgcctccaaacgcatcatgggattaga

SEQ ID NO: 218535 - DNA, 829 bp, Unknown
  Bacterial polypeptide expressing nucleotide sequence isolated from the Sargasso Sea
aatggatttacaagttaaaaaaaaaattactagaaattggtttaaaattttacaagaggtaatttgtaaagatatagaagaaattgagaaaaaaaaaaatatttttaaaataaaaaattggaaaagaaatcttaataaagaagaaggtggaggtgaatttagaatatttaaaaacggtaaggtatttgaaaaagtaggtgtaaattattctgaagtttttggtaaattttcaaagcaaataaggaacaaaatacctggcacagaaaaaagttcaaatttttgggcttcaggcatatcagttgtaatgcatatgcaaaacccaaatattccagcaatgcattttaatacaagatatatagtaactagctatgggtggtttggcggaggaatggatgtgacgccttgcattaaagataataatcttagcaaatggttccataatgaattaaaaaggtcatgtaataaacataataaaaaatattatcctaaatacagtaaatggtgtgatgaatatttttatctacctcatagaaaagaaccgagaggaataggaggaattttttttgattataaaaaaaaagactttgaaaaggactttaattttgtaagagatgtaggtttaacttttaaaaatatttttagagaaataatttcaaggaaacaaaataaaaaatgggataaaaagcttaaagagattcaaaatttaaaaagaggaagatatgttgaattcaatcttctttatgatagaggaacaaaatttggattacaaactggaggaaatgtagagggtattttgatgtctcttcctccaatagcaaaatggaagtag

SEQ ID NO: 218536 - DNA, 646 bp, Unknown
  Bacterial polypeptide expressing nucleotide sequence isolated from the Sargasso Sea
atgaaagaaaaattttatacatacattaaaagtctacaaaacaaaattacagatagaattgaggagattgaccagttagagaaatttaaagaagatatttggaaaagaaaagaaggtggaggggggaaaactagaattttacagaatggtaaagtctttgaaaaagcaggagttaatatttctgcagtaaagggtaagttacctgaaagtattatgaattatcttaaggtagatgagtcaagattttttgcatgtggtttaagtgtagttattcatccattaaatcctatgattccaacttgtcatgctaattggcgatattttgaattatataatgaaaaatctgaaataattgatcaatggtttggaggaggtcaagatctgactccatactatctgtataaagaagatgcagtccattttcataaagtttgtaaaaactcatgtgataaatttggaaaaaatttatatactgattttaaaaaaagatgtgacaattatttttggaattctcatcgaaatgaagcgagaggagtaggtggtattttttttgattacttgagagccaattcaaaaaaaagtatacaagattggcacaaatttactgttgaagttggtaataattttattgaatcttattttccta

SEQ ID NO: 218537 - DNA, 558 bp, Unknown
  Bacterial polypeptide expressing nucleotide sequence isolated from the Sargasso Sea
gtaatttttgggcatctggaatctcaattgttattcatatgagaaatccttttgtgccagcaatgcattttaacactagatatatttatacatctcacggttggtttggaggtggcatagatgtaactccatgttttaaagatgaaaaattgagaaggtggtttcataaaagccttaaaaaaatgtgtgatagacataataaaaagtattataaaaattatagtcagtggtgtgataagtatttttatttaccacatagaagagaaaccaggggtataggtggaatattttttgattataagaaaaataaatgggaaaaagattttcattttattaaagatgtaggattagaatttataaaaatatttaatgaaataattgagaaaaaaaataaaaacaaatggtcaataaaagaaaaagaaaatcaatatataaaaagaggtagatatgttgaatttaatcttctatatgatagaggaacaaaattcggtttacaaactggtggcaatatcgatgcaatattaatgtctatgccgccattagcaaaatggaagtaga

SEQ ID NO: 218538 - DNA, 829 bp, Unknown
  Bacterial polypeptide expressing nucleotide sequence isolated from the Sargasso Sea
atggaaactgatattaaaaaaaaattggcaagaaattggtttaaggttcttcaagacatgatttgttttgaaattgaagaaattgaaaaaaataaaaaaaaatttacttcaagtcactggaaaagaagcaaaaagaaagatgaaggaggtggagaatatagaattcttgaaaatggaaaagtatttgaaaaagttggagtaaatttttctgaagttagtggtaaattttctaaagagtttagaaaaaaaataccaggtacaaattctaatccaaatttttgggcttcaggtatatcaattgtaatgcatatgaaaaatcctcatgttcctgctatgcattttaacacaaggtatattcatacttcgtttggatggtttggtggtggaatggatgtaacgcccagttttgaggataaaaaaataaaaaattggttccacaaagaacttaagctaacatgtgatagacataataaaaaattttataaaaaatataaaaaaaattgtgatgagtatttttatcttcctcatcgtgaagaaacaagaggaattggtggaatattttttgattataaaaaagaaaactgggaaaaagattttagctttgtaagagacgttgggcttacatttaaaagaatttttagagaaattataaacaaaaaaaataataaaaaatggaataataaagaaaaagaaattcaatacttcaaaagaggtaggtatgttgaattcaatttactttatgatagaggaacaaggtttggtttacaaacaggtggaaatacaaatgcaattttaatgtctcttccgcccgtcgcaaaatggaaataaa

SEQ ID NO: 218539 - DNA, 355 bp, Unknown
  Bacterial polypeptide expressing nucleotide sequence isolated from the Sargasso Sea
aattattataaaaaatataaaaagtggtgtgatgaatatttttatctacctcatagaaaagaaccccgtggaataggtggtatttttttcgattataaaaaaaataattttgaaaaaaattttaaatttgtcagagatgttggcattacctttgagaccatttttcaaaaaattataaataaaaaaattaaaaaaaaatggacttctaaagataaagaaaatcaatatattaaaagaggtagatatgcagaattcaatttactatatgacaggggtacaaaatttggattacaaacaggtggtaatgttgagggaatattaatgtcattacctcctcatgcaaaatggaaataat

SEQ ID NO: 218540 - DNA, 394 bp, Unknown
  Bacterial polypeptide expressing nucleotide sequence isolated from the Sargasso Sea
tcataatgaattaaaattaacttgcaacaaacacgacaaatcattttataaaaaatatagcaaatggtgtgataaatatttttttttacctcatagaaaagagtcgagaggtataggaggaatattttttgattataaaaaagctaattgggaaaaagattttgcatttgtaatggatataggcttaacatttaaaagattgtttagagaaacaattgaaaaaaaaagtaaaaaaaaatggtctttaaaagataaagaaatacaatatttaaaaagaggaagatatgttgagtttaatctgcttcatgatagaggaacaaagtttggattacagacaggcggaaatgttgaagcaatatttatgtctcttcctcctttggcaaaatggaaataa

SEQ ID NO: 218541 - DNA, 579 bp, Unknown
  Bacterial polypeptide expressing nucleotide sequence isolated from the Sargasso Sea
tgccaggaactgaaaatgatccttcttatcaggctaccagtataagtgtagttcttcatcctcattccccttttataccttccatgcattttaacactcgatttttaaaaacagaacaagaatggtttggaggaggaatagatattaccccgtgcctaccttttaaagatgaagaacaatatcattcatctttaaaatctttatgtgataaatttgataaaaattattataaaaaatttaaaagttggtgtgatgaatatttttatttaacttacagaaaagagccaagaggtataggaggaattttttttgattatttgaagtcagatgattggggcaaggattttgaatttgttcaaaatgtgggaaatttttttaatgatttttcttccaaaactattttaaaatataaagatttcaattggagtgatgaagaaaaaaatatacaacttctaaaacgaagtaaatatgtagaatttaatttattgcatgatagaggaacaaaatttggtttagagactggaggaaatattgatgcaattcttatgtccatgcctcctttagcgaaatgggattgat

SEQ ID NO: 218542 - DNA, 380 bp, Unknown
  Bacterial polypeptide expressing nucleotide sequence isolated from the Sargasso Sea
aaaaaaagtttgcacagagaataaaaaagactataaaaaatataaaaagtggtgtgataaatatttttatttaccgcatcggaaagaagcgagaggcattgggggtatattttttgattatgaaaaaaaagattggattaaaaattttaaatttattagagaacttggttttgcgttcattgatatttctaaaaagattataaatagaaaaaaaaatttaaggtggaccaaaaaagataaagaaaaacaattattaaaaagaggaagatatgtagaatttaatcttctctatgataggggtacaaaatttggtttaaattctggaggaaatattgactcgattttaatgtcgcttcccccacaagctaaatggaaataat

SEQ ID NO: 218543 - DNA, 829 bp, Unknown
  Bacterial polypeptide expressing nucleotide sequence isolated from the Sargasso Sea
atggataaagaaattaaaaaagatctagctagtaattggtttaaattacttcaaaatgcaatatgtgatgacatcataaagttagaaaataataaaatcaattttcaatcaacaacatggaaaagaagtaaaagtaaagatgaaggtggtggtgaatatagaattttaaaagatggtaaaatttttgaaaaagttggtgttaacttttcaaaagttaatggaaaatttccaaaaaaatttcaaaaaaatattctaggagctagtaaggatcctcggttctgggcttcaggaatttcaatagtgatgcacatgcaaaatccacatattccagctatgcattttaacactagatatatttgcacaacacaaaattggtttggtggaggaatggatgttactcctgcaatcaaagataatcaggaaaaaagtaaatttcataaaactttaaaaacaatgtgcgatcgacataataaaaaatattataaaaaatacaaaaaatggtgtgatgaatatttttacttaccacatagaaaagaagcaaggggaattggtggtatcttttttgattataaaaagaatgattttgaaaatgattttaaatttgtaagagatgttggtgttacatttcaaatgttatttaactcgattattaaaaaaaagataaaaaaaaaatggacttttaaagataaagagatgcaatatgtaaaaagaggacgatacgcagagtttaatttattgtatgatagaggaacaaaatttggtctacaaactggcggtaatgttgaaggaattttaatgtcgttaccaccaattgtaaaatggaaataaa

SEQ ID NO: 218544 - DNA, 424 bp, Unknown
  Bacterial polypeptide expressing nucleotide sequence isolated from the Sargasso Sea
ataaaagatgaaacagagaagaaaagctttcataaaatattaaaatcaatgtgcgatagacataataagaattattataaaaaatataaaaagtggtgtgatgaatacttttatttacctcacagaaaagaggcaagaggtataggtggaatattttttgattataaaaatgataattttgaaaatgactttaaatttgtcagagatgttggtgttacatttcaaatgctatttaatgaaataattaaaaaaaaaataaaaagaaaatggactttaaaagataaagagtttcagtatattaaaagaggtcgatacgcagaatttaatttactctatgatagaggaacaaaatttgggctacaaactggtggtaatattgaaggaattttaatgtcattacctccgattgcaaaatggaaataaa

SEQ ID NO: 218545 - DNA, 892 bp, Unknown
  Bacterial polypeptide expressing nucleotide sequence isolated from the Sargasso Sea
actggaagatacttttaaaaagattcaagaaaatattcttgtaaaatttgaagaatttgaggagactttttcaagtaataagtcggtagatgcctgggtaagaaaagagggcggaggtggaaagacagctgtcattgccaatgggaatttttttgataattgtgcagtaaatttctcatccattgttgggaagaatcttcctgaggctgcacttaaaaacaaaaacaaactagcaaatggtaaattttctgccatgggagtatcagtaatttcacatcctaaaaatcctcatgttcccactagccatatgaatgttcgccttttttgtttatttgatagcaataacaaaataaaagactggtggattgggggaggttatgatttaacaccctacctcccatacaatgatgatattaaaaattggcataaagaagctaaaaatttcttagatacttttgatacaacatattacaaaaacttttctaaagaatgtaatgattatttctatatcccacacagaaaagaaagaagaggagtcggtggcattttttttgataatattaaatatcgatcaatagaaaatagcttaatttttttagaaaatgtagctaaacagtatttagattcttatattcagatagcaacaaaaagaaaagaaactaaatacacaaagatggaaaaggagtttcagctaattcgcagaggtagatatgtggagtttaatcttgtatacgatagaggaacagcttttgggcttcaatcagatggaagaatagaatctattttggcttcactacccgcagaagtaaaatggtcttataaaaaagatgatgagtataaagctttagagaaaaagctacttaaatatattaataaagattggaatgtctaa

SEQ ID NO: 218546 - DNA, 874 bp, Unknown
  Bacterial polypeptide expressing nucleotide sequence isolated from the Sargasso Sea
ctgcacaaaaacttatattcaaagattagcccttatgaggattctaatttttttattgaagacgaatggaaaaaagagaaccttggtagtggcacatctattgttattgatcaaggaagtttttttgataaagcaggcataaacttttctaaaatatcaggagactctcttccagcatcttcagttggaagtatggacaattcaacagagatgcctttttttgctactggtgtttcagtagtttttcatccgaaaaacccaaacataccgacagcacacttaaatgtacgatatttctgcacatttaaagatgggcaaattcttgaagagtggtttggaggaggttttgacctaaccccatatattttatttgaagaggattgtgccaattggcataaatcggcaaaaaaagcatgtgattccatcaatgaaaatctatatatagacttcaaaaaaaattgtgatgaatacttctttattaaacatagaaaagagcatagaggaatagggggcatattctacgagaagcataaagcagacactctagatcatgggcttaaattgtctgagaatgtttgcgaagcatttactaattcctatatcgagataataaataaacgaaaagacttagactttgaagagagagataaagaatttcaaaaatttagaagaggccgttacgtagaatttaatcttgtttatgacagaggaacattgtttggcttacagacaggcggaagaattgaatcaatattaatgtcattgcctaatgatgtggcatggagatataaatttgatgaaaatcttacagaaaaagaaaaaaatctctataagtttataaagagccctaaggattggatagatgactcataga

SEQ ID NO: 218547 - DNA, 808 bp, Unknown
  Bacterial polypeptide expressing nucleotide sequence isolated from the Sargasso Sea
aatgaatgataaccaacgaatggcaaaggagtggttctttacattaaggaacaacctggtcgatgctctggaaaaaatagatggaaataagttttactttaaggattgggaacactctggatctgggggtggcaccatgggcagtattagaggaaaaattgtagaaaaaggtggtgtcaatatatccacggtatctggtcagtttacagaagaaatgagacagagaattccgggtgcgaaaaaggatcctcaatactgggcaactgggatcagtgttgtaatccacccgacctccccccttataccatccatgcattttaattctcgctttctaaaaacctctaaaacatggttcggaggcggtatagatataacgccagctatcccatttaaaaaagagacagagcacttccactccattttgaataaagcctgttcgaagcatagtaaaacatattacgacgaacataaaaaatggtgtgatgagtattttttcttaaaacacagaaatgaagcacgtggtgtaggtggtattttctttgactatttagatagtggaaatattattaatgatctagaatatgtaaaagaagtaggaaaatttttccttcattatatcaactatattttcgataaatacgcagacaaagagtggacaacagagcaaaagcatatgcaattaaagaaaagaggtcgctatgtggagttcaatctcctttatgatagaggaactaaattcggacttgaaacaggtggtaacacagaggcaattcttatgtccatgcctccgcacgcatcatgggactag

SEQ ID NO: 218548 - DNA, 874 bp, Unknown
  Bacterial polypeptide expressing nucleotide sequence isolated from the Sargasso Sea
gttgcacaaaaacttacattcaaagattaggccttatgaggattctaatttttttattgaagacgaatggaaaaaagagaatcttggcagtggcacatctattgttgttgatcagggaaacttttttgataaagcagggataaacttttccaaaatatcaggagactctcttccagcatcttcagtcggaagtatggataattcaacagagatgcctttttttgctactggtgtttcagtagtctttcatccgaagaacccaaacataccgacagcacacttaaatgtacgatatttctgcacattcaaagatggacaaatttttgaagagtggtttggagggggttttgatctaactccatatattttgtttgaagaggattgcgctaattggcataaatccgcaaaaaaagcatgtgattctattaatgaaaatttatatacagacttcaaaaaaaattgtgatgaatatttctttattaaacatagaaaagagcatagaggaataggaggcatattctacgagaagcataaagcagaaactttagaccatggacttaaattatctcagaatgtttgtgaagcattcactaactcctatatcgaaataataaacaaacgaaaagatttaggctttgaagaaagagataaagaatttcaaaaatttagaagaggccgctacgtagaatttaatcttgtttatgacagaggaacattgtttggcctacagacaggcggaagaattgaatcaatattaatgtcattgcctaatgatgtggcatggagatataaatttgatgaaagtcttacagaaaaagaaagaaatctctataagcttataaagaaccctaaggattggatagatggctcatag

SEQ ID NO: 218549 - DNA, 826 bp, Unknown
  Bacterial polypeptide expressing nucleotide sequence isolated from the Sargasso Sea
aatggaagaaaatataaaaaaaaaattgactaaaaattggtttaagattcttcaagatatgatttgtagtgaaattgaagaattagaaaataaacctaaatttaaattaacaaattggcaaagaaataaatcaaaagatgaaggcgggggagaatatagaattttagaaaacggaaaaatttttgaaaaagttggagtaaatttctcagaggtatatggaaaattttcagagaaatttaaagacaggataccaggaactaaaaatgatccaagtttttgggcctctggtatttcagttgtaatgcatatgaaaaatcctcatattcctgctatgcattttaatacaaggtatatacatacatcttatggatggtttggagggggaatggatgttactccttgttttgaagacaaaaaattaaaaaagtggtttcacaatgaactaaaaaaaacatgtgatagtcataataaaaaattttataaaaaatataaaaagcaatgtgatgaatacttttatcttcctcatagaggagaaactagggggattggaggaatattttttgactataaaaaagaaaattgggagaaagattttaagtttgtgagagatgtggggctaacttttaaacaagtttttaaagatattattatgaaaaaaaataaaaaaaaatggacaaaaaaacaaaaagaagttcaatacttaaaaagaggaagatatattgaatttaacttgctatacgatagaggaactaaatttggattacaaactggaggcaatacagatgcaattttaatgtcacttccccctattgcgaaatggaaataa

SEQ ID NO: 218550 - DNA, 718 bp, Unknown
  Bacterial polypeptide expressing nucleotide sequence isolated from the Sargasso Sea
aaaacatggtatagaaatccaattaagaatgagggtggaggcgaatatagaattttagaaaaaggtaaagtgttcgataaagttggagtaaatttttctgaggtttatggtactttctcaaaagaatttagaaaaaatattccgggggcaaacaaaaaagggaaattttgggcgtcaggagtttcggttgtaatgcatatgaaaaatcctcatataccagcaatgcatttcaatacaagatacatatataccagttttggatggttcgggggcgggatagatattactccatgctttaatgataagcaaaatacaaaatggtttcataaagaattggaaaaaatgtgcaataaacataataaaaattattatataaagtataagaaatggtgtgataattacttttatctacctcacaggaaagaaccgagaggtgtcggaggtattttttttgattataaaaaaacaaattttgataaagacttttcttttgtaagagatgttggtttagcatttaaaaaaattttcaatgaaataattaatattaaaagaaaaaaaaaatggacttcgaaacaaaaggatgttcagtacttaaagagaggaagatatgttgaatttaatttattacatgatagaggaacaaaatttggtctaaaaacaggtggaaatgttgatgctatactaatgtcattacctccggttgctaagtggaaatagt

SEQ ID NO: 218551 - DNA, 792 bp, Unknown
  Bacterial polypeptide expressing nucleotide sequence isolated from the Sargasso Sea
aatggatattgaattaaaaaaaaaattggcaagaaattggtttaatatacttcaagatatgatttgtaatgaaattgaagaattagaaggtaagactaaatttaaaccaaaaaattggcaaagaaacaaaaaaaaggatgaaggtggtggagaatatagaattttagaaaatggaaaaatttttgataaagttggagttaatttttctgaagtatatggaaaattttctgagaaatttaaaaatagaataccagggactaaaaaagactcgagtttttgggcttcaggtatttcagttgtaatgcatatgaaaaatcctcatgttcctgccatgcattttaatactagatacatatatacatcttatggatggtttggcggaggaatggatgttactccttgtttagatgacaaaaatctaaaaaattggtttcacaaagaattaaaaaaaatatgtgattatcataataaaaaatattataaaaagtataaaaaacaatgtgatgaatatttttatcttccccacagaaaagaaactagagggattggaggtatattttttgattataaaaaagaaaactgggaaaaagattttaattttgtaagagatgttggattaacattcaaaagtatttttagagaaattataactaaaaaaaataaaaaaaaatggacaaaaaagcaaaaagaaattcaatatttaaaaagaggtagatatattgaattcaatcttctttacgatagaggaacaaagtttggtttgcaaactggtgggaaatacaaatgcaattt

SEQ ID NO: 218552 - DNA, 628 bp, Unknown
  Bacterial polypeptide expressing nucleotide sequence isolated from the Sargasso Sea
atggataaagatataaaaaagaaattaacaaggaattggtttataaacctgcaagaaatgatttgtaatacaatacagcaaattgaaggtggaaaaataaaatttttaaagaagagttgggaaagaagtataaaaaaggatgaaggaggtggctgttattatattcttgaaaatggcaaagtatttgacaaagttggtgtcaatttttcagaagtttatggaaaactgactaaagaatttaaaaaaaaaattcctggtacaaaaaataacagagatttttgggcatctggcgtatccgtggtaatgcacatgaaaaatcctcatgtaccagctatgcattttaataccagatatatctatacaaatcatggctggtttggaggagggatggatgttactccatgctttaatgattcagctattaaaaaactattatttaaaaaattaaaaaaaatatgcgataagcatgacaaaaaatattttaaaaaatataaaaaatggtgtgatgaatatttttatttatcacaccgaaaagagccaagaggaattggtggaattttttttgattataaaaaaaaagattgggaaaaagattttggatttataagagatttaggaataaatttat

SEQ ID NO: 218553 - DNA, 307 bp, Unknown
  Bacterial polypeptide expressing nucleotide sequence isolated from the Sargasso Sea
tttgccacataggaaagagccaaggggtattggcgggattttttttgattataaaaaaaataattgggaaaaagatttttcttttgttagagaagtgggaataagttttaaaaacatttctaatgaaataattgagaaaaaaaataaattaaaatggacaattaaagataaagaaatccaatacaaaaaaagaggtagatatgttgaatttaatttattacatgatagggggacaaaatttggtttacaaactggtggaaatgttgaagctatacttatgtcattaccaccaacagctaaatggtaa

SEQ ID NO: 218554 - DNA, 520 bp, Unknown
  Bacterial polypeptide expressing nucleotide sequence isolated from the Sargasso Sea
cctgtttcacctaaaattccttctatgcattttaatacaagatttattaaaactactcagggaatggtttggtggaggcatggatattacaccttgtgtaatatttgaggatgagaaaaaatatcatcgtggtttagaacttttatgtaataaatatgataaatcatattatcctaaatttaaaaaatggtgtgatgactatttttttctaaaacatagaaacgaaccaagaggtgttggaggaatattttttgattaccttcaaactggtgattggggaaaagattttgaatttgtccaaggcgtaggtacttattttcatcagtttatcaaaaatactttaattgcacttaaggatgagaagtggaatgaagaggaaaaaaagatacaattagttaagcgtagtcgctatgctgaatttaacttattatatgatagaggtacaaaatttggtctagagactggcgggaatgttgatgctatattaatgtcaatgcctcctcacgcggtatgggaataa

SEQ ID NO: 218555 - DNA, 829 bp, Unknown
  Bacterial polypeptide expressing nucleotide sequence isolated from the Sargasso Sea
atggatttagatattaaaaaagatttagtaagtagttggtttaaattattacaagattcattttgtaaagatataaaaaaattagaaaataataaaattaaatttcattcaacttcttggtcaagaaatacaaaaaaaaatgaaggtggtggtgagtatcgtattttaagaaatggaaaagtttttgaaaaagttggtattaatttttcaaaagtatatggaagattttcaaaaaaatttcaaaataatattcctggtgctaaaaaagatcctagattttgggcttcaggaatttctgtagtaatgcatatgaaaaaccctttaattcctgcaatgcattttaatacaagatatatttgcacttctcaccaatggtttggtggaggaatagatattactccttcaaaaaaagataattttgaaaaaaaatattttcatcaaaatcttaaaatgatgtgtgatagaaataataaggattattataaaaaatataaaaaatggtgcgatgaatatttttatttgcctcatcgaaatgaaacaagaggcattggtggaattttctttgactataaaaaaaataattttaaaaaagattttaaatttgttagagatgtgggaattacttttcaaatgttgtttaatcaaattataaaaaggaaaataaaaaaaagatggaacatgaaagataaggaaactcaatatattaaaagaggtagatactcagaatttaatcttctttatgatagaggaacaaaatttggattacaaacaggtggaaatgttgaaggaatattaatgtcacttccaccattagcaaaatggaaataaa

SEQ ID NO: 218556 - DNA, 853 bp, Unknown
  Bacterial polypeptide expressing nucleotide sequence isolated from the Sargasso Sea
tatggaaataagtcaggaaatagaaaaaaaactagtaagtcaatggtttgcctttttacaacgtaaaatattagaagaatttcaaaatcttgaaatagaattttctaaaaaaaaaagattaaaagtaaaatattttagaaaaaatatttggagaaaagataacccccaagatggcgggggacaatattatattttaaaaaatggtcaaatttttgatcaggttggaattaatcattctacggtccagggtaaatttcagaagaattataaatctaatattcctggaactaaaaaaaatcaatcctattgggcgtcaggtatatcggttgtagcacatatgaaaaatcccaatatcccagctattcattttaacacaagatttgttattacatctaaaagatggttcggcggaggtatggatgttacgccaagcaataaagattttaatgagaagaaatttgttcacgaaaatcttaaattcgtgtgtgataacaataaaaaaaattacaaaaattacaaaaaatggtgtgatgattatttttacataaaacatctgggggaaactaggggaattgggggaattttttttgattacctttacaaagattgggaaaaaaattttaaatttataagagatgtaggaatttcttttattgagataactaaaacaattgtagaaaagaaaaaattcttaagatggactgaaaaacaaaaaggtgatcaactaattaaaagaggtaagtatgtggaatttaatttactttatgacagaggaactaagtttggattaaataccggtggtaatattgatgcaatatttatgtcattaccacctaatgcgagatggaaataa

SEQ ID NO: 218557 - DNA, 736 bp, Unknown
  Bacterial polypeptide expressing nucleotide sequence isolated from the Sargasso Sea
ttggcttcaaattggtttcgagacttaagagataccttttgctcttcatttgaatcaattgagggtaataaatatagctttgaaagaaaatcatggcctcatagacactccggtggtggcgaaatgagtatcatgaaaggcgaggtgtttgaaaaagttggagtaaacatttcaactgtctcaggtaagtttcaagaagattttagaggacaaataaagggcacagaacaatctccagaatattttgcaactggaataagcctagttgcgcacatgaattcaccaaaaattcctgcatttcatttcaatacaagatttcttgttacaggagaatcttggtttggaggtggggcagacttaactccaaccctgtccgataaagaggcagttgatctattccataatcatatgaaagatgcttgtagcgactataaaaaggatgcctatgaggaatacaaaaaaaattgtgatgaatatttttacttgggccatagagaagaacctagaggagctggagggattttctttgatcacattaattcaaatgactgggaaagagactttgattttataaaacaagtcggcaaatctactaatcaagttattacacaaattgtagaaagtaaaaaagaccattcttggactgaagaggagaaaaatttacaacttataaaaagaggaagatacgttgaatttaatttaatctgggacaggggaactttatttggattaaaaa

SEQ ID NO: 218558 - DNA, 829 bp, Unknown
  Bacterial polypeptide expressing nucleotide sequence isolated from the Sargasso Sea
atgaataaagaaataaaaaaaaaaattgctagaaattggtttaaattacttcaaaatgtcatttgttttgaaattgagaaacttgaaaaatcctctgccaaattcgtttgtaaaaaatgggaaaaaaataaaaaaaagaatgaaggcggtggtgaatgcaggattcttcaaaatggtaaaatatttgaaaaagtcggtgtaaatttttctgaagtaagtggtaaattttcaaaagatataaaaaagaaaataccgggagcaggtaaaaaaggaacattttgggcttcgggaatatcagttgtaatgcatatgaaaaatccaaacataccagcaatgcatttcaacactagatatatttatacatcatatggatggtttggtggaggaatggattttacgccttgcgtaaaagacctaggtgaaaaaaagtggcttcatagtatgctcaaaaaaacatgcaatttacataataaaaattactaccctaaatataaaaagtggtgtgataaatatttttatctaccacatagaaaagaaatgagaggtattggtggaattttttttgattataaaaaaaaaaactgggaaaaagattttgcttttgtaagagatgttggaatatcttttaaagatattttcaaaacaataatattaaaaaaatataaaaaaaaatggaattcaaaacaaaaagaattacaatatttgaaaaggggaagatatgttgaatttaatttaatatatgatagaggcacaaagtttggattacaaacaggtggtaatgttgatgcgattttaatgtcgcttccaccaatagcaaaatggaaataat

SEQ ID NO: 218559 - DNA, 619 bp, Unknown
  Bacterial polypeptide expressing nucleotide sequence isolated from the Sargasso Sea
aatggatagttttctaaaaaaaaaattagcaagaaactggtttaaaattcttcaagatatgatttgttttgaaattgaagaaattgaaaaaaataaaataaaatttatatcaacacattggaatagaagtaaaaaaaaagatgaaggtggaggtgagtataggattttaaaaaatggaaaaatttttgaaaaagttggtgtaaatttttctgaagtctatggaaaattatcaaatgaattaaaaaaaaaaatacctggggcaaatttaaatactaatttttgggcctcaggtatatcaattgtaatgcatatgaaaaacccacatgttccagcgatgcattttaatactagatatatttatacttcttttggatggtttggaggaggcatggatgtaactccttgttttaatgatgaaaaattaaaaaattggtttcataaagaactaaaatttacatgtgataaacatgataaaaaatattataaaaaatataaagaaaaatgtgatgagtatttttatcttcctcatagaaaagaaactaggggtattggtggaatattttttgattataaaaaggataactgggaaaaagatttcagttttgtcagagatgtagga

SEQ ID NO: 218560 - DNA, 492 bp, Unknown
  Bacterial polypeptide expressing nucleotide sequence isolated from the Sargasso Sea
taacgccatactttccattccaagacgatataaatctgtggcactccaatgctagaaaaatgtgcgataagcatgataagagttattataaaaagttcaaaaaacaatgtgatgaatatttttatttacctcacagaaatgaaaggagaggtgtaggtggaatatttttcgataatcttaataaccttagtaaggaaaaacattgtaattttattattgatgtccttgatagctacattaactcatatatccaaataattaccaaacgatataaaagtagatttacgaaatcacaaaaagattttcaactttatagacgaggcagatacgtggagtttaatctgctttatgatagaggaacaacatttggcttgcaatcaggaggacgtgcagagtcaatactaatgtcgctacctccaaacgtaaagtggagtgcaagcaaatctaaacaattcaaatcttatgaaaaaaatttattgaaatatctctaag

SEQ ID NO: 218561 - DNA, 678 bp, Unknown
  Bacterial polypeptide expressing nucleotide sequence isolated from the Sargasso Sea
tatgattgctgatcccaaatttaatactgcaaaagaatggtttgaaaaattacgagataacttagttgaaactattcaaaacattgatgaaaatcaatttgaaataagtaactgggatcacaaaggtgatggtggtggtaaaatgagtaaaattaagggtaatattattgaaaaaggtggagtaaatatttctaccgtctctgggacatttaacgaaaatatgagagatgctattccgggtgctaaagaagatccaaattataatgcaaccggcatcagtgttgtattacatcctgtttcacctaaaattccttctatgcattttaatacaagatttattaaaactactcaggaatggtttggtggaggcatggatattacaccttgtgtaatatttgaggatgagaaaaaatatcatcgtggtttagaagttttgtgtaataagtatgataaatcatattatcctaaatttaaaaaatggtgtgatgactatttttttcttaaacatagaaacgaaccaagaggtgttggaggaatattttttgattaccttcaaactggcgattggggaaaagattttgaatttgtccaaggcgtaggtacttattttcatcagtttatcaaaaatactttaattgcacttaaggatgagaactggaatgaagaggaaaaaaagat

SEQ ID NO: 218562 - DNA, 578 bp, Unknown
  Bacterial polypeptide expressing nucleotide sequence isolated from the Sargasso Sea
accaggtgcatataaaaatccaaaattttgggcttcaggaatttcagttgtaatgcatatgaaaaatcctcatgttccagcaatgcattttaatacaagatatatttatacatctcatggatggtttggaggaggtatggatgttaccccatgtataaaagatgaaaaattaaataagtggtttcattctgagttaaaaaaaacatgtaatagacataataaaaattattataaaaaatataaaaaatggtgcgatgaatatttttatttacctcacagaaaagaagccaggggaattggtggtattttttttgactataaaaaagaaaactgggagaaagatttttcttttgtaagagatgtgggaatatgttttaaaaaagtatttagagaaataatattaaaaaaacatagaatgaaatggacaaataaacaaaaagaaattcaatatgaaaaaagaggaagatatgttgaatttaatttactttacgatagaggaacaaaatttggattacaaactgatggaaatgtcgaagcaatattaatgtcattaccacctgtggctaaatggaaataat

SEQ ID NO: 218563 - DNA, 829 bp, Unknown
  Bacterial polypeptide expressing nucleotide sequence isolated from the Sargasso Sea
ttctcggaagtacagggaaaggaattgcctcaatctataatctctcaaagacccgaagcaaaaggtcatgaatggttcgctacgggaacttctatggttttgcatcctaagaatccctatattcctacagttcatctgaattatcgatatttcgaagctggtcctgtttggtggtttgggggaggtgcagacttaacccctttttatccttatctttctgatgtaaggaattttcataatgaacataaaaaagcttgtgagaaagttgatcaagatttgcataaggttttcaaaccatggtgtgatgaatatttcttcttgaagcatagaaatgaatcgagaggcataggaggtattttttatgattatcaagatggctcaggtaatatatatagaggaaataatcaaaatggagaggcatcaaaagcttcacaaactattgacagatctaatttaaattgggatgatttattttctttagcggaaaactgtgggcaggcattcctcccttcatatttgcctattattgataaaagagcttctcaaacatattcatcgaaggaaagagaattccagctatatcgaagaggtagatatgtcgaattcaatttagtttgggatagagggacaatttttggactacaaacaaatggcagaactgaatctatattaatgtccttaccgcctttagctagatgggaatatggatataaagctagaaagaattctcgagaggaatttctcacatcaatttttacaaaaccccaagattggttaaacgataaagagttagagaaattctgtatagagaataatatttttgattaaa

SEQ ID NO: 218564 - DNA, 799 bp, Unknown
  Bacterial polypeptide expressing nucleotide sequence isolated from the Sargasso Sea
atgtttgaaaatgcaaagacatggttcgaggatttacgagataggcttgttgaaaagattcaatcctatgaatcacaagcatttgttgaaaaaaaatggtctcatcatgaaaaaggtggcggtctcatgaccaagattaatggaaatatcattgagaaaggaggtataaatatttcaactgtatcaggaaaatttaacgagaagatgcaagggaggattttaggcgcaaaagacgatccctcgttttcagcaacaggcattagcgttgtgcttcatccgcgatcaccacacatcccctcaatgcactttaatacacgctttctttctacaacaaaaacttggtttggtggaggtatggatttaacgccttgtttgaattttgaaaacgagaccaaagattttcacaaaaaacttaaaattatatgcgataaatttgacataaattgttatgagaaatataaaaaatggtgcgatgattatttttttttgaagcaccgcaatgagcccagaggcgttggtggtatcttttttgatcacgtttttacttctacacctgaaaatgattttgaatttgtaaaaaatgttggtcagtttttccttgagcattcttgcaatctcattgacaagtttaaagacgaaacctggactgatcaccaaaaggaaattcaacttattaaaagagggcgatatgttgaattcaatttgctctacgatagaggaacaaaatttggtcttgaaaccggtggaaacactgaagcaattttaatgtcaatgccaccccaagcgtattggaagtaaa

SEQ ID NO: 218565 - DNA, 427 bp, Unknown
  Bacterial polypeptide expressing nucleotide sequence isolated from the Sargasso Sea
atgttgaaagaacctcctaaaaactcgagagaaaaaactaaaaatctcttattaactctacaagacaaaatttgttcaggacttgaaaatgtagatggcaaaggaaaatttacagaagaatcctggctaagagacgaaggtggcggtggaagatcaagagtattgaaaaatggttctatttttgagcaagcaggcgtaaatttctcggaagtacagggaaaagaattacctcaatctataatctctcaaaggcccgaagcaaaaggtcatgaatggtttgctacgggaacttctatggtgttgcatcctaagaatccctatattcctacagttcatctgaattatcgatatttcgaagctggtcctgtttggtggtttggaggaggtgcagacttaacacctttttatccttatctttctgagtgag

SEQ ID NO: 218566 - DNA, 943 bp, Unknown
  Bacterial polypeptide expressing nucleotide sequence isolated from the Sargasso Sea
gttgtcttgggctggcttcgcctgtttaggttcagcgatcgattggtctggcttcatggttcgctccctggttcgacgcctgcttggccgcccgcagggccatggacctgcactggagctgccacccgaggattcacgggcccgcgctcgggcgatggtgatggggttgcaggacgagatctgcgctggtctcgagtctctcgatggggaagggagattcgttgaagaaagttgggagcggcctgagggtggtggtggccggtccagggtgatgcgtgagggccgggtcttcgagcagggcggcgtcaacttctcggaagtgcagggccaggagctgccaccgtcgatcctcaagcagcgccctgaggccaaggggcatccctggttcgccaccggcacctcgatggtgctgcatccgcgcaatccatacatccccacggttcacctcaactaccgctatttcgaggccggcccggtgtggtggttcggcggtggggctgatctcacgccctactacccctttctggaggatgcccgccactttcatcgcacccatcaggcggcctgcgattcggtgcatccagacctgcacaaggtgttcaagccctggtgcgatgagtacttcttcctgaagcaccgtggagagacccggggcgtcggtggaatcttctacgactatcaggattccagcggtgtgctctacaaggggcaggacccctcaggtccagccgccggggtgtcggcacagctgggggcgcgccccctgggctgggaacagctgttcgccctcggtcaggccaacggccgggctttcctgccgtcctatgcgccgatcgtggagaagcgtcatcccatggcctacggcgatcgcgagcgtcagttccagctctatcgccgcggccgttacgtggagttcaacctggtctgggaccgaggcacgatc

SEQ ID NO: 218567 - DNA, 413 bp, Unknown
  Bacterial polypeptide expressing nucleotide sequence isolated from the Sargasso Sea
aaattgtgatgattatttttacttgcctcatagaaaggaaaaaaggggcatcggaggtatattttttgaccagcttaagcataaaactatagaagatagcttagatttattaaatgcagttgctaattgctatattgagagttatctagatatcgtcaatataaataaggataaaaaatttacagcagatgacagagagtttcaactatacagaagaggaagatatgttgagtttaatttgttatttgacagaggtacaaaatttggaatagagtcgaatggaagaactgattccatacttgcatcaatgcccccagctgtaaattggccgtttcgactttctaaaaacattattagaaatgaaaagaaacttttaagatttataaataaaaattggaatcaacacatataga

SEQ ID NO: 218568 - DNA, 655 bp, Unknown
  Bacterial polypeptide expressing nucleotide sequence isolated from the Sargasso Sea
tggaaaaatttttgaaaaagtaggagtaaatttttctgaagttcatggaaaattttcaaaagaatttagaaaaagaataccaggaggagaaaaaaatccaaaattttgggcatcaggtatatcaatagtaatgcatatgcaaaaccctcatgttcctgctatgcattttaatactagatatatttatacctcatacggatggtttggtggaggtatggatgttacaccttgttttaaagataacagtttagaaaaatggtttcataaagaactaaaagtttcatgtgataaatataataaaaacttttacaaaaaatataaaaaatggtgtgatgaatatttttacttacctcatagaaaagagccaagaggaataggaggtatttttttcgattataaaaaagataattgggaaaaggattttagttttgtcagagaagttggtataagctttaaaaatatatttagagagataatattaaaaaaatataaaaaaaaatggtcaaataaacaaaaagaaattcaattggaaaaaagaggtcgatacgttgaatttaacttactttatgatagaggcaccaaatttggtttacaaactaatggtaatgttgaggctatattaatgtcactcccacctattgctaaatggaaataa

SEQ ID NO: 218569 - DNA, 790 bp, Unknown
  Bacterial polypeptide expressing nucleotide sequence isolated from the Sargasso Sea
atggaaaaagaaataattgaagaagcgtttaaggaaattcaagacaatatttgtaatgcattgacaaacgtcgatggtaaatcatttttagaacaaaaatggaaccgacctggtggcggtggtggtagaacaagagttattgaagggaatctcattgagaaaggtggtgtgaacttttcagccgtgaaaggcgaaactcctgacaaaattttgaaagctttaaatcttgataaatcgaacttctacgccactggggtttcaattgttttacatccaaaaaaccctcttgtccccatcattcatatgaatattcgatattttgaaatggataatggaatttggtggttcggcggtggcattgacttaacccctcatttaataaataaggatcaagcttcttatttccacaaacaactcaaagcaacttgcgacaaatttaatcccgatttctatcctaaattcaagaaatgggcagatgattatttctacattcctcatagaaaagagactcgaggagttggcggaattttctttgatagattgaacgagaaaagttcagaactcacaaaaggagaaatatttgaatttataaaggctgtaggtaataccttcgcacctacttatacgactatcttgaataacaataaagagcttgagtattctgaaagtcaaaaagaatggcaattcattagaagaagtaggtacgcagaattcaacctagtttatgacaaaggtaccaaatttggacttgagacagatggtagaattgaatcaatccttatgagcatgc

SEQ ID NO: 218570 - DNA, 644 bp, Unknown
  Bacterial polypeptide expressing nucleotide sequence isolated from the Sargasso Sea
catgacagtccctgacggagtgttgtcttgggctggcatcacctgtttaggttcttcgatcgaatggtctgccttcatggttcgctccctggttcgacgcctgcttggccgcccacagaacaatgggaccgctgcgccggctttggagctgccgccagaggattcccgggcccgggctcgggccatggtgatgggattgcaggatgagatctgcgcaggtctggagtccctcgatggtgaagggacattcgtcgaggagagctgggagcggcctgagggaggcggggggcgatcccgggtgatgcgcgaggggcgtgtcttcgagcagggcggcgtgaacttctcggaagtgcagggccaggagctgccaccctcaatcctcaagcaacgtcctgaggccaagggacatccttggtttgccacgggcacctcgatggtgctgcacccgcgcaatccctacatccccacggttcacctcaattaccgctatttcgaggctggtccggtgtggtggttcggtggtggggcagacctcacgccgtactacccctttctggaggatgcccgtcacttccatcgcacccatcaggcggcctgcgattcggtcgatccagacctgcacaaggtgttcaagccctggtgcg

SEQ ID NO: 218571 - DNA, 578 bp, Unknown
  Bacterial polypeptide expressing nucleotide sequence isolated from the Sargasso Sea
cgccgaaaaagaaggtgaagcaccggtctggtggttcggtggcggttttgatttaacacctttttatccggttgaagcggatgtggtgcattggcatcaggtggcgaaagactgttgcgatgggtttgacgccacttattaccctaaatacaaaaaatggtgcgatgaatacttctacttaaagcaccgcaacgaaacccgtggtgtaggtggtttgttttttgatgatttaaacgaaccgggttttgagcagagttttgcttttatgtctgctgtaggtgaagcctttactaaggcttatctgccaatagtcgaacgtaataaaaacaaggcgttttcggaagcagagcgccagttccagctttatcgccgtggccgttatgtcgagtttaatctggtgtttgaccgaggcactttgtttggtttgcaaagtggtggtcgcactgaatctattttgatgtcgatgccacctttagtacgctggcaatatggttatcagcctgaaacaggttcgccggaagcgcagttgtatcaacgttatttaacgccacaagattggctgggcctgaacggataac

SEQ ID NO: 218572 - DNA, 597 bp, Unknown
  Bacterial polypeptide expressing nucleotide sequence isolated from the Sargasso Sea
aagaatttgcaaaaaaaattctgggagcagaaaataatatgaatttttggtcctcaggtatttctgttgtgcttcatccaaaaagtcctaaaattcctgccatgcatttcaataccaggtttatttgcacaaaaaaaaattggtttggaggtgggatggatgttactccatctttgattgataaaaatgaaaaaaaaaactttcataatattttaaaaaaaatgtgtaatttacataataaaaagtattataaaaaatataaaaaatggtgtgatgaatatttttatttacctcaccgtaaagaaagtcggggtataggtggtattttttttgattataaaatggacaactgggaaaaagattttttatttgttaaagatgtagggtttactttttcatatttaatcgatgatataataagaaaaaaaatgtttttaaaatggacaaaaaaagagaaagaaattcagcaatttaaaagaggaagatatgttgagtttaatttgctatatgatagaggtacaaaatttggattaaatagtggtggaaatcctgaagctatattaatgtctatgccgcctagtgctacttggaaataat

SEQ ID NO: 218573 - DNA, 446 bp, Unknown
  Bacterial polypeptide expressing nucleotide sequence isolated from the Sargasso Sea
ccctaaatacaaaaaatggtgtgatgaatacttctacttaaagcaccgcaacgaaacccgtggtgtaggtggtttgttttttgatgatttaaacgagccaggttttgagcaaagttttgcttttatgtctgctgtaggaaaagccttcactttggcttatctaccaatagtcgaacgtaataaaaacaaggcgtattcggaagcagagcgccagttccagctgtatcgccgtggccgttatgtcgagtttaatctggtatttgaccgaggcactttgtttggtttgcaaagcggtggtcgtaccgaatctattttgatgtcgatgccacctttagtgcgttgggaatatggttatcagcctgaagcaggttcgccggaagctctgttgtatcaacgttatttaatgccacaagattggctgggcctgaacggatcacagctttgaa

SEQ ID NO: 218574 - DNA, 676 bp, Unknown
  Bacterial polypeptide expressing nucleotide sequence isolated from the Sargasso Sea
tcaaaattaaaaattgggaaaagaggaaaaaaatctaatgaaggtggtggccaatttagaatattagaaaatgggaaaatatttgaaaaagtaggagtaaatttttctgaagtttacggaaaattttcaaaacaatttagaaatagaattcctgggggagataaaaatccaaacttttgggcagcaggtatatcagtagtaatgcatatgaaaaaccctcatgttcctgctatgcattttaacactagatatatttatacttctcatggatggttcggtggagggatggatgttactccttgcatgaaagataaaagtttagaaaaatggtttcataatgaattaaagaaatcttgtaataaacataataaaaatttttataaaaaatataaaaaatggtgtgatgaatatttttacttgccgcataggaaagaaccaagaggtatagggggaattttttttgattataaaaaagaaaattgggaaaaagattttagttttgtaagagaagtgggaataagttttaaaaatatttttagagaaattatattaaaaaaatataagaaaaaatggtcaaataaacagagagaaattcaattagaaaaaagaggacgatatgttgaatttaacttactttatgatagaggtacaaagtttggtttacaaacaaacggta

SEQ ID NO: 218575 - DNA, 655 bp, Unknown
  Bacterial polypeptide expressing nucleotide sequence isolated from the Sargasso Sea
aaggaaaaatctttgataaagtttggggtaaataaatctacagtttcaggaatttttccaaaaacttttaggtcaaagatactaggtgcagaaaagaaaggtagatattgggcatcaggagtgtctgttgttgctcacatgagaaatccaaagatgccagcgatacattttaatacaagatttatagttaccactaaagagtggtttggtggaggaatggacgtgactccgagttttaaagataataaagaaaaaaaaatgatacatgaagatttaaaaaaattatgtgttctcaacaaaaaaaattataagaaatataaaaaatggtgcgatgaatatttttttttaccacatagaggagaaacaagaggtataggaggtattttctttgattacgaaactcaagattggattaaaaactttaaatttgtgagagaacttggtctatcttttattgatatttcaaaaaaaattattaagagaaaagaaaaatttaaatggacaaagaaagacaaagaaaaacaattattgaaacgtgggagatatgtagaattcaaccttttatatgatagaggtacaaaatttggattaaactcaggtggaaatattgactcaatactaatgtcacttcctcctgaagcaaaatggaaatagc

SEQ ID NO: 218576 - DNA, 736 bp, Unknown
  Bacterial polypeptide expressing nucleotide sequence isolated from the Sargasso Sea
aaataaactagcaagaaattggtttaaaactttacaagaagttttgtgtaaagagatagaagaattagaaggtagatcaaatttatttagatacaaaaattgggaaagaggaaaaaagtcaagtgaaggcggaggtcaatcaagactttatgaaaatggaaaaatatttgataaagtcggtgtaaatttctcagaagtctatgggaaattttctaaacaatttagaaataaaattcctggtacaagtaaaaattctaaattttgggcatctggaatatctgtagttatgcatatgaagaatccacatgttcctgctatgcactttaacacccgatatatttatacctctcatggatggtttggtggtggcatggatgtaacttcgagtattaaagataaaaagctagaaaaatggtttcattctgaaataaagaaatcctgtgacaaacataataaaaattattataaaaaatataaaaaatggtgcgatgaatatttctatttaccacatcgaaatgagccaagaggtataggtggaattttttttgattataaaaaagacaattgggaaaaagatttttcttttgtaagagaagttgggataagctttacaaatatatttagagaaataatattaaaacagcataaaaaaaaatggacaaaaaaagaaaaagaaattcagtacgaaaaaagaggaagatacgttgaatttaacttgctatatgatagaggaacc

SEQ ID NO: 218577 - DNA, 847 bp, Unknown
  Bacterial polypeptide expressing nucleotide sequence isolated from the Sargasso Sea
gaggaaagttgggtgcggcctgaagggggtggtggccgctccagggtgatgcgtgagggccgcgtctttgaacaaggcggcgtgaatttctcagaggttcaaggggaagaactgcccccatccatcctcaagcagcgtccggaggcgaagggtcatccctggttcgccacaggaacgtcgatggtgctgcatccgcgcaacccctacatcccaacggttcacctcaattatcgctacttcgaagctggcccagtgtggtggtttggagggggcgccgacctgaccccctattaccccttcctggaagatgcacgccattttcatcgcacccatcaggcggcctgtgattcggttcatccggatttgcacaaggtcttcaagccctggtgcgatgagtacttctttttgaagcaccgtggtgagacccgcggcgtcggcggcattttttacgactatcaagatgccaacggcacgctttacaagggacaggacccggcgggcccagccgctcaggtgtctgcacatttgggggccaggccattgagctgggagcaactgttctcgctcggccaggccaacggcagagccttcttgccctcttatgcccccatcgttgagaagcgtcacccgatggtttatggcgaccgcgagagagagttccagctctatcgccgtggcaggtacgtggaattcaacctggtctgggaccgcggcacgattttcggattgcagaccaatgggcgtacggagtcgatcctgatgtctctgcccccgctcgtgcgctgggagtatggctacaccgcagaggccggatcaagggaggccttgctgaccgagctgtcaccaa

SEQ ID NO: 218578 - DNA, 376 bp, Unknown
  Bacterial polypeptide expressing nucleotide sequence isolated from the Sargasso Sea
aaagtatggtgtgcaaaataaaaagaattataaaaaatacaaaaaatggtgtgatgaatatttttatttaccacacagaaaagaagctagaggcattggtggtattttttttgactatgaaactaaagattggattaaaaactttaagtttgtaagagaacttggactttcttttatagatatttcaaaaaaaattataaagagaaaagaaaaatttgaatggacaaataatgataaagaaaaacagttattcaaacggggaaggtatgtagaattcaatctattgtacgatagaggcacaaagtttggattaaactcaggaggaaatattgactcaatattaatgtcacttccgcctgaagcaaggtggaagtag

SEQ ID NO: 218579 - DNA, 601 bp, Unknown
  Bacterial polypeptide expressing nucleotide sequence isolated from the Sargasso Sea
atgttcaaagaacctcctaaaaactcgagagaaaaaactaaaaatctcttattaactattcaagacaaaatttgttcgggccttgaaaatgttgatggtaaaggcaaatttaccgaagaatcatggataagagacgaaggcggtggtggaagatcaagagtattgaaaaacggttctatttttgagcaagcaggcgtaaatttctctgaagtacatggtaaagaattacctcaatcaataatttctcagcggcccgaagcaaaaggtcatgaatggtttgcgacaggaacttctatggttttgcatcctaagaatccttatattcccacagttcatctgaattatcggtatttcgaagctggtcctgtttggtggtttggtggaggtgcagacttaacacctttttacccttatctttctgatgtgagaaattttcataaagagcataaaaaagcttgtgagaaagttgataaagatttgcataaagttttcaaaccatggtgtgatgaatatttcttcttaaaacacagaaatgaatctagaggcataggaggaattttttatgattatcaagatggctcaggcaatatttatagaggta

SEQ ID NO: 218580 - DNA, 688 bp, Unknown
  Bacterial polypeptide expressing nucleotide sequence isolated from the Sargasso Sea
atgttcaaagaacctcctcaaaactcgagagaaaaaactaaaaatctcttattaactctacaagacaaaatttgttcgggtcttgaaaatgttgatggcaaagggaaattcaccgaagaatcctggctaagagacgaaggaggtggtggcagatcaagagtattaaaaaacggttctatttttgagcaggcaggagtaaatttctctgaagtacatgggaaagaattacctcaatcaataatctctcagaggcccgaagcaaaaggtcatgaatggtttgcgacagggacttctatggtattgcatcctaagaatccttatattcctacagttcatctcaattatcgttatttcgaagctggtcctgtttggtggtttggcggaggtgcagacttaacccctttttatccttatctttctgatgtacgacatttccataaagaacataaaaaagcttgtgaaaaggttgataaagatctacataaagtgttcaaaccatggtgtgatgaatatttcttcttgaagcacagagatgaatctagagggataggaggtattttttatgattatcaagatggttcaggcaatatttataaaggaaataatcaaaatggacaggcatcaaaagcttcaaaaaatattggcaaatctaatttaaattgggataatttattttctttagcgaaac

SEQ ID NO: 218581 - DNA, 596 bp, Unknown
  Bacterial polypeptide expressing nucleotide sequence isolated from the Sargasso Sea
gttccggcagcggatacccggcgcggaagatgacgggcgtttctgggcttccggcgtctcgctggtggcccatatgcaaagcccgctggtcccggccgtgcacatgaacacccggcacatcgtgacgagcaagggctggttcggcggcggcgcggacctgacgccgatgtatccggacgatgaggataccgaacagttccacggcgccttcaaggccgcctgcgacgcgcacgatccggactactatccgaagttcaaggcatggtgcgacgagtatttccatctcgagcaccgcgacgagccgcgcggtgtgggaggcatcttctatgattatgtcgacaccggcgattgggaggctgacttcgcgttcacccaggatgtcggcaaatcgttcctgaatgtctatccgcgaatcgttcgccggcacatggaccggtcctgggaagagacccagcgggcgcaccagctgcagcgccggggacgatacgtggaattcaatctcctgtacgaccgtggcacccagttcggcctgaagaccggcggaaacgtggaggcgatcctgatgtcgatgccgccgacggtgacctggccctgag

SEQ ID NO: 218582 - DNA, 750 bp, Unknown
  Bacterial polypeptide expressing nucleotide sequence isolated from the Sargasso Sea
ttgaatatattgaaaaaaataaagtaaaattttctaaaagaatttggagtaaaaataaaaaagatgaaggaggcggaatttcatatttgttaacaaagggaaaaatattcgataaagtaggtgtgaataaatctactgtttcaggaatttttccaaagcaatttagatcaaagattttaggagcagagagaaaaggtcgttattgggcatcaggtatttcggttgttgcacatatgagaaatccaaaaattcctgcaatacattttaatacaagatttatagttacatctaaagaatggtttggtggaggaatggacgccactccaagttatgcggacattaaagaaaaaaaaataatgcacaattttttaaaaaaagtatgtgttcaaaataaaaaaaattacaaaaaatataaaaaatggtgtgatgaatatttttatttaccccatagaggagaaactaggggaataggtggtattttctttgattatgaaactaaagattggattaaaaattttaaatttgtaagagagcttggccttgcatttatcaatatttcaaaaaaaattattaaaagaaaagaaaaatttaaatggacaaaaaaggataaagaaaaacaattatttaaacggggaagatacgttgaattcaatcttttatatgacagaggaacaagatttggtttaaactctggtggcaatattgaatctatattaatgtcacttcctccagaggcgagatggaaataat

SEQ ID NO: 218583 - DNA, 421 bp, Unknown
  Bacterial polypeptide expressing nucleotide sequence isolated from the Sargasso Sea
aatgggagaagcatcaaaagcttcacaaaatattggcagatctaatttaaattgggataatttattttctttagcagaaaactgtgggcaggcattcctcccttcatatttgcccattattgaaaaaagagcttctcaaacatattcaccgagggaaagagaattccagctatatcgaagaggtagatatgtcgaattcaatttagtttgggatagagggacgatttttgggctacaaacaaatggcagaactgaatctatattaatgtccttaccacctttagctagatgggaatatggatataaagctaaaaatggttctcgagaggaatttctcacatcaatatttacaaaatcccaagattggttaaatgataaagagttagaaaaattctgtatagagaataatatttttgattaa

SEQ ID NO: 218584 - DNA, 691 bp, Unknown
  Bacterial polypeptide expressing nucleotide sequence isolated from the Sargasso Sea
tatggatggcggcggcacttatgcaattttaaaaaatggagcagtttttgatagtgttggtgtaaatttttccgaggtttctggaaaatttcataaaaaatttagatcacaaatttttggggctcgagaaaatccaaattactgggcatcaggaatatcagtagtggcacacatgagaaacccaaaaatacctgcaatgcactttaatactagatttattgtaacatcaaaaaattggttcggcggaggtatggatgcaactccaacaataaaagatttgaaagagaaaaaattatttcataagaagataaaaattacatgtgacaagtacagtaaaaaatattaccctaaatataaaaaatggtgtgatgagtatttttatctgcctcacaggggagaaactagaggtattggtggaatattttttgattataaaaaaaataattgggaaaaagattttagttttgtaagggacgtggggctatgttttttagattgtgcaaaaacaattattacaaaaaaaatgaattcaaaatggtcaaaaaaacaaaaaaatcaacaattctataaaaggggaaggtatgtagaatttaacttgttatacgacagaggaacaaaatttggtttaaacacaggtggaaatgttaatgcaattcttatgtcgctacctccagctgcaaaatggaaataa

SEQ ID NO: 218585 - DNA, 750 bp, Unknown
  Bacterial polypeptide expressing nucleotide sequence isolated from the Sargasso Sea
aaattgaaggtggaaaaataaaatttttaaagaagagctggaaaagaagtataaaaaaggatgaaggaggtggctgctattatattcttgaaaatgggaaagtatttgacaaagttggtgtcaacttttcagaagtttacggaaacctgactgaagaatttaaaaagaaaattcctggtacaaaaaataatagagatttttgggcatctggcgtatctgtagtaatgcacatgaaaaatcctcatgtaccagctatgcattttaatactagatatatttatacaaatcacggctggtttggaggagggatggatgttactccatgctttaatgattcaactgttaaaaaactattatttaaaaaattaaaaaaaatatgtgataggcataacaaaaaatattttaaaaaatataaaaaatggtgtgatgaatatttttatttatcacaccgaaaagagccaagaggaattggtggaattttttttgactataaaaaaaaagattgggaaaaagattttggatttgtaagggatctgggaataaactttattcaaatttttaatcaaattattagtcttagaaaaagtaaaaaatggaacttgaaacaaaaaaatattcaatatttaaaaagaggtagatatgtggaattcaatttattatatgatagaggcacaaaatttggattacaaactggtggcaatgtagaggctatattaatgtcactacctcctttagcaaaatggaaataaa

SEQ ID NO: 218586 - DNA, 319 bp, Unknown
  Bacterial polypeptide expressing nucleotide sequence isolated from the Sargasso Sea
tcatatctgcctattattgaaaaaagagctaataaaacatatacatcaaaagaaagagaattccagctatatcgaagaggaagatatgtcgaattcaatttagtttgggatagagggacaatttttggattacaaacaaacggtagaacagaatcaattttaatgtcattaccgcctttagctagatgggagtatggatataaagctaaaaagggttctcgagaggaatttctcacatcaatttttacaaaacctcaagattggttaaatgataaagagttagaaaaattctgtatggagaataatatctttgattaaa

SEQ ID NO: 218587 - DNA, 370 bp, Unknown
  Bacterial polypeptide expressing nucleotide sequence isolated from the Sargasso Sea
tgtaataaacataacaaaaattattacaaaaaatatttaaagtggtgtgatgaatatttttatttgccacataggaaagagtcaagaggtattggcgggattttttttgattataaaaaaaataattgggaaaaagatttttcttttgttcgagaagtgggaataagttttaaaaacatttctaatgaaataattgagaaaaaaaataaattaaaatggacaattaaagataaagaaatccaatacaaaaaaagaggtagatatgttgaatttaatttattacatgatagggggacaaaatttggtttacaaactggtggaaatgttgaagctatacttatgtcattgccaccaacagctaaatggtaaa

SEQ ID NO: 218588 - DNA, 325 bp, Unknown
  Bacterial polypeptide expressing nucleotide sequence isolated from the Sargasso Sea
cggattcgagcaaagctttagctttatgcaagctgtaggtaatggcttcttaacggcctatgcgccgattgtcgagcgtcgtaaagagactgaattcggtgagcgtgagcgccagttccaactctaccgtcgtggtcgttatgttgagttcaacttagtctacgacaggggcactttgtttggcctgcagacaggcggccgtaccgagtctatcttaatgtcgatgccgccattagtgcgttggcaatatgcttatacaccagaggcgggaagcccagaggcagatttgtacgataactacctcaaaccccgcgactgggtttag

SEQ ID NO: 218589 - DNA, 829 bp, Unknown
  Bacterial polypeptide expressing nucleotide sequence isolated from the Sargasso Sea
aatgaataaagaaattaaaaaaaaattaactaaaaattggtttaaaacctttcaagatatgatctgtgaagacatacaaaaaatagaaggtaaaaataaaaaatttgttaccactaaatggttaagaaataaaaaaaaagatgaaggaggtggtgaatacagaattttaaaaggtggaaaaatatttgacaaagttggagtgaatttttctgaagtttatggaaaattctctaaacaatatagaaataaaattccaggaacaaaatatagtcctaatttttgggcttcaggtatatcaatagtaatgcacatgaaaaatccccatgttccagcaatgcattttaatacaagatacatttatacttcctatggttggtttggaggtggaatggatgtaactccatgtttcaaagatgcaaagttaaaaaaatggtttcacaaaaaaattaaaaaaagttgtgatagacataataaaaattattacaaaaaatataaaaaatggtgtgatgattatttttatctacctcatagaaaagaagcgagaggaataggtggaatattttttgattataaaaaaaataattggaaaaaagattttgattttattagagatgttgggataacatttaaaaatatttctaacgaaataattaataaaaataataaaaaaaaatggacatttaaagataaagaaattcaatatgaaaaaagaggccgatatgtcgaatttaatttaatttatgatagaggaacaagatttggtttacaaaccggtggtaatgttgatgcaatattaatgtcgctacctccaactgcaaaatggaaataa

SEQ ID NO: 218590 - DNA, 785 bp, Unknown
  Bacterial polypeptide expressing nucleotide sequence isolated from the Sargasso Sea
gagagaaaaaactaaaaatctcttattaactttacaaaacaaaatttgttcaggacttgaaaatttagatggcaaaggaaaatttatagaagaatcctggctaagagacgaaggtggtggtggaagatcaagagtattgaaaaatggttctatttttgagcaggcaggagtaaatttctctgaagtacagggaaaagaattacctcaatctataatctctcaaaggcccgaagcaaaaggtcatgaatggtttgccactggaacttctatggtgttgcatcctaagaatccctatattcctacagttcatctgaattatcgatatttcgaagctggtcctgtttggtggttcggaggaggtgcagacttaaccccgttttatccttatctttcggatgtgaggaattttcataacgaacataaaaaagcttgtgagaaagttgataaaaatttgcataaagttttcaaaccatggtgtgatgaatacttcttcttgaagcatagaaatgaatctagaggcataggaggtattttttatgattatcaagatggttcaggcaatatttatagaggtaataatcaaaatggagaggcatcaaaagtttcacaaaatattcggggatcaaatttaaattgggataatttattttccttagcggaaaactgtggacaggcattcctcccttcatatttgccaattattgaaaaaagagctgctcaaacattttcatcgagggaaagagaattccagctatatagaagaggtagatatgtcgaattcaatt

SEQ ID NO: 218591 - DNA, 772 bp, Unknown
  Bacterial polypeptide expressing nucleotide sequence isolated from the Sargasso Sea
ggtgctgtatttgagcaggctggtgttaatttctctcatgtgtttggcgataagatgcctggctcagccactgcgcaccggcctgaactggctgggcgtaagtttgaagctatgggcgtatctttggtgatccatccgctcaatccacatatccccaccagtcacgccaatgtgcgtttttttatcgcggaaaaagaaggtgaagcaccagtctggtggtttggtggtggttttgatttaactcctttttatccggtggaagctgatgtagtgcattggcatcaggtggccaaggactgttgtgatggttttgacgccgcttattaccctaaatacaaaaaatggtgtgatgaatacttctacttaaagcaccgcaacgaaacccgtggtgtaggtggtttgttttttgatgatttaaacgagccaggttttgagcaaagttttgcttttatgtctgctgtaggaaaagcctttactaaggcttacgtgcctatagtgcagcgtaataaaaacaaagcctattcggaagcggagcgccagttccagctgtatcgccgtggccgttatgtcgagtttaatctggtatttgaccgaggcactttgtttggtttgcaaagcggtggtcgtaccgaatctattttgatgtcgatgccacctttagtgcgttgggaatatggttatcagcctgaagcaggttcgccggaagctctgttgtatcaacgttatttaatgccacaagattggctgggcctgaacggatcacagctttgaa

SEQ ID NO: 218592 - DNA, 814 bp, Unknown
  Bacterial polypeptide expressing nucleotide sequence isolated from the Sargasso Sea
aaaaaaaaattagctaggaactggtttaaaacgctacaagaggttatttgtaatgatatagaagagttagaagaaaacactaatttatttaaaattactaattgggaaaaaaataaaaaatctgacgagggtggaggtcaatttagaatttttaaaaatggaaaaatttttgaaaaagttggtgtaaatttttctgaagtatatggaaaattttctaaagaatttaaagatagaattccaggagcaaaaaaaaatcctaaattctgggcatcaggaatatctgttgttatgcatatgcaaaatccacacatacctgcaatgcattttaatacgagatatatttttacttcccatgggtggtttggtggcggtatggacgtaacgccttgtttaaaagatgaaaatttaaaaaaatggtttcactcagaattaaaaaaatcttgtgataaacataatagaaattattataaaaaatataaaaaatggtgtgatagatatttttatctaccccacagaaatgaaactagaggaataggtggcatcttctttgattataaaaaagaaaattgggaaaaagatttctcttttgttagagagataggtattagttttaaaaatatttttagggaaatcatattaaaaaaatataaaaaaaaatggacaaataatcaaaaacaaattcaaaatgaaaagagaggacggtatgttgaatttaatctgttgtatgatagaggtacaaaatttgggttacagacaaatgggaatacagaagcaatactgatgtcattaccacctgtcgcaaattggaaataag

SEQ ID NO: 218593 - DNA, 484 bp, Unknown
  Bacterial polypeptide expressing nucleotide sequence isolated from the Sargasso Sea
atgttgaaagaacctcctaaaaactctagagaaaaaactaaaaatctcttattaactctacaagacaaaatttgttcaggacttgaaaatgtagatggcaaaggaaaatttacagaagaatcctggctaagagacgaaggtggcggtggaagatcaagagtgttgaaaaatggttctatttttgagcaagcaggtgtgaatttctcggaagtacagggaaaagaattacctcaatctataatctctcaaaggcctgaagcaaaaggtcataaatggtttgctacgggaacttctatggtgttgcatcctaagaatccttatattcctacggtccatctgaattatcgatatttcgaagctggtcctgtttggtggtttggaggaggtgcagacttaacacctttttatccttatctttctgatgtgagaaattttcaaaaggagcataaaaaagcttgtgagaaaatgataaagattgcataaa

SEQ ID NO: 218594 - DNA, 701 bp, Unknown
  Bacterial polypeptide expressing nucleotide sequence isolated from the Sargasso Sea
agttcatctgaattatcgatatttcgaagctggtcctgtttggtggtttgggggaggtgcagacttaacccctttttatccttatctttctgatgtaaggaattttcataatgagcataaaaaagcttgtgagaaagttgatcaagatttgcataaagttttcaaaccatggtgtgatgaatatttcttcttgaagcatagaaatgaatctagaggcattggaggtattttttatgattatcaagatggttcaggcaatatttataaaggaaataatcaaaatggagaagcatcaaaagcttcacaaaatattgggagatcaaatttaaattgggatgatttattttctttagcggaaaactgtgggcaggcattcctcccttcttatttgcccattattgaaaaaagagcttctcaaacatattcatcgaaggaaagagaattccagctatatcgaagaggtagatatgtcgaattcaatttagtttgggatagagggacgatttttggactacaaacaaatggtagaaccgaatctatattaatgtccttaccgcctttggccagatgggaatatggatataaagctaaaaatggttctcgagaggaatttctcacatcaatttttacaaaaccccaagattggttaaatgataaagagttagaaaaattctgtatagaaaataatatttttgattaaa

SEQ ID NO: 218595 - DNA, 394 bp, Unknown
  Bacterial polypeptide expressing nucleotide sequence isolated from the Sargasso Sea
catcgcggcgagccgcgcggcatcggcgggctgtttttcgacgacctcaacgagtgggacttcgacaccagcttcgccttcatgcgcgccatcggtgacgcctacatccaggcctacctgcccattgtccagcgccgcaagctgatgccgttcggcgagcgtgagcgtgagttccaggcctttcgccgcggccgctacgtcgagttcaacctggtgttcgaccgtggcacgctgttcggcctgcagtccggcgggcgcaccgagtcgatcctcatgtcgctgccgccgcatgtgcgctggggctatgactggaagccggagccgggcagcatcgaggcgcgcctgaccgagtacttcctgaccgatcgtgattggctgtcggccacgtcatgat

SEQ ID NO: 218596 - DNA, 829 bp, Unknown
  Bacterial polypeptide expressing nucleotide sequence isolated from the Sargasso Sea
aatggataaagatataaaaaagaaattatcaaggaattggtttataaacctgcaagagatgatctgtaatacgatacagcaaattgaaggtggaaaaataaaattttttaagaaaagctggaaaagaaatataaaaaaggatgaaggaggtggctgttattttattcttgaaaacgggaaagtatttgacaaagttggtgtcaacttttcagaagtttatggaaaactggctgaagaatttaaaaagaaaattcctggtacgaaaaataatagagatttttgggcatctggtgtatccgtggtaatgcacatgaaaaatcctcatgtaccagctatgcattttaataccagatatattcatacaaatcacggctggtttggaggagggatggatgttactccatgttttaatgatccaattgttaaaaaactactatttaaaaaattaaaaaaaatgtgtgataagcataacaaaaaatattttaaaaaatataaaaaatggtgtgatgaatatttctatttgtcacaccgaaaagagccgagaggaattggtggaattttttttgattataaaaaaaaagattgggaaaaagattttggatttgtaagggacctaggaataaattttattcaaatctttaatcaaattatcagtcttagaaaaagtaaaaaatggaacttaaaacaaaaaaatattcaatatttaaaaagaggtagatatgtggaattcaatttattatatgatagaggcacaaaatttggtttacaaactggtggcaatgtagatgctatattaatgtcactacctcctttagcaaaatggaaataa

SEQ ID NO: 218597 - DNA, 602 bp, Unknown
  Bacterial polypeptide expressing nucleotide sequence isolated from the Sargasso Sea
aatgatcgatattgatagtattaagcagtatttactgagcctacaggatcagatttcaactgctttactgcaaatagatggcaaattggaattgcgtgaagatgagtggcaacgcgaaggtggtggtggtggccgtactcgcgtaatgaacggcggtgaactattcgaacagggaggcataaatttctctcatgtatttggtgatagattaccaccgtcggcgacggctagtcgtcccgaattagccggacgatcatttcaggcgctgggtgactctctggttattcatccactaaacccttatataccaacaactcatatgaatatccgtttttttgtcgcggaaaaagaaggcgaagaacccatctggtggtttggcggtggttttgatttaacaccgtattacggttttaaagaagatgcgcgtttctggcatgaaacagcaaaagccgcgtgcgctggctttggcgaagacaagtatgaaaagtataaaaaatggtgtgatgattatttttatttaaaacaccgacaggaaccacgtggcatcggcggcttgttttatgatgatttgaatgaacaaggtttcgaacattgtttcaatt

SEQ ID NO: 218598 - DNA, 777 bp, Unknown
  Bacterial polypeptide expressing nucleotide sequence isolated from the Sargasso Sea
aagaggttgtgtgtaaagatattgaacaaatagaaaaaaaaaaaaatattttcatatcaaaagattggaaaagaggtaaaaatggaaacgaaggcggtggccaatttagaatttttgaaaacggaagaatttttgaaaaagttggagtaaatttttcagaagtttatggaaaattttccaaacaatttagagatagaattccagggacgaaaaaaaaacctgatttttgggcttcaggaatttcagtagtcatgcacatgagaaatccttatgttccagcaatgcattttaatacaagatatatcgttactgatcatggctggtttgggggcggtatggatgtaactccgtgtctaaaagatgaaaagttgaaaaaatggtttcatgaagaaataaaaaaaacatgcgataagcataataaaaaattttatagtgagtataaaaaatggtgtgataattatttttatttaccacacagaaaggaatcaaggggaataggcggtattttttttgattacaaaaaaaaaaatttcgaaaaggatttttcttttgtaagagatgtaggtctttcgtttaaaaaaatttttagagatataattgtaaaaaaaaataaaaaaaaatggacaaaaaaaacaaaggaaattcaactttataaaagaggtaggtatgttgaatttaatttgttatatgatcggggtacaaaatttggtttacaaactgggggtaacgtggaaggtattttaatgtcacttcctcccacagctaaatggaaataag

SEQ ID NO: 218599 - DNA, 682 bp, Unknown
  Bacterial polypeptide expressing nucleotide sequence isolated from the Sargasso Sea
tggaggccaatttagaatattggaaaatggaaaaatttttgaaaaagtaggtgtaaatttttcagaagtttatggaaaattttcaaaagaatttagaaatagaattcccgggggagataaaaatccaaacttttgggcagcaggtatatcggtagtgatgcacatgaaaaatccccatgttcctgctatgcattttaatactaggtatatttatacttctcatggatggtttggtggagggatggatgttaccccttgcctaaaagataaaagtttagaaaaatggtttcataatgaattaaagaaatcttgtaataaacataataaaaatttttatgaaaaatataaaaaatggtgtgatgaatatttttacttaccgcacagaaaagaaccaagaggtatagggggaattttttttgattataaaaaagaaaattgggaaaaagattttagttttgtcagagaagtaggaataagttttaaaaatatttttagagaaattatattaagaaaatataaaaaaaaatggtcaaataaacaaaaagaaattcaattagaaaaaagaggtcgatatgttgaatttaacttactttatgatagaggtaccaagtttggtttgcaaacgaatggtaatgttgaggcaattttaatgtcattaccacctcttgcaaaatggaaataa

SEQ ID NO: 218600 - DNA, 670 bp, Unknown
  Bacterial polypeptide expressing nucleotide sequence isolated from the Sargasso Sea
gcaccggcctgaactggcgggtgcgccgttcgaggccatgggcgtgtccctggtcttccatccgcgcaatccttttgtgcctacggtacacatgaatgtgcgaatgattgcggctggctcaggtgcggccggctcaggtgcggcagggcatccgggcaacgaacccacctgctggttcggcggcggcatggacctgacaccggtctacggcttcgaggaagatgcacagcactttcaccgcgtctgccgagatgcgctggcgccttttggcgacacgctctacccgcgcttcaagacctggtgcgacgagtacttctgcctgaagcaccgcaacgagcagcgcggcatcggcggcatcttcttcgacgacttctctgagctgggccaggcgcgcagcttcgacatgctgcgttcggtgggcgattcctttctggagtcctacctgcccatcgtcgagcgccgccaggccatggactacgggcagcagcaggtcgatttccagcgctaccgccgcggccgctacgtggagttcaacctggtctgggaccggggcacgcacttcggcctgcagtccggcgggcgcacggaatccatcttgctgtccatgcccccgcatgcgagctggagctaccagcgcgaggacgcgcccggcacgcccgagcgcgcgctg

SEQ ID NO: 218601 - DNA, 706 bp, Unknown
  Bacterial polypeptide expressing nucleotide sequence isolated from the Sargasso Sea
agaggaaaaaaatcaaatgaaggtggaggtcaatcaagaatttttgaaaacggaaaaatatttgataaagttggtgtaaatttctcagaagtttatggaaaactttctgaagaatttaaaaataaaattccaggagctagtaaaaatcgtaaattttgggcatcaggaatatctgtagtcatgcatatgaaaaatccatatgttccagcaatgcattttaatacacgttatgtttatacatcttatggatggtttggtggaggaatggatgtaacgccttgcatgaaagataaaaaattagaaacatggtttcactctaaaattaaaaaatcctgtgacaaacataataaaaattattataaaaaatacaaaaaatggtgtgatgaatatttttttctacctcatagaaatgaacctagaggtattggaggtatattttttgattataaaaaaaataactgggaaaaagatttttcttttgtaagagaagtgggaataagttttaaaaatatagctagagaaataatactaaaaaaacataaaaaaaaatggacaaaacaagagaaagaaattcagtatgaaaaaagaggaagatacgtcgaatttaatttgctatatgatagaggaaccaaatttggtttacaaactggaggtaatattgatgctatattaatgtctttacctccattggcgaaatggaaataaa

SEQ ID NO: 218602 - DNA, 532 bp, Unknown
  Bacterial polypeptide expressing nucleotide sequence isolated from the Sargasso Sea
gggcaagatttaacgccttattacctttttgaagaagacgcaaaacactttcatcaagtgtgtaaaaccgcttgcgataaacacaatccagaattttatccaaaatacaaagcacgttgtgacgagtatttttataatacacatcgtaacgaagcacgaggaattggcggattattttttgactattgcaaagcaaccgaagaaatgagcatggaaaactggtacaattttgtaaccgaagttggtaatagtttccttgaagcttatcttcctattgtagaaaaacgtaaagaattaccatacacaaaagcacaacgcgattggcaagaaatacgtcgtggtcgttatgtcgaattcaatttagtacacgataaaggcactttgtttggcttaaaaacaaacggacgaatagaaagtattttaatgagtcttccgccacatgtacaatgggtttacgaccataatccagaagacggtagcgacgaagctaaattgttagacgtattaaaaaaccctaaaaactgggtataac

SEQ ID NO: 218603 - DNA, 295 bp, Unknown
  Bacterial polypeptide expressing nucleotide sequence isolated from the Sargasso Sea
tatgcaggctgttggtaatggcttcatcgatgcttacgttcctattgttgagcgccgtaagcaaaccgatttcggcgaaagagagcgtgatttccaactttatcgccggggccgctacgttgagtttaaccttgtattcgaccggggcactttatttggactgcaaaccggcgggcgcacggaatcaattctaatgtcgatgccgccgctagcgcgctgggagtattgttatacacctgcaccgggtagcgccgaagccaagctgacagactggttaaaacctactgattggtga

SEQ ID NO: 218604 - DNA, 790 bp, Unknown
  Bacterial polypeptide expressing nucleotide sequence isolated from the Sargasso Sea
tatggaagaaaatattagaaaaaagttagcgcgaaattggtttttaacaattcaagaattgatttgtcacgaaattgagaatattgaaaatggatcctcttattttaaaacgaaggcgtggtctagaagcgaaacaaaagatgaaggaggtggaaaatcaaagcttcttaaaaacggaaaagtttttgagaaagtaggtgtaaatttttctgaagtatatggaaatttttcaaatgaatttaaaaaaaaaatacctagatttaacaatagtaaagatttttgggcatcaggaatatcaattgttatgcatatgaaaaatccttatatcccagcaatgcattttaatacgagatacataattacagatcatgggtggtttggtggagggatggattttactccgtgctttaaagactcagcgctagaaaaaattgttgagaagaaattaaaaatgatgtgcaataaacatggcaaaaattattacaaaaaatataaaaaatggtgtgatgattatttttatttacatcatagaaatgaaccgagagggattggaggaatattttttgattataagaagaaaaattgggacagagattttgcttttgtaagagacgtaggtatagttttttcatatttatttaaagaaataattgcaaagaaatttaaaaaaagatggaaaaaaaaggacaaactaattcaaaataaaaaaaggggtaggtacgttgaatttaatttgctacatgatagaggtacaaaatttggattacaaactgggaggaaatgtagaagc

SEQ ID NO: 218605 - DNA, 920 bp, Unknown
  Bacterial polypeptide expressing nucleotide sequence isolated from the Sargasso Sea
gatgggattgcaggatgagatctgcgcaggtctggagtccctcgatggtgaagggacattcgtcgaagagagctgggagcggcctgagggaggcggcgggcgatcccgggtgatgcgcgagggccgtgtcttcgagcagggcggcgtgaacttctcggaagtgcagggtcaggagctgccaccgtcaatcctcaagcaacgtcctgtggccaagggacatccgtggtttgccacgggcacctcgatggtgctgcacccgcgcaacccttacatccctacggttcatctcaattaccgctacttcgaggctggtccggtgtggtggttcggcggtggggcagacctcacgccctactacccctttctggaggatgcccgtcacttccatcgcacccatcaggcggcctgcgattcggtccatccagacctgcacaaggtgttcaagccctggtgcgatgagtacttcttcttgaagcaccgcggtgagacccgcggcgtcggtggcatcttctacgactatcaggattccagcggtgtgctctacaaaggacaggacccttcaggtcccgcggcaggggtatcggctcagctgggggctcgccccctgggctgggagcaactgttcgccctggggcaggccaatggccgggcctttcttccgtcctatgcgccgatcgtggagaagcgccatccgatggcctatggcgatcgcgagcgtcaattccagctctatcgccgtggccggtacgtggaattcaacctcgtgtgggatcggggaacgatctttggccttcagaccaacggccgtaccgagtccatcctgatgtcgctgccgccgttggtgcgctgggaatacggctacaaggccgaggccggctccagagaagctctgctgacggagctgttcaccaaccccagga

SEQ ID NO: 218606 - DNA, 289 bp, Unknown
  Bacterial polypeptide expressing nucleotide sequence isolated from the Sargasso Sea
cggcgacgcgttcctgcaggcctacctgccgatcgtcgagcggcgcgccgagctgccgtacggcgagcgcgagcgcgatttccaggcgtaccgccgcggccgctacgttgaattcaacctcgtattcgaccgcggcacgctgttcggcctgcaaagcggcggccggaccgagtcgatcctgatgtcgatgccgccggtcgcgaactggcgctacaactggcaacccgaaccgggttcgccggaagcgcgcctgtacagcgacttcatcgtgccgcgcgactgggtctga

SEQ ID NO: 218607 - DNA, 753 bp, Unknown
  Bacterial polypeptide expressing nucleotide sequence isolated from the Sargasso Sea
tcagaagtacatgggaaagaactacctcaatcgataatctcacaaagaccagaagctaaaggccatgaatggtttgcgactggcacttcgatggtcttacaccctaaaaatccatttatacctacagtacatcttaattatcgttattttgaagcaggaccagtttggtggtttggtggaggtgccgacctaacgccatattatccatatttaactgacgtaagaaattttcataaagaacattgtaatgcctgtgaaaaagtgaataaaaatctccacaaggtatttaagccatggtgtgatgaatatttctttttaaaacatagaaatgaatctagaggtattggaggcatcttttatgattatcaagatggttctggcagaatttataaaggtgataataaagagagtaaggcttataaagaatctattaatattggagaattaaacttaaattggaataatttattttcattagcagaaaattgcggtggagcattcttagattcgtatcagccaataattgaaaaaagagttaaccaaaactacacaaaagagcaaagagaatttcaactatatagacgaggaagatacgtagaattcaatttggtttgggacagaggaacaatttttggattacaaacaaatggtagaactgaatctatattaatgtcattaccaccattggctagatgggaatatgggtataaagcccaaaaaggctctagagaagactatctcacaaaaattttc

SEQ ID NO: 218608 - DNA, 559 bp, Unknown
  Bacterial polypeptide expressing nucleotide sequence isolated from the Sargasso Sea
gttcggtggtggcttcgatctcaccccgtattacggcaatgaagaagaccgcattcactggcaccgcgtggccgagcaggcctgtgcaccgtttggcccggacgtgtactcacgctacaaggcctggtgtgacacctacttccacatcaagcaccgcaacgagccccgtggcatcggtggcctgttcttcgatgacttgaacgagtggggctttgacacctgcttcgccttcatccgcgccatcggcgatgcctacatcgatgcctacctgccgattgtgcagcgtcgcaaggccatggcgtacaccgagcaacaacgccagttccaggagttccgccggggccgctacgttgagttcaacctggtctatgaccgtggcaccctgttcggcctgcaatcgggcgggcgtacggagtcgatcctgatgtcgctgccacctcaggtacgctggagctacgactggaaggccgaagccggcagcgaagaggcgcgcctcaccgactacttcctgcaagaccgtgactggctcggcgttgccgcgcccaaggcggcggtgtga

SEQ ID NO: 218609 - DNA, 790 bp, Unknown
  Bacterial polypeptide expressing nucleotide sequence isolated from the Sargasso Sea
tatggacgaattaataaaaaaaaaattagccagaaattggtttaaaactttgcaagaagttatttgcaatgaaattgaggaattagaaggtaaaaaaaagatctttaaaattaaaaattgggaaagaggaaaaaaatctaatgaaggtggaggccaatttagaatattagaaaatggaaaaatttttgaaaaagttggagtgaatttttcagaggtttacggaaaattttcaaaaaaattcagaaatagagtaccaggtggagaaaaaaatccaaaattttgggcatcaggcatatcaattgtaatgcatatgcaaaaccctcatgttccagcgatgcattttaacacaagatatatttacacttcacatggatggtttggtgggggaatggatgttacgccttgtctaaaagataaaagtttagaaaaatggtttcacaaagagttaaaagttgcatgtgataaacataataaaaactattacaaaaaatataaaaaatggtgtgatgaatatttttacttacctcatagaaaagaaccaaggggaataggaggtattttttttgattataaaaaagacaattgggaaaaggattttagttttatcagagaagttggtttaagctttaaaaatatatttagagagataatattaaaaaaatataaaaaaaaatggtcaattaaacaaaaagaaattcaatttgaaaaaagaggtcgatacgttgaatttaacttactttatgatagaggtaccaaattcggtttacaaactaatggtaatgttgaggct

SEQ ID NO: 218610 - DNA, 622 bp, Unknown
  Bacterial polypeptide expressing nucleotide sequence isolated from the Sargasso Sea
atggtccgctccctgattcgccgcgtcctcggacgccaggacgtgggtgtcagcaaggctccccttgagctgccccccagcgattccagagagcgggcccgggcgatggtgatggggctgcaggacgaaatctgtgcgggcctggaagccctcgacggtgaaggtcgcttcgttgaggagagttgggtcaggcctgaaggaggtggtgggcgctcccgggtgatgcgtgaggggcgcgtctttgaacagggcggcgtgaatttctccgaggttcaaggcgaagaactgcccccgtcgatcctcaagcagcgtcctgaggccaaggggcatccctggttcgccacgggaacctcgatggtgctgcatccccgcaacccctacatcccgaccgttcacctcaattaccgctatttcgaggctggcccggtgtggtggttcggcggcggtgccgacctcacgccttactacccgttcctcgacgacgcccgtcatttccatcgcacccaccaggcggcctgtgattcagttcacccggatctgcacaaggtgttcaagcaatggtgcgatgaatacttttatttgaagcaccgtggtgaaacccgcggcgttggcggcatcttct

SEQ ID NO: 218611 - DNA, 517 bp, Unknown
  Bacterial polypeptide expressing nucleotide sequence isolated from the Sargasso Sea
tatgagaaaccccaaaatgcctgcgatacatttcaatactaggtttatagtaactgccaaagagtggttcggtggagggatggatgcaacaccaagttataaagatctaaaagaaaaaaaaatgattcatgatgaattagaaaaagtatgtgtccaaaataaaaaaaattataaaaaatacaaaaaatggtgtgacgaatatttttatttaccacacagaaaagaagctagaggcattggtggtattttttttgactatgaaactaaagattggattaaaaattttaaatttgtaagagaacttggtcttacttttataaatatttcaaaaaagattattaagagaaaagaaaaatttaaatggacaaacaaagacaaagaaaaacaactcctcaaacgtggaaggtatgtagagttcaatcttttatatgatagaggcacaaggtttggtttaaactcgggaggaaatattgactcaattttaatgtcacttcctcctgaagcaaaatggaaatag

SEQ ID NO: 218612 - DNA, 850 bp, Unknown
  Bacterial polypeptide expressing nucleotide sequence isolated from the Sargasso Sea
acgacgctgctgagggatggctcgggagaggctggcgacgacagcgccatgcgagccaagtttgagcagatgattcgaaaggcgcaggatgaaatctgcgatgcgatctccaagttggacggaaagccgttccacgaggacgcgtggacgagaccggccggtggaggcggcgtctcgcgcgtgttgcaagatgggaacgtgttcgaaaaggctggcgtgaatgtgtcggtggtgtacgggcaaatgccgcccgaggcgtaccgcgcggcgactggcgaagcgggcgagtccacggagatgattccgttcttcgcggcgggtatctcgagtgtgatgcacccgcacaacccgatggcgccgaccgtgcacttcaactaccgttactttgagacggacgcgccgaagggcgccgcgggcgcgccgcgggcgtggtggttcggcggcggtaccgatttgaccccgtcctatgtcttcgaagacgacgtcaagcacttccaccaaacgttgaaggatgtgtgcgacaagcacgacgacgagtactacccgagattcaagcaatgggctgacgattacttcatgatcaagcaccgcgaagaacgccgcggcgtcggcggcgtctttttcgacgacatgaacgaccgcagcaaggaagaactactcgcctttgcgacggacatggcgagtgctgtcgtcccggcgtacgttccgctcgttgaaaagcacaaggatgacgaattcacgccggaacaacgcgcgtggcaacaaatgcgtcgtggtcgctacgtcgagttcaacctcgtctacgatcgcggaaccacctttggcttgaaaaccggcggccgcatcgagt

SEQ ID NO: 218613 - DNA, 838 bp, Unknown
  Bacterial polypeptide expressing nucleotide sequence isolated from the Sargasso Sea
catggtccgctccctgattcgccgcgtccttggacgccaggacgtgggtgtcagcaccgctccccttgagctgccccccagcgattccagagagcgggcccgggcgatggtgatgggtctgcaggacgaaatctgtgcgggcctggaagccctcgacggtgaaggtcgcttcgttgaagagagttgggtcaggcctgaagggggtggggggcgctcccgggtgatgcgtaagggccgcgtctttgaacagggcggcgtgaatttctccgaggttcaaggcgaagaactccccccgtcgattctcaagcagcgtcctgaggcgaaggggcatccctggttcgccacgggaacctcgatggttctgcatccgcgcaacccctacatcccgacggttcacctcaattaccgctatttcgaggctggcccggtgtggtggttcggcggcggtgccgacctcacgccctactacccgttcctcgacgacgcccgtcatttccatcgcactcatcaggcggcctgtgattcggttcacccggatctgcacaaggtgttcaagccctggtgcgatgaatatttctatttgaagcaccgtggtgaaacccgcggcgttggcggcatcttttacgactaccaagacgccaatggcaccctctacaagggtcaggatccctccgggcctgcggctcaggtgtcagcccgactgggagttcggccgttgagctgggagcagctgttctccttggggaaggccaacggcagagccttccttcccgcctatgcccccatcgtggagaagcgccacccgatggcctatggcgatcgcgaaagggacttcagc

SEQ ID NO: 218614 - DNA, 829 bp, Unknown
  Bacterial polypeptide expressing nucleotide sequence isolated from the Sargasso Sea
atggacgaattaattaaaaaaaaactagctagaaattggtttaaaactttgcaagaagtgatttgtcaagaaatagaagaattagaaggaaaaaaaaatattttcaaaattaaaaattgggaaagaggaaaaaaatcaaatgaaggcggaggtcaatttagaatattagaaaatggaaaaatttttgaaaaagttggagtaaatttttcagaagtttatggaaaattttcaaaagagtttagaaatagaataccgggtggagagaaaaatccaaaattttgggcagctggcatatcaatagtgatgcatatgcaaaatcctcatgttccagcaatgcattttaatactagatatatttatacttcacatggatggtttggtggagggatggatgtaactccttgccttaaagataaaagtttagaaaaatggtttcataaagaattaaaagtttcatgtgataagcataataaaaattactacaaaaaatataaaaaatggtgtgatgaatatttttacttaccacacagaaaagagccaagaggaataggaggtattttttttgattataaaaaagataattgggaaaaagattttagttttgtaagggaggtaggaataagctttaaaaatatctttagagagataatattaaaaaagtataaaaagaaatggtcaaacaaacaaaaagagtcccagttagaaaaaagaggtcgatatgttgaatttaacttactttacgatagaggtacaaaattcggtttgcaaaccaatggtaacgttgaggctattttaatgtcacttcctcctgttgcaaaatggagataaa

SEQ ID NO: 218615 - DNA, 769 bp, Unknown
  Bacterial polypeptide expressing nucleotide sequence isolated from the Sargasso Sea
tatggaagaaataataaaaaaaaaattagctagaaattggtttaaaactttacaagaagttttgtgccaagaaatagaagaactagaaggtagatcaaacttatttaaatataaaaattgggaaagaggaaaaaaatcaagcgaaggtgggggtcaattcagaatttatgaaaatggaaaaatatttgaaaaagttggagttaatttttcagaagtccatggaaaattttctaagcaatttagaaataaaattcctggcacaaaagaaaatcctaaattttgggcttcaggaatatctgtagttatgcatatgaaaaatccacacgttcctgcaatgcattttaatactagatatatttatacttcctatggatggtttgggggtggaatggatgtaactccttgttttaaagataaaactctagaaaaatggtttcattctgaattaaaaaaatcctgtgacaaatataataaaaattattataaaaaatataaaaaatggtgtgataattatttttatttaccacatagaaaagagtctagaggcataggtggaattttttttgattataaaaaacataattgggaaaaagatttttcttttgtaagagaagttggaataagttttaaaaatatatttagagaaataatattaaaaaaacataaaaaaaaatggacaaaaaaagaaaaagaaattcaatatgaaaaaagaggaagatacgttgagtttaatttgttatacgatagaggaactaaatttggtttacaa

SEQ ID NO: 218616 - DNA, 910 bp, Unknown
  Bacterial polypeptide expressing nucleotide sequence isolated from the Sargasso Sea
atgagtgtgccagatgcgacagtggtaaaagcatttttactcgatctacaacatcgaatttgtgcgggtcttgagcagttggatgggcaagcaagctttgcagccgattcatggacgcgcaccgaaggcggtggcggcaccagtcgggtcttaacccaaggtgcggtatttgagcaagccggggttaacttttcccatgtgacaggggctgcgatgcccgcatcggcaacggctcatcgccctgaactggcgggtcgcagctttgaggccatgggtgtctccttagtgattcatccaagaaatccttacattccaaccacccatgctaatgtgcgtttctttattgcccataaagacggcgcggatcctgtctggtggtttggtggtggtttcgatttaacgccttactatcctttcgaagaagatgtgcgcgagtggcatcaaagtgctaaaaatctatgccagccttttggtgacgatgtttatcctaagtataagaagtggtgtgatgagtatttcttcctgccacatcgtaatgaaacccgcggtgtgggcggtctgttctttgatgacttaaaccaaacaggcttcgataagagtttcgattttatgcaggcggtgggcaacggcttcttaactgcatatgcgccgattgttgagcgtcgtaaagagactccctatggtgagcgtgagcgtgagttccagttatatcgtcgcggccgttatgttgagttcaatctggtatacgacagaggcactttgttcggcctgcaaaccggtggtcgcacagagtctattttgatgtcaatgccgccattggtacgttggcaatatgcttatacgccagaggcgggcagcccagaggcagatctttacgataactacctcaaacctcgagattgggtataag

SEQ ID NO: 218617 - DNA, 758 bp, Unknown
  Bacterial polypeptide expressing nucleotide sequence isolated from the Sargasso Sea
tatgaaaaaagaaataaaaaaaaaattagtaaaaaattggtttaaaattttgcaagatgtaatttgttacgatattgaaaaaatagaaaataaatcaagtaaattcgtcactaaagattggaaaagaaacaatgaaaaaaatagtggtggtggcatttgtaaaattttagaaaatggaaaagtttttgataaagttggagtaaacttttccgaagttcatggtaaactttcaaaaaaatttaaacaaaaaattccaggtgggagcaagagctcttatttttgggcatcaggaatctctatagtaatgcacatgaaaaatccacatgtcccggctatgcattttaatacacgctacgtttatactactcatggttggtttggtggtggaatagatgtaacaccatgttttaaagataatgctttaaaaaaatggtttcataaaaaaataaaatctacatgtgataaacataacaaaaattattacaaaaaatacaaaaaatggtgtgatgaatatttttatttaccacatagaaaagagcctaggggtataggtggtatattttttgattataaaaaaaataattgggaaaaagatttcgcttttgttagggatataggattggtttttcataaaattttcaatgaattaattaataaaaaaaataaaaaaaaatggagtaaaaatgaaaaagatattcagtacaaaaaaagaggtagatatgttgaatttaatttattatacgatagaggaaccgaga

SEQ ID NO: 218618 - DNA, 829 bp, Unknown
  Bacterial polypeptide expressing nucleotide sequence isolated from the Sargasso Sea
tatggatcaaacaattaaaaaaaaattagcacgaaattggtttaagactttgcaagaagtaatttgtcaagaaatagaggaattagaagcaaaaaaaaaaatcttcaaaattaaaaattgggaaagaggaaaaaactcaaatgaaggtggaggccaatttagaatattggaaaatggaaaaatttttgaaaaagtaggtgtaaatttttcagaagtttatggaaaattttcaaaagaatttagaaacagaattcccgggggagataaaaatccaaacttttgggcagcaggtatatcggtagtgatgcacatgaaaaatccccatgttcctgctatgcattttaataccaggtatatttatacttctcatggatggtttggtggagggatggatgttaccccttgcctaaaagataaaagtttagaaaaatggtttcataatgaattaaagaaatcttgtaataaacataataaaaatttttataaaaaatataaaaaatggtgtgatgaatatttttacttaccgcacagaaaagaaccaagaggtatagggggaattttttttgattataaaagagaaaattgggaaaaagattttagttttgtaagagaagtaggaataagttttaaaaatatttttagagaaattatattaagaaaatataaaaaaaaatggtcaaataaacaaaaagaaattcaattagaaaaaagaggtcgatatgttgaatttaacttactttatgatagaggtaccaagtttggtttgcaaacgaatggtaatgttgaggcaattttaatgtcattaccacctcttgcaaaatggaaataa

SEQ ID NO: 218619 - DNA, 787 bp, Unknown
  Bacterial polypeptide expressing nucleotide sequence isolated from the Sargasso Sea
aatgagagacaaagcaaaagattggtttgaagatctaagaaataaattagtgtcaatgatagaaggtcatgatggatcaagatttaaaataaagcgttggaatcattctggagagggcggtggaatgatgagtattatcaaaggtaatgtaattgaaaagggtggtgtaaatatctcaacagtatcaggaaaattttctgaaaaaatgcagcaacgtattttaggtgcaagtaaagatccaacttattgggctactggtattagtgtagttttgcatccactaaaccctaatattccttcaatgcactttaacacaagataccttgtaacgcaaaaaagttggttcggcggtggtatggatataacgccatgtcttgattttacagctgagaaaaaacaatttcatgaaaaccttaaagaaatgtgcgataggcatgataaagattattatccgaagtataaaaaatggtgcgacgattattttttcctcaagcatagaaatgaggctagaggtataggaggaattttctttgaccatctaaacaatgataattttgaaaatgatttttgtttcattcaagatgtaggaaaatttttccatgagtatgtgaatcaaataataacagtaaataaaaagaaaaaatggaccaaaaaagatagaaaccttcagctaattaaaagaggccgttatgttgaattcaatttgttatatgataggggaacaaaatttggactggagactggtggtaatacagaagcaatcttgatgtctcttccgccaatagca

SEQ ID NO: 218620 - DNA, 874 bp, Unknown
  Bacterial polypeptide expressing nucleotide sequence isolated from the Sargasso Sea
catgttgaaagaaccacctaaaaactcgagagaaaaaactaaaaatctcttattaactctacaagacaaaatttgttcaggacttgaaaatgtagatggcaaagggaaatttacagaggaaacctggctaagagacgaaggtggaggtggaagatcaagagtattgaaaaatggttctatttttgagcaagcaggcgtaaatttctcggaagtacaaggaaaagaattacctcaatctataatctctcaaaggccagaagcaaaaggtcatgaatggtttgctacgggaacttctatggttttgcatcccaagaatccctatattcctacagttcatctgaattatcgatatttcgaagctggtcctgtttggtggtttgggggaggtgcagacttaacccctttttatccttatctttctgatgtaaggaattttcataatgagcataaaaaagcttgtgagaaagttgatcaagatttgcataaagttttcaaaccatggtgtgatgaatatttcttcttgaagcatagaaatgaatctagaggcattggaggtattttttatgattatcaagatggttcaggcaatatttataaaggaaataatcaaaatggagaagcatcaaaagcttcacaaaatattggcagatcaaatttaaattgggatgatttattttctttagcggaaaactgtgggcaggcattcctcccttcttatttgcccattattgaaaaaagagcttctcaaacatattcatcgaaggaaagagaattccagctatatcgaagaggtagatatgtcgaattcaatttagtttgggatagagggacgatttttggactacaaacaaatggtagaaccgaatctatatta

SEQ ID NO: 218621 - DNA, 493 bp, Unknown
  Bacterial polypeptide expressing nucleotide sequence isolated from the Sargasso Sea
atgttgaaaataccaccaaaaaactcgagagaaaaaactaaaaatctcttattaactctacaagacaaaatttgttcagggcttgaaaatgtagatggcaaagggaaatttacagaagaatcctggctaagagacgaaggtggcggtggaagatcaagagtattacaaaatggttctgtttttgagcaagcaggagttaatttctctgaagtaaagggaaaagaattacctaaatctataatctctcaaaggcctgaagcaaaaggtcatgaatggtttgccacgggaacttctatggtgttgcatcctaaaaatccctatatcccaacagttcatctgaattatagatatttcgaagctggtcctgtttggtggtttgggggaggtgcagacttaacccctttttatccttatctttctgatgtaaggaattttcataaagagcataaaaaagcttgtgagaaagttgataaagatttgcataaagttttca

SEQ ID NO: 218622 - DNA, 919 bp, Unknown
  Bacterial polypeptide expressing nucleotide sequence isolated from the Sargasso Sea
atgcaaaacgtcgataaacatcaggtaaaagcttttttaatggcactgcaggacagcatttgcgctgagcttgctgctgctgatggcgtttcaatttttgtcgaagaaagctgggacagagcagaaggcggtggtggtcgcagtcgtgtattgactcatggtgctgtgtttgagcaggcgggtgtgaatttctctcatgtttttggcgataagatgccagcttcagctacagcgcacaggcctgaactggctgggcgtaagtttgaagccatgggcgtgtctttagttatccatccgctcaatccacatatccccacaagtcacgccaatgtacggttttttatcgccgaaaaagaaggtgaagcaccggtctggtggttcggtggcggttttgatttaacacctttttatccggttgaagcggatgtggtgcattggcatcaggtggcgaaagactgttgcgatgggtttgacgccacttattaccctaaatacaaaaaatggtgcgatgaatacttctacttaaagcaccgcaacgaaacccgtggtgtaggtggtttgttttttgatgatttaaacgaaccgggttttgagcagagttttgcttttatgtctgctgtaggtgaagcctttactaaggcttatctgccaatagtcgaacgtaataaaaacaaggcgttttcggaagcagagcgccagttccagctgtatcgccgtggccgttatgtcgagtttaatctggtgtttgaccgaggcactttgtttggtttgcaaagtggtggtcgcactgaatctattttgatgtcgatgccacctttagtacgctggcaatatggttatcagcctgaaacaggttcgccggaagcgcagttgtatcaacgtttatttaacgccacaagattggctgggcctgaacgga

SEQ ID NO: 218623 - DNA, 859 bp, Unknown
  Bacterial polypeptide expressing nucleotide sequence isolated from the Sargasso Sea
atggaatcgttcatccaacaactacaggatgagatatgtcaagcactagaaaaaaaagactcccgaaaattccaagaagactgctggaaacgtaaagaaggcggtggagggcgaacccgagtcttggaaaatggtagttttctggaaaaaggaggggtcaatatttcaagtgttcatggaccaatgtctgatgaattagcgaaacaattgggcacgaaagcatctttttttggagcatgtggcatatccctggtgttacacccacgatctccaaaaataccaacggtccatatgaatctccgatatttcgaaactctctcaggggattgctggtatggtggaggtatcgacctgactccctatttcccttatccagaggatttccgtcattttcaccaaacccttcagcaagtatgcgaaagatgtattccagattcatacgaagaatacaagaaaaactgtgatgagtatttttgcctccctcaccgtcaggagatgaggggaattggtgggatatttttcgatcatctgaatggttcagaagaaaaatatttcaatctggttcatgaagtgggtgaagaatttctgaatgcctatctgccgctggttgatcgaagaattaatgaagaatggaacgacgaggatgttgaatttcaaaattaccgaagaggtagatacgtcgaattcaacctgatctatgacaggggcacactttttggaattaaatctaatggaaggattgaatcaatcttcatgtctttacctccaaaagtcgatttccgttataattgggaaccaagaaaaaatagtccgcaccacgaaatgaatggtttttatcaaccgcaaaattggtgttaaa

SEQ ID NO: 218624 - DNA, 685 bp, Unknown
  Bacterial polypeptide expressing nucleotide sequence isolated from the Sargasso Sea
cgatatttcgaagctggtcctgtttggtggtttgggggaggtgcagaccttacccctttttatccttatctttctgatataaggaattttcataatgagcataaaaaagcttgtgagaaagttgatcaagatttgcataaagttttcaaaccatggtgtgatgaatatttcttcttgaagcatagaaatgaatctagaggcataggaggtattttttatgattatcaagatggttcaggcaatatttatagaggaaataatcaaaatggagaagcatcaaaagcttcacaaaatattggcaaatctaatttaaattgggatgatttattttctttagcggaaaactgtgggcaggcattcctcccttcatatttgcccattattgaaaaaagagcttctcaaacatattcatcgaaagaaagagaattccagctatatcgaagaggtagatatgtcgaattcaatttagtttgggatagagggacgatttttggactacaaacaaatggcagaactgaatctatattaatgtctttaccgcctttagctagatgggaatatggatataaagctaaaaaaaattctcgagaggaatttctcacatcaatttttacaaaaccccaagattggttaaatgataaagagttagagaaattctgtatagagaataatatttttgattaaa

SEQ ID NO: 218625 - DNA, 925 bp, Unknown
  Bacterial polypeptide expressing nucleotide sequence isolated from the Sargasso Sea
atgaccgattcgacctacgacgtagcgcgcgtgcgcacgtacctccagggcctgcagacacgcatcgccgacgcgctcggcgcgctcgacggcacgccgctcgcgaccgatgcatggcagcgcggtccggccgagcgcctgcgtggcggcggctgcacgcggattctcgaaggcggccgcgtgttcgaacgcgcggggatcggcttttccgacgtcgcgggcgatgcgctgccgccgtcggcgagcgcggcgcgcccgcaactcgcgggccgcggcttcgaggcgctcggcgtgtcgctggtgctgcatccgcgcaatccgtactgcccgaccgtacacatgaacgtgcggatgctgatcgcgacgaaaccgggcgaggagcccgtgttctggttcggcggcggcatggatctgacaccggtttacggtttcgaggacgacgcccgccatttccaccagacctgcaaggatgcgctcgacccgttcggcgtcgagctctacccgcgcttcaagaaatggtgcgacgaatatttcttcctgaagcaccgcaacgagatgcgcggcatcggcgggatcttcttcgacgatttctcggagcccggtttcgaacgatcgtttgacatgatgcaaagcgtcggcgacgcgttcctgcaggcctacctgccgatcgtcgagcggcgcgccgagctgccgtacggcgagcgcgagcgcgatttccaggcgtaccgccgcggccgctacgttgaattcaacctcgtattcgaccgcggcacgctgttcggcctgcaaagcggcggccggaccgagtcgatcctgatgtcgatgccgccggtcgcgaactggcgctacaactggcaacccgaaccgggttcgccggaagcgcgcctgtacagcgacttcatcgtgccgcgcgactgggtctgac

SEQ ID NO: 218626 - DNA, 859 bp, Unknown
  Bacterial polypeptide expressing nucleotide sequence isolated from the Sargasso Sea
gatggaatcgttcatccaacaactgcaggatcagatctgtcaagcactagaaaaaaaagactcccaaaaattccaagaagattgctggaaacgtaacgaaggaggtggaggacgaacccgagtcttggaaaatggtagttttctggaaaaaggaggagtcaatatttcaagtgtacatggtccaatgtctaatgaattagcgaaacaattgggtacgaaagcatctttttttagagcatgtggtatatccctggtgttacacccacggtctccaaaaataccaacagtccatatgaatctccgatatttcgaaaccctctcaggggattgctggtatggtggaggtatcgacctgactccctatttcccttatccagaggatttccgtcattttcaccacacccttcagcaagtatgcgaaagatgtattccagattcatacgaagaatacaagaaaaactgtgatgagtatttttgcctccctcaccgtcaggagatgaggggaattggtgggattttttttgatcatctgatcggttcagaagaaaaatatttcaatctggttcatgaagtgggtgaagaatttctgaatgcctatctgccgctggttgatcgaagaattaatgaagaatggaacgatgaggatgttgaatttcaacattaccgaagaggtagatacgtcgaattcaatctgatctatgacaggggcacactttttggaattaaatctaatggaaggattgaatcaatcttcatgtctttacctccaaaagtcgatttccgttataattgggaaccaagaaaaaatagtccgcaccacgaaatgaatggtttttatcaaccgcaaaactggtgttaa

SEQ ID NO: 218627 - DNA, 931 bp, Unknown
  Bacterial polypeptide expressing nucleotide sequence isolated from the Sargasso Sea
atgaaaactaaatttaaagttgaagatggagatatcattagtaaaagttttcaaactttacaaaataatattattaatgaatttcttaagtatgaagaaactgattttcatattgatacatggaaaaggccggaaggaggtggaggtaagacctgtgttctttcaaaaggatgtacattcgataaagttggtgtaaatttttctgacatcaatggtacttcattgcctccagcagcaacttcaaataggcccgagcttaatgggatgaaatatagagcaatgggagtatcagtagtcacacatcccaaaaatccattcgtacctaccgtgcatttaaatgtaagattttttatggcttttgatgaaaatacagagccgttgtggtggtttggtgggggctttgatatgacaccattttatcccttcttagaagatgttgttttatggcatgaaagcgcacaaaaaatatgtgtacttgataaaaaaaattactatgacgattttaaaaaacaatgtgatgattatttttatttaaaacatcgaaacgagccaagaggagtaggaggtattttttttgataatctcaataatcataaattagcagactgccacgattttgttattaaggttggcgaatgtttttatacaacatattcaaagatactaaaaaaaagaaaagacttaccatattctgaaaaacataaaagttttcaattatttagaaggggccgctatgttgaattcaatctggtttatgacagaggaactctttttggacttcaatcaaatggtagaacagagtcaatattaatgtcccttccaccaagcgttaattggatatacaactatccagtagaagatggtagcgaggaatctgttctttataacgactacctaatggctaaagattggcttaaagaaaaaaattaat

SEQ ID NO: 218628 - DNA, 331 bp, Unknown
  Bacterial polypeptide expressing nucleotide sequence isolated from the Sargasso Sea
tggtgtgataaatatttttatctcccacataggaaagaagctaggggtatcggcggaattttttttgattatgaaactacagattggattaaaaactttaaattcgtaagagaacttggattagcttttatagatatttcaaataaagtaatcaaaagaaagaaaaaattaaaatacacagctagagataaagaaaaacaattgcttaaacgtggaagatatgtagagtttaatcttctacatgatagaggaacaaaattcggtttaaattctgggggaaatactgagtctattttaatgtctttgcctcctgaagctaagtggaaataat

SEQ ID NO: 218629 - DNA, 886 bp, Unknown
  Bacterial polypeptide expressing nucleotide sequence isolated from the Sargasso Sea
atgaaaacaaatgaaatatcaaagagctttaaaaatactcaaaatcaaattgtcaaagctataaaaaccctagactcaacaattatcaagaaatcatcttcttggaaacataggacaggcggtggtgggataagctgtgagatggaaggaagtaaatatattgataaagcagctgtcaatttttcaagtatagtaggtgataaacttccagcgagcgccctacagaaatcaggagtaagtggtctaaataaatatagggctacaggggtttcagtaattattcatcctataaacccgaaaataccatgtgctcacatgaacattagattttttgaagccaaagtgaataggaaaaatgtttggtggtttggtggaggttttgatttaactccttacttcattaataaatcagatattctttattggaaaaactcagcaaaagaactttgtgataaatacaaaaggggaatgtatgaagaatacaacaaaaattgtaataactattttttcttaccgcatagacaagagccaagaggagtaggaggattattctatgatcaaatgaactcgcctgattatagtacatgtaaagagttctctcttgattgcgctatgacattcaaaaattcatatttatacctattcgacctgaaaaaaaataaaaaatatacaaaaaaagaaaaatcatttcaactttaccgtagaggaagatatgtagaatttaacttattgtatgatcgaggaactttatttggacttcagtcaggtgggagagctgaatcgattctcatgtctctgccaccagaggttacatggaataaaaaatatgactttactaaatatgaaaaaaagctgatggaaatgttttctctagctagaaagtaaa

SEQ ID NO: 218630 - DNA, 829 bp, Unknown
  Bacterial polypeptide expressing nucleotide sequence isolated from the Sargasso Sea
tatggatgaaataattaaaaaaaaattagcaagaaattggtttaaaactttacaagaagttttgtgtaaagaaatagaagaattagaaggtggatcaaaattatttaagtataaaaactgggaaagaggtaaaaaatcaaatgaaggcggaggtcaatcaagaatttataaaaatggaaagatttttgataaggttggtgtaaatttttctgaagtttatgggaagttttctaatcaatttaagaataaaattccaggtacaaataaaaattctaaattttgggcctcagggatatctgtggttatgcacatgaaaaaccctcatgttcctgcaatgcattttaatactagatatgtttatacatcttatggatggtttggtggtggaatggatgtaacgccatgttttaaagataaaaaattggaaaaatggtttcattctgaaataaaaaaatcttgtgataaacataataaaaactattacaaaaaatataaaaaatggtgtgacgaatatttttatttgccacatcgaaatgaaccacgtggcattggtggaattttttttgattataaaaaaaataattgggaaaaagatttttcctttgtgagagaagtaggaataagttttaaaaacatttttagagaaataatattaaaaaaacataaaaaaaaatggactaaaaaggataaggaaattcaatatgaaaaaagaggaagatatgtagaatttaatttgttatatgatagaggaactaaatttggattaaatactggtggtaacgttgatgctatactaatgtctttgcctcctctggcaaagtggaaataa

SEQ ID NO: 218631 - DNA, 886 bp, Unknown
  Bacterial polypeptide expressing nucleotide sequence isolated from the Sargasso Sea
atgttagataaaatagcagaaaactttcaagagattcatcaatcactggtagataacttttatcgttatgaacaaaaagaaaaaattattgttgataaatgggaaaaagagactcttggtcgcgggatttcagttgttgtagattgcggcaaattttttgataaagcgggaatcaatttctcgcaaatttctggcaattctttacccagatcatctgttggaagtgaggggtataaagatgctccatattttgcgactggagtttcagttgtctttcatcccaaaaacccaaatataccaacttcgcacttgaatgtaaggtactttgcgactttcaatgagaataatgaaattaatgaagattggtttgggggaggttttgacctaacaccttacgttccatttaaagaagattgtaaatcttggcatcagcaagcccaaattgcatcgaaaaataaatatcaagaatggaaaaataattgtgatgattatttctatttaaaacatagaaatgagcataggggcattggcggtattttttatgaaaaacaaacatttgaaaaacctgaacaaggattagaactgtctaaaagtgttgcagagtcttttttaagcggatacagcaatattttagacaaaagaaaagatcttgagtttacagaaagacaaaaagagtttcagatatttagaaggggaaggtatgtagaatttaatcttttatatgacagaggaactttgtttggacttcaatctgggggaagaatagagtcaattttaatgtctctcccaagtgaagtttcatggcgctataaatttgatcaaaatcttaatagtgaagagcaaaacctttataacttaatatcgaaaaagcataaatggatatgaa

SEQ ID NO: 218632 - DNA, 910 bp, Unknown
  Bacterial polypeptide expressing nucleotide sequence isolated from the Sargasso Sea
gatgagcgtgccagatgcgacagtggtaaaagcatttttactcgatctacagaatcgaatttgtgcgggtcttgagcagttggatgggcaagcaagctttgcggctgattcatggacgcgcaccgaaggcggtggcggtaccagtcgtgtcttaacccaaggtgcggtattcgagcaagctggggtgaacttttcccatgtaacaggtgcggccatgcccgcatcggcaacggctcatcgcccagaattggcggggcgtagttttgaggccatgggtgtctctttagtgattcaccctaaaaatccttatattccaactactcatgctaacgtgcgtttctttattgcccataaagacggtgcggatcctgtttggtggtttggtggtggtttcgatttaacgccttactatcctttcgaggaagacgtacgcgaatggcatcaaaccgctaaaaatctgtgtctgccctttggcgacgacgtatatcctaaatataagaagtggtgtgatgagtatttcttcctgccacatcgtaacgaaacccgcggcgtgggcggattgtttttcgatgacttgaatcaagctggctttgataagagtttcgattttatgcaagcggtggggaatggcttcttaaccgcttatgcgccgattgttgagcgccgtaaagagacgccctatggcgagcgtgagcgtgagttccagttgtatcgtcgcggtcgttatgttgagttcaatctggtatacgacagaggtaccctgttcggtctgcaaaccggtggtcgcacagagtctattttgatgtcaatgccgccattggtacgctggcaatatgcttatacgccagaggcgggtagccctgaggcagatctttacgataactacctcaaacctcgagattgggtataa

SEQ ID NO: 218633 - DNA, 907 bp, Unknown
  Bacterial polypeptide expressing nucleotide sequence isolated from the Sargasso Sea
aatgaagcataaaattgaaaataatttaatagacatacagtcggacatcattaatgcttttaaatctcttgaatccgaaaacgactcaattatttcattagacgaatggaagcgagaagaaggcggcggcggcaaaacatttgtgatagaaaatggatctttctttgataaatgcgcagtaaatttttcatctattaaaggaaaggatttacccaaaactgcattagctaataatcttaataaagaagttaattatggatataaggcaatgggagtttctgtcatatcacatccaaaaaatccaaatgttccaactagtcatatgaatgttaggttatttggaattttggataaaaacagtgaaatagatgagtggtggattggtgggggatatgacttaactccttttatagcatttgaagacgatattaaaaaatggcatagaaatgcaaaagagtgtctagatgaaattaataacgattattatccctgcttttctgacaattgtaataattatttcaaaataccacacaggaacgagagaagaggagttggaggtatcttttttgataatgttacagatttatctctagaaaatagtgtaaaaatgcttgaatctgttgcaaatgcttatctaggatcctacatggaaattgcaaataaaaggaaaaacattaaattttcagatacagaaagagattttcagcttattagaaggggaagatacgtagaatttaaccttatttacgaccgaggcactttatttggacttcaatcaaatgggagaatagaatcaattttggcgtctttgccaaataatactaaatggcagtataaaaaaacagaagagtacaacagattagaaaaagagcttttatcaacaattaataaggattggaatgtctaa

SEQ ID NO: 218634 - DNA, 859 bp, Unknown
  Bacterial polypeptide expressing nucleotide sequence isolated from the Sargasso Sea
atgtacctgtctactaaaaaccaacgcctagaaacacaaaaatggtttgaagtgttgagggatcaaatctgttccagttttgaaaaacttgaacagaattacgaaggccctaaacagtcaatgcctcccggtaaatttagacggaaaaaatggcatcgagagggaggaggaggaggagagatgtcaataatggagggccgccttttcgaaaaggttggtgtaaatatttccaccgtaatgggagagctgtcgccagagtttagcaaacagattcccggcgcagagaataatcctaaattttgggcatcgggcatttcattagttgcgcacatgtggtctccgcatataccggcagttcatatgaacacacgacacattgcaacaacacggtcatggtttggtggcggagccgatctcacacccatgattattaatacagaggacaaggaattattccacaacgcgtttcggtctgcttgcaccaaacacgatgacacttactatactcgttttaaggaatggtgcgatgactacttctatctaaaacataggaatgaaccgagaggtgtaggcggtatcttctacgatcaattagcaaataattttgagaccgactttaactttacgaaagacgtagggtcgacctttgccagcatatatccaacaatagtaaaacggcatatgaacaagacgtggactaaaaaagagagacaagcacaattagttaagcgagggcgctatgtagaatttaatttactttatgatagagggacgctttttggattacagacgggcggtaatgtcgaagctatcctgatgagcctgccccctgcagttgcctggccaagttcgatataat

SEQ ID NO: 218635 - DNA, 799 bp, Unknown
  Bacterial polypeptide expressing nucleotide sequence isolated from the Sargasso Sea
atgtttaacgaagcaaagaattggtttaaacttttaagagatgatcttgtgaaaaacacacaagtatttgaaaaaaaatcttttattgaaaaacgttggaagcatcatgatgaaggtggcggcttaatgacaaaaattaaaggaaatgttatcgaaaaaggtggcattaatatttctactgtttcagggaaattcaatgaaaaaatgcaaaaaaatgttttaggcgcctcggaagatccaacattttcagcaacaggtattagcgtagtatttcatcccatgtcccctcatataccctcaatgcactttaatactcggtatcttacaactacaaaaagttggttcggcggcggtatggatcttactccttgtttagattttgacaccgaatctcaaatttttcataaagaattagaggatatttgtaatagatataacgatgattattatccaaaatataaaaaatggtgtgatgaatatttttacttaaaacatagaaaagaaccgcgtgggattggaggaatattttttgatcatcttaatagtggaaatcaagaaaatgattttgagtttgttaaagatgtaggaaagttttttttgaaacacgccatatacttaataaataaagataaagatagagcatggacatctagagaaaaagatgtccaactaattaaaagaggacgctatgttgaatttaatttgctttatgatagaggtacaaagtttggtcttgaaaccgggggaaatacagaagctatcttaatgtcaatgcctccaatagccaattgggaataaa

SEQ ID NO: 218636 - DNA, 718 bp, Unknown
  Bacterial polypeptide expressing nucleotide sequence isolated from the Sargasso Sea
aatgaacgaagaattaaaaaaaaatttagcaagagattggtttaaaatattgcaagatatgatttgtcttgaaattgaaaaaatagaaaaaaataaagttatttttgaatcaagaagttggaaaaggaataaagttagagatgagggtggtggagagtacagaatattaacaaatggaaaagtatttgataaagttggagtaaatttttccgaagtttatggtaaattttctaaagaattcaaaaataaaattcctggcactaattcaagttctaaattttgggcatctggaatatctgttgtcatgcatatgaaaaatccacatataccagcaatgcattttaatacaagatttatatatacatctcatggttggtttggtggaggagttgatgtaaccccatgtttcaatgacaaaaaattaaaaaaatggttccatgcagagataaaaaaatgctgcgatagacataataaaacttattataaaaaatacaaaaaatggtgtgatgaatatttttatttacctcatagaaaagaatcaagaggcataggtggaattttttttgattataaaaaaaataattggaaaaaagatttttcttttgtaagagatgttggaatttcatttaaaagaatttttgaggaaattataaaaaataaaaataagaaaaaatggaataaaaatgaaaaagaaattcaataccaaaaaagaggaaga

SEQ ID NO: 218637 - DNA, 826 bp, Unknown
  Bacterial polypeptide expressing nucleotide sequence isolated from the Sargasso Sea
atgataacacctgattttagaaaaaaaatggctgatagctggttttcatatttacaaactcaaatttgtaaagaatttgaatatcttgaaaaaaataaagtaaaattctcaaaaagagattggagtaaaaaaaaaaaaaaagaaggtgggggaacttcatttctgttatcaaatgggaaaatatttgataaagttggagtcaataaatctaccgtttcaggaatttttcctaaacaattcagatcaaaaatattaggtgctgaaaagaaaggtaaatattgggcatcaggagtttctgtggtagctcatatgagaaaccctaaaatgcctgcgatacatttcaacactaggtttatagtaacctctaaagagtggtttggtggagggatggatgcaactccaagttataaagatttaatagaaaaaaaaatgatacatgatgaattaaaaaaagtatgtgtgcaaaataaaaagaattataaaaaatacaaaaaatggtgtgatgaatatttttatttaccacacagaaaagaagctagaggcattggtggtattttttttgactatgaaactaaagattggattaaaaactttaagtttgtaagagaacttggactttcttttatagatatttcaaaaaaaattataaagagaaaagaaaaatttaaatggacaatcaaagataaagaaaaacagttattcaaacgcgggaggtatgtagagttcaatctattgtacgatagaggtacaaagtttggattaaactcggggggaaatattgactcaatattaatgtcacttccgcctgaagcaaagtggaaatagt

SEQ ID NO: 218638 - DNA, 704 bp, Unknown
  Bacterial polypeptide expressing nucleotide sequence isolated from the Sargasso Sea
catgttgaaagaacctcctaaaaactcgagagaaaaaactaaaaatctcttattaactcttcaagacaaaatttgttcaggtcttgaaaatattgatggcaaagggaaatttacagaggaatcctggctaagagacgaaggtggcggtggaagatcaagagtattgaaaaatggttctatttttgagcaagcaggcgtaaatttctcggaagtacagggaaaagaattacctcaatctataatctctcaaagaccggaagcaaaaggtcatgaatggtttgctacaggaacttctatggttttacatcctaagaatccctatattcctacagttcatctaaattatcgatatttcgaagctggtcctgtttggtggtttgggggaggtgcagaccttacccctttttatccttatctttctgatataaggaattttcataacgagcataaaaaagcttgtgagaaagttgatcaagatttgcataaagttttcaaaccatggtgtgatgaatattttttcttaaagcatagaaatgaatctagaggcataggaggcattttttatgattatcaagatggttcaggcaatatttatagaggaaataatcaaaatggagaggcatcaaaagcttcacaaaatattggcagatctaatttgaattggggtaatttattttctttagcggaaaactgtgggcaggcat

SEQ ID NO: 218639 - DNA, 829 bp, Unknown
  Bacterial polypeptide expressing nucleotide sequence isolated from the Sargasso Sea
tatggatcaaacgattaaaaaaaaactagctcgaaattggtttaagactttgcaagaagtaatttgtcaagaaattgaggaattagaagcgaaaaaaaatatcttcaaaattaaaaattgggaaagaggtaaaaactcaaatgaaggtgggggccaatttagaattttagaaaatggaaaaatttttgaaaaagtaggtgtaaatttttcagaagtgtatggaaaattttcaaaagaatttagaaacagaatccctgggggagataaaaatccaaacttttgggcagcgggtatatcagtagtaatgcatatgaaaaaccctcatgttcctgctatgcattttaacactagatatatttatacttctcatggatggtttggtggagggatggatgttacaccttgcctgaaagataaaagtttagaaaaatggtttcataatgaattaaagaaatcttgtgacaaacacaataaaaatttttataaaaaatataaaaaatggtgtgatgaatatttttatttgccacataggaaagaaccaagaggtatagggggaattttttttgattataaaaaagaaaattgggaaaaagattttaattttgtaagagaggtaggaataagttttaaaaatatttttagagaaataatactaaaaaaatataaaaaaaaatggtcaaataaacaaagagaaattcaattagaaaaaagaggtcgatatgttgaatttaacttactttatgatagaggtacaaagtttggtttacaaacgaatggtaatgttgaagctattttaatgtcattaccacctgttgcaaaatggaaataa

SEQ ID NO: 218640 - DNA, 561 bp, Unknown
  Bacterial polypeptide expressing nucleotide sequence isolated from the Sargasso Sea
gtgaaccctgcttattacccggtcttcagccctggtgtgatgagtacttctacttgaaacaccgcgatgagacccgcggtatcggcggcattttttacgactaccaggcacctggcggcgcgatttacaaaggccccgatgccgacggtctggccgcggcggtgggtaaagaccagatgcctgagcgcgattgggagagtcttttccagctggcttcagcctgcggaaatgcctttttgcccagctatgtgccgatcgctgagcggcgccagggcctgagctacggcgaccgcgagcgtcaattccagctctaccggcgcggccgttatgtggagttcaacctggtcttcgatcgcggcactatttttggtttgcagaccaatggccgcaccgaatcaattttgatgtccctgcccccgctggtgcgctgggaatacggctacagcgctgatgagggaagccgtgaggccctactcactgatgtcttcaccagtccccaggactggctcggggatggtgcccttgagcagcgttgtgccctccacggggccgttggctaag

SEQ ID NO: 218641 - DNA, 910 bp, Unknown
  Bacterial polypeptide expressing nucleotide sequence isolated from the Sargasso Sea
atgagcaaaccggatgtggcccaggtcaaggccttcctgctgcagttgcaggacgagatctgccgtggcctggaactggccgacggcgtcggacactttgtggaagatgcctggcttcgtgaaggaggtggtggtggccgcactcgcgtactgcgtcacggtgctgtgatcgagcagggaggggtcaacttctcccacgtgcatggcgacgccatgccggcctcggcgacggcccatcggccggaactggcgggccgccggtttgaggccatgggggtgtcgctggtgatccacccacacaatccgtatgtgccgaccagccacgccaatgtgcgcttcttcatcgccgagaaagagggtgaggagccgatctggtggtttggtggcggcttcgatctcaccccgttttatccgttcgaagaggacgtacagcattggcatcaggtctccttcgatctttgtcagccgttcggcaccgatatttatcccgagttcaaatcctggtgtgatcgctacttcttcctcaagcaccgggacgagacgcgcggcgtcggcggcctcttcttcgatgatctgaatcgctggccgtttgtcgactgtttcgcctttatgcaggcggtcggcaagggctatctcgatgcctacctgccgattgtcgagtgccgcaaggcgctggcttatggcgaacgggagcgggaattccagctctatcgtcgtggccgctatgtggagttcaatctggtgtatgaccgtggaaccctgttcggcttgcagactggcgggcgtactgagtcgatcctgatgtcgatgccgccgctggcgcgctgggaatatgactggcagccgcctgcgggcagcccggaggcattgctctacagcgactacctaaaaccgcgcgagtggttgtgac

SEQ ID NO: 218642 - DNA, 398 bp, Unknown
  Bacterial polypeptide expressing nucleotide sequence isolated from the Sargasso Sea
tttcatcaaatacttaagaaaatcttgtgatcaacataataaaaattattacaaaaaatataaaaaatggtgtgatgaatatttttttttgaaacatagaaatgaacccaggggaataggtgggatttttttcgattataaaaaaaaaaattgggaaaaagattttgaatttgtaagggatgttggtttaacttttcaaatgatttataatgaaattatttttaagtataaaaataaaaaatggacaaaaaaagataaggaaaaacaatttttgaaacgtggaagatatgtagaatttaatttaatatatgatagaggaactaaattcggactacaaacaggtggaaacgtagaaggaattttaatgtcgttaccgcctattgctaaatggaaataag

SEQ ID NO: 218643 - DNA, 1027 bp, Unknown
  Bacterial polypeptide expressing nucleotide sequence isolated from the Sargasso Sea
gttgaaagaaccacctaaaaactcgagagaaaaaactaaaaatctcttattaactctacaagacaaaatttgttcaggacttgaaaatgtagatggcaaagggaaatttacagaggaaacctggctaagagacgaaggtggaggtggaagatcaagagtattgaaaaatggttctatttttgagcaagcaggcgtaaatttctcggaagtacaaggaaaagaattacctcaatctataatctctcaaaggccagaagcaaaaggtcatgaatggtttgctacgggaacttctatggttttgcatcccaagaatccctatattcctacagttcatctgaattatcgatatttcgaagctggtcctgtttggtggtttgggggaggtgcagacttaacccctttttatccttatctttctgatgtaaggaattttcataatgagcataaaaaagcttgtgagaaagttgatcaagatttgcataaagttttcaaaccatggtgtgatgaatatttcttcttgaagcatagaaatgaatctagaggcattggaggtattttttatgattatcaagatggttcaggcaatatttataaaggaaataatcaaaatggagaagcatcaaaagcttcacaaaatattggcagatcaaatttaaattgggatgatttattttctttagcggaaaactgtgggcaggcattcctcccttcttatttgcccattattgaaaaaagagcttctcaaacatattcatcgaaggaaagagaattccagctatatcgaagaggtagatatgtcgaattcaatttagtttgggatagagggacgatttttggactacaaacaaatggtagaaccgaatctatattaatgtccttaccgcctttggccagatgggaatatggatataaagctaaaaatggttctcgagaggaatttctcacatcaatttttacaaaaccccaagattggttaaatgataaagagttagaaaaattctgtatagaaaataatatttttgattaa

SEQ ID NO: 218644 - DNA, 766 bp, Unknown
  Bacterial polypeptide expressing nucleotide sequence isolated from the Sargasso Sea
tttgtcagaaatagaagaattagaaggaaaaaaaaagatcttcaaaattaaagattgggaaagaggaaaaaactcaaatgaaggtggtggccaatttagaatattggaaaatggtaaaatttttgaaaaagtaggagtaaatttttctgaagtttacggaaaattttcaaaacaatttagaaatagaattcctgggggagataaaaatccaaacttttgggcagcaggtatatcagtagtaatgcatatgaaaaaccctcatgttcctgctatgcattttaacactagatatatttatacttctcatggatggtttggtggagggatggatgttactccttgcctgaaagataaaagtttagaaaaatggtttcataatgaattaaagaaatcttgtgataaacataataaaaatttttacaaaaaatataaaaaatggtgtgatgaatatttttacttgccgcacaggaaagaacccagaggtataggaggaattttttttgattataaaaaagaaaattgggaaaaagattttagttttgtaagagaagtaggaataagttttaaaaatatttttagagaaattatactaaaaaaatataaaaagaagtggtcaaataaacaaagggaaattcaattagaaaaaagaggtcggtatgttgaatttaatttgctttatgatagaggtacaaagtttggtttacaaacgaatggtaatgttgaagctattttaatgtcactaccacctgttgcaaaatggaaatag

SEQ ID NO: 218645 - DNA, 403 bp, Unknown
  Bacterial polypeptide expressing nucleotide sequence isolated from the Sargasso Sea
gcttcacaaaatattggcagatttaatttaaattgggataatttattttatttagctgaaaattgtgggcaggcattcctcccttcatatttgcccattattgaaaaaagagcctctcaagcatattcatccaaggaaagagaattccagctatatcgaagaggtagatatgtcgaattcaatttagtttgggatagagggacgatttttggactacaaacaaatggcagaactgaatctatattaatgtctttaccgcctttagctagatgggaatatggatataaagctaaaaagagttctcgagaggaatttctcacatcaatttttacaaaaccccaagattggttaaatgataaagagttagagaaattctgtatagagaataatatttttgattaag

SEQ ID NO: 218646 - DNA, 220 bp, Unknown
  Bacterial polypeptide expressing nucleotide sequence isolated from the Sargasso Sea
tatgttcattccgaccattcaagggcaaggcgacgaggagcaacgaaagtattggataccaaaatgtgtcaagttggagtgcatcgggacatacgcacagactgagctaggtcatggcacgtttcttcgaggtttggagacgaccgcaacttacgaccaatcaacagaagaattcatcgtgcattcaccaacactgacgagtacgaagtggtgggccggg

SEQ ID NO: 218647 - DNA, 229 bp, Unknown
  Bacterial polypeptide expressing nucleotide sequence isolated from the Sargasso Sea
gggtggaatggagatgaatatttaggacctgctgtccttttacaagcagcaagatgggttagtgactctagagactcagaaagaaaagagagattaaaagcaataaatgattcattaaaactttatagatgtcattcaataatgaattgtactaggtcttgtcctaaaggtctaaatccagccaaagaaattgctggacttaaaaaggctattgttacagaattataat

SEQ ID NO: 218648 - DNA, 493 bp, Unknown
  Bacterial polypeptide expressing nucleotide sequence isolated from the Sargasso Sea
atggttcaaataaatttacctgagaattcaaaaattcaaaaaggtaaatattttaaagacaaaactaactcaagaaatattaggaaagttaacatttacaggtgggatccctcaacaggcgctaaaccaagaatagatacctacgaagtagacatggacaattgtccatctaaagttttagatattttaaataaaataaaaaacgaaattgacccaacaataacttacagaagatcgtgtgctcacggagtatgcggttcatgtgcaatgaacatgggaggtaaaaatggtctcgcatgcactacctcacactctgaaataaaaggagatattaacatatatcctttgccacatttaaaagtaaaaaaagatttaataggtgatcttgatggtctttacaaccaatacaaatctatagaaccttggttgaaaaataaatctacatctgaaagtaaagaaatacatcaatcccaaaaagatagatcaaaattag

SEQ ID NO: 218649 - DNA, 422 bp, Unknown
  Bacterial polypeptide expressing nucleotide sequence isolated from the Sargasso Sea
tgtaattaaggatttaatcgttgatttaagtcatgctttaaacaaacttgaatttatacagccatggttacaaaataatataggaaaatctacaaaaaatgaacaaattcaattatcaaatgatcgttctaaaatagatggattatgggagtgcatattgtgttttagttgtacaacatcctgtgtaagttattggtggaatggagaaaaatatctaggccctgccgttttacttcaagcatctagatgggttaatgatagcagggatagcgaaaagaaaaaaagattaaaatatatagaacaaaattcaaatattcataattgtcattcaattatgaattgtgcaaactcttgtcctaaaggacttaatcctggaaaagcaattgttgatttaaagaaacaaattgctatgaatgtttagt

SEQ ID NO: 218650 - DNA, 183 bp, Unknown
  Bacterial polypeptide expressing nucleotide sequence isolated from the Sargasso Sea
tccaaaggctgtttgtgagctcgaacatatggttttacctttctctagatttgaaaacggtagaatttatcaaagaccttttggaggtcaatcaaaagaatttggaaaaggaggccaagcctcaagaacatgtgctgcagctgatagaacaggacatgctttgttacacacactttatcaaaa

SEQ ID NO: 218651 - DNA, 562 bp, Unknown
  Bacterial polypeptide expressing nucleotide sequence isolated from the Sargasso Sea
catgaataaagtaattaatatctcaaataaaagtaacatcaaagaatttgatgcacttattgttggtggaggcggatcagggatgagaacctctcttgaactagccaaatcaggtctgaatacagctgttatttctaaagtttttcctaccaggtctcataccgtctcggctcagggaggaattacatgtgcaatccaaagcgaagatccaaatgatgattggagatggcatatgtacgataccgtaaaaggctctgactatattggtgatcaagatgctattgagtatatgtgctcagaggggccaaaagcagtttatgaattagagcacatgggcctaccattttctcgttttgaaaatggaaggatttatcaaagaccatttggtggacaatctaaagattttggaaaaggtgggcaggcagcaagaacttgtgcagctgcagatagaacaggtcatgcacttcttcataccctctaccaaaataatgttaaagagggaacaaactttcttaatgaatggtttgctgttgatcttgtaaaaaattcaaagaatgagata

SEQ ID NO: 218652 - DNA, 496 bp, Unknown
  Bacterial polypeptide expressing nucleotide sequence isolated from the Sargasso Sea
catgaataaagtaattaatatctcaaaaaaaaataacatcaaagaatttgatgcacttattgttggtggaggcggatcagggatgagaacctcccttgaactagccaaatcaggtctgaatacagctgttatttctaaagtttttcctaccaggtctcataccgtctcggctcaaggtggaattacatgtgcaatccaaagtgcagatccaaatgatgattggagatggcatatgtacgataccgtaaaaggctctgactatattggtgatcaggatgctattgagtatatgtgctcagagggaccaaaagcagtttatgaattagagcacatgggcctacctttttctcgttttgaaaatggaaggatttatcaaagaccatttggcggacaatctaaagattttggaaaaggtggacaggcagctagaacttgtgcagcagcagatagaacaggtcatgcacttcttcatactctctaccaaaataatggttaa

SEQ ID NO: 218653 - DNA, 711 bp, Unknown
  Bacterial polypeptide expressing nucleotide sequence isolated from the Sargasso Sea
aatggttcaattaaatttacctgcaaactcaaaggtagaaaaaggtcaatactataaagataaaacagggtcaaaaaatattagaaaagtaaatgtttatagatgggatccatctacaaatgaaaatccaagacttgatacctatgaggttgatatggataattgttcatctaaagtccttgatgttttaaacaaaattaaaaatgaaatagatccgtctattgcttatagaagatcttgcgctcacggagtatgtgggtcatgtgcaatgaatatgaatggaaagaatggtctagcatgcaccaaatctcattctgaattaagtggagacatcgatatttatccattaccacatttaaaagttttgaaagatttaattggagacttaagcactctttataaacaatacgagtctgttgaaccttggctaaaaacgtcaaaaataaatgataaagaaaacattcagacaaaacaggatagagcaaaattagatggtttgtatgagtgtataatgtgtgcatgctgttcaacatcttgcccaagttattggtggaatggtgaaaaatatttaggtcctgcagttttacttcaagcttacagatggataattgatagtagagacgaggacagaaaagaaagacttaaaaaggttgctgacgaacttaaactttatagatgtcatactatcttgaaatgcacaaatgcttgtcc

SEQ ID NO: 218654 - DNA, 594 bp, Unknown
  Bacterial polypeptide expressing nucleotide sequence isolated from the Sargasso Sea
aatggtacagtttaatcttcctaaaaattctaaaattttaaaaggacaatattttaagaataaaacaggatcttcaaatataaagttagtgcatgtttatagatggaatcctgaaaaaaaggaaaatcctagagaagatacttttgaagttgatttaaatacatgtggaaataaagttttagatattttaaataaaataaaaaatgaaatagattcaactttaacatttagaaaatcatgtgctcatggaatatgtggatcctgtgcgatgaatgttgatggggttaatacactatcttgtatgaaatcgcacaaagacatcaaaggtgatttgcgtatttttcctttaccccatttgaaagtgataaaagatttggttgcagatctaagtatattatacaaacaatatgaatcaatagaaccttggttaaaaacatcaaaatctagatcagaaaaaaatgagatcaatcaatcaaaaaaaaatagagaaaaacttgatggtttatatgagtgtattatgtgtgcatgttgttcaacatcctgtccaagctattggtggaacggggaaagttacctaggaccagcagtgttact

SEQ ID NO: 218655 - DNA, 388 bp, Unknown
  Bacterial polypeptide expressing nucleotide sequence isolated from the Sargasso Sea
gcaactggcctctattaaaccttggttgcagcgtgaaaaaacaaatgaagaaaaaaactcaggagacgaaaaaaaacaatcaccaaaagatagagaaaaacttgatggtaaatgggagtgtgtattatgtttttgctgcactacttcttgtccaagttattggtggaatggagatgaatatttaggacctgcagtccttttacaagcagcaagatgggtaagtgactctagagactcagaaagaaaagagagattaaaagcaataaatgattcattaaaactttatagatgtcattcaataatgaattgtactaggtcttgtcctaaaggtctaaacccagccaaagaaattgctggacttaaaaaggctattgttacagaattgtaa

SEQ ID NO: 218656 - DNA, 730 bp, Unknown
  Bacterial polypeptide expressing nucleotide sequence isolated from the Sargasso Sea
catgaataaagtaattaatatctcaaaaaaaaataacatcaaagaatttgatgcacttattgttggtggaggcggatcagggatgagaacctcccttgaactagccaaatcaggtctgaatacagctgtcatttctaaagtttttcctaccaggtctcataccgtctcggctcagggaggaattacatgtgcaatccaaagcgaagatccaaatgatgattggagatggcatatgtacgataccgtaaaaggctctgattatattggtgatcaagatgctattgagtatatgtgctcagagggaccaaaagcagtttatgaactagagcacatggggctaccattttctcgttttgaaaatggaaggatttatcaaagaccatttggtggacaatctaaagattttggaaaaggtgggcaggcagcaagaacttgtgcagctgcagatagaacaggtcatgcacttcttcataccctctaccaaaataatgttaaagagggaacaaactttcttaatgaatggtttgctgttgatcttgtaaaaaattcaaagaatgagatcactggagttatagctttttctattgaatcgggtgaagtctgttaccttaaagctcaggcaacggttctagccactggcggtgctggaagaatatatgcatccacaacaaatgctttgattaataccggagatggacttggaatgactcttagagctgggtttcctgca

SEQ ID NO: 218657 - DNA, 395 bp, Unknown
  Bacterial polypeptide expressing nucleotide sequence isolated from the Sargasso Sea
acaattagcatcaattaaaccttggatagagagggataaagatgaatatactaaacaagattctacaattgcagaaaacaagcagacaacaaaagatagagaaaaattagatggtaaatgggagtgcgtattatgtttttgttgcactacagcatgccctagttattggtggaatgaagatgaatatttaggtccagcagttttgatgcaagctgctaggtgggtagatgattctagagattctaagagaaaagaaagattaaaatcaataaatgattccatgaagttatttagatgtcactcaataatgaattgtactcgttcttgtccaaagggtctcaaccctgcaaaagctattgcagatttaaagaaggctattgttacagaattataat

SEQ ID NO: 218658 - DNA, 250 bp, Unknown
  Bacterial polypeptide expressing nucleotide sequence isolated from the Sargasso Sea
catggaggacggcacgctgcaccgcttcaagtgcaagaacaccgtcctcgcgaccggcgggtacggccgcgcgtggtactcggccacgtcggcccacacgtgcacgggcgacggcaacgcgatggcggcgcgcgccggcctgccgatgcaggacctggagtttgtgcagttccaccccaccggcatctacggcgccggctgcctcatcaccgagggtgcgcacgcggtagtgaatggtgggtggtggtgg

SEQ ID NO: 218659 - DNA, 216 bp, Unknown
  Bacterial polypeptide expressing nucleotide sequence isolated from the Sargasso Sea
aatactgggtcccagcagttcttttacaggcttataggtggatagttgatagcagagatgaagagagagaagctagattgaaaaaagttgcggacgaattaaaactttatagatgtcatactattttaaattgtacaagcgcttgtccaaaaggcttgaatcctgcaaaagcaatagcagaaataaaaaaaatgttagcaacagctagtctttgaa

SEQ ID NO: 218660 - DNA, 414 bp, Unknown
  Bacterial polypeptide expressing nucleotide sequence isolated from the Sargasso Sea
atttaagtaaagcttatgaacaattagcatcaattaaaccatggcttgaaagatctaagtctaatgacaaaaatttagaagatcaaaatgaagaaaaaaaacaatcaccacaagatagagaaaaactagatggaaaatgggaatgcgttttatgcttctgttgcacaacatcttgtccaagctattggtggaatggagatgaatatttagggccggctgtattacttcaggcggcaagatgggttgaagactcccgtgatgttgaaagaaaaaaaagattaagtgcaataaatgactcattgaaactttatagatgtcactctataatgaattgtacccgctcttgtccgaaaggcttaaatcctgcaaaggaaatagcaggtctaaaaaaggctattgttacagaattataat

SEQ ID NO: 218661 - DNA, 454 bp, Unknown
  Bacterial polypeptide expressing nucleotide sequence isolated from the Sargasso Sea
atggcgaatattaggaagatggagtttgacgggctgatagtcggcggcggcggatcagggatgcgcgcttctttgcaaattgcccagtccggcttgaaaacagcagtcattacaaaagtctttccaacccggtctcatacagtttcagctcaaggaggcataacctgcgcaattgcgagcgatgatcccaatgatgattggcgttggcatatgtacgataccgtaaaagggtcggactatattggtgaccaagatgccattgagtatatgtgttcggaaggcccgcaagccgtatttgaacttgagcacatgggcttgcccttctctcgaactgaaaatggtcgaatttatcagaggccctttggtggtcaatccaaggattttgggaagggtggtcaggccgctcgaacctgtgcagcagcggaccgaacaggccatgcacttttgcacactc

SEQ ID NO: 218662 - DNA, 169 bp, Unknown
  Bacterial polypeptide expressing nucleotide sequence isolated from the Sargasso Sea
tgatagtagagatgaagagagaaaagctagattaaaaaaagtttctgatgaattaaaattatatagatgccatacaatattaaattgtacaaatgcatgtcctaagggcttgaatccagcaaaagctatagctgaaattaaaaaaatgctagcttctaagaatctttaa

SEQ ID NO: 218663 - DNA, 661 bp, Unknown
  Bacterial polypeptide expressing nucleotide sequence isolated from the Sargasso Sea
aatggtaaaatttaatcttccgccaaattctaaaattttaaaaggacaatattttaaagataaaactggatcttctaatttgaaaatagttcatgtttatagatggagtccagacgaaaataaaaatccaagagaagatactttcgaggttgatctaaatacgtgtggtaataaagttttagatgttttaaataaaataaaaaatgagatagactcatctcttgcttttagaaaatcatgcgcacatggagtctgtggatcatgcgcaatgaatgtagatggtgtaaatactttatcttgcatgaaatctcacaaagacataaaaggtgacattcgtatttttcctttaccgcatttaaaggttatcaaagatttagtggcagatttaagtacattgtataaacagtacgaatcaattgaaccttggttaaaaacaaaaggatctaagtcacaaaataatgaaattaatcagtcaaaagaaaatagagaaaaactcgatggtttatacgaatgtattatgtgcgcttgttgttctactgcttgtccaagctattggtggaatggagaaagttacttaggtccagcagttttactccaagcttatcgctggatatctgatagtagagatgaggaaaaaaaagaaagattaaaaatggtcgct

SEQ ID NO: 218664 - DNA, 436 bp, Unknown
  Bacterial polypeptide expressing nucleotide sequence isolated from the Sargasso Sea
ggcggtgctgcgcgacaagatgcagcgcgccatgcaggaagaggcggccgtgttccgcacccaggagacgctggaggaaggctgccgccggatttcggaaatctggaaggaactgccggacgtcaaggtcaccgaccgctcgatgatctggaactccgacctggtcgagacgctggaactgcagaacctgatggcctgcgcgatcaccaccgtctacggcgcggaagcccgcaaggaaagccgcggcgcgcatgcccgcgaggactatgccgacggcccgttctccggtcgcgacgacgagaactggcgcaagcatacgctcgcctgggtgaacgaggccggcgacgtcaagctcgactaccgcccggtccacaccgacctcatcgccgacggcatcgacatcaagaagatcgcgccgaaggcgcgggtgtattga

SEQ ID NO: 218665 - DNA, 694 bp, Unknown
  Bacterial polypeptide expressing nucleotide sequence isolated from the Sargasso Sea
atggttcaaataagtttacctgagaattcaaaaattgaaaaaggaaactattataaagataaaacaggatcaaaaaatttaaggaaagtaaacatttacagatgggatccttccactggaaagaatccgagaatagacacttatgaagtcgatatggataattgtccttctaaagttttagacatcttaaataaaattaaaaacgaaatcgatccatctattgcttatagaagatcttgcgctcatggagtttgtggttcttgcgcaatgaatatggatggaaaaaatgggcttgcttgtactaaaccacactctgaaatcaaaggtgatataaatatttatcccttgcctcatttaaaagttttaaaagatttaattggagatttaagtacattatacaaacaatacgagtcagtagaaccttggcttaaaacctctaaaaaaaatgatgaaaaagaaaatctacaatccaaaaaagatagagcaaaattagatggtttgtatgaatgcataatgtgtgcttgctgttcaacgtcttgcccaagttattggtggaatggagaaaaatatttaggaccagctgtcttgcttcaagcttatagatggatcatagatagtagggatgaagatagaaaagagagacttaaaaaagttgcagatgagttaaaattatatagatgtcatactatcatga

SEQ ID NO: 218666 - DNA, 544 bp, Unknown
  Bacterial polypeptide expressing nucleotide sequence isolated from the Sargasso Sea
atggtacagataaatttacctgaaaactcaaaaattaaaaaaggtaaatattttaaagataaaactggttcaaaaaatttaagaaaagttaatatctatagatgggatccatctactggagacaatcctagacttgatacatatgaagttgacatggacaattgttcttcaaaagtattagatgtcttaaataagataaaaaatgaaatagactcaacaattgcttatagaagatcttgtgcacatggtgtttgtggttcttgtgcgatgaatatgggtggaaaaaatggtttggcctgcactaaacctcattctgaaattgatggtgatttagatatttatcctttacctcacttaaaggttaaaaaagatttaattggtgatttagatggtttgtatagacagtataaatctattgaaccatggcttaaatcaaattcgaaatctgaaaaaacagaaatttttcaatccaaagaagatagaaaaaaacttgacggagcttatgaatgcatcatgtgtgcgtgctgctctacatcgtgtccaa

SEQ ID NO: 218667 - DNA, 529 bp, Unknown
  Bacterial polypeptide expressing nucleotide sequence isolated from the Sargasso Sea
catgaatatagatggcgttaacactttagcgtgcttaaaaagtatgtctgatgttaaaaaagaaatcaaaatatatcctttaccccatatgagagttgttaaggatttagtacctgatctaagtaaggcctacgagcaattagcatcaatcaaaccttggttagaacgatcaaaatcagatacaaaaacagaaataaatacaaaagaagaaaaaaaacaatctccacaagatcgagaaaaacttgatggtaagtgggaatgtgttttgtgtttttgttgtacaacatcttgccctagttattggtggaatggagatgattatttaggacctgctgttttattacaagccgctcgatgggtaaacgactcgagagatactgaaagaaaagaaagattaactgctatcaatgactctttaaaattgtacagatgtcattcaataatgaattgtactcgttcttgtcccaaaggtttaaatcctgctaaagaaattgctggtttgaaaaaggctattgttacagaattataa

SEQ ID NO: 218668 - DNA, 664 bp, Unknown
  Bacterial polypeptide expressing nucleotide sequence isolated from the Sargasso Sea
atggttcaaattaatttacctcaaaactcaaaaataataaaaggcaaatactataaggaccaaacaggttcaaaaaatattagaaaagttaatgtttacagatggaatccatcaactggagaaaatcccagaatagacacatatgaagttgatatggataattgtccttcaaaagttttagatatacttaacaaaattaaaaatgaaatagatccttcactagcttacaggagatcttgctctcacggagtttgtggatcttgtgcaatgaatatggatggaaaaaatggattagcatgtacaaaatcacattcggaaattaaaggtgatattaatatttatcctttaccacatttaaaagttttaaaagatcttataggtgatttaagtactttatataaacaatatcaatcaattgaaccatggcttaaaagttcaaaaaaagatgatggtaaagaaaatatacaatcaatagaagatagagaaaaattagatggtctttatgagtgtataatgtgtgcctgttgttcaacgtcatgccctagttattggtggaatggagaaaaatacttaggtccagcagtgttgcttcaagcttaccgttggattgttgatagtagagatgaagaaaaaaaagaaagactaaaaaaagttgctgatgagt

SEQ ID NO: 218669 - DNA, 124 bp, Unknown
  Bacterial polypeptide expressing nucleotide sequence isolated from the Sargasso Sea
agttgcagatgaattaaaactttatagatgccatactattttgaattgtacaaatgcatgtccaaaaggtttaaatccagcaaaagctatagctgaaataaaaaaaatgcttgcaacgagctaa

SEQ ID NO: 218670 - DNA, 478 bp, Unknown
  Bacterial polypeptide expressing nucleotide sequence isolated from the Sargasso Sea
catgaataaagtaattaatatctcaaataaaagtaacatcaaagaatttgatgcacttattgttggtggaggtggatcagggatgagaacctctcttgaactagccaaatcaggtctgaatacagctgttatttctaaagtttttcctactaggtctcataccgtctcggctcaaggaggaattacatgtgcaatccaaagtgcagatccaaatgatgactggagatggcatatgtacgataccgtaaaaggctctgactatattggcgatcaagatgctattgagtatatgtgcgcagagggaccaaaagcagtttatgaattagaacacatgggcctaccattttctcgttttgaaaacggaagaatttatcaaagaccatttggtggacaatctaaagattttggaaaaggtggacaggcagctagaacttgtgcagctgcagatagaacaggtcatgcacttcttcataccctt

SEQ ID NO: 218671 - DNA, 667 bp, Unknown
  Bacterial polypeptide expressing nucleotide sequence isolated from the Sargasso Sea
atgtcatctcttagaacaatttcttttgacgcggtcattattggcggcggcgggtcaggtatgcgagccgcactccaactgtcccaatctggacacaaaacagcggttatttcaaaggtttttccaacgcgttcacatactgtttcagctcaaggtggtattacatgtgcgattgctagcgccgatccaaatgacgattggagatggcacatgtacgataccgtaaaagggtctgattatatcggagaccaagatgcgatcgagtatatgtgcagtgagggaccccaaacagtatttgagctggagcacatggggttgccgttttctcgaaccgacaatgggcgaatttatcaaagaccgtttggcggacagtccaaagattttggtaagggtggacaggcggcaaggacttgtgcagccgcggataggacaggtcatgcgcttttgcatgctctttatcagggtaatttgaaaaataacactgagtttcttagtgagtggtatgcggtagatcttgtacggaatcaagatggatgtgtagtaggtgtcattgctattgagatagagagtggtgaaattgtatttataaattcgaaatctactgtcctggccacaggaggcgctggtcggatctatgcttccactaccaatgccttgatctgtacta

SEQ ID NO: 218672 - DNA, 697 bp, Unknown
  Bacterial polypeptide expressing nucleotide sequence isolated from the Sargasso Sea
aatgttacaatttaatcttccaaaaaattctaaaattttaaaaggacaatactttaaagacaaaacaggatcttcaaacataaaaatagtccatatttatagatggaatcctgaaaaaaatgaaaaccctagggaagacacttttgaagtagatttaaacacatgtggaaataaagtattagatattttgaataaaataaaaaatgaaatagattcatctttaacatttagaaaatcatgtgcccacggcgtatgcggatcttgtgctatgaatgttgatggtcagaatacattatcttgtatgaaatcacacaaagatataaagggtgatttacgtatttttcctctgccgcatttaaaggttgtgaaagacctagtagcagatttaagtacattatataaacaatatgaatcaatagaaccttggctaaaaataaaaaaaactaaatctaaaaaaaatgaaattaatcaatctaaaaaaaatagagaaaagcttgatggcttatacgagtgtatcatgtgcgcttgctgttcaacttcttgcccaagttattggtggaatggagagagttatctaggacctgcagttttgctcccagcatatcgttggatatcagatagtagagatgatgaaaaaaaggaaaggttaaaaatggtagctgataaacttaaattatataggtgtcataccataaat

SEQ ID NO: 218673 - DNA, 133 bp, Unknown
  Bacterial polypeptide expressing nucleotide sequence isolated from the Sargasso Sea
ttgcaaaaagttgcagatgaactcaaactttatagatgtcatactattttaaattgtacaagtgcatgcccaaaaggattaaatccagcaaaagccattgctgagataaaaaaaatgcttgcaacagcataat

SEQ ID NO: 218674 - DNA, 464 bp, Unknown
  Bacterial polypeptide expressing nucleotide sequence isolated from the Sargasso Sea
cctcgatcggatcgacaatttgcgtcacgcaaagggtgaggttcgtactgcggaactgaggctcgagatgcagcggatcatgcagaataactgcgcggtcttccgcacgggcgaagtccttgatgaaggtgtccaactgatgcagtcggcgatcgacaaacgggataacttgcaggttacggacaccacgatggtctggaactctgacctcgtggaaactctggaactccaaaacctcctcgaccagtcgatggcgactatcgcgtcggctgcgaaccggaccgaatcgcggggtgcccacgcccgtgaagattatccggaccgtgacgatgatgagtggatgaaacatacgctggcctgggtagaccatggcggcaacgttaagattgactaccgagaagtcgtcatgcgaacgctcagcaatgacgtgcaagtctttccgccgaaggcgcgggtttattaag

SEQ ID NO: 218675 - DNA, 154 bp, Unknown
  Bacterial polypeptide expressing nucleotide sequence isolated from the Sargasso Sea
gaaagggaagctagattaaaaaaagttgctgatgagttaaaactttatagatgtcatattattttaaactgtactagtgcgtgtccaaaaggtttaaaccctgcaaaagctatagcagaaataaaaaagatgttagccactactagtctttaaa

SEQ ID NO: 218676 - DNA, 259 bp, Unknown
  Bacterial polypeptide expressing nucleotide sequence isolated from the Sargasso Sea
atgttgctcgacttcgtgcccagttattggtggaatggtgacaaatacttaggtccagcattgcttttacaagcttatagatggattgtagatagtagagatgaagaaagagaagctagattaaaaaaagttgcagatgaattaaaactttatagatgtcatactattttaaactgtactagcgcgtgtccaaaaggtttaaacccagcaaaagctatagcagaaataaaaaaaatgttagccactgctagtctttaaa

SEQ ID NO: 218677 - DNA, 286 bp, Unknown
  Bacterial polypeptide expressing nucleotide sequence isolated from the Sargasso Sea
aaaacaacaaaaataaatgataaagaaaacattcagacaaaagaggatagagcaaaattagatggtttatatgagtgtataatgtgtgcatgttgttcaacatcctgcccaagttattggtggaatggtgaaaaatatttaggtccagcagttttacttcaagcttacagatggataattgatagtagagacgaggacagaaaagaaagacttaaaaaagttgccgacgaacttaaactttatagatgtcatactatcttgaattgtacaaacgcttgccccaagg

SEQ ID NO: 218678 - DNA, 479 bp, Unknown
  Bacterial polypeptide expressing nucleotide sequence isolated from the Sargasso Sea
tttgaatactgtgaattcttctaatatctcaaccctcgagttcgatgtgcttgtcattggtggaggtggttcaggaatgagaacttctctggagttagctaaatctgggttaaaaacggctgttgtttcaaaagtttttccaactaggtctcatactgtctcagcccaaggagggataacttgtgcaattgcaagtgctgaccctcaagatgattggcgttggcacatgtacgatactgtcaaaggatcagattacattggagaccaagacgcaatcgagtatatgtgttccgaagggccaaaagcagtctttgaacttgagcacatggggttacctttttcaagaactgaaaatggtcgaatttatcaacgcccatttggaggtcagtccaaggattttggaaaaggtggtcaagcagcaagaacatgtgctgctgcagatagaacaggacatgctttattgcatactctttatcaga

SEQ ID NO: 218679 - DNA, 316 bp, Unknown
  Bacterial polypeptide expressing nucleotide sequence isolated from the Sargasso Sea
aaacaatcaccaaaagatagagaaaaactagatggtaaatgggaatgtgtattatgtttctgttgcactacttcttgtccaagttattggtggaatggagatgaatatctaggacccgcagtccttttacaagcagcaagatgggtaagtgactctagagactcagaaagaaaagagagattaaaagcaataaatgattcattaaaactttatagatgtcattcaataatgaattgtactaggtcttgtcctaaaggtctaaatccagccaaagaaattgctggacttaaaaaggctattgttacagaattataat

SEQ ID NO: 218680 - DNA, 389 bp, Unknown
  Bacterial polypeptide expressing nucleotide sequence isolated from the Sargasso Sea
gcaactggcttccattaaaccttggttgcagcgtgaaaaaacaaatgaagaaaaaaacgcaggagacgaaaaaaaacaatcaccaaaagatagagaaaaactagatggtaaatgggagtgtgtattatgtttttgttgcactacttcttgtccaagttattggtggaatggagatgaatatttaggacctgcagtccttttacaagcagcaagatgggttagtgactctagagactcagaaagaaaagagagattaaaagcaataaatgattcattaaaactttatagatgtcattcaataatgaattgtactcggtcttgtcctaaaggtctaaatccagccaaagaaattgctggacttaaaaaggctattgttacagaattataat

SEQ ID NO: 218681 - DNA, 550 bp, Unknown
  Bacterial polypeptide expressing nucleotide sequence isolated from the Sargasso Sea
atggcccaaataagtttgcctaaaaactctgaggtaaataaagggaaatatttcaaagataagactggatcaaaaaatattcgtaaagttaatgtttataggtgggatccttctacagaagaaaatccaagaattgatacttatgaagttgatatggataattgtccttcaaaagttttagatattttaaacaaaattaaaaacgaaatagacccaacattggcatatagaaggtcatgtgctcatggtgtttgtggttcatgtgcaatgaacatgggaggtaaaaatggtcttgcatgtacaaaacctcatgctgaaatagatggggacattgatatttatcctttgcctcatctaaaagtgaagagagatttaattggtgacttggatggtctttataaacagtataagtctattgagccttggttaaaaagtaattcaactaaagaaacaacagaaatttttcaatcaaaagaggatagagcaaaattagatggtgcgtatgaatgcattatgtgtgcatgttgctcgacttcctgtcctagttatt

SEQ ID NO: 218682 - DNA, 661 bp, Unknown
  Bacterial polypeptide expressing nucleotide sequence isolated from the Sargasso Sea
catgaataaagtaataaatatcgcgacaaaaaataacattaaagaatttgatgcactcattgttggtggtggcggatcaggtatgaggacttctcttgaactggccaaatcaggtttgaatactgctgttatttctaaagtttttccaactaggtcccataccgtttcagctcaaggaggaatcacatgcgcgattcagagcgcagatccaaatgatgattggagatggcatatgtatgatacggtgaaaggctctgactatattggcgatcaggatgctattgagtacatgtgctcagagggacccaaatcagtttatgaattggaacatatgggtctgccattttctcgctttgaaaatggaaggatttatcaaagaccatttggcggacagtctaaagattttggaaaaggtggacaggcagctagaacttgtgcagctgcagatagaacaggtcatgcacttcttcatactctttaccaaaataatgttaaagaaggaacgaactttcttaacgaatggtttgctgttgaccttgtaaaaaattctaagaatgagatcactggagttatagctttttccattgaatctggtgaagtttgttaccttaaagctcaggcaacagtattagccactggcggtgctggaagaatatatgca

SEQ ID NO: 218683 - DNA, 724 bp, Unknown
  Bacterial polypeptide expressing nucleotide sequence isolated from the Sargasso Sea
ttgaatattttaaattcttctaatatcacaacacttgaatttgatgttttggttattggtggaggcggttcaggaatgagaacatctcttgaactagccaaatctggattaaaaacagctgttgtttcaaaagtatttccaactaggtctcatactgtctcagcccaaggaggcataacttgtgcaattgccagtgctgatcctcaagatgactggcgatggcatatgtacgatactgttaagggatcagattacattggagatcaagatgcaatcgagtatatgtgttctgaaggaccaaaagcagtttttgaacttgaacacatggggttacctttctctagaactgaaaatggtagaatttaccaacggccatttggtggtcagtctaaggattttggaaaaggtggccaagctgcgagaacatgtgctgctgcagatagaacaggacatgctttattgcacactctatatcagaacaatgtaaaagaaggatctaattttctaaatgaatggtttgcagttgacttggttctcaatcaattaaaagaagttacaggagtaattgcattttctattgagtctggagaggttgcgtatctgaagtctcaagcaactgtcctagcaactggaggagctggaaggatatattcctcaacaacaaatgccctcataaacactggtgatggtcttggaatgtcccttagagcaggtatccctgcgc

SEQ ID NO: 218684 - DNA, 361 bp, Unknown
  Bacterial polypeptide expressing nucleotide sequence isolated from the Sargasso Sea
ctaagtctaacgataacaatttctgataatttaaatgaagaaagaaaacaatctcccaaagatagagaaaaacttgatggtaaatgggaatgcgtattatgtttctgctgtactacatcttgccccagctattggtggaatggtgatgaatacttaggacctgccgtattacttcaagcagcaagatgggttgaagactctcgagatgctgagagaaaaaaaagattaagtgcaataaacgattctctaaaactatacagatgccactcaataatgaattgtactcgttcttgtcctaaaggattaaatcctgctaaagaaattgctggcttaaaaaaggctattgttacagaattataat

SEQ ID NO: 218685 - DNA, 225 bp, Unknown
  Bacterial polypeptide expressing nucleotide sequence isolated from the Sargasso Sea
tggtggatagtgataaatatcttggtcctgcagtactattgcaatcatataggtggcttcaggatagtagagacgagtcacgaagagaaagattagaagagttagatgacgcttttaaggtttatagatgccatactatcatgaattgcactcaaacttgtccaaaaggtctaaatccagcagaggctatttcaggcatcaaaagaatgattgcctctagataat

SEQ ID NO: 218686 - DNA, 115 bp, Unknown
  Bacterial polypeptide expressing nucleotide sequence isolated from the Sargasso Sea
taaactttatagatgccatactatcttaaattgtactagtgcatgtcccaaaggtttaaacccagcaaaagctattgctgaaataaaaaaaatgttagcaagtgctaatctttaa

SEQ ID NO: 218687 - DNA, 700 bp, Unknown
  Bacterial polypeptide expressing nucleotide sequence isolated from the Sargasso Sea
atggtacagtttaatttaccgtcaaattcaaaaataaaaaaaggtcaatattacaaagacaaaacaggatcaaaaaatataagaaaagtaaatgtttatagatgggatccatctaaaaatgaaaatccaagaattgatacttatgaagttgatatggataattgctcttctaaagttttagatattttaaataaaatcaaaaatgaaattgatccgtctattgcatatagaagatcatgtgctcatggagtatgtgggtcatgtgcaatgaatatgaatggaaagaatggtctagcgtgtaccaaatctcattctgaattagatggagatatcgatatttatccattaccacatttaaaagtcttaaaagatttaattggagacttaagcactctttacaaacaatacgagtcagttgaaccttggctaaaaacaacaaaaataaatgacaaagaaaacattcagactaaagaggatagagcaaaattagatggtttatatgagtgtataatgtgtgcatgctgttcaacatcctgcccaagttattggtggaatggtgaaaaatatttaggtcctgcagttttacttcaagcttacaggtggataattgatagtagagacgaggacagaaaagaaagacttaaaaaagttgctgacgaacttaaactttacagatgtcatactatcttgaatgtacaaa

SEQ ID NO: 218688 - DNA, 118 bp, Unknown
  Bacterial polypeptide expressing nucleotide sequence isolated from the Sargasso Sea
gatgaattaaaactttatagatgtcatactattttaaattgtacaaatgcatgtccaaaaggtttaaatccagcaaaagctattgctgaaataaaaaaaatgcttgcaacgagctaat

SEQ ID NO: 218689 - DNA, 543 bp, Unknown
  Bacterial polypeptide expressing nucleotide sequence isolated from the Sargasso Sea
tttgtggttcctgtgctatgaatattgatggcgttaacacattagcatgtttgaaaaatatgtctgatgttaagaatgaaatcaaaatttatcctcttccacatatgcgtgttgtaaaagatttagttccagatctcagtaaagcatacgaacaactagcttcaattaaaccttggttgcaacgaaaaaaaataaatgaagaagaaaaaaactcgcgagacgaaaaaaaacaatcaccaaaagatagagaaaaactagatggtaaatgggagtgtgtattatgtttttgctgcactacttcttgtccaagttattggtggaatggagatgaatatttaggacctgcagtccttttacaagcagcaagatgggtaagtgactctagagactcagaaagaaaagagagattaaaagcaataaatgattcattaaaactttatagatgtcattcaataatgaattgtactaggtcttgtcctaaaggtctcaatccagccaaagaaattgctggacttaaaaaggctattgttacagaattataat

SEQ ID NO: 218690 - DNA, 445 bp, Unknown
  Bacterial polypeptide expressing nucleotide sequence isolated from the Sargasso Sea
tattaatatttatcctttgcctcatttaaaagttcaaaaagatttaattggagatttaagtattttatacaaacaatacgagtcagttgaaccatggttaaaagtttcaaaaaaagatgaaggtaaagaaaatttgcagtcgatagaagacagatcgaaattagatggcctttacgaatgtataatgtgtgcatgctgctcaacttcttgcccaagttattggtggaatggagataaatatttaggtccagcagttttattacaagcatatagatggattatagacagtagagatgaagatagaaaagagagattaaagaaagttgctgatgaactaaagctttatagatgccatactattatgaattgtactaatgcatgcccaaaaggcttaaatcctgcaaaagcaatagcgtctataaagaaaatgcttgcaacaagttaa

SEQ ID NO: 218691 - DNA, 644 bp, Unknown
  Bacterial polypeptide expressing nucleotide sequence isolated from the Sargasso Sea
gatagatcaagaaaagtgtggcccaatggtattagacgcacttatgaaaataaaaaacgaaattgatccaactttaacatttagaagatcttgcagagaaggagtttgtggttcctgtgctatgaatattgatggtgttaacacattagcatgtttgaaaagtatgtctgatgttaagaatgaaataaaaatttatcctcttccacatatgcgtgtagtaaaagatttagttccagatcttagtaaggcttatgagcaactggcttccattaaaccttggttgcagcgtaaaaaaacaaatgaagaaaaaaactcaggagacgaaaaaaaacaatcaccaaaagatagagaaaaactagatggtaaatgggagtgcgtattatgtttttgctgcactacttcttgtccaagttattggtggaatggagatgaatatctaggacctgcagtccttttacaagcagcaagatgggtaagtgactctagagactcagaaagaaaagagagattaaaagcaataaatgattcattaaaactttatagatgtcattcaataatgaattgtactaggtcttgtcctaaaggtctaaatccagccaaagaaattgctggacttaaaaaggctattgttacagaattgtaat

SEQ ID NO: 218692 - DNA, 706 bp, Unknown
  Bacterial polypeptide expressing nucleotide sequence isolated from the Sargasso Sea
aatggtacaaataaatttacctaaaaattctaaagttcaaaaaggcaaattttataaagataaaacaggttcaaaaaatattagaaaagtaaatatttatagatgggacccttctagtggtgaaaatcctcgtatagatacatacgaagttgatatggacaattgtccatcaaaagtattagatcttttaaataaaattaaaaatgaaatagatccatcgattgcttacagaagatcttgtgcccacggtgtttgtggttcttgcgctatgaacatggatggaaaaaatggtttagcatgtacaaaaccacataaagacattaaaggtgatattaatatttatcctttgcctcatttaaaagttcaaaaagatcttattggagatttaagcaccttatataagcagtacgaatctgttgagccatggttaaaagtttcaaaaaaagatggacataaagaaaacttacaatcaattgaagaccgatcaaagttagatggactttatgaatgtataatgtgtgcatgctgttcaacttcttgtccaagttattggtggaatggagataagtatttaggcccagcagttttattacaagcatatagatggattatagacagtagagatgaagatagaaaagagagattaaagaaagttgctgatgaactaaagctttatagatgtcatactattatgaattgtactaat

SEQ ID NO: 218693 - DNA, 597 bp, Unknown
  Bacterial polypeptide expressing nucleotide sequence isolated from the Sargasso Sea
aatggttcaaataaatttacctaagaattctaaagttcaaaaaggtaaatattatcaagataaaactggttcaaaaaatattagaaaagtaaatatttatagatgggatccttcaagtggtgaaaatccacgtattgatacatatgaggttgatatggataattgcccatcaaaagtattagacctattaaataaaattaaaaatgagatagatccatcacttgcttatagaagatcttgtgcgcatggtgtttgtggatcttgtgcaatgaatatggatggaaaaaatggtttagcatgtacaaaacctcacaaggaaataaaaggtgatataaatatttatcctttacctcatctaaaagttcaaaaagatttaattggagatttaagcactttatataaacagtatgagtcagttgaaccgtggttaaaagtttcaaaaaaagaaaaagatcaagaaaatttacaatctattgaggatcggtcaaaattagatggtctttatgaatgtattatgtgtgcgtgttgttcaacctcctgtccaagttattggtggaatggtgacaaatatttaggcccagcagttttattgcttgc

SEQ ID NO: 218694 - DNA, 421 bp, Unknown
  Bacterial polypeptide expressing nucleotide sequence isolated from the Sargasso Sea
agttaaaaaagacctaatcggagatttagatggattatacaagcaatataaatctattgagccatggttaaaatcgagttcaaaatctgagtcagctgaattaattcagtcaaaagaagatagagctaagcttgatggtgcttatgaatgtattatgtgtgcttgttgttctacttcttgcccaagttattggtggaatggagataagtatttaggaccagcagttttattacaagcttatagatggattatcgatagtagagatgaggaaagacaagctagattaaaaaaagtagctgatgaacttaaattgtatcgttgtcatactattttgaactgtactagcgcatgccctaaaggtttaaaccctgcaaaggcaattgctgaaataaagaaaatgttagcaacagctaatatttaa

SEQ ID NO: 218695 - DNA, 664 bp, Unknown
  Bacterial polypeptide expressing nucleotide sequence isolated from the Sargasso Sea
tggcgaaaatcctcgtattgatacctatgaggttgatatggataattgtccatccaaagttttagatattttaaataaaattaaaaatgagatagatccaacattagcttataggagatcctgcgcccatggggtttgtggttcatgtgcaatgaatatgggtggcaaaaatggtttggcatgcacaaaaccacatgaagaaatagatggcgatatagatatttatccattaccacacttaaaagttaaaaaagatttaatcggagatttagatggattgtataaacaatatcagtcaatcgagccttggttaaaaaataattccaaatccgaaacaaatgaaattattcaatctaaagaagatagggctaaactagatggtgcatatgagtgtattatgtgtgcttgttgttcaacatcatgcccaagctattggtggaatggtgataaatatttaggtcctgcagttcttttacaggcatatagatggatagttgatagcagagatgaggaaagaaattccagactaaaaaaagtggcagatgagcttaaactttataggtgtcatacaattatgaactgtactagtgcttgtcctaaaggtttaaatcccgcaaaagctattgctgaaataaaaaaaatgttagcaactgccaatatttaa

SEQ ID NO: 218696 - DNA, 730 bp, Unknown
  Bacterial polypeptide expressing nucleotide sequence isolated from the Sargasso Sea
tactataaactagaagctgaaaataaaagtattaaaaaatttaaaatctacagatggtctcctgaggatgataaaaatccaagaatggatacctatgaaattgacatagatgattgtggcccaatggtattagatgccgttatgaagattaaaaatgaagttgatacttctttaaccttcagaaggtcttgtagagagggaatttgcggctcatgtgctatgaatattgatggtaccaatacactcgcgtgtactaaagcgatatctgatgtaaaaggtgatattaaaatttatcctttacctcatatgcccgtcatcaaagacctggtaactaatcttaaaaatctctataaacaactaaagtctataaagccatggctaataaaacaaaaacaagaagcaacagacactgaaaatattcaatcaagaaatgatcgcgaaaaacttgatggtttgtacgaatgtatattatgtgcttgttgttctacttcttgtcctagttattggtggaacagtgataagtatttaggaccagctgtcttactgcagtcctataggtggctgcaggacagtcgtgatgaagaaagaaaagaaagacttaaagagctggatgacacgtttaaagtttatagatgccacaccataatgaactgtactcaagcctgtccaaagggacttaatccagccaaagcgattgctggaataaagcagatgattgcacaacaataat

SEQ ID NO: 218697 - DNA, 703 bp, Unknown
  Bacterial polypeptide expressing nucleotide sequence isolated from the Sargasso Sea
caaaaatattagaaaagttaatatttatagatgggacccttctgatactgaaaatccccgtatagatacctatgaagttgatatggataattgtccttcaaaagtattagatattttaaataaaattaaaaatgagatagacccatcaattgcttacagaagatcatgtgcacatggtgtttgtggctcttgtgcaatgaatatggatggaaaaaatggtttagcatgtacaaaacctcataaagaaataaaaggtgatattaatatttatcctttgccacatttaaaagttcaaaaagatctaattggagatctaagtactttgtatagacagtacgagtcagtagagccatggttaaaagttttaaaaaaggatgggaataaagaaaattttcaatctattgaagatagatcaaaattggatggtctttatgaatgtataatgtgtgcgtgctgttcaactgcttgcccaagctattggtggaatggagataagtatttaggtccagcagttttattacaagcatatagatggataattgatagtagagatgaagatagaaaagaaaggttaaagaaggttgcagacgaactgaaactttatagatgtcataccattatgaattgtacaaatgcatgtccaaaaggcttaaatcctgcaaaagctattgcatctataaagaaaatgcttgcaacaggttaa

SEQ ID NO: 218698 - DNA, 775 bp, Unknown
  Bacterial polypeptide expressing nucleotide sequence isolated from the Sargasso Sea
atggttcaaataaatttgcctcaaaattctaaaatagaaaaaggtgagtattacaaagataaaactggatcaaaaaatattagaaaagttaatatctataggtgggatccttcgactggaaaaaatccaagaattgatacttacgaggttgatatggataattgcccatctaaagtattagaccttttaaataaaattaaaaacgaaatagatccttcgatcgcctatagaagatcttgtgcacatggcgtttgtggctcttgtgcaatgaatatggatggaaaaaatggattggcctgcaccaagcctcattcagaaattaaaggagatataaatatttatcctttacctcatttaagggttcaaaaagatttaattggagatttaaatactttatataaacagtatcattctgttgagccatggttaaaaaattcaaataaaaatgacagtaaagaaaatttacaatctatagaagatagatcaaaattagatgggctctacgaatgcataatgtgtgcttgttgttcaacttcatgtccaagctattggtggaatggagataaatatcttggtccagctgtattacttcaagcatatagatggataattgatagtagagatgaagatagaaaacaaagacttcaaaaagttgcagatgaattaaagctttatagatgtcacactataatgaactgtactaatgcttgtcccaagggattaaatcctgcaaaagcaattgctgaaattaaaaaaatgttagtaagtagctaat

SEQ ID NO: 218699 - DNA, 775 bp, Unknown
  Bacterial polypeptide expressing nucleotide sequence isolated from the Sargasso Sea
aatggtacaaataagcttacctgaaaattcaaaagtagaaaaaggggaatactacaaagataaaacaggatcaaaaaatattagaaaagttaatatttatagatgggatccatcaagcggaaaaaatcctagaatagatacttatgaagttgatatggataactgtgcttcaaaagtattagatctgttaaacaaaattaaaaatgaaatagattcatccattgcttatagaagatcttgctctcatggagtttgtggttcttgcgctatgaatatggatggaaaaaatggactagcttgcaccaaaccacatgcagaaataaaaggcgatataaatatttatccactacctcatttgagagttgaaaaggatttaatcggagatttgagtactttatataagcagtatcattcgatagaaccatggttaaaaaattctaaaaaggatgatgaaaaagaaaatttacaatctatagaagatagatcaaaattagatggtctttacgaatgcataatgtgtgcttgttgttcaacttcatgtccaagttactggtggaacggtgataaatatcttggaccagctgttttacttcaagcctataggtggattatagacagtagagacgaagaaagaaaagagaggttaaagaaagttgctgatgaactaaaactttatagatgtcatactataatgaattgtacaaatgcttgtcctaaaggactaaatccagcaaaggcaattgcttcaataaagaaaatgcttgcaacaagctag

SEQ ID NO: 218700 - DNA, 292 bp, Unknown
  Bacterial polypeptide expressing nucleotide sequence isolated from the Sargasso Sea
ttctaaattagatggattatacgaatgtataatgtgtgcatgttgctcaacttcttgtccaagctattggtggaatggagataaatatttaggtccagcagttttgttacaagcttatagatggataatagatagtagagatgaggatagaaaagagagattaaaaaaagttgctgatgaattgaagctttataggtgccacacaattatgaactgtactaatgcatgtccaaaaggtttaaatcctgcaaaagccattgcttctattaaaaaaatgcttgcaactagctaa

SEQ ID NO: 218701 - DNA, 506 bp, Unknown
  Bacterial polypeptide expressing nucleotide sequence isolated from the Sargasso Sea
tgatatggatgggaaaaatggtttagcttgcacaaaatctcattcagaaattacaggagatattaatatttatcctcttcctcatttaaaagttttaaaagacttaattggagatttaagtatactttataaacaatatgagtcagttgaaccctggttaaaaacttcaaaggtaaatgatagaaaagaaaacattcaatccaaagaagatagagcaaaactagatggactttatgaatgtattatgtgcgcatgttgttctactgcatgtcctagctattggtggaatggagataagtatttaggaccagcggtactacttcaagcttacagatggataattgacagtagagacgaagatcgaaaggaaagattaaaaaaagttgctgatgaattaaagctttatagatgtcatacaataatgaattgtacaaatgcttgtccaaagggtctaaatccagcaaaagccattgcatctataaaaaaaatgcttgcaacagtctaat

SEQ ID NO: 218702 - DNA, 610 bp, Unknown
  Bacterial polypeptide expressing nucleotide sequence isolated from the Sargasso Sea
cctaaagttttagatattctttttaaaattaaaaatgatattgactcgtcattaactttcagacgatcttgtgcccatggagtttgtggttcatgcgctatgaatgtcgatggagttaacactttatcgtgtattaaatcacatagtgatataaatggtgaacttaatatctatcctttgcctcacttaaaagtaatcaaagatttaattggagatttaagcactttatacaaacagtatgagtctattcaaccttggcttaaaacctctaaaactaattctgaaaaacaagaaatccttcaatctcaaaaagacagatcaaaactagacggatattacgaatgtattttgtgtgcatgctgctctaccgcctgcccgagttattggtggaatggagaaaaatatttaggacctgcagttctactacaagcatatagatggataagtgatagtagggatgaagagaaaaaagaaagattgaaaaaagttgctgatgaattaaagctttataggtgtcacacaataatgaattgtacaaattcttgtccaaaaggtctaaatccagcaaaagctattggatcaataaagaaaatgcttgcatcaagctaaa

SEQ ID NO: 218703 - DNA, 309 bp, Unknown
  Bacterial polypeptide expressing nucleotide sequence isolated from the Sargasso Sea
ccatctataagcttgtatcaaaactagatggtctttatgaatgtattatgtgtgcatgttgctcaacttcatgcccaagttattggtggaatggagaaaagtatcttggaccagcagttttgttacaagcttatagatggatcatagatagtagagatgaagatagaaaaaaaagattaaaaaaagttgctgatgaattaaaattgtatagatgtcatacaataatgaattgtactagtgcttgtccaaaaggcttaaatccagcaaaagctatagcatctataaagaaaatgcttgcaacaagctaat

SEQ ID NO: 218704 - DNA, 766 bp, Unknown
  Bacterial polypeptide expressing nucleotide sequence isolated from the Sargasso Sea
aatggccgagtttattctccccaaaaactctaaaatcgttaaaggcaaatattataaagataaaacaaattcaagaaatattaaaaaagtaaacgtatatagatgggatcccgaagatggtagaaatccaagaatagacactttcgaagttgatatggacaattgtggacccaaggttttggatattttatttaagattaaaaatgaaattgactcatcattaacttttagaagatcgtgtgctcatggagtttgtggatcatgcgcgatgaatgtagatggagttaatactttatcatgtattaaagcgcatgatgatataaaaggtgaattaaatatttaccctttaccacatctaagagttattaaagatttaattggagatttaagtaatttatataaacagtatgagtccattcaaccttggttgaaaaactcaaaaacagatactgaaaaaagagaaatacttcaatctcaggacgacagatcaaagcttgacggatattatgaatgtattctgtgcgcttgttgttctacatcctgcccaagctattggtggaatggtgaaaaatatttaggtcctgctgttttgcttcaagcatatagatggattagcgatagtagagacgaggataaaaaagaaaggcttaaaaaagtagctgacgaattaaagctatatagatgtcacactataatgaattgcacaaattcttgcccccagggacttaatcctgcaaaagctattggctctattaaaaaaatgctt

SEQ ID NO: 218705 - DNA, 706 bp, Unknown
  Bacterial polypeptide expressing nucleotide sequence isolated from the Sargasso Sea
tcattaaacattagaaaagtaaatgtttatagatgggatccatcaaaaaatgaaaatcctagaatagatacctatgaagtagatatggacaactgtccatcaaaagttttagatattttaaacaaaattaaaaatgaattagatccttctttagcttatagaagatcttgtgctcacggtgtttgtggatcatgtgcaatgaatatgaatggtaaaaatggattagcatgcacaaagtctcattctgaattagatggtgatataaatatttatcctttgccacatttaaaagtattaaaagatttaataggtgaccttagtactttatataaacaatatgaatcagtagagccatggcttaaaacttcaaaaaagaatacggagggtgaaaatttgcaatcaatagaagatagagcaaaattggatggtctttacgaatgtataatgtgtgcttgttgttctacctcttgtccaagttattggtggaatggagataaatatttagggcctgctgttttattacaagcttatagatggataatagatagtagagatgaagaaagaaaagaaagactaaaaaaagtagctgatgaattaaaactatatagatgtcataccattttaaattgtaccaatgcatgtcctaaagacttaaatccagcaaaagctatagctgaaataaagaaaatgcttgcaacgacctgat

SEQ ID NO: 218706 - DNA, 778 bp, Unknown
  Bacterial polypeptide expressing nucleotide sequence isolated from the Sargasso Sea
atggttcaatttaatcttcccgataattctaaattaacagatggggattattttaagtctgaaaagaatttgaaaaatattaaaaaattcaaaatttatcgttggtctccagacgatgaaaagaatccgagaatggatacttacgaagtagatttagatgattgtggtcctatggtgttagatgcagttatgaaaattaaaagtgatattgatacttcactaacttttaggagatcatgtcgtgagggtatctgtggttcttgtgcaatgaacattgatggcactaacacacttgcatgtacaaaagcaattagtgatgtgaaaggtgatgtaaaaatttatcctttacctcatatgccggtaatcaaggacttagtcacaaacttaaaaacactctacagccagctaaaatctatcaagccatggcttatgaacaataaacaaaaggcgaatgataccgaaaacattcaatctaaagatgatagagaaaagttagacggattatatgaatgtattttgtgtgcctgttgttctacatcttgcccaagttattggtggaatagtgataagtatttagggccagctgtgttgcttcaatcatatcgttggttacaggatagtcgtgatgaagaaagaaaagaaagattaaaagaattagacgatacttttaaagtttatagatgccatacgattatgaactgtacacaggcatgccccaaaggtttaaacccagcaaaagcgatcgctggaattaagaggatgattgcacaacaatgat

SEQ ID NO: 218707 - DNA, 667 bp, Unknown
  Bacterial polypeptide expressing nucleotide sequence isolated from the Sargasso Sea
cgactggagaaaccctagaattgatacatatgaagttgatatggacaattgtccttcaaaagtcttagatattttaaacaaaattaaaaatgaaatagatcctaccctggcctacagaagatcttgtgctcatggtgtatgtggttcgtgcgcaatgaatatgggtggaaaaaatggtttagcatgcaccaagcctcattctgaaatagatggaaatatcgatatttatccgcttccgcatttgaaggttaaaaaagatttaattggtgacctagatggcctctatagacaatatcaatctattgaaccttggttaaaatcaaatgctaaatctgataaaaaagagatcattcaatcaaaaaaagatagagaaaaacttgatggtgcttatgaatgtataatgtgtgcgtgctgttcaacttcatgcccaagttattggtggaatggggataaatatttaggacctgcagttttattacaggcttatagatggattatagatagtagagatgatgaaagggaagcaagattaaaaaaagttgcagatgaattaaagctttacagatgccatacaatattaaattgtactagtgcatgcccaaagggacttaatccagctaaagccattgctgagataaaaaaaatgttagtaaaagctagtctttaa

SEQ ID NO: 218708 - DNA, 847 bp, Unknown
  Bacterial polypeptide expressing nucleotide sequence isolated from the Sargasso Sea
atgacaaataatctacattcaattaattttaacaatattaaaacaaaagaatttgacgctctcattattggtggcggtggctcaggtatgagagcatcactagaattagcaaaatcaggacttaaaaccgcagttgtttcaaaagttttcccaacaagatctcatactgtttctgcacagggaggcataacatgtgctattgcaagtgccgacccaaatgacgattggagatggcatatgtatgatactgtcaaaggtgcagactttattggcgatcaagatgctatagaatatatgtgttcagaaggccctaaggcagtttttgagttggagcatatgggattgcctttttctagatttgataatggtagaatctaccaaagaccatttggtggtcaatcaaaagattttggtaaaggtggtcaagcagccagaacttgtgctgcggcggacagaacaggccatgcattattacatactttgtatcaaaataatgtcaaagaaggttcaaattttctcaacgaatggttcgcagttgaccttgtaaaaaataataaagatgaagttaccggagtgattgctttttcaatagaatctggagaagtagcttatttaaaagcgcaagcaacagttcttgctactggaggcgctggaagaatatatgcttcaacaacaaatgctttaattaatactggagatggcttagctatggcattaagagctggattcccagctcaagatatggaaatgtggcagtttcatccaactggaatttttggcgcaggatcattagtcactgagggttgcagaggagagggtggatatctagttaacggagaaggagaaa

SEQ ID NO: 218709 - DNA, 340 bp, Unknown
  Bacterial polypeptide expressing nucleotide sequence isolated from the Sargasso Sea
caaactggtcaagagaaaattgagcttaaacaatcacagaaagatagagaaaaactagatggatactacgaatgtattttatgtgcttgttgttctacgtcttgtccaagttactggtggaatggtgataagtatttagggccagcagttttactgcaagcatatcgttggataaatgatagcagagatggtgataaaaaagagagattaaagaaagtagctgacgaattaaagctttatagatgtcatactataatgaattgcaccaattcatgtccgaaaggccttaatcctgcaaaagccataggctcgattaaaaaaatgcttgcaacaagctaaa

SEQ ID NO: 218710 - DNA, 447 bp, Unknown
  Bacterial polypeptide expressing nucleotide sequence isolated from the Sargasso Sea
ttcatatttttcctttaccccacttaaaggtagtcaaagatttggtagcagatttaagtatattgtataaacaatatgaatcaattgaaccttggctaaaaacaaaagagtttaaatctgaaaaaagtgaaattaatcagtctaaagagaatagagaaaaacttgatggtttatatgaatgtattatgtgtgcttgttgttcaacatcttgtccgagctattggtggaacggcgaaagttacttaggtcctgctgttttacttcaggcgtatcgctggatatccgatagtagagatgaagaaaaaaatgaaagacttaaaaaagttgctgataaacttaaattatacagatgccatactataatgaattgcacaagttcatgcccaaaaggcttaaatccagcaaaggccataggttcaattaaaaaaatgcttgcaacaagctaga

SEQ ID NO: 218711 - DNA, 727 bp, Unknown
  Bacterial polypeptide expressing nucleotide sequence isolated from the Sargasso Sea
atggttcaaataaatttacctcaaaactcgaaagttcaaaagggtaaatattatgaggataaaactggctcaaaaaatattcgaaaagttaatatttatagatgggatccttctacaggtgataaacctcgaatagatacttacgaagtagacatggataattgtccttcaaaagtattagatttattaaataaaattaaaaatgaaattgatccatcgattgcgtatagaagatcatgcgctcatggagtttgtggttcatgtgcaatgaatatggatggaaaaaatggtttagcttgtacaaaaccacataaagaaataaagggagatataaatatttatcccttaccccatctaaaagttcaaaaagatttaattggagatttgagcacattatataaacaatacgcatctgtagaaccgtggttaaaaaattcaaaaaaagatgatgcaaaagagaattttcagtcagtagaagatagatctaaattagatggtctttacgagtgtataatgtgcgcttgctgttctactgcatgcccaagttattggtggaatggagacaagtatcttggacctgcagttttgttacaagcttatagatggataattgatagcagagatgaagaaagaaaagaaaggctaaaaaaagttgcagatgaattaaaactttatagatgccataccattatgaattgtactaatgcttgtccaaaaggattaaatc

SEQ ID NO: 218712 - DNA, 543 bp, Unknown
  Bacterial polypeptide expressing nucleotide sequence isolated from the Sargasso Sea
ttagaagatcttgtagggaaggtatttgtggttcatgctcaatgaatataaatggtactaatactttagcttgtcttaaaccacttcaaaacgagaatgaggtaaacatttttcctttaccacacatgaaagtaatcaaagacttagtaccagacatgaatgagttttatgaacagtataagtccataaaaccctggttagaaaataccaaaaagagtggtaaagaaaacaggcagtcacctgacgaaagaaaaaaactcgacggactctatgaatgcgttttatgtgcttgttgttcaacatcatgtccaagttactggtggaatagtgataagtttttgggtcctgctatacttctgcaagcgtatcgctttattgttgatagtagggataaaaataaaaaagaaagaatagattttcttaaagataaatttaagctttacagatgccatactataatgaattgtactaaaacatgtcctaaaaacctaaatccagcaaaagcaatcgcagaaatcaaaaaacttcaaattaactcataag

SEQ ID NO: 218713 - DNA, 691 bp, Unknown
  Bacterial polypeptide expressing nucleotide sequence isolated from the Sargasso Sea
aatggtccaatttagccttccaaagaactctaaaattttaaaaggcaaatactacaaagatgaaactggatcaaattatttaaaaaaagtaaatatttatagatggagtccttctaacaacgaaaatccaagagtcgacacattcgaagtagatttgaacgattgtggacccaaagtattagatgttctattcaaaattaaaaatgaaattgatcctactttaacttttagacgatcttgtgcacatggtgtttgtggttcatgcgctatgaatgttgatggagtaaacacattatcctgtattaaatctcactcagacattaaaggtgaattgaatatttatccattacctcatttaaaagtaatcaaggatttagttggagatttaactacactttataaacaatatgaatctgtggaaccttggcttaaatctaaagttggagaaaaaacatctacagaaattaaacagtcacaagaggacagagcaaaacttgatggatactatgagtgtatactttgtgcatgttgctcaacctcatgcccaagctattggtggaatggagataaatacttgggaccagcagttttattacaagcgtatcgttggataacagatagcagagatgaagaaagaaaagaaagattaaaaaaagttgcagatgagctgaaactgtatagatgtcatact

SEQ ID NO: 218714 - DNA, 736 bp, Unknown
  Bacterial polypeptide expressing nucleotide sequence isolated from the Sargasso Sea
aggtaaatattataaagataaaactaattctaataacattaagaaagtaactatttatagatggaatccagatgatggacaaaatccaaggattgatacatttgaagtagatatgggtaattgtggacctaaagttctagatattctttttaagattaaaaatgaaatggattcttctttaacttttagaagatcttgtgcacacggagtatgtggttcttgtgctatgaatgtggatggaattaatactttgtcatgcattaaatctcataatgatattaaaggagaactaaatatttatcctcttcctcacttaaaagttataaaagatttaattggagatttaagcaatttgtacaaacaatatgagtctattcaaccgtggttaaaaacttcaaaaacagatacagaaaaaaaagaaattcttcaatctcagaaagatagatcaaaattagatggttattatgagtgtatattatgtgcttgttgttctacatcttgcccaagttattggtggaatggtgataaatatttgggtccagctgttttacttcaagcctatagatggataagtgatagtagagatgaagaaaaaaaagaaagactaaaaaaagttgctgatgagctaaagctttatagatgtcatactataatgaattgtactaattcttgtccaaaaggtctaaatccagcaaaagccattggatcaataaaaaaaatgcttgcaacaagttaa

SEQ ID NO: 218715 - DNA, 502 bp, Unknown
  Bacterial polypeptide expressing nucleotide sequence isolated from the Sargasso Sea
actggcttgtttgaaaccaataaatgagattaagggagatattaaaatttatccattaccacatatgaaagttataaaagatctagttcctgatttatcacatgcttataaacaacttgcttcagttacaccttggttaaaaagaaatatcaacaacacaaaaaaaacaaaaaacattgaagaaaacaaacagttacctaaagatcgagcaaaattagatggtcaatgggaatgtgtattatgtttttgttgtacaacttcatgcccaagttattggtggaatagtgatgaatatttaggaccagctgttttattgcaggctgcaagatgggctaatgactctagggatgaagagagaaaagaccgtcttactaaaattaatgactcattaaaactttatagatgtcattcaataatgaattgcacaagttcttgtcccaaaggtttaaatcctgcaaaagcaatagctgatttgaagaaggctattgttacagaattataa

SEQ ID NO: 218716 - DNA, 790 bp, Unknown
  Bacterial polypeptide expressing nucleotide sequence isolated from the Sargasso Sea
tcttcctaaaaactcaattcctattaaaggaaaatcatattccaatgtagatcttattgatgaacagtcccaacaaaaccatgacatcagaattgtaaatgtttaccgatggtcaggtgaagaagatactccccctcaaatagatcgatttgaaattgatgtagctaaagcagggacaatggttttggatatattaaataaaattaaagctgaggttgatccaagcctaacttttagaaaatcatgtagagaaggtgtttgtggatcatgtgcaatgaatatagatggtgtcaatacacttgcatgccagaaacatatagaggaatgttctgatgaaattaacatataccctcttcctcatatgagagttttaaaagatttagtggtagatttgaaaaaagctttcgaacaatttaaatctataaagccatggttaaataaaaaatctccaaataatgaaagagaaaatatacagtcagtcgaagatagagataagctagatggcaaatgggaatgtgtaatgtgcttttcttgtagtacctcttgtccaagttattggtggaatgaagatgaatatttaggacctgctgtgttacttcaagcaaaccgctggataaaagatagtagagatgaagagaaaaaagaaaggttgaatgagttggatgatagtcttaaactatatagatgtcactcaatcatgaattgtaccaattcctgtccgaaaggattaaacccagctaaagctatagctgaaataaagcatgaaatatccaaaatggataataagtga

SEQ ID NO: 218717 - DNA, 527 bp, Unknown
  Bacterial polypeptide expressing nucleotide sequence isolated from the Sargasso Sea
tgtttgtggttcttgtgcaatgaatatggatggaaagaatgggttagcatgtactaagcctcataaagagattaaaggagatattaatatttatcctttgcctcatttaaaagttcaaaaagatttaataggagatttaagtacattgtataaacaatacgagtccgtagaaccttggctaaaaaattcaaaaaaaaatgatgataaagaaaatttgcaatctatagaagacaggtcaaaacttgatggtctttatgagtgtataatgtgtgcttgttgctcaacttcttgtcctagctattggtggaacggcgataaatatcttggacctgctgtgctacttcaagcttacagatggataatagatagcagagatgaagaaagaaaagaaaggttaaagaaagttgcagatgaattaaaactttataggtgccatactattatgaattgtacaaatgcatgtccaaaaggacttaatccagcaaaagcaattgcatctataaaaaaaatgcttgcaacaagctaat

SEQ ID NO: 218718 - DNA, 312 bp, Unknown
  Bacterial polypeptide expressing nucleotide sequence isolated from the Sargasso Sea
agcaatcccaaaaagatagagaaaaattagacggttattacgaatgtattctatgtgcgtgttgttcaacctcttgtccaagttattggtggaacggtgataaatatttaggtccggctgtcctgctccaagcttatcgttggataaatgatagtagagatggagacaaaaaagaaaggttaaaaaaagttgcagatgaattaaaactatacagatgtcatactataatgaattgtactaattcatgccccaaaggccttaatccagcaaaagccataggttctattaaaaaaatgcttgcaacaagttaaa

SEQ ID NO: 218719 - DNA, 511 bp, Unknown
  Bacterial polypeptide expressing nucleotide sequence isolated from the Sargasso Sea
tatgaatgtagatggagttaatactctatcatgtattaaatctcataaagatataaagggagaaataaatatttatcctttgcctcatttaaaagttgtaaaagatttaattggagatttgagtaatttatataaacaatatgaatctattcaaccgtggttaaaaacttcaaaaactgatactgaaaaacaagaaattcttcagtctcaaaaagatagatcaaaacttgatggatactacgagtgtatattatgtgcctgctgttctacatcttgcccgagctactggtggaatggtgaaaaatatttaggtccagcagttttattacaagcttatagatggataagcgatagtagagatgaagaaaaaaaagaaagattaaaaaaagttgccgatgagctaaaattatatagatgccacactataatgaattgtactaattcttgtccaaaaggtctaaatccagcaaaagctattgggtctataaaaaaaatgcttgcatcaagctaa

SEQ ID NO: 218720 - DNA, 771 bp, Unknown
  Bacterial polypeptide expressing nucleotide sequence isolated from the Sargasso Sea
ctttgcctaaaaactcaaaaattgtcgagggcaattattttaaaaataactctaatgacaataaaatcaaaaaattaaaagtctacagatggaatcctgatgacaaaaaaaatcctagaatggatacatatgaaattgatttaaaaacctgcggccctatggttttagatgccctaattaaaattaaaaatgaaatagatacaacgcttacatttagaagatcatgcagagaaggagtatgcggatcatgcgcaatgaatattgatggaattaatacacttgcttgcttaaagccaataaaagaaattaaaaacgatataaaaatttatcctttgcctcatatgaaagttgtaaaggatcttgttcctgatttaaatgaggcttacaaacaacttaaatcaattaaaccatggattagaaaaaatgatgaaaatttaaaaacaaaagtaaaacagaaacaaagtcctgatgaaagatctaaattagatggaaaatgggagtgtgtactatgtttttgttgtacaactgcatgtcctagttattggtggaatggggaaaaatatttaggtccagctgttttgcttcaagcatcaagatggattaatgatagtcgcgatgaaaaaagaaaagaaagattaaatgaaattaacgattctttaaaattatatagatgccactccataatgaactgcacacgctcctgtcccaaaggtttaaatcctgcgaaagcaattgcagatataaagaagtctattgttacagaaaaataat

SEQ ID NO: 218721 - DNA, 741 bp, Unknown
  Bacterial polypeptide expressing nucleotide sequence isolated from the Sargasso Sea
aatggtgcaaatcagtttacctgagaattccaaaacaaaaaaaggtaaatattttaaggacaaaaccggctcaaaaaatttaagaaaagttaatgtatatagatgggatccatcttcaggagaaggtccaagaattgacacttatgaagttgatatggaaaactgtccatccaaagtattggatattttaaataaaattaaaaatgaaatagaccccacccttgcttacagaagatcatgtgctcacggtgtatgtggatcgtgtgcaatgaacatgggtggtaaaaatggtcttgcttgtacaactcctcatgaaaatattgatggagatattgatatttatccgttgccacacttaaaagttaaaaaagacctaatcggagatttagatggattatacaagcaatataaatctattgaaccttggttaaaatcaagttcaaaatctgagtcagctgagttaattcagtcaaaagaagatagagctaagcttgatggtgcttatgaatgtattatgtgtgcatgttgttctacttcttgcccaagttattggtggaatggagacaaatacttaggaccagcagttttattacaagcttatagatggatcattgatagtagagatgaggaaagacaggccagattaaaaaaagtagctgatgaattaaaattatatcgttgtcatactattcttaactgtactagtgcatgccccaaaggtttaaaccctgcaaaggcgat

SEQ ID NO: 218722 - DNA, 472 bp, Unknown
  Bacterial polypeptide expressing nucleotide sequence isolated from the Sargasso Sea
aaagaaataaaaggtgatattaatatttatcctttgccacatatgccggtgataaaagatttagttccaaatttaaaacagttatatgaacaatatcagtcaatagaaccctggatacaatcgaccaaaaaatctaatggtacagaagggctacaaaccattcaggatagatctaaattagatggattatatgagtgtattatgtgtgcttgctgcgcaacttcttgcccaagttactggtggaatggtgataaatatcttgggccagcagtccttttacaggcatacagatggataattgatagtagagatgaagaaagacagaaaagattaaaaaaagtagcagatgagctgaagttatttaggtgtcatactataatgaattgtactaacgcatgtcccaaaggtttaaatccagcgaaagccataggctcaataaaaaaaatgctggtgactgaaaaatcatcatagt

SEQ ID NO: 218723 - DNA, 625 bp, Unknown
  Bacterial polypeptide expressing nucleotide sequence isolated from the Sargasso Sea
aaactcttagtatatagatggaatcctgatgatgaagataatccaaggttagatacttatgaaatagatcaaaaggagtgtggaccgatggtacttgatgcattgattaaaattaaaaatgaaattgatagcacactaacctttagacgttcttgtagagaaggtgtttgtggatcatgcgcaatgaatattgacggagttaatactttagcatgtttaaaaccaatgaaagaaataaaaaaagaagtaaaagtatatcctcttcctcatatgcgtgttataaaagaccttgttccagatttgaaagaggcctacgaacaacttaaatctattaaaccctggcttatacaaaacaaaaaaactcaatcagaagctaataaatttacaaataatcaaaaacctaaagaaagagaaaaattagatggaaaatgggagtgtattttatgtttttgttgtacaacatcttgcccaagttattggtggaacagtgaaaaatacttaggacctgcagttttacttcaagcgtctagatggattgatgatagtcgtgacgataacaaaaaagaaagattaaaagaaataaatgattctatgaaattgtatagatctcactcaattatgaatt

SEQ ID NO: 218724 - DNA, 319 bp, Unknown
  Bacterial polypeptide expressing nucleotide sequence isolated from the Sargasso Sea
tgaaatccttcagtcacaaaaagatagatcaaagttggatggatactacgagtgtatattgtgtgcttgttgttcaacatcttgtcctagttattggtggaatggggataaatatctgggacctgcggtactgttacaagcttatagatggataagtgatagcagagatgatgaaaaaaaagaaagacttaaaaaagttgcagatgaattaaagctttatagatgccatacaataatgaactgtacaaattcatgtccaaaaggtcttaatcctgcaaaagctattggttctataaaaaaaatgcttgcaacaagctaa

SEQ ID NO: 218725 - DNA, 607 bp, Unknown
  Bacterial polypeptide expressing nucleotide sequence isolated from the Sargasso Sea
atggctgaatttaaactacccaaaaatagccaaattgttgaaggtgatacacaccctgagcctacatcatctggtgaaaaaaaagtttttaaaatttatagatggtcacctgatgatgacaaaaacccaagagtggatacatttactatagacaaagatgaatgtggccctatggttttagatgctttaataaaaattaaaaatgaagttgatgggtctcttacttttagaagatcttgtagggaaggtatttgtggttcatgttctatgaatattgacggaacaaataccttagcttgccttaaaagcattgaagacattaaaggagatgttgttgtttttcctttacctcatatgagtgttgttaaagatttagtcccagacttaacgaaggcatatgcccagctgagttcaatagaaccttggcttaaatctgatacaccacctacagaaggtgaaagaagacaatcaaaagaagaaagagccgttctcgatggagcatgggaatgtgtcctatgtttttcttgctctacgtcttgtccatcttattggtggaacggggatcaatacttgggtccagcggttcttttgcaagcatacagatgga

SEQ ID NO: 218726 - DNA, 778 bp, Unknown
  Bacterial polypeptide expressing nucleotide sequence isolated from the Sargasso Sea
atggttcaatttaacttaccgcaaaattcaaaaatagaagtcggtaagcattatcaagataaaacaaattctaaaaacataaaaaaagtaaacatatacagatgggatccatcttcaggacaaaaccctaggatagacacatttgaagttgacatggataattgcggtccaaaagtcctagatattttgtttaaaataaaaaatgaaattgatccatcgctaacatttagaaggtcctgtgctcatggtgtttgcggatcctgtgcaatgaatatcgatggaataaatacattggcatgtataaaatcacatacagacattaacggtgatttaaatgtttatccactacctcatttaaaagtagtgaaggatttaattggggatttaactacgctttataaacaatatgaatcaattaaaccctggttagagactgaacaaactggagaagaaaaagcagaattacaacaatctcaaaaagatagagaaaaattagatggatactacgagtgcattctttgtgcgtgttgttctacctcgtgcccgagctattggtggaatggtgataaatatttaggtcctgctgttttattgcaagcatatcgttggattcaagatagtagagatggcgataaaaaagaaagattaaaaaaggtggcagatgagttaaaattatatcgttgtcataccataatgaattgtactaattcttgcccaaaaggattaaatcctgcaaaagctattggatctatcaagaaaatgcttgcaaccagttaaa

SEQ ID NO: 218727 - DNA, 775 bp, Unknown
  Bacterial polypeptide expressing nucleotide sequence isolated from the Sargasso Sea
aatggtacaaattaatttacctcaaaactccaaggttcaaaaaggtaaacattataaagataaaactggctcaaaaaatttaagaaaggttaatatctatagatgggatccatcttctggtgaaaatcctagaatagattcttatgaagttgatatggataattgtccttcaaaagtattagatattttaaataaaattaaaaatgagatagatccatcgattgcatatagaagatcttgtgcccatggggtgtgtggttcatgtgcaatgaatatggatggaaaaaatggtttagcttgtacaaagcctcataaagaaattaaaggagatattaatatttatcctttacctcatctaaaagttcaaaaagatttaattggagatctaagcacattatacaaacagtaccagtcagttgaaccttggttaaaaaattcaaaaaaagatgatgataaagaaaatatacaaactatagaagaaagatctaaattagatggactttatgaatgtataatgtgtgcttgctgttctactgcctgcccaagttattggtggaatggagataaatatttaggaccagcagttttgttacaggcatatagatggataattgatagtagagatgaagacagaaaagaaaggctaaaaaaggttgcagacgaactaaaactttatagatgtcatactattatgaattgtacaaatgcatgtccaaaagggttaaatcctgcaaaagcgattgcttctataaagaaaatgcttgcaacaagctaa

SEQ ID NO: 218728 - DNA, 751 bp, Unknown
  Bacterial polypeptide expressing nucleotide sequence isolated from the Sargasso Sea
tggaattacctgcgcaattgcaagtgctgatccaaatgatgattggagatggcatatgtatgacacggtaaaaggagcagactttattggtgatcaggatgctattgagtatttatgttcagaaggacctaaagctgtatttgaacttgagcatatgggtttgcctttttcaagatttgaaaatggtcgaatatatcagagaccttttggaggccagtcaaaagattttgggaaaggaggccaggcttctagaacatgcgcagcagctgatagaactggtcatgccttgctccacaccctttatcaaaataatgtaaaagagggagctaattttcttaatgaatggtttgcggtcgatctagttaaaaattcaaaagatgaggttacaggtgttatagctttttcaattgagaatggggaaattgcatatttaaaagctcaggctacagttcttgctactggaggagctggacgtatttatgcttcaacaacaaatgccttaataaatactggcgatggcctagcaatgacattaagggctggatatcctgctcaagatatggaaatgtggcaatttcatcctactggaatatatggcgcaggatctcttgtaactgaaggttgtagaggtgaggggggttatcttataaataaagatggtgagaggtttatggaaagatatgctccaaatgttaaagatcttgctggaagagatgtagttgctagatctatggttcttgaaatacttgaa

SEQ ID NO: 218729 - DNA, 778 bp, Unknown
  Bacterial polypeptide expressing nucleotide sequence isolated from the Sargasso Sea
atggttcaatttagccttccacaaaattcgaaaattataaaaggcaaattttacaaagataaatctggatcaaataatttaaaaaaagttaatgtttatagatggaaccctataggcaatgaaaatccaaggattgatactttcgaagttgatttgaatgaatgtgggccaaaggttttagacattctttttaaaatcaaaaatgaaattgatcctacattaacttttagaagatcttgtgcccacggtgtttgtggttcatgcgctatgaatgttgatggagtaaatacattatcatgtataaaatcacattctgatataaaaggtgaattaaatatttatccattaccacatttaaaagtaataaaagatttagttggtgatctgaccacactttacaaacaatatgaatccgttgagccgtggctaaaatctaaagttggtgaaaaaacatctacagaaattaaacaatcacaagaggatagggcaaaacttgatggttattatgaatgtatactctgcgcgtgttgttccacttcttgtccaagctattggtggaatggtgataaatatttagggccagcagttttattgcaagcatatcgttggatatcagatagtagggatgatgaaagaaaagagagattaaaaaaagttgcagatgagctaaaactatacaggtgtcatacgataatgaattgtactaattcctgccccaaaggtttaaatcccgctaaagcaatcggatctattaaaaaaatgcttgcaacgagctaaa

SEQ ID NO: 218730 - DNA, 746 bp, Unknown
  Bacterial polypeptide expressing nucleotide sequence isolated from the Sargasso Sea
aaatttaaaaggtaaatattacaaagatcagtctggatcaaaaaatttaaaaaaagtaaacatttacaggtgggatccatcatcaaacgaaaatcctagagtggatgttttcgaagtagatgtaaatgagtgtggaccaaaagtattagacatactatttaaaattaaaaatgaaatcgatcccacattaacttttagaagatcttgtgctcatggagtttgtggatcttgcgcaatgaatgttgatggcgttaacaccttgtcatgtataaaatcacattcggatattaaaggagaattaaatatttatccattgcctcatttaaaggtaattaaagatttagtcggagatcttagcactttgtacaagcaatatgagtctgttgagccatggttaaaaactaaagtcggtgaaaaaacaaataaagaaataatacaaacccaagaagatagagctaaattagatgggtattatgagtgcatcttatgtgcatgttgttctacttcatgccctagttattggtggaatggagataagtatttggggcctgccgttttattacaggcatatagatggattaatgatagtagagacgaagagaaaaaagcaagactaaaaaaagttgcagatgaattgaaactatatagatgtcatacgattatgaattgcacaaattcatgtcccaagggtttaaatcctgctaaagcaataggctctatcaaaaaaatgcttgcaacaagctaaa

SEQ ID NO: 218731 - DNA, 717 bp, Unknown
  Bacterial polypeptide expressing nucleotide sequence isolated from the Sargasso Sea
aatggttcagtttaatcttcccgacaattctaaattaacagacggtgattattacaagtctgaaaaaagcaatgggaatactaaaaaattcaaaatctaccgttggtctcctgatgacacaaaaaacccaagaatggatacttatgaagttgatctagacgattgtggcccaatggtattggacgcagttatgaaaatcaaaagtgaaattgatacttcattaacctttagaagatcatgtcgcgagggcatatgtggttcttgcgcaatgaatattgatggaacaaatacacttgcttgtactaaagcaataagtgatgtgaaaggtgatataaaaatttatcctttgcctcatatgccagttataaaagatttggttacgaatttaaaaacactttataagcaattaaagtctatcaagccatggcttatgaacaacaaacaaaatgcaattgatactgaaaatattcaatcaagaaatgaccgagaaaaattagatggcttatatgaatgcattctgtgtgcttgttgctcaacttcatgcccaagttattggtggaacagtgacaaatatttgggccctgcagtcctgcttcagtcatatcgctggttacaagatagccgtgatgaggaaagaaaagagagattaaaagaattagatgatacttttaaagtttacagatgccatacaattatgaattgtactcaagcatgtcc

SEQ ID NO: 218732 - DNA, 235 bp, Unknown
  Bacterial polypeptide expressing nucleotide sequence isolated from the Sargasso Sea
cctagctattggtggaatggcgataaatatttaggacctgcagttttattgcaagcttatagatggataaatgatagcagagatgaagataaaaaagaaagattaaaaaaagttgcagatgaattaaagctctacaggtgtcatacgatcatgaattgtacaaattcttgtccaaagggtttgaatcctgccaaagctattgcttcgattaaaaaaatgcttgcaacaggctaaa

SEQ ID NO: 218733 - DNA, 781 bp, Unknown
  Bacterial polypeptide expressing nucleotide sequence isolated from the Sargasso Sea
atggtgcaaatcagtttacctgagaattccaaaacaaaaaaaggtaaatattttaaggacaaaaccggctcaaaaaatttaagaaaagttaatgtatatagatgggatccatcttcaggagaaggtccaagaatcgacacttatgaagttgatatggataactgtccatccaaagtattggatattttaaataaaattaaaaatgaaatagaccccacccttgcttacagacgatcatgtgctcacggtgtatgtggatcctgtgcaatgaacatgggtggcaaaaatggtcttgcttgtacaacacctcatgaaaatattgatggagatattgatatttatccgttgccacacttaaaagttaaaaaagacctaatcggagatttagatggattatacaagcaatataaatctattgagccatggttaaaatcgagttcaaaatctgagtcagctgaattgattcagtcaaaagaagatagagctaagcttgacggtgcttatgaatgtattatgtgtgcttgttgttctacttcttgtccaagttattggtggaatggagataagtatttaggacctgcagttttattacaagcttatagatggatcattgatagtagagatgaggaaagacaggccagattaaaaaaagtagctgatgaattaaaattatatcgttgtcatactattctaaactgtactagtgcatgccccaaaggtttaaaccccgcaaaggcaatcgctgaaataaaaaaaatgttagcaacagccaatatttaaa

SEQ ID NO: 218734 - DNA, 442 bp, Unknown
  Bacterial polypeptide expressing nucleotide sequence isolated from the Sargasso Sea
tatccgcttccgcacatgccggtggtgaaggacctggtgccggacctcaacaatttctacgcccagcaccgctcgatcgagccctggctcaagaccgtctccccgccgccggcgaaggagtggaagcagagccatgagaaccgcgtgaagctcgacgggctttacgagtgcatcctgtgcgcctgctgctcgacctcctgtccgtcctattggtggaatggcgaccgctatctcggccccgccgtgctgctgcaggcctatcggtggctgatcgacagccgcgatgaggcgaccggcgagcggctcgacaatctggaagatcccttccggctctatcgctgccacaccatcatgaactgcacccaggcctgtccgaaggggctcaaccccgccaaggcgattgccggcatcaagaagatgatggtcgagcgttcggtctgat

SEQ ID NO: 218735 - DNA, 427 bp, Unknown
  Bacterial polypeptide expressing nucleotide sequence isolated from the Sargasso Sea
catttaaaggttgttaaagatttgattggtgatttaagcaatctttataaacaatacgagttaattcatccttggttaaaagtagatcaaacaggagaagaaaaaaaagagttaaaacaatctcaaaaagatagagaaaaacttgatggttattatgaatgtattttatgcgcttgttgttcaacatcttgcccaagttattggtggaatggagagaagtacttaggtcctgcagttcttttacaagcctatagatggataaatgatagcagagataatgataaaaaagaaagattaaaaaaagttgctgatgaactaaaactatatagatgtcatactattatgaattgcactaattcttgtccaaaaggtctgaatccagcaaaagctattggatcaataaaaaaaatgcttgcaacaagctaaa

SEQ ID NO: 218736 - DNA, 528 bp, Unknown
  Bacterial polypeptide expressing nucleotide sequence isolated from the Sargasso Sea
gtgtttgtggatcttgtgcgatgaatatggatgggaaaaatgggttagcttgtacaaaaccacataaagaaattaaaggagatataaatatttatccgttacctcatttaaaagttcaaaaagatttaattggagatttaagtacattatataaacagtaccaatcagttgagccgtggcttaaaaattcaaaaaaagaagaagataaagaaaacttacagtctgtagaagatagatctaaattagatggactttacgaatgtataatgtgtgcttgttgttcaactgcctgcccaagttactggtggaatggagataaatatttaggtccagcagttttgttacaggcgtacagatggataattgatagtagagatgaggatagaaaagaaaggttaaaaaaggttgcagatgaactaaaactttatagatgtcatactattatgaattgtactaatgcatgtccaaaagggttaaatcctgcaaaagcgattgcttctataaagaaaatgcttgcaacaagctaat

SEQ ID NO: 218737 - DNA, 778 bp, Unknown
  Bacterial polypeptide expressing nucleotide sequence isolated from the Sargasso Sea
atgtttcaattcaacctcccagataactcaaaactcactgacggcgattattataaattagaatctgaaaacaaacgtgtaaaaaagtttaaaatttacagatggtctcctgaggatgataaaaatcctagaatggatacttatgaagttgatatagatgattgcggtcccatggtgttagatgctgttatgaagattaaaaatgaagttgatacttctttaacttttagaaggtcttgcagagaaggaatttgcggctcatgtgctatgaatattgatggtacaaatacacttgcatgtacaaaagcaatatcagatgtgagaggtgatattaaaatttatcctttacctcatatgcccgtcatcaaagacctagtaacaaacctgaaaaatctttacaaacagctaaagtctataaagccatggctaataaaacaaaaacaagaagcaacagatactgaaaatattcaatcaagaaatgatcgagaaaaacttgatggcttgtatgaatgtatattatgtgcttgttgttctacatcttgtcctagttattggtggaacagtgataagtatttaggaccagccgtcttactgcaatcctataggtggctgcaggacagtcgtgatgaagaaagaaaagaaagacttagagagttggatgatacttttaaagtttatagatgccacaccataatgaactgtactcaagcctgtccaaagggccttaatccagctaaagcgattgctggaattaagcagatgattgcacaacaataat

SEQ ID NO: 218738 - DNA, 496 bp, Unknown
  Bacterial polypeptide expressing nucleotide sequence isolated from the Sargasso Sea
atggaaaaatggcttggcatgcaccaaaccacattctgaaataaaaggagatataaatatttatcctttaccacatcttaaagttttaaaagatctaattggggatttaagcactttatacaagcaatatgagtctgttgaaccttggttaaaaaatacaagtaaagagtctgataaagaaaatatacaatctaaagaggatagagcgaaactggatggattatacgaatgtattatgtgtgcgtgttgttctacctcatgtccaagttactggtggaatggtgataaatatttaggtcctgcagtattgctacaagcttatagatggataatagattcacgggacgaggatagaaaagagagattaaaaaaagtagcagatgaacttaagctttatagatgtcacaccataatgaattgtacaaatgcttgtccaaaaggattaaatccagcaaaagctatagcatctataaaaaaaatgcttgcaacaagctaa

SEQ ID NO: 218739 - DNA, 407 bp, Unknown
  Bacterial polypeptide expressing nucleotide sequence isolated from the Sargasso Sea
tttaatgggagatttaaccactttatataaacaatacgaatctattcaaccttggttaaaagttgatcaaactggtcaagagaaaacagaactaaaacaatcacaaaaagatagggaaaaattagatggatattatgaatgtatcttatgtgcttgctgttctacatcttgcccgagttactggtggaacggcgataagtatttaggaccagcagtgttgttgcaggcatatcgttggattaatgatagtagagatggtgataaaaaagaaagactgaagaaagttgctgatgaattaaagttatatagatgtcatacaataatgaattgtactaattcatgcccgaaaggccttaatcctgcaaaagccataggttctattaaaaaaatgcttgcaacaagttaaa

SEQ ID NO: 218740 - DNA, 920 bp, Unknown
  Bacterial polypeptide expressing nucleotide sequence isolated from the Sargasso Sea
cgtgctcgcgaccggcggctacggccgcgcgtacttttcgtgcacgtccgcgcacacgtgcacgggcgacggcaacgcgatggcgctgcgagcaggcctcgcggccgaggaccccgaattcgtgcagttccacccgaccggcatctacggcgcgggctgcctcatcaccgagggctgccgtggcgagggcggcatcctgcgcaaccgcgagggcgagcgcttcatggagcgatacgcgccctcggcgaaggacctcgcgtcgcgcgacgtggtctcgcgcgcaatgacaatggagatccgcgacgggcgcggcgtcggcaaggacgccgaccacatccacctccacctcgaccacctgccgcccgagttgctcaacgagcgcctgccgggcatctccgagacggcgtcgatcttcgcgggcgtcgacgtgacgaaggagccgatccccgtgctgccgaccgtgcactacaacatgggcggcgtgccgacgaaccattacggagaggttatccgccagcgcaaggacgcgtcgggcgccgtcgtcgaccacgacgaggtcgtgccggggctcttcgcggcgggcgaggtcgcgtgcgcgagcgtgcacggagcgaaccggctcggcgccaactcgctgctcgatatcgtcgtcttcggccgcgcgtgcgcgctgcgcatcgccgacatcgccaagccgggcgacgcgatccctccaatgccggcgaacgcgggcgccgagagcatccatcagctcgacaagctgcgctactcccagaccaaggggggttcgatcccgaccgccgagatccgcatgaacctgcagaagacgatgcaggatcacgcggccgtgtaccgtaccggcgagtcgatggccgagggctgcgtgaaggtcgacgccgtcgtcgacacgtttcgcgacg

SEQ ID NO: 218741 - DNA, 781 bp, Unknown; identical to SEQ ID NO: 218733
  Bacterial polypeptide expressing nucleotide sequence isolated from the Sargasso Sea

SEQ ID NO: 218742 - DNA, 364 bp, Unknown
  Bacterial polypeptide expressing nucleotide sequence isolated from the Sargasso Sea
gacagaaactccagaagacgagtggaagcaatctgtagatcaacgaaaaaaattagacgacttatacgagtgtgtaatgtgtgcttgctgttctacttcttgtccaagctattggtggaatagtgataagtatcttggacctgccgctcttttacatgcttacaggtggctagtagatagtcgggacgaaacaagagatgaaagattaaatgagttagaggactcttttaagttatatagatgccatacaatcatgaattgcgctagaacttgcccaaaaaacttaaatcctgcaaaagccatagcagaaataaaaaaaatgatggttgaaaagaatagtagaagtaagcagaaatcattttag

SEQ ID NO: 218743 - DNA, 382 bp, Unknown
  Bacterial polypeptide expressing nucleotide sequence isolated from the Sargasso Sea
tttgtacaagcaatatgagtcaatagaaccatggttaaaaacaagtgcaaaagttgagagtaaagaaattcttcaatctagagaagatagatcaaaattagatggtgcatatgagtgtataatgtgtgcttgttgttcaacagcatgcccaagttattggtggaatggtgataaatatcttggaccggctgttttattgcaagcttatagatggattatagatagtagagatgaagaaagaaaagaaaggttaaaaaaagttgctgatgaattaaaactttataggtgtcatactataatgaattgtacaaatgcatgtccaaaaggcttaaatcctgcaaaagcaattgcatctataaagaaaatgcttgcaacaagttaa

SEQ ID NO: 218744 - DNA, 400 bp, Unknown
  Bacterial polypeptide expressing nucleotide sequence isolated from the Sargasso Sea
ggtgatttaactacactatataaacaatatgagtctgtggaaccttggctcaagtctaaagtaggagaaaaaacatctacagaaattaaacagtcgcaagaagatagagcaaaacttgatggatattatgagtgtatactttgtgcatgttgctcaacttcttgcccaagttattggtggaatggagataaatatttgggaccggcagtattattacaagcatatcgttggataacagatagtagagatgaagaaagaaaagaacgattaaaaaaagttgcagacgagcttaaactttatagatgtcatactattatgaattgcacaaattcttgtccaaaaggtttaaatcctgcaaaagcaattggatctattaaaaaaatgcttgcatcaagctgaa

SEQ ID NO: 218745 - DNA, 364 bp, Unknown
  Bacterial polypeptide expressing nucleotide sequence isolated from the Sargasso Sea
gttgaaccttggctcaagtctaaagtttggagaaaaaacatctacagaaattaaacagtcacaagaagacagagcgaaacttgatggatattacgagtgtatactttgtgcctgttgttcaacttcttgtccaagttattggtggaacggggataaatacctaggaccggcggttttattacaagcttatcgttggattacagatagcagagatgaggaaagaaaagagagattaaaaaaagttgcagatgagcttaagctatatagatgtcatacgattatgaattgcacaaattcttgcccaaaaggtttaaatcctgcaaaagcaattggttctattaaaaaaatgcttgcatcaagctaa

SEQ ID NO: 218746 - DNA, 778 bp, Unknown
  Bacterial polypeptide expressing nucleotide sequence isolated from the Sargasso Sea
atggttcaaattaacttaccagaaaactctaaagttcaaaaaggtaagtattataaagataaaacaggatctaaaaatattcgtaaagtaaatgtttatagatgggacccttcatcaagtgaaaagcctagaatagatacttatgaagttgatatggataattgtccatcaaaagttttagatgttttaaataaaattaaaaacgaaattgatccaagtatagcctacagaagatcttgtgctcatggagtatgtgggtcgtgtgctatgaatatggatggtaaaaatggtttagcgtgcacaaaggcacatgcagaaataaaaggtgatataaacatttatccacttccacatctaaaagttcttaaagatttaattggagatttaagtacactctataagcaatatgagtcggttcaaccttggttaaagacttctaaaaaaacagataaagaaaatatacaatcaaaagaagatagatctaaattagatggtttatatgagtgtataatgtgtgcatgttgttcaactgcatgcccaagttattggtggaacggagataagtatctaggtcctgctgttttgttgcaagcatatagatggataattgatagcagagatgaagatagaaaggagaggttaagaaaagtagctgacgagctaaaattatatagatgtcatactattatgaattgtactaatgcatgccctaaaggattaaatccagcaaaagcaattgctgaaataaaaaagatgctagctgcatctaatatttaaa

SEQ ID NO: 218747 - DNA, 716 bp, Unknown
  Bacterial polypeptide expressing nucleotide sequence isolated from the Sargasso Sea
ccggttcaaaaaattaagaaaagtaaacatttatagatgggacccttctacaggagaaaatcctaggattgatacttatgaagtcgatatggacaattgtccctcaaaagtcctagatatattaaataagattaaaaatgagctagatccaacaatagcttataggagatcttgtgctcatggtgtttgcggttcttgtgcaatgaacatgaatggtaaaaatgggttagcttgtactacccctcatgctgatattgatggtgatatagatatttttcctttacctcatttaaaagtaaaaagagatttaattggagatttagatggattatatagacaataccaatctattgaaccgtggttaaaatcaaattctaagtctgagacgactgaaatcattcaatcaaaagaggacagaaaaaaattagatggagcttatgaatgtatcatgtgtgcatgttgctcgacttcgtgtccaagttattggtggaatggtgacaaatacttaggtccagcagtgcttttacaagcttatagatggattgtagatagtagagatgaggaaagagaagctagattaaaaaaagttgcagatgaattaaaactttatagatgtcatacaattttaaactgcactagcgcgtgtccaaaaggtttaaatccagcaaaagctattgcagaaataaaaaagatgttagccactgctagtctttaaa

SEQ ID NO: 218748 - DNA, 882 bp, Unknown
  Bacterial polypeptide expressing nucleotide sequence isolated from the Sargasso Sea
gagccgctctgcagttatcgcaatcttggatacaagacagcagtaatatcgaaagtatttccaacccgttcgcatacggtttcagcacaaggaggaattacttgtgcaatagcgagtgctgaccctaatgatgattggcgatggcacatgtatgataccgtcaaaggctctgattatatcggtgatcaagatgcgatcgagtatatgtgcagcgaagggcctcagactgtgtttgaattagaacacatgggattgcctttttctcggactgataacggtagaatttatcaaagaccctttggtggccagtctaaagatttcggtaagggcggtcaggccgccaggacctgtgcggcagctgacagaaccggtcatgcacttctgcatgctctttaccaggggaatttgaagaacaatacatcctttcttagcgagtggtatgcagtggacttggtaaaaaaccaagacggggagattgtaggtgtaattgccattgaaattgaaagtggtgaagttgtgtttattaattcaaaagcaacggtgttggcgacgggcggagcaggcagaatctacgcctcgacaacaaatgctttaatttgcactggtgatggaatcggaatggcgctcagagccggttatccaatgcaagatatggagatgtggcagtttcatccaacgggcatttatggagcaggaacgcttgtaactgaaggctgcaggggcgagggtggctaccttataaacaaggatggtgagagattcatggaacgttatgcgccaaatgccaaggatcttgcaggaagagatgtcgtagcgcgatctatgattctggagattattgacgggcgtggttgcggagaaaaatgcgatcacgtgatgttg

SEQ ID NO: 218749 - DNA, 426 bp, Unknown
  Bacterial polypeptide expressing nucleotide sequence isolated from the Sargasso Sea
ctcacttaaaagttcaaaaagatcttattggtgacctaagtacactatataaacaatatcaatctgtggaaccatggttgaaagtttctaaaaaaaatgacaacggtgaaaatttacaatcaatagaggatagatctaaattagatgggctttatgaatgtattatgtgtgcgtgctgctctacttcatgcccaagttactggtggaatggggacaaatatttaggacctgcagttttattacaagcatatagatggataatagatagccgagatgaagatagaaaagaaagattaaagaaagttgctgatgaattaaaactttaccgatgtcatactattatgaactgtacaaacgcatgtccaaaaggcctaaatcctgcaaaagcaatagcatctataaaaaaaatgcttgcaacaagttaat

SEQ ID NO: 218750 - DNA, 907 bp, Unknown
  Bacterial polypeptide expressing nucleotide sequence isolated from the Sargasso Sea
gaaggaattgcacaaagaacatgtgctgctgcagaccgaacaggccatgcaatgctgcacacgctttacggcaaagcaataagtaattcagcggagttttttatagaatactttgctattgacctaataatggataaaaatggagcctgccttggcgtagtagcgctatgtttggaagacggtacaattcatagatttcaagcacagaaaacaatccttgccacaggtggctatggacgcgcttatttttcagcgacatctgcgcactcatgcacgggagatggaaatgctatggttctcagagctggcttaccattacaggatatggaatttgttcagtttcatccaacgggaatatatggggctggttgcttaataacagaaggatcaagaggtgaaggtggatatctaacaaactcagaaggtgagagatttatggaaagatacgctccatcagccaaagacttagcaagtagagatgtggtctcgagatccatgacgattgaaattagggaaggtagaggtgttggcaaagataaagatcacattcatctccatctcgagcatttagcaccggaagtactagctgaaagattgccagggatatcagaaacagctaaaatattctcaggggttgacgtaacaaaagagccaatccctgtattaccaacagttcattataatatgggtggaattcctacaaatttccacggggaagttcttacaaaaatcaacggggatcccgactgtgttgttgatggattaatggctatcggggaagcagcttgcgtttcggtccatggtgcaaacagactaggctcaaactcccttatagatctggtcgtttttggtagagctgcagggctgagagctgcagatacaacgacagcaaatgctaatcagccac

SEQ ID NO: 218751 - DNA, 634 bp, Unknown
  Bacterial polypeptide expressing nucleotide sequence isolated from the Sargasso Sea
gaagtagatttaaataaatgtggtaataaagttctagacattttaaataaaatcaaaaatgaaatagattcttcattaacatttagaaaatcttgtgctcatggtatctgtggatcatgtgcaatgaatgtagatggtgtaaacactttgtcatgtatgaaatcacataaggaaataaaaggagatttgcgaatttttcctttaccacatttaaaagttgtcaaagacctagttgcagatctaagcgcattgtatagacaatatgaatcaatagagccttggttaaaaacagcagattctaaatcacaaaaaaaagaaattaaccaatccaaaaaaaatagagaaaaacttgatggtttatatgagtgtataatgtgcgcgtgctgttctacagcatgtccaagttattggtggaatggagaaaagtatttaggtcccgctgtattacttcaagcctacagatggatatctgatagtagagatgaagataaaaaagcaaggttagaaatggttgctgataaactcaaattatacaggtgccatactataatgaattgtactagtgcatgcccaaaaggcttaaatccagcaaaggccattggttctattaaaaaaatgcttgcaacaagctaga

SEQ ID NO: 218752 - DNA, 268 bp, Unknown
  Bacterial polypeptide expressing nucleotide sequence isolated from the Sargasso Sea
aatgtattatgtgtgcgtgctgttttcatcttgcccaagttactggtggaatggtgataaatatttaggtcctgcagtgttgctccaagcatacaggtggattattgattcaagagatgaggagagaaaagagagattaaaaaaagtagcagatgaactaaagctctatagatgtcacactatcatgaattgtacaaatgcatgtcctaaaggattaaatcctgcaaaagctatagcatctataaagaaaatgcttgcaactagctaa

SEQ ID NO: 218753 - DNA, 358 bp, Unknown
  Bacterial polypeptide expressing nucleotide sequence isolated from the Sargasso Sea
ccatggttaaaaacttcaaaaactaatactgaacaacaagaaataattcaatctcaaaaagatagatctaaactcgatggatactatgagtgtatattatgcgcttgttgctcaacttcttgcccaagctactggtggaacggagataaatatttaggaccggctgtcctacttcaagcttatagatggataagtgatagcagagatgaagaaaaaaaagaaagattgaaaaaagttgctgatgaattgaaactttatagatgccacaccataatgaactgtacaaattcatgtcccaaggggcttaatccagctaaagctattggatctataaaaaaaatgcttgcaacaagctaaa

SEQ ID NO: 218754 - DNA, 697 bp, Unknown
  Bacterial polypeptide expressing nucleotide sequence isolated from the Sargasso Sea
aactctaaaatattgaaaggcaaacattacaaagataaatttggttcaaaaaatctaaaaaaagttaatatttatagatgggatccagaaaccaaagataatccaagaattgatacatttgaggttgatataaatgaatgtggaccaaaagttcttgatatattatttaaaattaaaaatgaaattgatccttcattaacttttagaagatcatgtgctcatggtgtttgtggatcttgctcaatgaatgttgatggagtaaatacattatcatgtatcaaatctcattcagacattaaaggagacttaaatatctatcctctacctcatctaaaagttataaaagacttagttggtgatctaagcacactatacaaacaatatgaatctgttgagccatggcttaagaccaaagctggagaaaagacaacagaagaattaaagcaatcacaagaagatagagcaaaattagatggttactacgaatgtattttgtgtgcctgttgttctactgcttgcccaagttattggtggaatggtgaaaaatatttaggaccagcagttttactacaagcatacaggtggattagtgatagtagagatgaagagagaaaaaaaagactaaaaaaagttgcagatgagcttaaactatatagatgtcatacgattatgaattgcactaattcatgtccctaag

SEQ ID NO: 218755 - DNA, 262 bp, Unknown
  Bacterial polypeptide expressing nucleotide sequence isolated from the Sargasso Sea
atgtgtgcgtgttgttcaacctcatgtcctagctattggtggaatggggataaatatttaggacctgcggttctattacaagcatatagatggattgttgatagtagggatgaggatagaaaagaaagactcaaaaaagttgcagatgaattgaagctatacagatgtcatacaattatgaactgtacaaacgcatgtcctaaaggtttaaatccagcaaaagctatcgcttcaattaaaaaaatgcttgcaactagctgat

SEQ ID NO: 218756 - DNA, 476 bp, Unknown
  Bacterial polypeptide expressing nucleotide sequence isolated from the Sargasso Sea
caccaagcctcacgcagaaatcaagggggatataaatatttatccattgcctcatttaaaagtacaaaaggatttaattggagatttaaatactttgtataaacagtatcattctgttgagccgtggttaaaaaactcaaaaaagaacgataataaagaaaatatacaatctatagaagatagatcaaaactagatggactttacgaatgtataatgtgtgcatgttgttcaactgcatgcccaagttattggtggaatggagataaatatcttggtccagctgttttgcttcaagcgtacagatggataattgacagtagagatgaagaaagaaaacaaagactagaaaaagttgcagatgaattaaaactttatagatgccatactattttgaattgtacaaatgcatgtccaaaaggtttaaatccagcaaaagctattgctgaaataaaaaaaatgcttgcaacgagctaat

SEQ ID NO: 218757 - DNA, 405 bp, Unknown
  Bacterial polypeptide expressing nucleotide sequence isolated from the Sargasso Sea
ttggtgatttagatggtttatataaacagtatcaatctattgaaccttggctaaaaaataattccaaaaaagaaacaacagaaatttatcaatcccaagaagatagagcaaaacttgatggcgcttatgaatgtattatgtgtgcatgttgttcaacgtcttgcccaagttattggtggaatggagataaatatttaggtccagcagttcttctacaagcataccgatggatcgttgatagtagagatgaagaaagaaaagcaagattaaaaaaagttgctgatgaattaaaactttacagatgtcatactattttaaattgtacaaatgcttgtcctaaaggcctaaatccagcaaaagcaattgcagaaattaaaaaaatgttagctacggccaatgtttaaa

SEQ ID NO: 218758 - DNA, 774 bp, Unknown
  Bacterial polypeptide expressing nucleotide sequence isolated from the Sargasso Sea
aatggttcaatttgttcttccaaaaaattctaaaattcaaaaaggcattattcacaaacctaaacaacctactactgatccgataaaacttgaaatatataggtgggatcctgaaaaaaaagaaaatcccaaaattgatacttttgaagttaataaaaataaatttggcccaatggttcttgatgcactaataaaaattaaaaatgaaattgactcaacgctaacatttcgtcgctcttgtcgtgaaggggtctgtggatcttgtgcaatgaatatagatggcattaatacattggcttgtattaagccaattgaagaaattaaaggtacaattaaaatatttcctctacctcatatgaatattataaaagatttagtgcctgatttatctaaagcgttcaaacaacttgcttcaatcaaaccatggttgcaaaacaacaataaaaaacacaaatcctcttctaaaaatattcaagaaacaaagcaattacctaaagaaagagaaaagttagatggcaaatgggaatgtgtgctttgtttttgttgcacaaccgcttgccctagttactggtggaatagcgatgaatatctaggtcctgcagttttgttgcaggcagctagatgggttaatgattcaagagatgatgaaagaaagaaaagacttaatgcaataaatgattctttaaaactttatcgttgtcacactattatgaattgtactcaatcttgtcctaaaggtttaaatccagcaaaagcaatagcagatttaaagaa

SEQ ID NO: 218759 - DNA, 400 bp, Unknown
  Bacterial polypeptide expressing nucleotide sequence isolated from the Sargasso Sea
attgggagatttaagtactctttacaagcaatacgagtcagttcagccatggttaaaaactacaaaaaaaattagtgatactgaacatcttcaatctaaaaatgatagatctaaattagatggtttatatgaatgtataatgtgtgcatgttgttccacgtcatgtccaagttactggtggaatggtgataaatatttaggacctgcagttttgttacaagcttatagatggataattgatagcagagatgaagataggaaagaaagattaaaaaaagttgctgatgaattgaagctttatagatgccatacaattatgaactgtactaatgcttgtccaaaaggattaaatccagcaaaagctatcgcttcaattaaaaaaatgcttgcaactagctga

SEQ ID NO: 218760 - DNA, 796 bp, Unknown
  Bacterial polypeptide expressing nucleotide sequence isolated from the Sargasso Sea
atggtgcaatttacattacctgcaaattcaaaagtaaaaaaaggaattgagcatcctgtaagagaaatttcaaaaaaaccaaaaaaaatcatcatttatcgatggaaccccgaggacaatcaaaatccaagattagatagttaccaaattgatttaaaaaaatgtggacctatggttctcgatgcactgatgaaaataaaaaatgaaatagactcttctttaacttttcgaagatcgtgccgtgaaggggtttgtggctcatgcgcaatgaatattgatggggtaaatacactagcatgcctaaaaccaattgaagaggttaatggtgagattaggatttatcctttaccgcacatgcctgttgttaaagatttagttcctgatttaagtaaagcttatgatcaattagcctcgataaagccatggctgcaaagatcagatgaaaacaacaatgctaacaaaacacaaaatgaagaaaaaaaacaatcgccaaaagatagagaaaaattagatggacaatgggaatgtgttttgtgtttttgttgtactactgcgtgtccaagttactggtggaatagtgatgaatatttgggaccagctgttttaatgcaggcagcaagatgggtaaacgactcaagagattcagaaagaaagagcagattgaaagcagttaacgattcaatgaaattatatcgatgccattccattatgaattgtacacgttcatgtcctaaaggactcaatcctgcaaaagctattgctgatttaaagaaggctattgttacagaattataat

SEQ ID NO: 218761 - DNA, 751 bp, Unknown
  Bacterial polypeptide expressing nucleotide sequence isolated from the Sargasso Sea
aatggttcaattcaaccttccagacaactcaaaactcactgacggtgattattataaattagaagctgaaaataaaagtattaaaaaatttaaaatctacagatggtctcctgaggatgataaaaatccaagaatggacacttatgaagttgacatagatgattgtggcccaatggtactagatgccgttatgaagattaaaaatgaagttgatacttctttaacctttagaaggtcttgtagagaaggaatttgtggttcatgtgctatgaatattgatggtacgaatacgcttgcatgtaccaaagcgatatctgatgtaaaaggtgatgttagaatttatcctttaccacacatgcctgtcattaaagatttggtaacaaatcttaaaaatctatataagcaactaaaatctataaaaccatggttaataaaacaaaaacaagaagcaactgatactgaaaatattcaatcaagaaatgatcgtgaaaagcttgatggattgtatgaatgtattttgtgtgcttgttgttctacatcttgtcctagttattggtggaacagtgataagtatttaggaccggctgttttattgcaatcatatagatggttgcaagatagtcgtgatgaagaaagaaaagaaagacttaaagagctggatgatacatttaaagtttacagatgccacaccataatgaactgcactcaagcctgtccaaaaggccttaatccagctaaagcaatcgctgga

SEQ ID NO: 218762 - DNA, 694 bp, Unknown
  Bacterial polypeptide expressing nucleotide sequence isolated from the Sargasso Sea
aaagtaaacatttatagatgggacccatcaacaggaaaaaatccctctattgatacttttgaagttgacatggataattgtggaccaaaagtcttagatattttatttaaaataaaaaatgaaatagatccgtctcttacttttagaagatcatgcgctcatggtgtttgcggttcctgcgccatgaacattgatggagttaacggtttggcatgtattaaatctcatacagatattaaaggtgatttgactgtttatccattgccacacttaaaagtagtaaaagatttaattggtgaccttacaactttatataagcaatatgagtctattcagccatggcttaaggttgatcaaactggcaaagaaaagacagaattaaaacaatcacaaaaagatagggaaaaattggatgggtattacgaatgtatattatgcgcatgttgctcaacttcttgcccaagttattggtggaatggagataaatacctaggcccagcagttttgttacaagcttatcgatggataaatgatagcagagatggagataaaaaagagagactgaagaaggtggcagatgaattaaaattatacagatgccacactattatgaattgtactaattcatgtcctaaaggccttaatcctgcaaaagctataggttctattaaaaaaatgcttgcaacaagctaaa

SEQ ID NO: 218763 - DNA, 555 bp, Unknown
  Bacterial polypeptide expressing nucleotide sequence isolated from the Sargasso Sea
atagaaggtcttgtgctcatggtgtttgtggctcttgtgctatgaatatgggaggaaaaaatggcttggcttgtacaactccacatgcagagatagatggtgacatcgatatttatcctctacctcatttaaaagttaaaagagatttgatcggcgatttagatggcttatataaacaatatcaatctattgaaccttggttaaaaaataactcaacaaaacagtcaacagaaatttatcagtctaaagaagatagagcaaaacttgatggtgcttatgaatgcattatgtgtgcctgttgttctacatcttgcccaagttattggtggaatggagataaatatttaggtcctgcagttctgctacaggcctatagatggattattgatagtagagatgaagagagaaaagctagattaaaaaaagtttctgatgaattaaaattatatagatgccatacaatattaaattgtacaaatgcatgtcctaagggcttgaatccagcaaaagctatagctgaaataaaaaaaatgttagcaacagctaatgtttaaa

SEQ ID NO: 218764 - DNA, 601 bp, Unknown
  Bacterial polypeptide expressing nucleotide sequence isolated from the Sargasso Sea
ttggatatcttatttaagattaaaaatgaaatagatccttctcttacgtttagaagatcatgcgcacatggagtttgtggatcgtgcgcaatgaatatcgatggtattaatggattagcatgtattaaatctcatgaggatataaaaggtgatttaaatatatacccattacctcatttgaaagtagtaaaagatttaattggagatcttacaactttatataaacaatatgagtcaattcagccttggctaaaagtagatcagactggtcatgaaaaaacagaattaaaacaatctcaaaaagaaagagaaaaacttgatggttactatgaatgtattttgtgtgcatgttgttcaacctcatgtcccagttattggtggaatggtgacaaatatttaggacccgcagttctattacaagcatatcgatggattaatgatagtagagatggtgacaaaaaagagaggttgagaaaagttgctgatgaattaaaattatacagatgtcatactattatgaattgtacgaattcttgtcctaaaggcctaaatccagcaaaagcaataggctctataaagaaaatgcttgcaacaagctaaa

SEQ ID NO: 218765 - DNA, 569 bp, Unknown
  Bacterial polypeptide expressing nucleotide sequence isolated from the Sargasso Sea
agatccatctttaacttttagaagatcttgtgctcatggtgtttgcggatcttgcgctatgaatatagatggtgtcaatggacttgcatgtattaaatctcatacagatattaagggagacctaaatatttaccccttgccacatttaaaagtagttaaagatttaattggtgatttaactactttgtataaacaatatgagtcaattcaaccttggttaaaggtagatcaaacgggtcaagaaaaaatagaattgaaacaatctcaaaaagagagagaaaaacttgatggttattatgaatgtattttgtgcgcttgttgctcaacatcttgcccaagttattggtggaatggagacaaatatttgggtccggcagtacttttacaagcctaccgttggataaatgatagcagagatggagataaaaaagaaagattaaaaaaagttgcggatgaattaaaattatacagatgtcatactattatgaattgtacaaactcttgtcccaaaggcttgaatcctgctaaagctataggttctattaaaaaaatgcttgcaacgagctaaa

SEQ ID NO: 218766 - DNA, 490 bp, Unknown
  Bacterial polypeptide expressing nucleotide sequence isolated from the Sargasso Sea
tttggcatgcactaaaccacatgccgaaattgatggtgacatagatatttatcctttacctcatttgaaggttaaaaaagatctgattggagacttagatggcctatacaaacaatatcaatcgattgaaccctggttaaaatcaaattccaaatctgagaatactgaaattattcaatcaaaagaagatagaaaaaaattagatggggcttatgaatgtattatgtgtgcttgctgttctacatcttgtccaagttattggtggaatggtaataaatatttaggtccagcggttcttttacaagcatacaggtggattgtagacagtagggacgatgaaaggcaagccagattaaaaaaagttgctgatgaattaaaactttataggtgtcatactatattaaattgtactagtgcatgtccaaaaggcttaaatcctgcaaaagcaatcgcagaaattaaaaagatgttagcaaccgctaatatataa

SEQ ID NO: 218767 - DNA, 466 bp, Unknown
  Bacterial polypeptide expressing nucleotide sequence isolated from the Sargasso Sea
cataaagaaattaaaggtgatattaatatttatcctttgcctcatttaaaagttcaaaaagatttaattggggatttaagcactttatataaacaatatgagtcagttgaaccatggttaaagatttcaaaaaaagatgaaggtaaagaaaacttacaatctatagaagacagatcaaaattagatggtctttatgaatgtataatgtgcgcatgttgttcaacctcatgcccaagttattggtggaatggagataaatatttaggtccagcagttttgttacaagcgtatagatggattatagatagtagagacgaagatagaaaagagagattaaagaaagttgctgatgaactaaagctttatagatgccatactattatgaattgtactaatgcatgcccaaaaggcttaaatcctgcaaaagcaatagcgtctataaagaaaatgcttgcaacaagttaat

SEQ ID NO: 218768 - DNA, 608 bp, Unknown
  Bacterial polypeptide expressing nucleotide sequence isolated from the Sargasso Sea
aatggttcaaataaatttacctgaaaattcaaaaattgaaaaaggctcatattataaggacaccacaggttctaaaaatattagaaaagttaatgtttacagatgggatccttctacaggaaaaaaaccaagaattgatacatacgaagttgatatggataattgtccttctaaagttttagatgttttaaataaaattaaaaatgaaattgatccatctttagcatacagaagatcttgtgctcatggagtttgtggatcttgcgcgatgaatatggacggaaaaaatggtttagcatgcacaaaacctcattcagaaataaaaggagacataaatatctatcctttgccacatttaaaagttttaaaagatttaattggtgatcttagtactttatataaacaatatgaatcagttgagccttggttaaaaacttcaaaaaaaaatgacaacaaagaaaatttacaatcaaaagaagatagaaaaaaactgaacggtctttacgagtgtattatgtgtgcttgttgctcgacctcttgcccaagttattggtggaatggtgacaaatatttaggaccggctgttttattacaagcttatagatgga

SEQ ID NO: 218769 - DNA, 283 bp, Unknown
  Bacterial polypeptide expressing nucleotide sequence isolated from the Sargasso Sea
gatggtttatatgaatgtataatgtgtgcatgctgctctacatcgtgcccaagctattggtggaatggtgataaatatcttggtcctgcagttttacttcaggcctatagatggataattgatagtagagatgaagaaagaaaagaaaggctaaaaaaagttgcagatgaattaaagctttacagatgtcatactattatgaattgtactaactcatgtccaaaaggcttaaatcctgcaaaagctattgcatctataaaaaaaatgcttgcaacaggttaat

SEQ ID NO: 218770 - DNA, 534 bp, Unknown
  Bacterial polypeptide expressing nucleotide sequence isolated from the Sargasso Sea
tttgtggttcatgtgccaatgaatatttggtggaaaaaaatggtttagcttgtacgacaccgcattctgaaattaatggagatattgatatttatccacttccccatttaaaagttaaaaaagatttaattggtgatcttgatggcttgtacaaacaatatcaatctatagaaccatggttaaaatctaattctaaatcagagacaaaagaaattattcaatcaaaagaggaaagagcaaagctggatggtgcgtatgaatgtataatgtgtgcatgttgttcaacatcgtgtcctagttattggtggaatggagataaatatttgggtccagctgttttattacaagcttatagatggataatagatagtagagacgaagagagacaagcgagattaaaaaaagtcgctgatgagttaaaactatatagatgtcatactataatgaactgtactaatgcttgtccaaaaggtttgaatcctgcaaaagctatagccgaaataaaaaaaatgttagcaactgccaatatttaaa

SEQ ID NO: 218771 - DNA, 418 bp, Unknown
  Bacterial polypeptide expressing nucleotide sequence isolated from the Sargasso Sea
aaagttcaaaaagatcttatttggtgacctaagcacactatataaacaatatcaatctgtagaaccatggttgaaagtttctaaaaaaaatgacaatagtgaaaatttacaatcaatagaggatagatctaaattagatgggctttatgaatgcattatgtgtgcgtgctgctcaacttcatgtccaagttactggtggaatggggataaatatttaggacctgcggttttattacaagcatatagatggataatagatagccgagatgaagatagaaaagagagattaaagaaagttgctgatgaattaaaactttaccgatgtcatactattatgaactgtacaaacgcatgtccaaaaggcctaaatcctgcaaaagcaatagcatctataaaaaaaatgcttgcaacaagttaa

SEQ ID NO: 218772 - DNA, 775 bp, Unknown
  Bacterial polypeptide expressing nucleotide sequence isolated from the Sargasso Sea
atggttcagataaacttaccagaaaattcaaaagtaaaaaaaggacattattataaagataaaactggatcaaaaaatattagaaaaataaatgtatatagatgggatccttcttcaggagataatcctcgactagatacttatgaagttgatatggataattgtccttctaaagttttggatgttttaaataaaataaaaaatgaaatagacccttcattaagttacagaaagtcatgtgctcatggagtttgtggatcatgtgcgatgaacatggatggaaaaaatggattagcttgcacgacttctcatgctgagataaaaggagatattgatatttatcctttacctcatttaaaagtaaaaaaagatttaataggtgatttagacggtctttataaacaatatgagtcaattgaaccttggttaaaaaataattctaaagataaaaatgatgaaatttatcagtctcaaaaagatagagaaaaattagatggtgcttatgaatgtattatgtgtgcctgttgctctacatcatgcccaagctattggtggaatggagacaaatatctaggtcctgcagttttacttcaggcatatagatggataatcgatagcagagatgaagaaagaaaagagagacttgaaaaagttgctgatgaattgaagctttatagatgtcatactattttaaattgtacaaatgcttgtcctaaaggtttaaatccagcaaaagctattgctgagataaaaaaaatgcttgcaacggcttaat

SEQ ID NO: 218773 - DNA, 710 bp, Unknown
  Bacterial polypeptide expressing nucleotide sequence isolated from the Sargasso Sea
gatggttgaatttattttacctactaattcaaaaataaaaaaaggtacaactcatccagttaaagaagtatctgaaaaacctaagaaagttgtaatttatcgttggaatccggaagatcaagataaccctcgtttggatagttatgaaattgatttaagtaaatgtggcccaatggttttggacgctttaatgaaaataaagaatgaaattgactcttcattaacctttagaaggtcctgccgagaaggtgtttgtggctcttgcgcaatgaatatagatggtgtcaatactttagcttgtttaaagcctattgaagaagtgaatggagaaattagaatctatccgcttccacacatgcctgttgttaaggatttagttcccgatctaagtaaggcttaccagcagctagaatctataaaaccgtggctccaaagatcaaaggaaaattctaatactaaatcagttagttcagaagaaaaaaaacaaacacctaaagaaagagaaaaattagatggacaatgggaatgcgttttatgtttttgttgtacaacatcatgtccaagttactggtggaatagtgatgaatatttagggcctgcagttttgatgcaagctgctagatgggttaatgactcaagagattctgaaagaaagaatagattgaaagcagttgatgataaaatgaaattatataaatgtcactcgatta

SEQ ID NO: 218774 - DNA, 226 bp, Unknown
  Bacterial polypeptide expressing nucleotide sequence isolated from the Sargasso Sea
ttggtggaatggagacaaatatttaggaccggctgtattattacaggcctatcgttggattaatgacagcagagatggtagtaaaaaagagagactgaaaaaagttgccgatgagttaaaattatacagatgtcataccattatgaattgcactaattcatgtccaaaaggattaaatcctgcgaaagctataggctctattaagaaaatgcttgcaacaagctaa

SEQ ID NO: 218775 - DNA, 498 bp, Unknown
  Bacterial polypeptide expressing nucleotide sequence isolated from the Sargasso Sea
gaatggaaaaaaacggtttagcatgtactaaagctcattcagagttggaaggagatattgatatctatcctttaccacatttaaaagttttaaaagatttaattggagatctgagtacattgtataaacaatatgaatcagttgaaccttggttaaaaactacaaaaaaaaatgacaaggaaaacattcaatcaaaagaagatagagcaaaattggatggtttctatgaatgcataatgtgtgcatgttgttcaacgtcttgcccaagttattggtggaatggtgaaaaatatttaggtcctgctgttttacttcaggcttatagatggataattgatagcagagatgaagatagaaaagaaagacttaaaaaagttgctgacgagcttaaactttatagatgccatactatcttgaattgcacaaatgcttgtcccaagggcttaaatcctgcaaaagccattgcagagataaagaaaatgcttgcaacagcttaat

SEQ ID NO: 218776 - DNA, 647 bp, Unknown
  Bacterial polypeptide expressing nucleotide sequence isolated from the Sargasso Sea
aatggtacaaataaatttacctgaaaactcaaaagttaaaaaaggcaattattttaaagacaaaactggatctaaaaatttaagaaaagtaaacatctatagatgggatccttctacaggagaaaatcctagaattgatacctatgaagttgatatggataattgtccgtcaaaagtcttagatatattgaataaaattaaaaacgagctagatccaacaatagcttatagaagatcttgcgctcatggtgtttgtggctcttgtgcaatgaacatgaatggtaaaaatggtttagcttgcaccactcctcatgttgatattgatggtgatatagatatttaccctttacctcatttaaaggtaaaaagagatttaattggagatttagatggattatatagacaataccaatctatagagccatggttaaaatcgaattctaaatctgaaacaactgagatcattcaatcaaaagaggataggaaaaaattagatggagcttatgaatgtatcatgtgtgcatgttgctcgacttcatgccctagttattggtggaatggagacaaatacttaggtccagcggtgcttttacaagcttatagatggattgttgacagtagagatgaagaaagagaagctagattaa

SEQ ID NO: 218777 - DNA, 547 bp, Unknown
  Bacterial polypeptide expressing nucleotide sequence isolated from the Sargasso Sea
taggagatcctgttctcacggtgtctgtggttcatgtgcaatgaatatggatggaaaaaatggtttagcatgcacaaaaccacataaagaaattaaaggtgatattaacatttatcctttaccccatttgaaagttcaaaaagatttaattggagatttaagtactttatataaacaatacgagtcagttgaaccatggttaaaaatttcaaaaaaaaatgaaggcaaagaaaacttacaatctatagaagatagatcaaaattagatggtctctatgaatgtataatgtgcgcatgttgttcgacagcttgcccaagttattggtggaatggagataaatatttaggtccagcagttttgttgcaagcatatagatggattatagatagcagagatgaagatagaaaagagagattaaagaaagttgctgatgagctaaagctttataggtgccatactattatgaattgtactaatgcatgcccaaaaggcttaaatcctgcaaaagcaatagcgtctataaagaaaatgcttgcaacagcttaa

SEQ ID NO: 218778 - DNA, 579 bp, Unknown
  Bacterial polypeptide expressing nucleotide sequence isolated from the Sargasso Sea
caataacttttagaagatcatgtcgtgaaggtgtttgtggatcatgcgctatgaatatagatggtataaatactttagcatgcttaaagcctatagaagaagttaaagatgatattaaaatttacccattaccccatatgcctgttgtaaaagatttagttcctgatttaagtcaagcatatagccagttagagtctataaaaccatggcttgaaagaagcaataattctacaaataaagactcgaataaattagaggaagaaaaacaaagccccaaagaaagagagaaattagatggtcaatgggaatgtgtactgtgtttttgttgcacaacttcttgccctagttattggtggaacagtgatgaatatttaggtcctgcagttttactacaggctgctagatgggttaatgactcacgagattcacaaagaaaaaaaagattacaagatataaatgactctatgaaattatatcgctgtcactctattatgaattgtactcgttcatgtccgaaaggtttaaatccagcaaaagcaattgcagatttaaagaaggctattgttacagaattataat

SEQ ID NO: 218779 - DNA, 683 bp, Unknown
  Bacterial polypeptide expressing nucleotide sequence isolated from the Sargasso Sea
aatggttcagtttaatcttcccgacaattctaaattaacagacggtgattattacaagtctgaaaaaagcaatgggaatactaaaaagttcaaaatctaccgttggtctcctgatgacgaaaaaaacccaagaatggatacttatgaagttgatctagacgattgtggcccaatggtattggacgcagttatgaaaatcaaaagtgaaattgatacttcattaacctttagaagatcatgtcgcgagggtatatgtggttcttgtgcaatgaatattgatggaactaatacacttgcttgcactaaagcaatcagtgatgtgaaaggtgatataaaaatttatcctctgcctcacatgccagttataaaagatttggttacaaatttaaaaacactttataagcaattaaagtctatcaagccatggcttatgaacaacaaacaaaatgcaaatgacactgaaaacatacaatcgagaaatgaccgagaaaaattagatggcctgtatgaatgcattctgtgtgcttgttgttcaacatcttgcccgagttattggtggaatagtgacaaatatttgggccctgcagtcctgcttcagtcatatcgttggttacaagatagccgtgatgaggaaagaaaagagagattaaaagaattagatgatacttttaaagtatacagat

SEQ ID NO: 218780 - DNA, 474 bp, Unknown
  Bacterial polypeptide expressing nucleotide sequence isolated from the Sargasso Sea
ctaaaccatactctgaaatcaaaggtgatataaatatttatcccttgcctcatttaaaagtgttaaaggatttaattggagatttaagtacattatacaaacaatacgagtcagtagaaccttggcttaaaaattcaaataaaaatgatgaaaaagaaaatctacaatccaaaaaagatagagcaaaattagatggtttgtatgaatgcataatgtgtgcttgctgttcaacgtcttgcccaagttattggtggaatggagaaaaatatttaggaccagctgtcttgcttcaagcttatagatggatcatagatagtagagatgaagatagaaaagctagacttaaaaaagttgcagatgagttaaaattatatagatgtcataccatcatgaattgcacaaacgcatgcccaaagggtttaaatccagcaaaagcgattgcatctattaagaaaatgcttgcaacaagctaat

SEQ ID NO: 218781 - DNA, 664 bp, Unknown
  Bacterial polypeptide expressing nucleotide sequence isolated from the Sargasso Sea
aatggttgaattttcacttccagcaaactcaaaagtcacaactggaaaattacatatgagtaaagagattgctgagtcaccaaaaaaattagtgatttacagatgggatccagaagatgacaaaaatccacgactagatacttatgaaattgatcaaagtaaatgtggacccatggttttggatgctctaatgaaaattaaaaacgaaattgatccaacgcttacattcagaagatcttgtcgagaaggtgtttgtgggtcttgtgcaatgaatattgatggagtgaatacattagcttgtctcaaaagtatgtcagatgtaaaaagtgatataaaaatctatccacttcctcacatgcgtgttgtaaaagatttagttccagatttaactaaagcttatgaacaactagcctcaattaagccatggttagaaagacctaagtctaacgataacaattctgataatttaaatgaagaaagaaaacaatctcccaaagatagagaaaaacttgatggtaaatgggaatgcgtattatgtttctgctgtactacatcttgccccagctattggtggaatggtgatgaatacttaggacctgccgtattacttcaagcagcaagatgggttgaagactctcgagatgctgagagaaaaaaagattaa

SEQ ID NO: 218782 - DNA, 775 bp, Unknown
  Bacterial polypeptide expressing nucleotide sequence isolated from the Sargasso Sea
atggttcaaataagtctcccaaagaactcagagattaaaaaaggaaattactataaagataagactggatctaaaaatatcagaaaagtaaatatttataggtgggatccagcaacaggagacaatcctaggatagatacatatgaggtggacatggataactgtccatccaaagtattagacttattaaataaaattaaaaatgaaatagatccatctttagcatatagaagatcttgtgcacatggcgtctgtggatcttgtgcaatgaatatggatggaaaaaatggtcttgcttgtacaaaacctcactctgaaataaagggagatataaatatttatccattacctcacttaagagttttaaaggatcttattggagatttaagcattctgtacaaacaatatgagtcggttcaaccatggttaaaaacaacaaaaaaatcagatggtactgaaaatcttcaatcaaaagaagatagatcgaagcttgacggattatatgaatgtatcatgtgcgcatgttgctcaacagcttgcccaagttattggtggaacggtgaaaagtatctaggtcctgcggttttattgcaagcttatagatggataatagacagtagagatgaagatagaaaagatagattaaaaaaagtcgctgatgaattaaagctttatagatgtcatacaattatgaactgtactaatgcatgtccaaaaggattaaatccagcaaaagctattgcttcaattaaaaaaatgcttgcaactagctgat

SEQ ID NO: 218783 - DNA, 772 bp, Unknown
  Bacterial polypeptide expressing nucleotide sequence isolated from the Sargasso Sea
atggtacaaataaacttaccacaaaattccaaagttgaaaaaggtaagtattttaaagataagactggctcaaaaaacattcgtaaagtaaatatttatagatgggatccttctaccggagaaaatccaaggattgatacttacgaagtagacatggataattgtccttcgaaagttttagatctattaaataaaattaaaaatgagatagatccatcgattgcctacagaaggtcttgtgcacatggagtatgcggttcttgtgctatgaatatggatggtaaaaacggattagcttgtacgaagccacactcagaaattaaaggagatattaatatttatccattaccacatttgaaagttttaaaagacttaataggtgatctcagtactttatacaaacaatatgagtctgttgaaccttggttaaagacaacctcaaaaactgaaaaagagaatattcaatccaaggaagatagagcaaaactagatgggctttacgagtgtataatgtgtgcatgctgctcaacatcttgtccaagttattggtggaacggtgataaatatttaggccctgccgttcttttacaggcttacagatggataattgattcaagagacgaagacagaaaagagagattaaaaaaagttgcagatgaactaaagttatataggtgccatactattatgaattgtactaatgcttgccccaaaggtttaaatccagcaaaagcaatagcctcaattaagaaaatgcttgcaactagctaat

SEQ ID NO: 218784 - DNA, 397 bp, Unknown
  Bacterial polypeptide expressing nucleotide sequence isolated from the Sargasso Sea
cgatttaaccactctttataagcaatacgagtcaatacaaccttggctcaaagtagatcaaaccggaaaagaaaaaacagaattaaaacaatctcaaaaagatagagaaaaattagatggctattatgaatgcattttatgtgcctgctgttcaacatcttgtccaagttattggtggaatggagataaatatttaggaccagcagtattattacaagcctatcgttggataaatgatagtagagatggagacaaaaaggagagattaaaaaaagtagctgatgaattaaaattatataggtgtcataccataatgaattgtaccaattcctgtcctaaagggcttaatccagcaaaagcaataggatctattaaaaaaatgcttgcaacaagctaa

SEQ ID NO: 218785 - DNA, 759 bp, Unknown
  Bacterial polypeptide expressing nucleotide sequence isolated from the Sargasso Sea
ctcaaaattcaaaaattttaaaaggcaaatattataaggacaaatcaggatcgacaaatatcaaaagagttaatgtttatagatggaatccatctagcaacgagaacccaaggatagatacttttgaaataaatattgaagaatgtggaccaaaagttttagatatacttttcaaaattaaaaatgagatagatcccagtttgacctttagaaggtcttgtgctcatggtgtttgtggttcttgcgcaatgaatgttgatggagtaaacactttatcttgtataaaatctcactctgatattaaaggagatttaaatatttatcctttaccacatttgaaggtagtcaaagacttagttggtgacctcagtactttatataaacaatatgaatctgttgaaccctggcttaaaacaaaagcaggagaaaaaacatcggttgaaattcaacaatcccaagaagatagagcaaaattagacgggtattatgaatgtatactttgtgcatgttgttcgacttcatgcccgagttactggtggaatggagataaatatttaggaccagctgttctattgcaagcttatagatggattacagacagcagggatgaagaaagaaaagctagacttaaaaaagttgcagatgaattgaaactatacagatgccatacaataatgaattgcactaattcatgtccaaaaggtttaaatccagctaaagcaatcgcatctattaaaaaaatgcttgcaacaagttaaa

SEQ ID NO: 218786 - DNA, 595 bp, Unknown
  Bacterial polypeptide expressing nucleotide sequence isolated from the Sargasso Sea
aaaaacgaaattgatccgactttaacatttagaagatcttgcagagaaggtgtttgtggttcctgtgctatgaatattgatggtgttaacacattagcatgtttgaaaagtatgtccgatgttaagaatgaaatcaaaatatatcctcttccacatatgcgtgttgtaaaagatttggttccagatcttagcaaagcttatgaacagctagcttccattaaaccttggttgcagcgtaaaaaaacaaatgatgaagaaaaaaacttgggagacgaaaaaaaacaatcaccaaaagatagagaaaaactagatggtaaatgggagtgtgtattatgtttttgctgtactacttcttgtccaagttattggtggaatggagatgaatatttaggaccagcagtccttttacaggcagcaaggtgggtaagtgattctagagacgcagaaagaaaagagagattaaaagcaataaatgattcattaaaactttatagatgtcattcaataatgaattgcactaggtcttgtcctaaaggtttaaatcctgctaaagaaattgctggacttaaaaaggctattgttacagaattataat

SEQ ID NO: 218787 - DNA, 511 bp, Unknown
  Bacterial polypeptide expressing nucleotide sequence isolated from the Sargasso Sea
aatgaatgtagatggagtaaacactttgtcttgtattaagtctcactcagatatcaaaggtgaattaaatatttatccactacctcatttgaaagtaattaaggatttagttggtgatttaactacactatataaacaatatgagtctgtcgaaccctggctcaaggctaaagttggagaaaaaacatctacagaaattaaacagtcacaagaagacagagcaaaacttgatggatattacgaatgtatactttgtgcctgttgctcaacttcttgccccagctattggtggaacggagataaatacctaggaccggcagttttattacaagcttatcgttggattacggatagtagagacgaggaaagaaaagagagattaaaaaaagttgcagatgaactcaagctgtatagatgtcatacgattatgaattgcactaattcttgcccaaaaggtttaaatcctgcaaaagcaattggatctattaaaaaaatgcttgcatcaagctaa

SEQ ID NO: 218788 - DNA, 475 bp, Unknown
  Bacterial polypeptide expressing nucleotide sequence isolated from the Sargasso Sea
atcgcataaagaaattgatggtgatattgatatatatccacttccacatttaaaagttaaaagagatttgattggagatttagatggtctttacaaacagtatcaatcaattgagccttggttaaaaaataattcaaaaaaagagagaacagaaatagttcaatcaaaagaagatagagcaaaacttgatggtgcatatgaatgtattatgtgtgcatgctgttcaacttcatgcccaagttattggtggaatggagataaatatttaggacctgcagttttattgcaggcatatagatggattatagatagtagagacgaggaaaggaaattaaggttaaaaaaagttgcagatgaactaaagctttatagatgtcacactattctaaattgtactagcgcttgtccaaaaggcttaaatcctgcaaaagcaatagcagaaataaaaaaaatgttagctacaactaatgtttaa

SEQ ID NO: 218789 - DNA, 583 bp, Unknown
  Bacterial polypeptide expressing nucleotide sequence isolated from the Sargasso Sea
aataaagaatgaaatagatccttcgcttacctttagaagatcttgtgctcatggagtgtgtggatcttgtgcaatgaacgtagacggtgtaaatactttatcttgtactaaatcccactcggatattagaggtgatctaaatatttatcctttgccacacctaaaagtcgtcaaagatttggtaggagatttaactactctttacaaacaatatgaatcagtcgaaccgtggttaaagactaaagttggacaaaaaacaactaaagaaataaaacaatctcaggaagacagagcaaaactagatggatattatgagtgcattttatgtgcctgttgttcaacagcatgccctagctattggtggaatggcgataaatatttaggacctgcagttttattacaagcttatagatggataaatgatagtcgagatgaagataaaaaagaaagattaaaaaaagttgcagatgaactaaagctctacaggtgtcatacgatcatgaattgtacaaattcttgcccaaagggtttgaatcctgccaaagctattggctctattaaaaaaatgcttgcaacaggctaa

SEQ ID NO: 218790 - DNA, 697 bp, Unknown
  Bacterial polypeptide expressing nucleotide sequence isolated from the Sargasso Sea
tatgaaaccttcatcactattcaaaatatatagaagcggaattaagacgagaatggacaagttcaatttagatacttctttattcggacccatggttttagatgcactcattcatatcaaaaacaccgaagataaatctttggtttttagacgttcgtgtagagaaggcatttgtggctcgtgtgcaatgaatattaacggcaaaaattcattggcgtgtttaacacccatcacaaaaactgtttctgtttatccattaccccatcaacctattattcgcgacctggtaacagatatgtccaacttttatgaacaatacaaagaaataaaaccttggttacacagtgaccttgaaacgacagttgaaaaaaaaggcgaaaacctacaaagcatccaagatcgcaaaaaattagatgggttgtacgagtgtattttgtgtgcctgttgtagtacatcgtgtcctagttattggtggaattccaaagaatatcttggaccggctgtgctaatgcaagcatatagatgggttgaagatagcagggatacaaataccaaagaacgattgaaatacttggacaatgctatgaaactctacagatgcaaaaccattatgaactgtagcaacacatgccctaaaggattgaatccaggaaaagcaatcggtaaactgaaactcaaaatagcacaacaaatctaa

SEQ ID NO: 218791 - DNA, 229 bp, Unknown
  Bacterial polypeptide expressing nucleotide sequence isolated from the Sargasso Sea
attggttggaatggagacaaatatttaggacctgctgttttacttcaggcatatagatggataattgatagtagagatgaagatagaaaagaaagactcaaaaaagtagctgatgagcttaaactttatagatgccatactatcatgaattgtacaaacgcatgtccaaaaggcttaaatcctgcaaaagcaattgcatcaataaaaaaaatgcttgcaacaagctaat

SEQ ID NO: 218792 - DNA, 511 bp, Unknown
  Bacterial polypeptide expressing nucleotide sequence isolated from the Sargasso Sea
gaatattggtggtaaaaatggattagcttgcactacaccacattcagagatagagggagatattgatatctatccattacctcatctaaaggttaaaaaagatttaattggtgaccttgatggtttgtacaaacaatataaatcaatagaaccctggttaaaggcaaatccaaaatcagaaacaactgaaatttttcaatcaaaaaaggataggaaaaaattagatggagcttatgagtgtattatgtgtgcttgttgttcaacatcttgcccaagttattggtggaatggagataaatatttaggtcctgcagttcttttacaagcatatagatggattattgatagcagagacgaagaaagagaagctagacttaaaaaagttgcggatgaattaaagctttatagatgtcatactattttaaattgtacaagtgcatgtcccaaaggtttaaatccagctaaagcaatagctgaaataaaaaaaatgttagctacttctagtctttaa

SEQ ID NO: 218793 - DNA, 778 bp, Unknown
  Bacterial polypeptide expressing nucleotide sequence isolated from the Sargasso Sea
atggttcaatttagccttccacaaaactcaaaaattttaaaaggcaaattttacaaagataaaactggttcaaataatttaaagaaagtaaacgtttacaggtggagcccttcaagcaatgaaaatccaagaattgatacattcgaagtagacttaaacgaatgtggaccaaaagttttagatatactttttaaaataaaaaatgagattgatcctacattaacttttagaagatcttgcgcccatggtgtttgtggttcatgcgccatgaatgttgatggaataaatacattatcatgcataaaatcacactcagatataaaaggagaactgaacatttatccattaccacatttgaaggttataaaagatttagttggtgatttgactacactttataaacaatatgagtctgttgaaccatggttaaaaactaaagctggagaaaaaaccccagcagaaattaaacaatctcaagaagatagggcaaaacttgacggatattatgaatgtatactttgcgcatgctgttccacatcttgtccaagttattggtggaatggagataaatacctaggcccagctgttttattacaagcttatcgttggattacagatagtagggatgatgaaagaaaagaaagattaaaaaaagttgcagatgagctaaaactatatagatgtcatacgattatgaattgcacaaattcctgccccaaaggtttaaatcctgccaaagcaattgcatctatcaaaaaaatgcttgcaacgagctaaa

SEQ ID NO: 218794 - DNA, 496 bp, Unknown
  Bacterial polypeptide expressing nucleotide sequence isolated from the Sargasso Sea
gtaaatacattgtcatgtataaaatcccactctgatatcaaaggagaattaaatatttatccactaccgcacttaaaagttattaaagatttagttggagacttgaccactctctataaacaatacgagtctgtggaaccatggttaaaaactagagctggagaaaaaactaatgcagaaattaagcaatcacaagaggacagagcaaaactagatggttattatgaatgtatactctgtgcatgttgttcaacatcttgccctagttattggtggaacggtgataagtaccttggacctgctgttttattacaagcatatcgatggattactgatagtagagatgaagagagaaaagaaagactaaaaaaagttgcagatgagcttaagctatataggtgtcatacaataatgaattgtacaaattcatgtcctaaaggtttgaatcccgcaaaagctataggctcaattaaaaaaatgcttgcatcaagctaaa

SEQ ID NO: 218795 - DNA, 514 bp, Unknown
  Bacterial polypeptide expressing nucleotide sequence isolated from the Sargasso Sea
ggggtaaataccttggcttgcacacgtggtcttaacgaaattaaaggtgatgtgagaatttatccattaccgcatatgccagttataaaagatttaatccctgatttgactaatttttataagcaacacgcaagcataatgccctggttggaaacaaaaacagaaactccagaaaaagaatgggaacaatcaatagaacaacgaaaaaaattagatgatttatatgagtgcgtaatgtgtgcatgctgttctacatcttgtccgagttattggtggaatagtgagaaatatcttggtcctgcagctcttttacatgcttatagatggttagttgatagtcgtgacgaaactagagatgaaagattaaatgatattgaagattcatttaaattatatagatgccatacaattatgaattgcgcccgaacatgtccaaagaatttaaatcctgcaaaagcaatagcagaaataaaaaaaatgatggttgaaaagaatagcaggaacaaacagtagc

SEQ ID NO: 218796 - DNA, 703 bp, Unknown
  Bacterial polypeptide expressing nucleotide sequence isolated from the Sargasso Sea
atggtacaatttagcttgcctcaaaattcaaaaattttaaaaggtaaatactaccaagataaatctggttcaaataatttaaagaaagttaatgtatatagatgggatccgtctaaaaaagagaatcctagaatcgatacatttgaagttaatatgaatgaatgcggaccgaaagtattggatatactttttaaaattaagaacgagatagattcctcactaacttttagaagatcttgtgctcatggggtgtgcggatcttgcgcaatgaatgtagatggcgtaaacactttatcttgtattaaatcgcactcagatattaaaggtgaattaaatatttatcctttgccacatttaaaagttgttaaagatttggttggggatttaactactctttacaaacagtatgagtccgtcgaaccatggttgaagactaaagttgtagaaaaaacaaccaaagagataaaacagtctcaagcagatagagaaaaactagacggttattatgaatgtattttatgcgcatgttgttcaacagcatgtcctagctattggtggaatggcgataaatatttaggacctgcagttttattacaagcttatagatggataaatgacagcagagatgaagataagaaagaaagattaaaaaaagttgccgatgaattaaaattatatagatgtcatactattatgaatgcac

SEQ ID NO: 218797 - DNA, 243 bp, Unknown
  Bacterial polypeptide expressing nucleotide sequence isolated from the Sargasso Sea
gcccaagttattggtggaacggcgacaaatatttaggtccagcagttttgttacaagcttatagatggattattgatagtagagatgaggagcgaaaagcaagattaaaaaaagttgctgatgaattaaaattatatagatgtcacactattttaaattgtacaaacgcatgtcctaaaggcctgaatccagcaaaagctatagctgaaataaaaaaaatgttagcaacagctaatgtttaaa

SEQ ID NO: 218798 - DNA, 322 bp, Unknown
  Bacterial polypeptide expressing nucleotide sequence isolated from the Sargasso Sea
gaaagaagacaatcaaagaagaaaagagctgttctcgatggagcatgggaatgtgtactatgtttttcttgctcaacatcttgtccgtcttattggtggaacggagatcaatacttgggtccggcagttcttttgcaagcatacagatggatagctgatagtcgtgatgaaagtacaggagaacgtcttgacgcccttgaggacccattcaaactttatagatgtcacactattatgaattgctctaaaacttgtccgaaaggattaaatccagctaaagcaattggcgaaattaaaaaacttatggttgaaagaagataat

SEQ ID NO: 218799 - DNA, 730 bp, Unknown
  Bacterial polypeptide expressing nucleotide sequence isolated from the Sargasso Sea
tatttcaagacaagacagggttctacaaacttaaaaaaagtaaatgtttatagatggaatcctgatgatggaaaaaaccctagaatagatacctttgaagtggatatgaataattgcggaccaaaagtattagatattctatttaaaataaaaaacgaaattgattcgtcgttaacttttagaagatcttgtgcgcatggcgtttgcggatcctgcgctatgaatgtagatggaataaatacattgtcatgtattaaatctcataacgatataaaaggagaattgaatatttatccattaccacacttgaaagttataaaagatttgataggggacttgagtaatttatacaaacaatacgagtcaatccaaccatggttaaagacttccaaaactgacacagaaaaacaagaaattctacaatctcagaaagatagatcaaaacttgatggatattatgagtgtatattatgtgcttgctgctctacatcatgtccaagttattggtggaatggagataaatatttaggtcctgcagtgctacttcaagcttatcgatggataagtgatagcagagatgaagaaaaaaaagaaagattaaaaaaagttgcggatgaattaaagctttacagatgccatactataatgaattgtactaattcttgtccaaaaggtcttaatcctgcgaaagcaattggctctataaaaaaaatgcttgcaacaagctaaa

SEQ ID NO: 218800 - DNA, 274 bp, Unknown
  Bacterial polypeptide expressing nucleotide sequence isolated from the Sargasso Sea
atgagtgtatactttgcgcgtgttgctcaacttcatgcccgagcctattggtggaatggagataaatacttgggaccagcagttttattacaagcatatcgttggataacagatagcagagatgaagaaagaaaagaaagattaaaaaaagttgcagatgagctcaagctgtatagatgtcatacgataatgaattgtacaaactcttgcccaaaaggtttaaatcctgcaaaagcaattggatctattaaaaaaatgcttgcatcgagctaaa

SEQ ID NO: 218801 - DNA, 613 bp, Unknown
  Bacterial polypeptide expressing nucleotide sequence isolated from the Sargasso Sea
cgtcaaagttttagatattttaaataaaattaaaaatgaaatagatcctaccttagcttatagaagatcttgtgctcatggagtttgcggttcttgtgcgatgaatatgggtggaaaaaatggtttggcttgtacaactccacattctgaaattaatggtgacatcgatatttatcctttacctcatttaaaggttaaaaaagatttaataggagatttagacggcttatacaaacagtatcagtctatagaaccatggttaaaatctaactctaaatcagaaactaaggaaattttccaatctaaagaagatagagcaaaattagatggtgcctatgaatgtattatgtgtgcgtgttgttcaacttcatgccctagttattggtggaacggtgataaatatttaggaccggcagttttgttacaagcttacagatggattatagacagtagagatgaagaaaggcagtcgagattaaaaaaggttgctgatgaactaaaactttatcgttgtcatacaatactaaactgtacaagtgcgtgcccgaaaggtttgaatcctgctaaagcaatagctgaaataaaaaaaatgttagcaaccgccaatatttaa

SEQ ID NO: 218802 - DNA, 660 bp, Unknown
  Bacterial polypeptide expressing nucleotide sequence isolated from the Sargasso Sea
aatggttcaatttgcacttccaaaaaattcaaaaattaaagaaggtattcagcaccctgtaaaagaacaatctgaaagtccaaaaaaaattgttatatatagatggagtccagatgatgatgaaaatccaagacttgatagttatgaaatagatttaaaaaaatgtggaccaatggttctcgatgctttgatgaagattaaaaatgaaattgattcttctttaacttttagaaggtcttgccgtgaaggtgtatgtggttcatgtgcaatgaatattgatggagttaacactcttgcatgtttaaaaccaattgaagaagtaaatggtgaaattagaatttacccgttgcctcatatgccagtagttaaggatttggtacctgacttgactaaggtttataaacaactagcatcaattaaaccatggcttcaaagatcaaaaaaaggagaggcttctaaatctaaattaattgaagaaataaaacaaagtcctaaagatagagaaaaattagatggccaatgggagtgtgtattatgtttttgttgtacaacctcttgcccaagttattggtggaatagcgatgaatatttaggacccgcagtattattgcaagctgcaagatgggtaaatgattctagagatgttgaaagaaaaaaaag

SEQ ID NO: 218803 - DNA, 611 bp, Unknown
  Bacterial polypeptide expressing nucleotide sequence isolated from the Sargasso Sea
aatggttaaatttaatcttccagataattcaaaactcacaaaaggtgattattttaaatctgatattggatcaaaaaatataaaaaaattccaaatttatagatggtcacctgaagatgagaggaatccaagaatggatacatatgaagtagacatgaattcatgtggacccatggttcttgatgcagttatgaaaattaaaaatgaaattgactcatctcttacattcaggagatcatgtagagaaggaatatgtggttcttgtgcaatgaatattgacggtacaaatactctagcatgtacgaaggcaataaatgatgttaaaggtgatattaaaatttatcctttaccacatatgcccgttattaaggatttaataaccaacttaaaaagtttatatactcaattaaagtcaatcaaaccttggctgcatagtaaaaaaactcaagcaactgatgtagagaatattcaatctaaagaggaaaggtcaaagttggatgggctgtatgaatgtatattatgtgcttgttgctcaacttcatgtccaagttactggtggaatagtgacaaatatcttggccccgctgtgttattgcagtcatacagatggc

SEQ ID NO: 218804 - DNA, 655 bp, Unknown
  Bacterial polypeptide expressing nucleotide sequence isolated from the Sargasso Sea
atggttcaaataaatttgcctaagaattcaaaaatccaaaagggcaaatattttaaagacacaacaggttctaagaatataagaaaagttaatatttatagatgggatccatcaactggcgaaaacccaagaattgatacttacgaagtggatatggataattgtccatcaaaagttttagatctacttaataaaattaaaaacgaaattgatccaactattgcttatagaagatcatgtgcacacggagtttgtggttcttgcgcaatgaatatggatggaaaaaatggtttagcttgcactaaacctcactcagagattaaaggagatattaatatttatcctcttcctcatttaaaagtattaaaagatcttattggagatttaagtacactttatagacaatatgagtctgtggaaccatggctaaaaaactcaaacgattctagcaaaaccgagaacttacaatctaaagaagatagagctaaacttgatggactttatgaatgtattatgtgtgcatgttgttccacgtcatgccctagttattggtggaacggagacaaatatcttggtccagctgttttacttcaagcctatagatggataatagactcaagagatgaagatagaaaagcaagattaaaaaagtagc

SEQ ID NO: 218805 - DNA, 451 bp, Unknown
  Bacterial polypeptide expressing nucleotide sequence isolated from the Sargasso Sea
tgcaccaaacctcatgcggaaatcaaaggagatataaatatttatcctttacctcacttaaaggttcaaaaagatttaattggaaatttagatactttgtataaacaatatcattctgttgaaccttggctaaaaaattctaaaaaaaatgataataaagaaaatttacaatctatagaagatagatcaaaactagatggactttatgaatgcataatgtgtgcttgttgttcaactgcatgtccaagctattggtggaatggagataaatatcttggtccagctgttttgcttcaagcatatagatggataattgatagtagagatgaagagagaaaacaaagactagaaaaagttgcagatgaattaaaactttatagatgtcatactattttgaattgtacaaatgcatgtccaaaaggtttaaatcctagcaaaagctattgctgaa

SEQ ID NO: 218806 - DNA, 454 bp, Unknown
  Bacterial polypeptide expressing nucleotide sequence isolated from the Sargasso Sea
aaagggtgatataaatatttatcctctacctcatttaaaagttcaaaaggatttaattggtgatctaagcgttttgtataagcaatatcaatcagttgagccatggttaaaagtttcaaaaaaaaatgaagataaagaaaatttacaatcaattgaagatcggtctaaattagatggtctttacgaatgtataatgtgtgcgtgctgctcaacatcttgcccaagttattggtggaatggagaaaaatatttagggccagcagttttattacaagcatatagatggataattgatagcagggatgaagatagaaaagaaagattaaagaaagttgcagacgaactaaagctatatagatgtcataccattatgaattgtacaaatgcatgtccaaaaggcttgaatcctgcaaaagctattgcatctataaagaaaatgcttgcaacaggttaa

SEQ ID NO: 218807 - DNA, 796 bp, Unknown
  Bacterial polypeptide expressing nucleotide sequence isolated from the Sargasso Sea
atggttcagttaacacttcctgcaaattcaaaaattacaaaaggtaaattgcatcaaagcaaggaaattttagagtcagaaaaaaaattagtaatttatcgatggaacccagatgatgacaaaaatccaagactagatacttatataattgatcaaactaagtgtggtccaatggtacttgatgctctaatgatgattaaaaacgaaattgactccacactaacatttagaaggtcttgtcgtgaaggagtttgcggttcttgcgcaatgaatatagatggagttaatacattagcttgtcttaaaagtatgtcagaaataaaaaaggatataaaaatttatccacttcctcatatgcgtgtagtaaaagatttagttcctgatttaagcaaagcttatgaacagttagaatcaattaaaccgtggttagaaaggtctaaatctaacggtaaaaatttagataaccaaaatggggaaaaaaaacaattacccaaagatagagaaaaacttgatggtaagtgggagtgtgtattgtgcttttgttgtactacttcatgtcctagttactggtggaatggtgaagaatatttaggacctgctgtattactgcaagcagctagatgggttaatgatactcgagatgctgaaagaaaagaaagattaaaagcaataaatgattcattaaaactttataaatgtcattcaataatgaattgtactcggtcttgtcccaaaggactaaatccagctaaagaaattgcaggtttaaaaaaggctattgttacagaattataat

SEQ ID NO: 218808 - DNA, 979 bp, Unknown
  Bacterial polypeptide expressing nucleotide sequence isolated from the Sargasso Sea
atgagaacctcctttgaactagccaaatcaggtctgaatacagctgttatttctaaagtttttcctaccaggtctcataccgtttcggctcaaggaggaattacatgtgcaatccaaagcgcagatccaaatgatgattggagatggcatatgtacgacaccgtaaaaggctctgactatattggtgatcaagatgctattgaatatatgtgctcagagggaccaaaagctgtttatgaattagaacacatgggccttccattttctcgttttgaaaatggaaggatttatcaaagaccatttggtggacaatctaaagattttggaaaaggtggacaggcagctagaacctgtgcagctgcagatagaacaggtcatgcacttcttcataccctctaccaaaataatgtgaaagagggaacaaactttcttaatgaatggtttgctgttgatcttgtaaaaaattcaaagaaagagatcactggagttatagctttttctattgaatctggtgaagtctgttaccttaaagctcaggcaacggttctggctaccggcggtgctggaagaatatatgcatctacaacaaatgctttgattaatactggagatggactcggaatgactcttagagctggatttcctgctcaggatatggaaatgtggcaatttcatccaactggtattcatggtgcagggtctcttgtaaccgagggttgcagaggtgaaggtggatatttgattaatgcagatggtgagagattcatggaaagatatgctccaaatgctaaggatcttgcagggagagatgttgttgctagatcaatggttatggaaatacttgaaggcagagggtgtggcccagagaaagatcatgtttacttgaaactcgatcatttgggtgcagatgtacttaattcaaaagtaccaggcatatgtgagctctcaaaaacttttgctcacgttgatcctattatga

SEQ ID NO: 218809 - DNA, 559 bp, Unknown
  Bacterial polypeptide expressing nucleotide sequence isolated from the Sargasso Sea
tcaattgcttatagaagatcatgtgcccatggtgtctgtggttcgtgtgcaatgaatatggatggaaaaaatggcttagcgtgcacaaaacctcacaaagaaattaaaggtgacattaatatttatcctttacctcatttaaaagttcaaaaagatttaattggagatttaagcactttatataaacaatacgagtcggttgagccatggcttaaagtttcaaaaaaagatgaaggtaaagaaaacttacaatctatagaagatagatcaaaattagatggcctttatgaatgtataatgtgtgcatgctgttcaacttcatgtccaagttattggtggaatggagataaatatttaggccctgcagttttattacaagcatatagatggattatagatagcagagatgaagatagaaaagagagattaaagaaagttgctgatgaactaaagctttatagatgccatactattatgaattgtactaatgcatgcccaaaaggcttgaatcctgcaaaagcaatagcgtctataaagaaaatgcttgcaacaagttaat

SEQ ID NO: 218810 - DNA, 451 bp, Unknown
  Bacterial polypeptide expressing nucleotide sequence isolated from the Sargasso Sea
aattgatatttatccgttgccacacctaaaagttaaaaaagacttaataggagatttagatggattatacaaacaatacaaatctatcgaaccttggttaaaatcaagttcaaaatctgaaacaactgagctaattcagtcaaaagaggatagagctaaacttgacggtgcttatgaatgtataatgtgtgcttgttgttctacctcttgcccaagttattggtggaatggagacaagtatttgggaccagcagtattattacaagcttatagatggatcattgatagtagagatgaggaaagacaggctagattaaaaaaagtagctgatgaattaaaattatatcgttgtcacactattttaaactgtactagtgcatgccccaaaggtttaaacccagcaaaggcgattgctgaaataaaaaaaatgttagcaacagctaatatttaa

SEQ ID NO: 218811 - DNA, 703 bp, Unknown
  Bacterial polypeptide expressing nucleotide sequence isolated from the Sargasso Sea
aatttaaaaaaagttaatgtttataggtggaatccttcgagcaatgaaaatcctagaattgatacatttgaagtagatctgaatgaatgtggacctaaagtattggatattctttttaaaattaaaaatgaaattgatcctactttaacttttagaagatcttgtgcgcacggtgtttgcggttcatgcgctatgaatgttgatggagtaaatacattatcttgcattaaatctcattcagatattaaaggtgaattaaatatttacccattacctcatttgaaagtaatcaaagatttagttggtgatttaactacattatataaacaatatgagtccgtcgaaccttggcttaaagctaaagttggggaaaaaacatctacagaaattaaacagtcacaagaagacagggcaaaacttgatggatattatgagtgcatactttgtgcatgttgttcaacttcttgcccaagttattggtggaatggagataaatacttaggaccagcagttttattacaagcttatcgttggataacagatagtagagatgaggaaagaaaagaaagattaaaaaaagttgcggacgaactcaagctgtatagatgtcatacgattatgaattgtactaattcttgcccaaaaggtttaaatcctgcaaaagcaattggatctattaaaaaaatgcttgcatcgagctaaa

SEQ ID NO: 218812 - DNA, 712 bp, Unknown
  Bacterial polypeptide expressing nucleotide sequence isolated from the Sargasso Sea
tggatcagataatctaaaaaaaattaatgtgtacagatggtatccctcaactaaggaaaatcctagggttgatacattcgaagttaatatgaacgagtgtggacccaaagtattagatatactctttaaaattaagaacgaaatagacccttcacttacttttagaagatcttgtgctcatggagtgtgcggttcttgcgcaatgaatgtagatggcgtaaacactttatcttgcaccaagtcccattcagatattaaaggtgatctaaatatttatcctttaccacatctaaaagttgtcaaagatttagtcggagatttaactactctttataaacagtatgaatcagttgaaccatggttgaagaccaaagttggacaaaaaaccaccaaagaaataaaacaatcccaagaagatagagcaaagctggacggttattacgaatgtattttatgtgcctgctgttctactgcctgcccaagctattggtggaacggggataaatatttaggacctgcagtcttattgcaagcctatagatggattaatgatagtagggatgaagataaaaaagctagattaaaaaaagttgctgacgagttaaaattatacagatgtcacactatcatgaattgcacaaattcatgtcccaaaggtttaaatccagccaaagctattagttcgattaaaaaaatgcttgcaacgagctaa

SEQ ID NO: 218813 - DNA, 748 bp, Unknown
  Bacterial polypeptide expressing nucleotide sequence isolated from the Sargasso Sea
aaagttcaaaaaggaaaatattataaagataaaactggatcaaaaaatattagaaaagtaaacgtatatagatggaatccatcagatggacaaagaccaaggatagatacttatgaagttgatatggataattgcccttcaaaagtattagacttattaaataagattaaaaatgaaattgacccttcccttgcttatcgaagatcatgttcacatggagtatgtgggtcttgtgctatgaatatggatggaaaaaatggtttagcttgcacaaaatctcattctgaaattaaaggtgatataaatatttatcctctgccacatttaaaagttttaaaagatttaattggtgatttgagtactttatttaaacaatacgattcaatcgaaccatggcttaaaaattcaaaaaaagatgatggaaaagaaaatttacagtctagaaaagaaagagaaaagttagacggttattatgaatgtataatgtgtgcttgttgttcaactgcttgtccaagttattggtggaatggagataagtatctcggtccagctgtgcttttgcaggcttatagatggattatagatagtagagatgaagaaagaaaagaaagattaaataaagttgctgacgaacttaaactttatagatgccacactattatgaattgtacaaatgcatgtccaaaagatttaaatccagctaaagcaatagctgaaataaaaaaaatgttggctactaattattaaa

SEQ ID NO: 218814 - DNA, 463 bp, Unknown
  Bacterial polypeptide expressing nucleotide sequence isolated from the Sargasso Sea
tagaatttatcctttaccccatatgccagttgttaaagatctagttcctgatctgagcaaggcttacgaacaattagcatcaattaagccttggcttcagagatcaaatgaagagtttaattctttacaaaatggttcagaagaaaaaaagcaaacacccaaagatagagaaaaattagatggacaatgggaatgtgtactttgtttttgttgcacaacttcatgcccaagttattggtggaacagtgatgaatatcttggacctgctgttttaatgcaagcagcaagatggataaatgactcaagagactctgaaaaaaagaacagattaaaagtggtaaacgacaaaatgaaactatatagatgccattctatcatgaactgtactcgttcgtgccccaaaggactcaatcccgctaaagctattgcggaattaaagaaggctattgttacagaattataa

SEQ ID NO: 218815 - DNA, 367 bp, Unknown
  Bacterial polypeptide expressing nucleotide sequence isolated from the Sargasso Sea
attgagccatgggttaaaaaataattcaacaaaacaaacaactgaaatttatcagtcaaaagaagatagagcaaaactagatggtgcttatgaatgcattatgtgtgcttgttgttcaacatcgtgcccgagttattggtggaatggagataaatatttaggacccgcagttcttttacaagcttatagatggattatagacagtagagatgaagagaggaaagaaagattaaaaaaagttgctgatgaattaaaactttacagatgtcatactatattaaattgtacaaatgcatgcccgaaaggcttgaatcctgcaaaagctatagcagagataaaaaaaatgcttgcaacagcaaatgtttaa

SEQ ID NO: 218816 - DNA, 565 bp, Unknown
  Bacterial polypeptide expressing nucleotide sequence isolated from the Sargasso Sea
gatccgtctctagcttatagaagatcatgtgctcacggtgtttgtggttcatgcgctatttatatggatggcaaaaatggtttagcttgtacaaaagcacattctgagattaaaggagacattaatatttatccattaccacatttaaaggttttaaaagatttgataggcgatctaaatacattatataaacaatatgcgtctgtagagccttggcttaaaacttcaaaaaaaaatgataatgttgaaaatattcaatcaattaatgatagatcaaaacttgacggattatatgagtgcataatgtgtgcatgttgctcaacttcatgtccaagttattggtggaacggtgacaaataccttggtcctgcagttttattacaagcttacagatggataatggatagtagagatgaagatagaaaagaaagactcaaaaaagttgcagatgaactaaaattatatagatgtcatactattatgaattgtactaattcctgccctaaaggactaaatccagcaaaggctatagcagaaattaaaaaaatgcttgtaacagtttagt

SEQ ID NO: 218817 - DNA, 778 bp, Unknown
  Bacterial polypeptide expressing nucleotide sequence isolated from the Sargasso Sea
aatggtacaatttaatcttccctccaattctaaaattttaaaggggaaatattttaaagacaaaactggatcttctaaattaagaatagttcatatttatagatgggacccagaaaaaaatgaaaatcctcgagaggatacttttgaagtaaatttagataactgcggtaataaagttttggatattttaaataaaattaaaaatgaaatagattcgtcactaacttttcgtaaatcctgtgcccacggagtttgtgggtcgtgtgcaatgaacgtcgatggtataaacacactatcttgcatgaaatcacataaagacattaaaggtgccattcgtattttccccttaccacatttaaaagtagttaaagatttggtggcagatttaagcacgttgtataagcaatatgaatcaattgaaccttggttaaaaacaaaagaatctaaattacgtaaaaatgaaattacgcaatctaaagaaaacagagaaaaattagatggtttatacgaatgtattatgtgtgcttgctgttcgacttcgtgtccgagttattggtggaatggtgaaagttatttaggtccagctgttttacttcaagcatatcgttggatatcagatagtagggatgaagaaaaaaaggaaaggttaaaaatggttgctgataaacttaaattatataggtgtcataccataatgaattgtacgagttcttgtccaaaaggcctaaatccagcaaaggctataggttcaattaaaaaaatgcttgcaacaagctag

SEQ ID NO: 218818 - DNA, 640 bp, Unknown
  Bacterial polypeptide expressing nucleotide sequence isolated from the Sargasso Sea
aatggttttggatgcattagtgcaaattaaaaatgaaatagatagtacattaacatttagacgttcttgtagagagggagtgtgcggatcatgtgctatgaatattgatggagtaaacactttagcctgtctcaaaccaataaatgaagtaaaaaaagaaataaaaatttttcccttgccgcatatgcgtgttgttaaagatttagtacccgatttatctgaagcttatgaacaattaaaatttattgaaccatggctagagataaataaaaaaaaacaaacaaaaagttctattcagaaaaaatttttaaagactgaagaaaaaaaacaaagtattactgaaagagcaaatttagatggtaagtgggaatgtgtattatgtttctgttgtaccacttcttgcccaagttattggtggaatagtgaccagtatcttgggccagctgttttacttcaggcatcaagatggataaatgatagtcgtgatgataaaagaaaagaaagattgaaaaaaataaatgactcaatgaagttatatagatgtcactctattatgaactgtacacgttcatgtccaaaaggactaaatcctgctaaagcaattgcagatattaagaaggctattgttacagaattataa

SEQ ID NO: 218819 - DNA, 299 bp, Unknown
  Bacterial polypeptide expressing nucleotide sequence isolated from the Sargasso Sea
tactacgcctcatgaagaaattaaaggtgatattaatatttatccactacctcatttaaaagttaaaaaagatttaataggtgatttagatggtttatataaacaatatcaatcaattgaaccttggttaaaaacaaattcaaaatctgaaacaaaagaaataattcaatcaaaaaaggatagagaaaaattagatggcgcatatgaatgtattatgtgtgcatgttgttcaacttcatgcccaagttattggtggaatggtgataaatatttgggacctgctgttttacttcaagctt

SEQ ID NO: 218820 - DNA, 718 bp, Unknown
  Bacterial polypeptide expressing nucleotide sequence isolated from the Sargasso Sea
atggtacaaataaatttacctcaaaattctaaagttcaaaaaggtgaatattataaagataaaactggttcaaaaaatattagaaaagttaatatttatagatgggatccttcgagtggtgaaaatcctcgtatagatacatatgaagttgatatggataattgtccatcaaaagtattagatcttttaaataaaattaaaaatgaaatagatccatcaatttcatacagaagatcttgtgcacacggtgtctgcggttcttgtgcaatgaatatggatgggaaaaatgggttagcttgtacaaaacctcataaagaaattaaaggcgatattaatatttatcctttgcctcatttaaaagttcaaaaagatttaattggagatttaagcatcttatataaacagtacgagtcggttgagccctggttaaaaatttcaaaaaaagatcaaaagaaagaaaacttacaatcaattgaggatcgttctaaattagatggattatatgaatgtataatgtgtgcatgttgttctacttcttgccctagctattggtggaatggtgacaaatatttaggaccagcagttttattacaagcttacagatggataatagacagtagagacgaagatagaaaagagagattgaagaaagttgcagatgaacttaagctttatagatgtcatactattatgaattgtactaatgcagtccaaaagg

SEQ ID NO: 218821 - DNA, 254 bp, Unknown
  Bacterial polypeptide expressing nucleotide sequence isolated from the Sargasso Sea
ctgttgttctacggcatgcccaagctattgtgggaatggagataaatatcttggacctgcagtcttgctccaagcttatagatggataattgatagtagagatgaagaaagaaaagaaagattaaaaaaagttgcagatgaattaaaactttatagatgtcatactattatgaattgtacaaatgcatgtccaaaaggactaaatccagcaaaggcaattgcatcgataaagaaaatgcttgcaacaagctagc

SEQ ID NO: 218822 - DNA, 775 bp, Unknown
  Bacterial polypeptide expressing nucleotide sequence isolated from the Sargasso Sea
atggttcaaataaggttacctgagaattcaaagattgaaaaaggaaactattataaagataaaacagggtcgaaaaatttaaggaaagtaaacgtttacagatgggatccttcgacaggaaagaaaccgagaatagacacttatgaagttgatatggataattgcccttctaaagttttagacatcttgaataaaattaaaaacgaaattgacccatctatcgcttatagaagatcttgcgctcatggagtttgtggttcttgtgcaatgaatatggacggaaaaaatgggcttgcttgcactaaaccacactctgaaattaaaggtgatataaatatttatcccttgcctcatttaaaagtgttaaaagatttaattggagatttaagcacattatacaaacaatacgagtcagtagaaccttggcttaaaacctcaaaaagaaatgatgaaaaagaaaatctacaatccaaaaaagatagagcaaaattagatggtttgtatgaatgcataatgtgcgcttgctgttcaacgtcttgcccaagttattggtggaatggagaaaaatatttaggaccagctgtcttacttcaagcttatagatggatcatagatagtagagatgaagatagaaaagccagactaaaaaaagttgcagacgagttaaaattatatagatgtcatactatcatgaattgcacaaacgcatgcccaaagggtttaaatccagcaaaagcgatagcatctattaagaaaatgcttgcaacaagctaat

SEQ ID NO: 218823 - DNA, 325 bp, Unknown
  Bacterial polypeptide expressing nucleotide sequence isolated from the Sargasso Sea
ctcaaaggaaattaaacaatcacaagaagatagagcaaaactagatggttattatgagtgtatactttgtgcatgctgctcaacttcttgcccaagttattggtggaatggagataaatatttaggaccagcagttttattgcaagcatatagatggataactgacagtagagatgaagaaagaaaagaaagattaaaaaaagttgcagatgagcttaaattatatagatgtcatacgattatgaattgtacaaattcatgtccgaaaggtttaaatcctgctaaagctatcggatctatcaaaaaaatgcttgcaacgagttaa

SEQ ID NO: 218824 - DNA, 799 bp, Unknown
  Bacterial polypeptide expressing nucleotide sequence isolated from the Sargasso Sea
atggttgaatttactttacctaaaaattcaaaagttgttaaaggtattgatcattcattaaaaaacaattctgaaaacacaagaaaattaattatatatcgttgggatccagaagaagataaaaacccaaggcttgacagatatgaaatagatttaaataaatgtggacccatggttttagatgctctgataaaaattaaaaatgaaatagatacaaccctcacctttagaagatcatgtagagagggagtttgtggctcttgttccatgaatatagacggtataaacacattagcatgtttaaaacctatggctgaaataaaaaaagatatcacaatctaccctttaccacatatgcgggttataaaagatctagttccagatttaaaaaaagcatatcaacaattagagtccataaagccttggttatcctctaacaattcaaataaaatagatgtaataaaaaaggataaacgtgaaaacaaacaaacacctgaagaaagagctaaattagatggaacttgggaatgtattctatgtttttgttgcacaacttcatgcccaagttattggtggaatagcgatgaatatttaggtccagcagtcttattacaagcatcaagatggattaatgatagtcgtgacaataaaaaaaaggaaagattaaaagaactaaataattcaatgaaactttacagatgtcactctataatgaattgtgcacgttcttgtcctaaaggtttaaatcctgccaaagctatagcagaaatcaagaaggctattgttactgaaaaataat

SEQ ID NO: 218825 - DNA, 796 bp, Unknown
  Bacterial polypeptide expressing nucleotide sequence isolated from the Sargasso Sea
gatggttgaatttactttacctgccaactcaaaagtacaaaaaggtattgctcatccagtgaagaaagtatcaaaaaaaccaaagaaacttgtaatttatcgttggaatcctgaagatcaagataatccccgtttagatagttatgaaattgatttaagtaaatgtggcccaatggttttggatgctttaatgaaaataaagaatgaaattgactcttcattaacctttagaagatcttgccgagagggcgtttgtggttcctgtgctatgaatatagatggggtcaataccttagcatgtttaaaacctattgaagaggtaaacggtgagattagaatttatccgcttcctcatatgcctgttgttaaagatttagtgcctgatcttagtaaagcttacgaacagttagcttctattaaaccttggctgcaacgctcttatgataattctagtgccacagcaagtataagtcaggaaaaaaaacaaacaccaaaagatagagaaaaattagatggtcaatgggaatgtgttttatgcttttgttgcacaactgcatgtccaagctattggtggaatagtgaagagtatctagggcctgcagttttaatgcaagcagctagatgggtgaacgactctagagactctgagagaaagaatagactgaaagcagtaaacgacaaaatgaagctatatcgttgtcattcgattatgaattgtacgcgctcttgtcctaaaggactcaatcctgcaaaagcaattgcagatttaaagaaggctattgttacagaattataa

SEQ ID NO: 218826 - DNA, 781 bp, Unknown
  Bacterial polypeptide expressing nucleotide sequence isolated from the Sargasso Sea
aatggttcagattaatttacctaaaaactctaaagttcaaaaaggtaattatttcaaagacaaaacaggttctaaaaacttaagaaaagttaatgtctacagatgggatccttcaacgggagaaaaccctagaattgatacttatgaggttgatatggataactgtccttcaaaagttttagatgttttaaataaaataaaaaatgagattgatccatctattgcttataggagatcttgtgctcatggagtttgtggctcttgtgcaatgaacatgggtggtaaaaatggattggcatgcactactcctcattctgaaattgatggggatatagatatttatccattacctcacttaaaagttaaaaaggatttaattggtgatttggacggtttatataaacaatatcaatctatagaaccctggttaaaatcaaattcaaattcagaaactacagaaattattcaatcaaaaaaagacagagaaaaattagatggtgcctatgaatgtattatgtgtgcttgttgctccacatcttgtccaagttattggtggaatggagacaagtatttaggtccagcagtattattgcaggcttacagatggattgtggatagtagagatgaagagagagaagctagattaaaaaaagtagcagatgaacttaaactttatagatgccataccatcctaaattgcactagcgcatgtcccaaaggtttaaacccagcaaaagctattgctgaaataaaaaaaatgttagcaaccgctaatatataa

SEQ ID NO: 218827 - DNA, 763 bp, Unknown
  Bacterial polypeptide expressing nucleotide sequence isolated from the Sargasso Sea
tttgcctcaaaattcaaaaattttaaaaggtaaatactatcaagataaatctgattcaaataatttaaaaaaggtaaatgtatatagatgggatccgtcaaaaaaagagaatcctagaattgatacatttgaagtcaacatgaatgagtgtggaccaaaagtattagatgtgctttttaaaattaaaaatgaaatagacccttcgctaacttttagaagatcttgtgctcatggagtttgcggatcctgtgcaatgaatgtagatggtgtaaacactttgtcttgtattaaatcacactcagatattaaaggtgaactaaacatttatcctttgccccatttaaaagttgttaaagatttggttggagatttaactactctttataaacagtatgagtcagtcgaaccatggttgaaaactaaagttggggaaaaaacaactaaagagataaaacaatctcaagcagacagagaaaaactagatggttattacgaatgtattttatgcgcatgttgttcaacagcatgccctagctattggtggaatggcgataagtatttgggacctgcagttttattacaagcttatagatggataaatgacagcagagatggagataagaaagaaagattaaaaaaagttgccgatgaattaaaattatatagatgtcatactattatgaattgtactaattcttgtccaaaaggtctaaatccagcaaaagctattggatcaataaaaaaaatgcttgcaacaagctaa

SEQ ID NO: 218828 - DNA, 781 bp, Unknown
  Bacterial polypeptide expressing nucleotide sequence isolated from the Sargasso Sea
atggtgcaattgaatttaccaaaaaattctgaagtcaaaaaaggtaaatattttaaagacaaaacaggttctaaaaatcttagaaaagtaaatgtttatagatgggatccctctaccgaggaaaatccaagaattgatacttatgaagttgatatggataactgtccttcaaaagtcttggatattttaaataaaattaaaaacgaaattgatccaacattagcttacagaagatcttgtgctcatggagtttgtggttcttgtgctatgaacatgggtggcaaaaatggtttagcgtgcacaactccacattcggaaattgatggagatgtagacatatatcctctaccgcacttgaaagttaaaagagatttaattggtgatttagatggtttgtataaacagtatgaatctattgaaccttggctaaaaaataattcaaaaaaagaaacaacagaaatttatcaatctcaagatgatagagcaaaacttgatggtgcttatgaatgtattatgtgtgcatgttgttcaacatcttgcccaagttattggtggaatggagataaatatttaggtccagcagttcttttacaagcatatagatggatcgttgatagtagagatgaagaaagaaaagcaagattaaaaaaagttgctgatgaattaaaactttacagatgtcatactattttaaattgtacaaatgcttgtcctaaagggctaaatcctgcaaaagcaattgcagaaattaaaaaaatgttagctacggccaatgtttaaa

SEQ ID NO: 218829 - DNA, 778 bp, Unknown
  Bacterial polypeptide expressing nucleotide sequence isolated from the Sargasso Sea
atggctcaatttaacttacctcaaaactcaaaaatagaagttggtaagtactacaaagacgagacaaactcaaaaaatttaaaaaaagttaatgtctatagatgggatccatctagtgggcaaaatccaagagttgatacttttgaggtagacatggatacatgtgggccaaaagttttagatattctatttaaaataaaaaatgaaatcgatccatcacttacatttagaagatcatgtgcccatggagtttgtggttcctgtgcgatgaacattgatggtgtaaacaccttagcttgtataaaatctcatacagatattaatggtgatcttaacgtttaccctctcccacatttgaaagtagttaaagatttaattggagacttaagcacactttataaacagtacgagtcaattaaaccttggttgcaaactgaacagactggaaaggaaaaagaagaattaaggcaatctcaaaaagatagagaaaagctagatgggtactacgaatgtatactttgtgcttgctgttcaacttcatgtccaagttattggtggaatggtgataaatatttaggaccagctgtgcttcttcaagcatatagatggatcaacgatagtagagatggagacaaaaaagaaagactgaagaaagtagccgatgaattaaaattatatagatgtcatacaataatgaattgcacaaattcttgtccaaaaggattaaatcctgcaaaagccataggatctattaagaaaatgcttgcaacaagctaaa

SEQ ID NO: 218830 - DNA, 775 bp, Unknown
  Bacterial polypeptide expressing nucleotide sequence isolated from the Sargasso Sea
aatggttcaaataaatcttcctaaaaactcaaaagttattaaaggaatttattataaggacaaaactaattcaaaaaacattagaaaagtaaatgtttatagatgggacccttcaactggtgaaaatccaagaattgatacatatgaagttgacatggacaattgtccatcaaaagttttagacttacttaacaaaattaaaaatgaaatagacccttcgcttgcatatagacgttcatgtgctcacggagtttgtggttcttgcgctatgaacatggatggaaaaaatggcttagcatgtacaaaacctcatgcagaaattaagggtgatattaatatttatccgttaccacatttgaaagtattaaaagatttaataggagatttaaatactttatacaaacaatatgagtccgtagaaccatggcttaagacttctaaaaaaaatgatcaacaagagaatattcaatcaaaatcagatcgttcaaaactagatggattatatgaatgtataatgtgcgcttgctgttctacatcctgcccaagttattggtggaatggagacaaatatttagggcctgcagtgcttcttcaagcttatagatggataatggatagtagagatgaagatagaaaagaaagattaaataaagtagctgatgaattaaagctttacagatgccatacaatcatgaactgtacaaatgcttgtccaaagggactaaatcctgcaaaagcaattgcatcaataaaaaaaatgcttgcaacaagctag

SEQ ID NO: 218831 - DNA, 775 bp, Unknown
  Bacterial polypeptide expressing nucleotide sequence isolated from the Sargasso Sea
aatggtacaaataaatttacctaaaaattctaaagtacaaaaaggcaaattttataaagataaaacaggctcaaaaaatattcgaaaagtaaatatttatagatgggatccatctagtggtgaaaatcctcgtatagatacatacgaagttgatatggataattgtccatcaaaagtattagatcttttaaataaaattaaaaatgaaatagatccatcgattgcttacagaagatcttgtgcccatggcgtatgcggttcatgtgcaatgaatatggatggaaaaaatggtttagcgtgcacaaaacctcataaagaaattaaaggtgacattaacatttatcctttaccacatttaaaagttcaaaaagatttaattggagatttaagtactttatataaacaatacgagtcagttgaaccatggttgaaagtttcaaaaaaagatgaaaataaagaaaacttacaatctatagaagatagatcaaaattagatggtctttatgaatgtataatgtgtgcatgctgttcaacttcctgcccaagttattggtggaatggagataaatatttaggcccagcagttttattgcaagcatacagatggattatagatagtagagatgaagatagaaaagagagattaaagaaagtagctgatgaactaaagctttacagatgccatactattatgaattgtactaatgcatgcccaaaaggcttaaatcctgcaaaagcaatagcgtctataaagaaaatgcttgcaacaagttaa

SEQ ID NO: 218832 - DNA, 775 bp, Unknown
  Bacterial polypeptide expressing nucleotide sequence isolated from the Sargasso Sea
atggtacaaattaatttacctgaaaattcaaaagtacaaaaaggcgaatattataaagataaaactggctcaaaaaatattagaaaagtaaatgtttatagatgggatccttcaaaaaatgaaaatcctagaatagatacttacgaagtagatatggataattgtccatcaaaagttttagatattttaaataaaattaaaaatgaattagatccttctttagcttacagaagatcttgtgcccatggtgtttgtggatcatgtgcaatgaatatgaatggtaaaaatggactagcgtgcacaaaggctcattcagaattggatggtgatataaatatttatcctttgccacatttaaaggtactaaaagatttaataggtgatcttagtacattatataaacaatatgagtctgtagagccatggctcaaaacttcaaaaaaaaatatggatagtgaaaatttacaatcagtggaagatagagcaaaactagatggtctttatgaatgtataatgtgtgcttgttgctcaacttcttgcccaagttattggtggaatggggataaatatttgggacctgccgttttgcttcaagcttacagatggataatagatagtagagatgaagaaagaaaagaaagattaaaaaaagtagctgatgaattaaagttatatagatgtcatactattttaaattgcactaatgcatgccctaaagacttaaatccagcaaaagctatagctgaaataaagaaaatgcttgcaaccacttaat

SEQ ID NO: 218833 - DNA, 613 bp, Unknown
  Bacterial polypeptide expressing nucleotide sequence isolated from the Sargasso Sea
tgcccctcaaaagtactagatctactaaataaaattaaaaatgaaatagattcatctattgcttatagaagatcctgtgcacacggtgtctgtggatcatgtgcaatgaatatggatggaaaaaatgggttagcgtgtacaaaacctcataatgaaattaaaggtgatattaatatttatcctttacctcatttaagagttcaaaaagatttaattggagatttaagcacattatataaacaatatgcgtctgtagagccttggttaaaaaattctaaaaaagatgatagcaaagaaaatttgcaatcgatagaagatagatcaaaattagatggtctttatgaatgtataatgtgcgcctgttgttccactgcatgtccaagttattggtggaatggagataaataccttggacctgcagtcttgctccaagcttatagatggataattgacagtagagatgaagaaagaaaagaaagattaaaaaaagttgcagatgaattaaaactttacagatgtcatactattatgaattgtacaaatgcatgtccaaaaggactaaatccagcaaaggcaattgcatcgataaagaaaatgcttgcaacaagctagc

SEQ ID NO: 218834 - DNA, 649 bp, Unknown
  Bacterial polypeptide expressing nucleotide sequence isolated from the Sargasso Sea
ccaagaatagatacttatgaagttgacatggacaactgtccttcaaaagtactagacttattaaataaaattaaaaatgaaattgatccttctattgcttatagaagatcttgtgctcatggagtttgtggatcatgtgcaatgaacatggacggaaaaaatgggttagcctgcactaaatcacacaaagaaataaaaggagacataaatatttatcccttaccacacctgagagttcaaaaagatttaatcggagatttgagcacattatatagacaatatgagtcagtagagccttggttgaaaacttcaaaaaaagatgaaaccaaagaaaatttgcaatccatagaagatagatcaaaattagatggcctttatgaatgtataatgtgtgcttgctgctcaacttcgtgtccaagttattggtggaatggagataaatatcttggacctgcagttttgcttcaagcatatagatggataatagatagtagagatgaagaaagaaaagaaaggttaaaaaaagttgctgatgaacttaaactttataggtgccatactattatgaattgtacgaatgcttgcccaaaaggattaaatccagcaaaagcaattgcatccataaagaaaatgcttgcaacaagctgat

SEQ ID NO: 218835 - DNA, 763 bp, Unknown
  Bacterial polypeptide expressing nucleotide sequence isolated from the Sargasso Sea
ttgcctcaaaattcaaaaattttaaaaggcaaacactataaagatgaaactggctcaaataatttaaagaaagttaatgtatacagatgggatccatcaaaaagtgaaaatcctaggattgatacttttgaagttgatatgaacgagtgtggaccaaaagtattagatatactcttcaaaattaaaaatgaaatagatccttctttaacttttagaagatcttgtgcccacggagtatgtggttcctgcgcaatgaatatagatggtgtaaatactttgtcttgcatcaaatcacacttagacattaaaggtgaattgaatgtttatcctttgccacatttaaaagttgttaaagatttggttggagatttaacaactctttataaacaatatgagtccgtcgaaccatggttaaagacgaaagttggagaaaaaacaacccaagaaataaagcagtctcaagaagatagagaaaaactggacggctattacgaatgtattttatgtgcatgttgctcaactgcttgtccaagctattggtggaatggtgataagtatttaggtccagctgttttattacaagcttatagatggataaatgatagcagagatgaagataaaaaagaaagattaaaaaaagttgctgacgagttaaaattgtatagatgtcatactattatgaattgtactaattcttgtccaaaaggtctaaatccagcaaaagccattggatcaataaaaaaaatgcttgcaacaagctaaa

SEQ ID NO: 218836 - DNA, 1273 bp, Unknown
  Bacterial polypeptide expressing nucleotide sequence isolated from the Sargasso Sea
acggaatttggtgaaggacctccagtgcagcgaacttgtgcagcagctgatcgtaccgggcacgcaattctacacacgctatatgggcaatcgctaaaaaacaatgccgagtttttcatagagtattttgctatcgatttaataatgacagaagatggtatttgtcagggtatcatcgcctggaatttggatgatggaacacttcatagatttaacgcaaaaatggtagttttagcaacggggggttatggaagagcatatttttctgcaacatccgcgcattcctgcactggtgacgggaatggaatggttgcaagacaaggattacctctccaagacatggaatttgtacaatttcaccctactgggatttatggggctggatgtctaattaccgagggagcgagaggtgagggaggttaccttactaactctgatggcgaaagatttatggagcgatacgccccaacctataaggacttggctagtagggatgtcgtatcgagatgtatgacaatggagataagagatggtcgtggagttggatcggaaaaggatcacatcttcttacacttaaaccatcttcctcctgaaacattagcagaaagacttccaggcatatcggagagtgccagagtttttgcgggggtcgatgtaaacaaagacccaataccagttctaccaaccgtgcattacaatatgggtggtattccaacaaactattggggcgaggtaataagtcctaatggagaagatcagaacaaaatattgcctgggctaatggctgttggtgaagcgggatgcgcttcggtacatggagctaatcgcttaggatcaaacagcttaatagacttagttgtttttggaagagcagccgcaattaaggctgctgaagtcatagataagaacgaaagcaataggcccttaaataagaactctgttgatcaagcgattgggaggttagatggacttagattttcaaaggggacaactcctacagctgagttgagattgaaaatgcaaaaaacgatgcagtctgacgcagcggtcttccggtcagacaggactttatcagacggttgtgaaaaaatggctgatatagctgccggcatagactatgtaaatgttaccgataagtctatgatttggaacacagatttaatggagacattggaacttacaaatttaatgccaaatgctctggcaacgattgtttctgctgaggctcgtaaagaaagtagaggagctcatgcacaggaagaccatcctgata

SEQ ID NO: 218837 - DNA, 775 bp, Unknown
  Bacterial polypeptide expressing nucleotide sequence isolated from the Sargasso Sea
atggttcaaattaatttaccagcaaattcaaaagtacaaaaaggtgaatattataaagataaaactggttcaaaaaacataagaaaagtaaatgtttacagatgggacccatcaaaaaatgaaaatcctagaatagatacatatgaagtagatatggacaattgtccgtcaaaagttttagatattttaaataaaattaaaaatgaattagatccttccatagcttatagaagatcttgtgcgcatggtgtttgtggatcatgtgcaatgaatatgaatggtaaaaatggattagcatgtacaaagtctcactctgaattagatggtgatataaatatttatccattaccacatttaaaagtattaaaagatttaataggcgatcttagtacattgtataaacaatatgaatcagtagagccatggctcaaaacttcaaaaaaaaatattgagagtgaaaatttacaatcaatagaagatagagcgaaattagatggtttttacgaatgcataatgtgcgcatgttgttctacctcatgcccaagctattggtggaatggagataaatatttgggacctgctgttttactacaagcttatagatggataatagatagcagggatgaagaaagaaaagaaagattaaaaaaagtagctgatgaattaaagctatatagatgtcatactattttaaattgtaccaatgcatgtcctaaagacttaaacccagcaaaagctatagctgaaataaaaaaaatgcttgcaacgacctgat

SEQ ID NO: 218838 - DNA, 529 bp, Unknown
  Bacterial polypeptide expressing nucleotide sequence isolated from the Sargasso Sea
gagtttgtgttcatgcgccatgaacgttgatggggtaaatacattatcatgtatcaaatcacactctgacataaagggtgcattaaatatttatccattaccacatcttagggtagtaaaagatttagtgggtgatttaagtactctctacaaacaatatgaatcagttgacccttggttaaaagctaaagttggtgaaaaaacatctaatgagattaaacaatcgcaagaggatagggcaaaactagatggttattatgaatgtatactttgtgcttgttgttccacatcctgcccaagttattggtggaatggtgacaaatatttaggaccagccgttttattacaagcatatcgttggataacagatagtcgggatgaggaaagaaaagaaagattaaaaaaagttgcagatgagcttaaattatatagatgccatacgattatgaattgtactaattcttgcccaaagggtttgaatcctgccaaagcaattggatctattaaaaaaatgcttgcatcgaactaa

SEQ ID NO: 218839 - DNA, 775 bp, Unknown
  Bacterial polypeptide expressing nucleotide sequence isolated from the Sargasso Sea
atggtccaaattaatcttcctaaaaaatcggaaattaaaaaaggacattattacaaagataaaactggatcaaaaaatattagaaaagtaaatatttatagatgggatccagcaaccggcgaaaatcctaggattgatacttatgaagttgatatggataactgcccttcaaaagttttagatttattaaataagataaaaaacgagatagacccatcacttgcatatagaagatcttgtgctcatggtgtttgtggatcttgcgcaatgaatatggatggaaaaaatggattggcttgcacaaaaccccattctgaaatcaatggggatataaatatttatcctctacctcatttaaaagttttaaaagatctaattggagatttaagtactctatataaacagtatgagtcagttcaaccttggttaaaaacaacaaaaagaatagatgatactgagcatcatcaatctaaagaagatagatctaaattagacggtttatatgaatgtataatgtgtgcatgctgttcaacatcatgtcctagttattggtggaatggagaaaaatatttaggaccagcggtattattacaagcatatagatggataatagatagtagagatgaggatagaaaagaaagacttaaaaaagttgcagatgaattgaagctatatagatgtcatacaattatgaactgtactaatgcttgcccaaaaggtttaaatcctgcaaaagccatagcttcaattaaaaaaatgcttgcaactagttaat

SEQ ID NO: 218840 - DNA, 778 bp, Unknown
  Bacterial polypeptide expressing nucleotide sequence isolated from the Sargasso Sea
atggcacaatttagcctaccgcaaaattctaaaattgaggtaggaaattattttaaagataaaacaaactcaaaaaatcttagaaaaataaacgtttatagatgggatccttcaacaggaaaaaatccaagagttgatactttcgaggttgatatggataattgtggtccaaaggttttggacattttattcaaaataaaaaatgaaatagatccgtctttaacattcagaagatcttgtgctcacggcgtttgtggatcctgtgcaatgaatattgatggagtaaatggcctagcttgtataaaatctcatacagatataagtggtgatctaaatatttatcctttacctcatttaaaagtagtaaaagacttaattggagatctcacaactttgtataaacaatatgagtctattcagccttggttgaaagttgatcaaactggacaagagaaaattgaacttaaacaatcacagaaagacagggaaaagttagatggatactatgaatgtattttatgcgcttgttgctctacgtcttgcccaagttattggtggaatggtgataaatatttagggcctgcagttctattacaggcatatcgctggataaatgatagtagagatggcgataaaaaagaaagattgaagaaagtcgctgatgaattaaagctatacagatgtcataccataatgaattgtactaattcatgtccgaaaggtcttaatcctgcaaaagctataggatctatcaaaaaaatgcttgcaacaagctaaa

SEQ ID NO: 218841 - DNA, 604 bp, Unknown
  Bacterial polypeptide expressing nucleotide sequence isolated from the Sargasso Sea
tttggatattttaaacaaaataaaaaatgaaatagatccaactttggcctatagaagatcttgtgcacatggagtttgtggttcgtgtgcaatgaatatggatggaaaaaatggtcttgcctgcacaactccccataaagaaatagatggtgatattaatatttatccattaccacaccttaaggttaaaaaggatttaataggtgacttggacggtttatataaacaatatcaatcaattgagccatggttaaaatcaaattcaaagtcagaaactaaagaaatttttcaatctaaagaggatagagctaaactagatggtgcatatgaatgtattatgtgcgcgtgttgctcaacctcttgcccaagttattggtggaatggtgataaatatttgggaccagcagtacttttacaagcctatcgttggattatagatagtagagatgaagaaagaacttcaagattaaaaaaagttgcagacgaacttaaactttataggtgtcacacaattttaaactgtaccagcgcttgtccaaaaggtttaaatcctgcaaaagcaattgctgaaataaaaaaaatgttagctacagctaatatttaa

SEQ ID NO: 218842 - DNA, 430 bp, Unknown
  Bacterial polypeptide expressing nucleotide sequence isolated from the Sargasso Sea
cttgcctcatctaaaagttcaaaaagatttaattggggatttgagtacattatataagcaatatgcatctgtagaaccatggttaaaaaattcaaaaaaagatgacgcaaaggagaatattcagtcaatagaagatagatctaaattagatggtctttacgaatgtataatgtgtgcttgctgctctacttcatgcccgagttattggtggaatggagataagtatcttggacctgcagttttgctacaagcctatagatggataattgatagtagagatgaagaaagaaaagaaaggttaaaaaaagttgcagatgaattaaaactttatagatgccatactattatgaattgtactaatgcttgtccaaaaggattaaatccagcaaaagcaattgcatctataaaaaaaatgcttgcaacaagctga

SEQ ID NO: 218843 - DNA, 706 bp, Unknown
  Bacterial polypeptide expressing nucleotide sequence isolated from the Sargasso Sea
attgataatttatagatggaatccagaagataaaaaaaatccaagattagacacctatgaaatagatcaatcgaagtgcggaccaatggttttagatgcattgatgaaaataaaaaatgaaattgatccaactttaacattcagaagatcatgcagggaaggtgtatgcggttcttgcgctatgaacattgatggagttaatacattagcatgtttgaaaagcatgtctgatgtaaaaaatgaaataaaaatatatccacttcctcatatgcgtgttgtaaaagatttagttcctgatcttagtaaagcttatgagcaacttgcatctatcaaaccttggcttcaacgtgagcaaacaaatggaatcaaaaaaaattctacagatgaaaaaaaacaatcaccaaaagatagagaaaaactagatggaaaatgggagtgtgtattatgtttttgttgcactacctcctgcccaagttattggtggaatggagatgaatatttgggaccagcagtattgcttcaagcagcaagatgggtagaggattcaagagattcagaaagaaaagagagactaaaagcaattaatgattcattaaaactttatagatgccattcaataatgaattgcacaagatcttgtcctaaaggtctaaatccagctaaagaaattgctggacttaaaaaggctattgttacagaattataa

SEQ ID NO: 218844 - DNA, 781 bp, Unknown
  Bacterial polypeptide expressing nucleotide sequence isolated from the Sargasso Sea
atggtacaattaaatttacctgaaaattcaaaagttaaaaaaggtaaatattttaaagacagaacaggttcaaaaaatcttaaaaaagtaaacatttatagatgggatccatcttcaggagaaaacccaagaattgatacttatgaggttgatatggataattgttcctcaaaagtgcttgatattttaaataagataaaaaatgagatagatccaaccctagcatatagaagatcatgtgcacacggagtttgtggttcatgtgcaatgaatatgggtggtaaaaacggactggcttgtactaaacctcattctgaaattgatggagatattgacatttaccctttaccacatttaaaagtaagaaaggatttgattggcgatttagatggtctctataaacaatataaatcaatagaaccttggttaaaatcaaattctaaatctgagtcagaggaaatttttcagtctaaagaagatcgaaaaaaattagatggagcttatgagtgtataatgtgtgcatgttgttcaacgtcatgccctagctattggtggaatggagataaatatttaggtccagctgtcttactacaagcttatagatggattatagatagtagagatgatgaaaaacaagctaggttaaaaaaggttgctgatgagcttaaactttatcgttgtcatacaattcttaactgtacaagtgcttgtcctaaaggattaaaccctgcaaaagctatagctgaaataaaaaaaatgttagcaacagctaatatttaaa

SEQ ID NO: 218845 - DNA, 766 bp, Unknown
  Bacterial polypeptide expressing nucleotide sequence isolated from the Sargasso Sea
tttgcctaaaaactctgaggtaaataaagggaaatatttcaaagataagactggatcaaaaaatattcgtaaagttaatgtttataggtgggatccttctacagaagaaaatccaagaattgatacctatgaagttgatatggataattgtccttcaaaagttttagatattttaaataaaattaaaaacgaaatagacccaacattggcatatagaaggtcatgtgctcatggtgtttgtggttcatgtgcaatgaacatgggaggtaaaaatggtcttgcatgtacaaaacctcatgctgaaatagatggggacattgatatttatcctttacctcatctaaaagtgaagagagatttaattggtgacttggacggtctttataaacagtatgaatctattgagccttggttaaaaaataattcaactaaagaaacaacagaaatttttcaatcaaaagaggatagagcaaaattagatggtgcgtatgaatgcattatgtgtgcgtgttgctcgacttcctgtcctagttattggtggaatggagataaatatttaggtccagctgttcttttacaggcttatagatggattgttgatagtagagatgatgaaagaaaagctagattaaaaaaagttgctgatgaactaaaactttatagatgtcatactattctaaattgtaccagcgcatgtcctaaggggctaaatccagctaaagcaattgctgaaatcaagaaaatgttagccacagctaatgtttaa

SEQ ID NO: 218846 - DNA, 775 bp, Unknown
  Bacterial polypeptide expressing nucleotide sequence isolated from the Sargasso Sea
atggttcagataaatttacctcaaaactctaaagttgaaaaaggtaaatattacaaagataaaacaggctcaaagaatattagaaaagtaaatatctatagatgggatccgtcaacaggtggaaatcctcgtatagatacttacgaagttgatatggataattgtccatcaaaagtattagatttgttaaataaaattaaaaatgaaattgatccatcaattgcttatcgtagatcatgtgctcatggcgtctgtggctcatgtgcaatgaatatggatgggaagaatggattagcctgcacaaaaccacataaggaaattaaaggagatataaacatctatcctttgcctcacttaaaagttcaaaaagatttgattggtgacctaagcacactatataaacaatatcaatctgtagaaccatggttgaaagtttcaaaaaaaaatgacaacggtgaaaatttacaatcaatagaggatagatctaaattagatgggctttatgaatgcattatgtgtgcgtgctgctcaacttcatgtccaagttactggtggaatggggataaatatttaggacctgcggttttattacaagcatatagatggataatagatagccgagatgaagatagaaaagagagattaaagaaagttgctgatgaattaaaactttaccgatgtcatactattatgaactgtacaaacgcatgtccaaaaggcctaaatcctgcaaaagcaatagcatctataaaaaaaatgcttgcaacaagttaat

SEQ ID NO: 218847 - DNA, 775 bp, Unknown
  Bacterial polypeptide expressing nucleotide sequence isolated from the Sargasso Sea
atggttcaaataaatttacctcaaaactcaaaagtagaaaaaggtgaatattataaagatagaaccggatcaaaaaatattagaaaagttaatatttatagatgggatccttcaactggaaaaaatccaagaatagatacttatgaagttgatatggataattgtccatcaaaagtattagaccttctaaataaaattaaaaatgaaattgatccttccatagcttatagaagatcatgtgctcatggagtatgcggttcttgtgcaatgaatatggatggaaaaaatggattagcttgcaccaaacctcattcagaaataaaaggagatataaatatttatcctttacctcatttaaaagttcaaaaggatttaattggagatttaaatactttgtacaagcagtatcattcagttgaaccttggttaaaaaattctaaaaagaatgataataaagaaaatttacaatctatagaagatagatcaaaactagatggactttatgagtgcataatgtgtgcttgttgttcaaccgcatgcccaagctattggtggaatggagataaatatcttggtccagctgttttgcttcaagcatatagatggataattgatagtagagatgaagaaagaaaacaaagactagaaaaagttgcagatgaattaaaactttatagatgtcatactattttgaattgtacaaatgcatgtccaaaaggtttaaatccagcaaaagctattgctgaaataaaaaaaatgcttgcaacgagttaat

SEQ ID NO: 218848 - DNA, 775 bp, Unknown
  Bacterial polypeptide expressing nucleotide sequence isolated from the Sargasso Sea
aatggtccaaataagattacctgaaaaatcaaaagttaaaaaaggtaattattataaggataaaactggttcaaaaaatttaagaaaagttaatgtttatagatgggatccctctacagaagagaatccgagaatagatacatatgaagtagatatggacaactgtccatctaaagttttggatattttaaacaaaattaaaaacgaaattgatccctcaattgcttatagaagatcttgtgctcatggagtttgtggatcttgtgctatgaatatggatggaaaaaatggacttgcatgtaccaaatcgcattcagaaattaaaggcgatataaatatctatccactaccacatctaaaagttttaaaagatcttataggggatttaagtactttatataaacagtatgagtcagttgaaccttggcttaaaaattcaaaaaatatttctgaaaaagaaaacctgcagtctaaggaagacagagctaaattagatggtttatacgaatgtataatgtgcgcctgttgttcaacttcatgtcctagttattggtggaatggggaaaaatatttaggaccagcagtcttgctgcaggcttacagatggataattgatagcagggatgaggatagaaaagcgagattaaaaaaagttgctgatgagcttaaattgtatagatgtcataccatcatgaattgtacaaatgcatgtcctaaaggattaaatccagcaaaagccattgcatcgattaagaaaatgcttgcaacaagttaa

SEQ ID NO: 218849 - DNA, 790 bp, Unknown
  Bacterial polypeptide expressing nucleotide sequence isolated from the Sargasso Sea
atggctcagtttacacttcctgcaaattcaaaaataactaaagggaaaacccaccaactaaaagaacctgcaaacgatccaaagaaacttgcaatctatagatgggatcccgaagatgataaaaatcctaggatagataattatgagatagatcaagaaaagtgtggcccaatggtattagacgcacttatgaaaataaaaaacgaaattgatccaactttaacatttagaagatcttgcagagaaggagtttgtggttcctgtgctatgaatattgatggtgttaacacattagcatgtttgaaaagtatgtctgatgttaagaatgaaataaaaatttaccctcttccacatatgcgtgtagtaaaagatttagttccagatcttagtaaggcttatgagcaactggcttccattaaaccttggttgcagcgtgaaaaaacaaatgaagaaaaaaactcaggagacgaaaaaaaacaatcaccaaaagatagagaaaaactagatggtaaatgggagtgtgtattatgtttttgctgcactacttcttgtccaagttattggtggaatggagatgaatatctaggacctgcagtccttttacaagcagcaagatgggtaagtgactctagagactcagaaagaaaagagagattaaaagcaataaatgattcattaaaactttatagatgtcattcaataatgaattgtactaggtcttgtcctaaaggtctaaatccagccaaagaaattgctggacttaaaaaggctattgttacagaattataat

SEQ ID NO: 218850 - DNA, 772 bp, Unknown
  Bacterial polypeptide expressing nucleotide sequence isolated from the Sargasso Sea
aatggttcaattaaatttacctgcaaactcaaaggtagaaaaaggtcaatactacaaagataaaacaggttcaaaaaatattagaaaagtaaatgtttatagatgggatccatctacaaatgaaaatccaagacttgatacctatgaagttgatatggataattgttcatctaaagtgcttgatgttttaaacaaaattaaaaatgaaatagacccgtctattgcttatagaagatcttgcgctcatggagtatgtgggtcatgtgcaatgaatatgaatggaaagaatggtctagcgtgtaccaaatctcattctgaattaaatggagatatcgatatttatccattaccacatttaaaagttttgaaagatttaattggagacttaagcactctttataaacaatacgagtccgttgaaccttggttaaaaacctcaaaagtaaatgataaagaaaatattcaatctaaagatgacagagcaaaattagatggattgtatgaatgtataatgtgtgcatgttgttcaacgtcttgcccgagttattggtggaacggtgaaaagtatttaggtccagctgttttacttcaggcttatagatggataattgatagtagagatgaagatagaaaagaaagacttaaaaaagttgctgatgaacttaaactttatagatgtcatactatcttgaattgtacaaatgcttgtcccaaaggcttaaatcctgcaaaagctattgcagagataaagaaaatgcttgcaacagcttga

SEQ ID NO: 218851 - DNA, 781 bp, Unknown
  Bacterial polypeptide expressing nucleotide sequence isolated from the Sargasso Sea
atggctcaaataggtttacctgacaactccaaagtaaaaaaaggtaaatattttaaggataaaactggttcaaaaaatcttagaaaagtaaatgtttatagatgggacccgtctacagaggaaaatcctagaattgatacctatgaagttgatatggataattgtccctcaaaagttttagatattttaaataaaattaaaaatgaaatagatccgactttggcttatagaagatcttgtgctcatggagtttgtggttcgtgtgcaatgaatatggatggaaaaaatggccttgcctgtacaactccccacaaagaaatagatggtgatatcaatatttatccattaccacaccttaaggtcaaaaaagatctaataggcgacttggatggtttatataaacagtatcaatcaattgagccatggttaaaatcaaattcaaagtcagaaactaaagaaatttttcaatctaaagaagatagagctaaactagatggcgcatatgaatgtataatgtgtgcgtgttgttcaacttcttgcccaagttattggtggaatggtgataaatatctaggaccagcagtacttttacaagcatatcgatggatcatagatagtagagatgaagagagaaattcaagattaaaaaaggtggcagatgaacttaaactttataggtgtcacacaattttaaactgtactagcgcttgtccaaaaggtttaaatcctgcaaaagcaattgctgaaataaaaaaaatgttagcaacagctaatatttaaa

SEQ ID NO: 218852 - DNA, 778 bp, Unknown
  Bacterial polypeptide expressing nucleotide sequence isolated from the Sargasso Sea
aatggttcagtttaatcttcccgacaattctaaattaacagacggtgattattacaagtctgaaaaaagcaatgggaatactaaaaaattcaaaatctaccgttggtctcccgacgatgaaaaaaacccaaggatggacacttatgaagttgatctagacgattgtggtccgatggtattggacgcagttatgaaaatcaaaagtgaaattgatacttcattaacctttagacgatcatgtcgcgagggtatatgtggttcttgtgcaatgaatattgatgggacaaatacactcgcttgtaccaaagcaattagtgatgtgaaaggtgacataaaaatttatcctctgcctcacatgccagttataaaagacttggttacaaatttaaaaacactctataagcaattaaagtccatcaagccatggcttatgaataagaaacaaaacgcaaacgatactgaaaatattcaatcaagaaatgaccgtgaaaaattagatggcttgtatgaatgcatcttgtgtgcatgttgttcaacttcatgcccaagttattggtggaacagtgacaaatatttgggccctgcagtcctgcttcagtcatatcgctggttacaagatagccgtgatgaggaaagaaaagagagattaaaagaattagatgatacgtttaaagtttatagatgccatacaataatgaactgcactcaagcttgtccaaaaggtctcaaccccgcaaaggctattgctggtatcaaacaaatgatagcacagcagtaa

SEQ ID NO: 218853 - DNA, 775 bp, Unknown
  Bacterial polypeptide expressing nucleotide sequence isolated from the Sargasso Sea
atggttcaattaaatttaccacaaaactcaaaagttaataaaggtaaatattttaaagacaaaaccggttcaaagaatatcagaaaagtaaatgtttatagatgggatccatccactggagagaacccaagaatagacacatatgaagtagatatggataattgtccatctaaagttttagacatactaaataaaattaaaaacgaaattgatccaacacttgcatatagaagatcttgtgcgcatggagtttgtggttcttgtgcaatgaatatgggtggaaaaaatggtcttgcatgtactaagccacatgcagaaattaagggagatatagatatataccctttgcctcacttaaaagtaaaaaaagatttaataggagacttaagtggattatataaacaataccaatccattgaaccttggttaaaaaataattcaaaaagtgaaacaacagaaattcatcaatctccagaagatagagctaaacttgatggagcttatgaatgtataatgtgtgcttgttgttctacttcatgtcctagttattggtggaatggtgataagtatttaggtcctgcagttttattacaagcttatagatggataatggatagcagagacgaagatagaaaggaaagacttcaaaaggttgcagatgaacttaagctttatagatgccatacgattttgaactgcactaacgcatgtccaaaaggattaaatccagcaaaagctattgctgagataaagaaaatgcttgcaaccacataat

SEQ ID NO: 218854 - DNA, 790 bp, Unknown
  Bacterial polypeptide expressing nucleotide sequence isolated from the Sargasso Sea
catggcagaatttacactacccaagaactcaaaaatcgaaaaaggcgaacattttagtgcagatgaatcggctgaaaatatcaggacatttcatgtatatcgttatgatccttctgatgattcaaatcctcgtgtggatacttatgagatagatatggataaatgtggcccgatggttttggatgggctcattaaaattaaaagcgattttgatccctcgttaacctttaggagatcatgcagagaaggcatttgcggctcatgttctcacaatatcaatggcgtcaatacactggcatgcataaagccgatcaaagatctaaaaggagatattcgcatttatcctctccctcacatggatgttgtaaaagatttagtggtcgacttaactgatttttatgagggttattcctcagtcgagccttggctcaagtcagatactcctgctcctgaaggatcagagaggcttcaaagcaaggaggatcagaagaaaattgaccaaccctctgcttgcatcctttgtgcatgctgttcaaccagttgccccagctattggtggaatggagataagtatcttggacctgcagcattgttggcttcatatcgttggcttcaggatagccgcgatgatgcgaaaaaagatcgtttaaaagatctgaatgattcgtcaaagctttatcgttgtcatacgatcatgaattgttctttggcatgtccgaaagatttgaatcctggtcaggcaattgcagagatcaaaaagatgattgccaccgaagatttgaatgagtga

SEQ ID NO: 218855 - DNA, 780 bp, Unknown
  Bacterial polypeptide expressing nucleotide sequence isolated from the Sargasso Sea
aatggtacaaataaatttacctcaaaattctaaagttcaaaaaggtaagtattataaagatcaaacaggttcaaaaaatatcagaaaagttaatatttatagatgggacccttctacaggggagaatcctcgaatcgacacttacgaagtagatatggataattgcccttcgaaagtattagatttattaaataaaattaaaaatgaaattgacccttcaattgcttatagaagatcatgtgctcatggagtctgcggctcttgtgctatgaatatggatggaaaaaatggacttgcatgtacaaaaccacataaagaaattaaaggggatataaatatatatccattaccacatttaaaagttcaaaaggatttgatcggtgacttaagcacattatataaacaatacgcatccgtagaaccttggttaaaaaattcaaaaaaagatgaagataaagagaatatacaatcaatagaagatagatcaaaattagacggtctttacgagtgtataatgtgtgcctgttgttcgacttcttgtccaagttattggtggaatggagataaatatctaggtccagctgttttacttcaagcctatagatggataattgatagtagggatgaggaaagaaaagagaggctcaaaaaagttgcagatgaactaaagctctatagatgtcatactattatgaattgtactaatgcttgtccaaaaggattaaatccagcaaaagcaattgcctctataaagaaatgcttgccacaagttaattactt

SEQ ID NO: 218856 - DNA, 778 bp, Unknown
  Bacterial polypeptide expressing nucleotide sequence isolated from the Sargasso Sea
aatggttcaattcaaccttccagacaactcaaaactcactgacggtgattattataaattagaagctgaaaataaaagtattaaaaaatttaaaatctacagatggtctcctgaggatgataaaaatccaagaatggacacttatgaagttgacatagatgattgtggcccaatggtactagatgccgttatgaagattaaaaatgaagttgatacttctttaacctttagaaggtcttgtagagaaggaatttgtggttcatgtgctatgaatattgatggcacgaatacgcttgcatgtaccaaagcgatatctgatgtaaaaggtgatgttagaatttatcctttaccacacatgcctgtcattaaagatttggtaacaaatcttaaaaatctatataagcaactaaaatctataaaaccatggttaataaaacaaaaacaagaagcaactgatactgaaaatattcaatcaagaaatgatcgtgaaaagcttgatggattgtatgaatgtattttgtgtgcttgttgttctacatcatgccctagttattggtggaacagtgataagtatttaggaccggctgttttattgcaatcatatagatggttgcaagatagtcgtgatgaagaaagaaaagaaagacttaaagagcttgatgatacttttaaggtatatagatgccatacaattatgaattgtactcaagcatgtccaaaaggcttaaatcctgcaaaagcaattgcgggtatcaagcaaatgattgcacaacagtaa

SEQ ID NO: 218857 - DNA, 697 bp, Unknown
  Bacterial polypeptide expressing nucleotide sequence isolated from the Sargasso Sea
tttcatatataccgatgggagccagattccggtaagaatcctagattagacgtctatgaacttaatcttgataattttgggcctatgattctcgatgcaattatttatatcaaaaatgaaattgattctaccttaacatttagacgatcttgtcgcgaaggcatatgtggttcctgttcaatgaatatcggcggtacaaacacattagcttgcacaaaatcaattgcaagttttgatggtgacatatcaatttatcctttaccacacatgccagtggttaaagatttagtcccagatttgagtaatttttataagcaatatgcttcaatcaaaccttggatgcaaaccgaaacagcagctccagagaattcagaaagaatacaatcaaagaatgatagggagaaactagacggcctttatgaatgcatattatgtgcttgctgttctactagctgcccaagctactggtggaatagtaaacgttaccttggtcccgctatcttattgcaagcgtatcgctggatagttgatagtcgtgataaatctactaataagcgcttagataaattggaggattcttttagtttatatcgttgtcatacaattatgaactgtacaaatgcctgccctaaaggtttaaatccagcaaaagcaattgctgaaattaaaaaacttttgttatctcgtataagctaaa

SEQ ID NO: 218858 - DNA, 661 bp, Unknown
  Bacterial polypeptide expressing nucleotide sequence isolated from the Sargasso Sea
atggttcaatttaacttacctcaaagttccaaaatagaagttggtaagtattataaagatgagacaaattcaaaaaatttaaaaaaaataaacgtttatagatgggacccatccacaaaacaaaatcctagagtcgatacttttgaagttgatatggataattgtggtccaaaagttttagatattctatttaaaattaagaacgaaatagatccttcacttacatttagaagatcatgtgcccacggcgtttgcggttcatgtgcgatgaatatagacggagtaaatactttagcttgcattaaatcgcatactgatatcaatggagatttaaatgtttatcctttacctcatttaaaagtagtaaaagatttaattggagatttaaccactctatataaacagtacgagtcgattaaaccctggctgcaaacagaacaaacaggaaaagaaaaagaggaaatcaagcagtctcaaaaagacagagaaaaattagatggttattatgaatgtatattatgcgcttgctgctcaacttcttgcccgagttattggtggaatggtgataaatacttaggtcccgctgttttattacaagcttaccgttggattaatgatagtagagatggagacaaaaaagagagacttaaaaaagtagcag

SEQ ID NO: 218859 - DNA, 772 bp, Unknown
  Bacterial polypeptide expressing nucleotide sequence isolated from the Sargasso Sea
aatggttcaattaaatttacctgcaaactcaaaggtagaaaaaggtcaatactataaagataaaacaggttcaaaaaatattagaaaagtaaatgtttatagatgggatccatctacaaatgaaaatccaagacttgatacctatgaagttgatatggataattgttcatctaaagtgcttgatgttttaaacaaaattaaaaatgaaatagatccttctattgcttatagaagatcttgcgctcatggagtatgtgggtcatgtgcaatgaatatgaatggaaaaaatggtctagcgtgtacgaaatctcattctgaattaaatggagacatcgatatttatccattaccacatttaaaagttttaaaagatttaatcggtgacttaagcacattatataaacaatatgagtctgttgaaccttggttaaaaacctcaaaagtaaatgataaagagaatatccaatctaaagacgacagagcaaaattagatggattatatgaatgtattatgtgtgcatgttgttcaacgtcttgcccgagttattggtggaacggtgaaaaatatttaggtcccgctgttttacttcaagcttacagatggataattgatagtagagacgaggacagaaaagaaagactgaaaaaggttgctgacgaacttaagctttatagatgtcatactatcttgaattgcacaaatgcttgtcccaagggcttaaatcctgcaaaagctattgcagagataaagaaaatgcttgcaacagcttaa

SEQ ID NO: 218860 - DNA, 763 bp, Unknown
  Bacterial polypeptide expressing nucleotide sequence isolated from the Sargasso Sea
cctgcctaacaactcaaaaatagttaagggggaatattataaagataaaactggctccaacaatatcaagaaagtaaacgtttatagatggaatcctgatgatggaaaaaatccaagaattgatacttttgaagttgatatggataactgtgggccaaaagttttagatattctttttaagattaaaaatgaaattgactcatcattaacttttagaagatcgtgtgcacacggtgtttgtgggtcatgtgctatgaatgttgatggagtaaacacactatcttgtataaaatctcatagtgatattaaaggtgaattaaatatttatccattacctcatttgaaagttgtaaaagatctaattggggatttaagcaatttatataagcagtatgagtcaattcaaccatggttaaagacttcaaaaactgacacagaaaaacaagaaattctgcaatcacaaaaagaaagatccaagcttgacggatattacgaatgcatactatgtgcttgctgctctacatcatgtccaagttattggtggaatggggataaatacttaggtccagcagtattacttcaggcttatagatggataagtgatagtcgagatgaagaaaaaaaagagagattaaaaaaagttgctgacgaattaaagctttatagatgccatacaataatgaattgtactaattcttgtcctaaaggtcttaatcctgcaaaagctattggctctataaaaaaaatgcttgcaacaagctaa

SEQ ID NO: 218861 - DNA, 781 bp, Unknown
  Bacterial polypeptide expressing nucleotide sequence isolated from the Sargasso Sea
aatggttcagataaatttaccaaaaaattctcaaattacaaaaggtagatattttaaagataaaactggttctaagaatttaagaaaggtaaatatttatagatgggatccttctgcaggagaaaatccaagaattgatacatatgaagtagatatggaaaattgtccttctaaagtattagatattttaaataaaataaaaaatgagatagattctacaatagcttatagaagatcttgtgcacatggagtttgtggttcttgtgcaatgaatatggatggaaaaaatggtttggcttgtactactcctcatgatgaaattaaaggtgatattaatatttatccactacctcatttaaaagttaaaaaagatttaataggtgatttagatggtttatataaacaatatcaatcaattgaaccttggttaaaaacaaattcaaaatctgatacaaaagaaataattcaatcaaaaaaagatagagaaaaattagatggcgcatatgaatgtattatgtgcgcatgttgttcaacttcatgcccaagttattggtggaatggtgataaatatttgggacctgctgttttacttcaagcttatagatggattatagatagtagagatgaagaaagacaagcaagattaaaaaaagttgccgatgagttaaagctttatcgatgtcatacgattttaaattgtacaagtgcatgcccaaaaggtttaaacccagcaaaagctattgccgaaataaaaaaaatgttagcaaccgctaacatttaa

SEQ ID NO: 218862 - DNA, 344 bp, Unknown
  Bacterial polypeptide expressing nucleotide sequence isolated from the Sargasso Sea
ttttacagatgagccaaatgaggaatggctgcagtctgaggcagacagaaaagagctcgacggactatatgaatgtgtaatgtgcgcttgctgttcgacttcttgcccaagctactggtggaacggtgataaatatttagggccagctgcgttgttacatgcatatcgatggattatcgacagcagagatcaggatagaaaagctaggctagatgaactaaatgactcttttaaactgtataggtgccatacaataatgaattgtgcaaaggcatgtccaaagggcttaaatcctgcaaaagctatagcagagataaaaaagttacagctgcagaacagttgag

SEQ ID NO: 218863 - DNA, 361 bp, Unknown
  Bacterial polypeptide expressing nucleotide sequence isolated from the Sargasso Sea
gtctgtcgaaccatggttaaaaacatcaaaaattactgaaaaagaaaatcttcaatctaaggaggatagggcaaaattagatggtttatatgaatgtattatgtgtgcttgctgctcaacatcatgcccaagttattggtggaatggagaaaaatatttaggacctgcagttttattgcaggcttacaggtggattatagatagtagagatgaagaaaggaagcaaagacttcaaaaagtagctgatgaactaaagttgtatagatgtcatactatccttaattgcactaatgcttgtccaaaaggcttaaatcctgcaaaagctattgcagagataaagaaaatgcttgcaacgacttaa

SEQ ID NO: 218864 - DNA, 775 bp, Unknown
  Bacterial polypeptide expressing nucleotide sequence isolated from the Sargasso Sea
atggtacaaataaatttacctcagaattctaaagttcaaaaaggtaaatattataaagataaaactggttcaaaaaatattagaaaagttaatatttatagatgggatccctcgagtggcgaaaatcctcgtatagacacatatgaagttgatatggataattgtccatcgaaagtattagatcttttaaataaaataaaaaatgaaatagatccatcaatttcatacagaagatcttgtgcacatggtgtctgtggttcatgtgcaatgaatatggatgggaaaaatgggttagcttgcacaaagcctcataaagaaattaaaggtgatattaatatttatcctttacctcatttaaaagttcaaaaagatttaattggagatttaagcatcttatacaagcagtatgaatccgttgagccttggttaaaaatttcaaaaaaagatgaagataaagaaaacttacaatcaattgaagatcgttctaaattagatggactatatgaatgtataatgtgtgcatgttgttcaacttcttgcccaagttattggtggaatggagacaaatatctaggtccagcagttttattgcaagcatacagatggataatagacagtagagatgaagatagaaaagagagattaaagaaagttgcagatgaacttaagctttatagatgtcatactattatgaattgtactaatgcatgtccaaaaggcttaaatcctgcaaaagcaattgcatctataaaaaaaatgcttgcaacaggttaat

SEQ ID NO: 218865 - DNA, 698 bp, Unknown
  Bacterial polypeptide expressing nucleotide sequence isolated from the Sargasso Sea
caaaaattttaaggtttacagatggaacccagatgataaaaaaaatccacagttagatatttttgaaattaatatggatgactgtggtccaatggttttggatgcattaataaaaataaaaaatgaaattgatcccacgttaacctttagaagatcatgcagagaaggcgtttgtggttcatgtgctatgaatatcgatggaacaaacacacttgcatgtactaaatccatagaagatgttaaaggtgaagtaagtatatttccattacctcatatgcacgtagttaaagacttagttacagatatgaaaaaactttatgaacagtatgcatctatcaaaccttggcttcaatcaaactcgactgatccttcaagagaaagaacacaaactaaagaggaaagagctaaacttgatggtttatgggaatgcatattatgtgcatgttgctctacaagctgtccaagttattggtggaatcctgacaggtatcttgggccagctgtacttctgcaggcttacagatggatcgctgactctagagacgaaaaaactggcgaaagactagataaccttgaagatccatttagattatatagatgtcatactataatgaattgcacttctgcttgtccaaagggattgaatcctgcaaaagctatagcacaaacaaaaaaactcatgcatgagagaagataaa

SEQ ID NO: 218866 - DNA, 709 bp, Unknown
  Bacterial polypeptide expressing nucleotide sequence isolated from the Sargasso Sea
ggttcaaaaaatattagaaaagttaatatttatagatgggatccctcaagtgggtgaaaatccacgtatagatagttacgaagttgatatggataattgtcctcaaaaagttctagatgtacttaataaaattaaaaatgaaatagatccatcaattgcatatagaagatcatgtgctcatggtgtttgcggatcatgtgctatgaatatggatggaaaaaatggattagcttgtacaaagcctcataaagaaataaagggagaaataaatatttaccctctaccacacttaaaagttcaaaaagatctaattggagatctaagcacattatacaagcaatatgaatctatagaaccttggttaaaaaattctaaaaaagatgatggcaaagaaaatttacaaactataaaagatagatcaaaattggatggtctttatgaatgtataatgtgtgcatgttgctcaacttcatgtccaagctattggtggaatggagataaatatcttgggcctgcagttttgcttcaagcctacagatggataattgatagcagagatgaagaaagaaaagagaggttaaaaaaagttgcagatgagttaaaactttatagatgccatactattatgaattgtactaatgcatgcccaaaaggcttaaatcctgcaaaagcaatagcctctataaagaaaatgcttgcaacaggctaa

SEQ ID NO: 218867 - DNA, 772 bp, Unknown
  Bacterial polypeptide expressing nucleotide sequence isolated from the Sargasso Sea
aatggttcaattaaatttacctgcgaactcaaaggtagaaaaaggtcagtattataaagataagacaggttcaaaaaatattagaaaaataaatatttatagatgggatccatctaaaaatgaaaatccaagacttgatacctatgaagttgatatggataattgttcatctaaagtccttgatgttttaaacaaaataaaaaatgaaatagatccttctatagcttacagaagatcttgtgcccatggagtttgtggatcttgtgcgatgaatatgaatggaaaaaatggtttagcatgcacgaagtcccattctgaactggatggagatattgatatttatcctttaccacatctaaaagtcttaaaagatttaatcggtgatttaagcacattatataaacaatatgagtctgttgaaccttggttaaaaacctcaaaagtaaatgataaagagaatatccaatctaaaaatgacagagcaaaattagatggattatatgaatgtattatgtgtgcatgttgttcaacgtcttgcccaagttattggtggaacggtgaaaaatatttaggtccagctgtattacttcaggcttataggtggataattgatagtagagatgaagatagaaaagaaagacttaaaaaagtagctgatgaacttaagctttatagatgccatactatcttgaattgtacaaatgcttgcccaaagggcttgaatcctgcaaaagctattgcagagataaagaaaatgcttgcaacggcctaa

SEQ ID NO: 218868 - DNA, 371 bp, Unknown
  Bacterial polypeptide expressing nucleotide sequence isolated from the Sargasso Sea
gtacgagtcagttgaaccgtggctaaaaaataaaagtcactcttctcaaaaagaaaatttacagtcaaaggaggacagagcaaaattagatggactatacgaatgtattatgtgtgcgtgttgctcaacttcttgcccaagttattggtggaatggagaaaagtatctcggaccagcagtattacttcaagcttacaggtggataattgatagcagagatgaagacagaaaagagaggttaaaaaaggttgctgatgaactcaaactttatagatgtcatacaattatgaactgtactaacgcatgtccaaaaggattaaatccagcaaaagcaattgcttcaattaaaaaaatgcttgcaactagctgat

SEQ ID NO: 218869 - DNA, 781 bp, Unknown
  Bacterial polypeptide expressing nucleotide sequence isolated from the Sargasso Sea
aatggttcagataaatttacctaaaaattctgaaattaaaaaaggtaattattataaagacaagactggttcaaataatattagaaaaataaatgtttacagatgggacccttcaacagaagaaaatcctagaatagatacttatgaagtagatatggataattgtccttcaaaagttcttgatattttaaataaaattaaaaatgaaattgatcctacattggcttacagaagatcatgtgcacatggggtttgtggatcttgtgcaatgaatatgggaggaaaaaatggtcttgcatgtacaaaatctcataaagaaattgatggtgatattgatatatatccattaccgcatttaaaagttaaaaaagatttgattggagatttagatggtctttataaacaatatcaatcaattgaaccttggttaaaaaataattcaaaaaaagaaagaactgaaattactcagtcaaaagaagatagagcaaaacttgatggcgcatatgaatgcataatgtgtgcatgctgctcaacttcatgcccaagttattggtggaatggagacaaatatttaggacctgcagttttgttacaggcatatagatggatcattgatagtagggacgaagaaagaaaagaaaggttaaaaaaagttgcagatgaattaaagctttatagatgtcacactattcttaactgtacttccgcatgtccaaaaggcttaaatcctgcaaaagcaatcgcagaaataaaaaaaatgttagctacaacaaatgtttaa

SEQ ID NO: 218870 - DNA, 1756 bp, Unknown
  Bacterial polypeptide expressing nucleotide sequence isolated from the Sargasso Sea
gatgcgtcgagcggtgggacgatcgacgtgtgcgcgcgccgcgcgggcggtgtgggacgcgagcgagggtcgaggggtggcgtcggcgtcggcgtcggcgtcgggaacgggaacgggaacggacgagtccgcgcatcgtcatcaacgacatcatcatcatcggcgtcacgatcgatcggtcgcgacgtcttcgtcttcgtcgacggcgagcgcgtggggacgcgcgaatcgagggtacgcgtcggcgacgccgtcgtgcgagatcatcgatcacgagtacgacgccctggtggtcggggcgggaggcgcgggtctgcgcgcggcgatcggtttgggcgaacacggatttaagacggcgtgcgtgacgaagcttttcccgacgcggtcgcacacggtggcggcgcagggaggtataaacgcggcgttagggaacatgacggaggatgattggcggtggcacgcgtacgacaccgtcaagggggcggattggctcggagaccaagacgcgattcagtacatgtgtcgagaggcgcccaaggcggtgatcgaattggaaaagtacggcatgccgttctcgagaacggacgaggggaagatttaccagcgcgcgttcggaggtcagtcgttggattacggtaagggtggacaggcgtatcgatgcgcggcggcggcggatcgaacgggacacgccatgttgcacacgctctacggcgccgcgttgaagcacgacgtgcaattcttcgtggagtactttgcgttggatttgatcatggacaagggtgagtgcgtgggcgtcatggcgctgtgcctcgaggacggcaccattcacaggttcagatcccaccagaccattttagccaccggtggatacggccgggcgtactttagcgcgacttccgcgcacacgtgcacgggcgacggcaacgccatggtcgctcgggcgggcttgcctctgcaggatcaagagtttgtgcaattccaccccaccggtatttacggcgccggttgcttgatcacggagggttctcgcggggagggtggcattttgcgcaactctgagggcgagcgtttcatggagcgatacgcgccgagcgccaaggatctcgccagtcgagacgtcgtctctcgatcgatgacgctcgagattcgcgagggaagaggcgtgggtaaggataaggatcacatctatttgcacctgaaccacttgccgccggagctcttggcggagcgtcttccagggatttccgaaaccgccgccattttcgccggcgtggacgtcaccaaggagcccattcccgtcattcccacggttcactacaacatgggcggtattcccaccaactacaagggcgaagtcgtcgcgccgaagaacggtgaccccgacgccatcgtcccgggtttgctcgccgccggcgaggcggcgtgcgccagcgtgcacggcgccaacagactaggggccaattcgttgttggacatcgtcgtcttcggtcgagcgtgcgccaacacagtcgcgggcaagctcaaacaaggcgcaccgcaccgtaagatcgccgacgacgccggatcgaacgccatcgaacgtctcgaaaagattcgcaactccaagggcacggcgccgacggcgatgcttcgcaagacgatgcaaaaggtgatgcaagaggacgccgccgtcttccgaacgcaagagacgctcgccaacggatgcacgcgcatcgacgacgtcgccgcgcagttggacaacctcaagctcaccgac

SEQ ID NO: 218871 - DNA, 720 bp, Unknown
  Bacterial polypeptide expressing nucleotide sequence isolated from the Sargasso Sea
aacagggttctaagaatttaaaaaaagtaaatatttatagatgggatccttcttctggagagaatccaagaattgatacatatgaagtagatatggacaattgtccctctaaagtattagatattttaaataaaataaaaaatgagatagattccacaatagcttatagaagatcttgtgcacatggagtatgtggttcttgtgcgatgaatatgggtggaaaaaatggtttagcttgcacaaaaccacattcagaaattgatggtgatattgatatttatccattacctcatttaaaagttaagaaagatttaataggtgatttagatggcttatatagacagtatcaatctatcgaaccttggttgaaaacaaattcaaaatctgaaaaaactgaaattactcaatctaaagaagatagagctaaattggatggtgcttacgaatgtattatgtgtgcgtgctgttcaacatcttgcccaagttattggtggaatggagataaatatttaggaccagcagttttactacaagcttatagatggattgtagatagtagagatgaagaaagagaagctaggttaaaaaaagttgctgatgaattgaaactttatagatgtcatactattttaaattgtacaaatgcatgccctaaaggcttgaacccagcgaaagcaattgcagaaattaaaaaaatgctggcaacagctagtctttaaa

SEQ ID NO: 218872 - DNA, 659 bp, Unknown
  Bacterial polypeptide expressing nucleotide sequence isolated from the Sargasso Sea
taaaatgaaaaatccagaaattgatactatgaaagttgatatggataattgctcttctaaagttttagatattttaaataaaatcaaaaatgaaattgatccgtctattgcatatagaagatcatgtgctcatggagtatgtgggtcatgtgcaatgaatatgaatggaaagaatggtctagcgtgtaccaaatctcattctgaattagatggagatatcgatatttatccattaccacatttaaaagtcttaaaagatttaattggagacttaagcactctttacaaacaatacgagtcagttgaaccttggctaaaaacaacaaaaataaatgacaaagaaaacattcagacaaaagaggatagagcaaaattagatggtttatatgagtgtataatgtgtgcatgctgttcaacatcctgcccaagctattggtggaatggtgaaaaatatttaggtcctgcagttttacttcaagcttacaggtggataattgatagtagagacgaggacagaaaagaaagacttaaaaaagttgctgacgagcttaaactttatagatgtcatactatcttgaattgtacaaatgcttgccctaagggcctaaatcctgcaaaagctattgcagagataaagaaaatgcttgcaacagcttgat

SEQ ID NO: 218873 - DNA, 351 bp, Unknown
  Bacterial polypeptide expressing nucleotide sequence isolated from the Sargasso Sea
taataaaacaaaaacaagaagcaactgatacagaaaatattcaatcaagaaatgatcgagaaaaacttgacggtttgtatgaatgtatattatgcgcttgttgttctacatcttgtcctagttattggtggaacagtgataagtatttagggccagccgtcttactgcaatcttataggtggctgcaagatagtcgtgatgaagaaagaaaagagagacttaaagagctggatgacacatttaaagtttacagatgccacaccataatgaactgcactcaagcctgtccaaaaggccttaatccagctaaagcaatcgctggaattaagcaaatgatcgcgcaacaataac

SEQ ID NO: 218874 - DNA, 772 bp, Unknown
  Bacterial polypeptide expressing nucleotide sequence isolated from the Sargasso Sea
atggtacaaataaatttacccaaaaattctaaaattcaaaaaggaaaatattataaagataatactggttcaaataatattagaaaagtaaacgtttatagatgggatccttcaactgaagaaaatcctagaatagatacttacgaagtagatatgaataattgtccatcaaaagttctagatatattaaataaaatcaaaaatgaaattgatccatctttagcttatagaagatcatgttcacatggtgtctgtggttcttgtgcaatgaatatggatggtaaaaatggtttggcttgtacaaaatcacattctgaaattaaaggagatattaatatctatccactaccacacttaaaagttttaaaagatttaattggagatttaagcattctttataaacaatatgaatcagttgaaccgtggcttaaaacttcaaaaaaaagtgaaaaagaaaatattcaatcaatggaagatagatcaaaattagatgggctttatgaatgtataatgtgtgcatgttgttcaactgcatgcccaagttattggtggaatggggagaaatacttaggacctgcagttttattacaagcctacagatggataatagacagtagagatgaagatagaaaagaaagattgaagaaagttgctgatgaattgaagctttatagatgccatacaattatgaactgtactaatgcatgtccaaaaggtttaaatcccgcaaaagctattgcatctattaaaaaaatgcttgcaactagctaat

SEQ ID NO: 218875 - DNA, 778 bp, Unknown
  Bacterial polypeptide expressing nucleotide sequence isolated from the Sargasso Sea
atggttcaattcagcttgcctcaaaactcaaaaatcctaaaaggcaaatattataaagataagtctggctcaaataatttaaaaaaagttaatgtgtacagatgggacccttcaactaaggaaaatcctagaattgatacatttgaagtcaatatgaatgaatgtggacctaaagtattagatatactctttaaaattaagaacgaaatagacccttcacttacttttagaagatcttgtgctcatggagtgtgcggttcttgcgcaatgaatgtagacggcgtaaatactttatcttgcaccaagtcccattcagatattagaggcgatctaaatatttatcctttgccacatctaaaagttgtcaaagatttagtcggagatttaactactctttataaacagtatgagacagttgaaccatggctaaagaccaaagttggacaaaaaacaaataaagaaataaaacaatcacaagaagatagagcaaaactagatggatattatgaatgtattttatgtgcttgttgctcaacagcatgccctagctattggtggaatggtgataaatatttaggacctgcggttttattgcaagcttatagatggataaatgatagtagagatgaagataaaaaagaaagattaaaaaaagttgcagatgaattaaagctctacaggtgtcatacgatcatgaattgcacaaattcttgtccaaagggtttgaatcctgccaaagctattggttcgattaaaaaaatgcttgcaacaggctaaa

SEQ ID NO: 218876 - DNA, 775 bp, Unknown
  Bacterial polypeptide expressing nucleotide sequence isolated from the Sargasso Sea
aatggtacaaataaatttaccacaaaactcaaaggttcaaaaaggtaaatattataaggataaaactggttcaaaaaatattagaaaagttaatatttataggtgggatccttcaacaggcgaaaatcctcgcatagatacttatgaggttgatatggaaaattgtccatcaaaagttttagatttattaaataaaataaaaaatgaaatagatccttcaattgcttatagaagatcttgtgcccacggagtttgtggttcttgtgcgatgaatatggatggaaaaaatgggctggcttgtacaaaacctcataaagatattaaaggtgatattaatatttaccctttacctcatttaaaagttcaaaaagatttaatcggggatttgagcactttatataaacagtaccaatccgttgaaccttggttaaaaaattcaaaaaaagatgagggtaaagaaaatttacaatcagtggaagacagatctaaattggatggtttatatgaatgtattatgtgtgcttgttgctctactgcttgcccaagctattggtggaatggtgataaatatttgggaccagcagttttgttacaagcttatagatggattattgatagtagagatgaagataggaaagaaaggttaaaaaaggttgcagatgaacttaaactttaccgatgtcatactattatgaattgtacaaatgcttgtccaaaaggcttaaatcctgcaaaagcgattgcttctataaagaaaatgcttgcaacaagctga

SEQ ID NO: 218877 - DNA, 778 bp, Unknown
  Bacterial polypeptide expressing nucleotide sequence isolated from the Sargasso Sea
aatggttcaatttagccttccgcaaaactctaaaattttgaaaggcaaataccacaaagataaaactggatcaaacaatttaaaaaaagttaatgtttatagatggagcccatctagcaacgacaatccaagaatcgatacttttgaagtagatcttaatgagtgtgggcccaaagtattagacgttctctttaaaattaaaaatgaaattgatcctactttaacttttagaagatcttgtgcacacggtgtatgtggttcatgtgcaatgaatgttgatggagtaaacactttgtcttgtattaagtctcactcagatattaagggtgaattaaacatttatccattacctcatttgaaagtaattaaggatttagttggtgatttaactacactatataaacaatatgagtctgtggaaccttggctcaagtctaaagtaggagaaaaaacatctacagaaattaaacagtcccaagaagatagagcaaaacttgatggatattatgagtgtatactttgtgcatgttgctcaacttcatgcccaagttattggtggaatggagataaatatttaggaccggcagtattattacaggcatatcgttggataacagatagtagagatgaggaaagaaaagaacgattaaaaaaagttgcagatgagctaaaactttatagatgtcatactattatgaattgcacaaattcttgtccaaaaggtttaaatcctgcaaaagcaattggatctattaaaaaaatgcttgcatcaagctga

SEQ ID NO: 218878 - DNA, 360 bp, Unknown
  Bacterial polypeptide expressing nucleotide sequence isolated from the Sargasso Sea
ccaccttggttgaagtagatcaaactgggcaagagaaaactgaacttaagcaatcacagaaagatagagaaaaattagatggatactatgaatgtattttatgtgcttgttgttccacttcttgtccaagctattggtggaatggtgataaatatttaggaccagctgttttattgcaagcatatcgatggataaacgatagtagagatggcgataaaaaagaaagattgaagaaagttgctgacgagttaaagttatatagatgtcatactataatgaattgtactaattcatgtcccaaagggctaaatcctgcaaaagcaataggctctataaaaaaaatgcttgcaacaagctaaa

SEQ ID NO: 218879 - DNA, 778 bp, Unknown
  Bacterial polypeptide expressing nucleotide sequence isolated from the Sargasso Sea
aatggttcaatttagccttccgcaaaactctaaaattttgaaaggcaaataccacaaagataaaactggatcgaataatttaaaaaaagttaatgtttatagatggagcccatctagtgacgaaaatccaagaattgatacatttgaaatagatcttaatgagtgtggacccaaagtattagatgttctttttaaaattaaaaatgaaatcgatccttctttaacttttagaagatcttgcgcacacggtgtgtgtggttcatgtgcaatgaatgtagatggagtaaacactttgtcttgtattaagtctcactcagatatcaaaggtgaattaaatatttatccattacctcatttgaaagttatcaaggatttagttggtgacttaacaacactatataaacaatacgagtctgttgaaccttggcttaaggctaaagtaggagaaaaaacacctacagaaattaaacagtcacaagaagatagagcaaaactagatgggtattatgagtgtatactttgtgcatgttgctcaacttcttgcccaagctattggtggaatggggataaatatcttggaccagcagttttattacaagcttatcgttggattacagatagcagagatgaagaaagaaaagagagattaaaaaaagttgcagatgagctcaagttatatagatgtcatacgattatgaattgcacaaattcttgcccaaaaggtttaaatcctgcaaaagcaattggttctattaaaaaaatgcttgcatcaagctaa

SEQ ID NO: 218880 - DNA, 916 bp, Unknown
  Bacterial polypeptide expressing nucleotide sequence isolated from the Sargasso Sea
atgaataatataaatactattgaattcgatgccttgataattggtgggggtggctcaggaatgcgcgcatctcttgaattagcaaaatcaggcctcaagactgctgttgtttcaaaagttttcccaacaaggtctcacactgtttctgctcaaggagggataacatgtgccattgcaagcgcagatccaaatgatgattggagatggcatatgtatgacactgtaaagggcgctgattttataggagaccaagatgctatagagtatctatgttcagaaggcccaaaggctgtttttgagcttgaacatatgggcttacctttctctagatttgaaaacggtagaatttatcaaaggccttttggaggccaatcaaaagattttggtaaaggaggccaagcctctagaacatgtgctgcagccgatagaacagggcatgctttgttgcatacactctatcaaaataatgtaaaagaaggagcaaattttctaaatgaatggtttgcagttgatttagttaaaaattcaaaagatgaagttactggagttatagccttctcaattgaaaatggagaagtggcatatttaaaagctcaagcaacagttcttgctacaggcggggctggacgtatttatgcctcaaccactaacgcattaataaatacaggagatggtttagcaatggctttaagggctggctatcctgcccaagatatggaaatgtggcaatttcatcctactggtatttatggggctggctcccttgtcactgaaggttgcagaggagaaggaggttatctaataaataaagatggtgaaaggtttatggaaagatatgcaccaaatgtaaaagatcttgctggaagagatgtagtggctagatctatggtgcttgagatacttgaaggaagaggtt

SEQ ID NO: 218881 - DNA, 605 bp, Unknown
  Bacterial polypeptide expressing nucleotide sequence isolated from the Sargasso Sea
aatggcacaattttctttaccagaaaattctaagattatcaaaggagactattataaagacaaaactggctcaaataatattaagaaagttaatgtttacaggtggaaccctgaggacggaaaaaacccaagaacagatacttttgaagtagatatgaataattgcggtccaaaggttttagatatcttatttaaaattaaaaatgaaatagatccatctttgacctttagaagatcttgtgcacatggagtttgtggatcatgtgcaatgaatgtcgatggagtaaatactttatcatgcataaaatcacatagtgatattaaaggagatcttaacatttatcctttaccacatttaaaagttatcaaagacttaattggagacctaagtaatctttacaagcaatatgagtcaattcaaccatggctcaaaacatcaaaaactgattcagaaaaaaaagaaattttgcagtcccaaaaagatagatctaaacttgatggatattatgagtgtattttatgcgcatgctgttcaacttcgtgtccaagctactggtggaatggtgacaaatatttgggtccagcagtactatacaagcttatag

SEQ ID NO: 218882 - DNA, 775 bp, Unknown
  Bacterial polypeptide expressing nucleotide sequence isolated from the Sargasso Sea
aatggtacaaataaatttacctaaaaattctaaagtacaaaaaggcaaattttataaagataaaacaggttcaaaaaatattagaaaggtaaatatttatagatgggatccatctagtggtgaaaatcctcgtatagatacatacgaagttgatatggataattgtccatcaaaagtattagatcttttaaataaaattaaaaatgaaatagatccatccattgcctatagaagatcttgtgcccatggtgtctgtggctcttgtgcaatgaatatggatggaaaaaatggcttagcatgcacaaaacctcataaagaaattaaaggtgatattaatatttatcctttgcctcatttaaaagttcaaaaagatttaattggagatttaagctctttatataaacaatatgagtcagttgaaccatggttaaagatttcaaaaaaagatgaaggtaaagaaaacttacaatctatagaagacagatcaaaattagatggtctttatgaatgtataatgtgcgcatgttgttcaacctcatgcccaagttattggtggaatggagataaatatttaggtccagcagttttgttacaagcgtatagatggattatagatagtagagacgaagatagaaaagagagattaaagaaagttgctgatgaactaaagctttatagatgtcatactattatgaattgtactaatgcatgcccaaaaggcttaaatcctgcaaaagcaatagcgtctataaagaaaatgcttgcaacaggttaa

SEQ ID NO: 218883 - DNA, 562 bp, Unknown
  Bacterial polypeptide expressing nucleotide sequence isolated from the Sargasso Sea
tctggcatatagaaggtcgtgcgctcatggtgtttgtggttcatgtgcaatgaatatgggtggtaaaaatggtcttgcttgtacaaaacctcatgctgaaatagatggcgatatagatatttatcctttgcctcatttaaaagtgaagagagatttaataggcgacttagatggtctttataaacagtaccagtctattgagccttggttaaaaaataattcgtctaaagatacaaatgagatttttcaatcaaaagaagatagagcaaaattagatggtgcatatgaatgtattatgtgtgcatgttgttctacgtcatgtcctagttattggtggaatggagataaatatttaggtccagctgtacttttgcaggcttatagatggattgttgatagtcgagatgacgaaagaaaagcaagattaaaaaaagttgctgatgaactaaaactttatagatgtcatactattctaaattgtaccagtgcttgccccaaagggctaaatccagcaaaagcaattgctgaaatcaagaaaatgttagctacagctaatgtttaa

SEQ ID NO: 218884 - DNA, 529 bp, Unknown
  Bacterial polypeptide expressing nucleotide sequence isolated from the Sargasso Sea
tatgaatatagatggcgtcaataccttagcatgtttaaaacctattgaagaggtaaacggtgagattagaatttatccacttcctcatatgcctgtagttaaggacttagtgcccgatcttagtaaggcttacgaacagttagcttctattaagccttggttgcaacgctccaatgacaattcaaataccgcggtaagtattagtgaggaaaaaaaacaaacacctgaagatagagaaaaattagatggtcaatgggaatgtgttttatgcttttgttgtacaactgcgtgcccaagttactggtggaacagtgatgaatatctagggcctgcagttttaatgcaagcagcaagatgggtgaacgattctagagactctgaaagaaagaatagattgaaagcagtaaacgacaaaatgaagctatatcgttgtcattcgattatgaactgtactcgctcttgtcctaaaggactcaatcctgcaaaagcaattgcagatttaaagaaggctattgttacagaattataa

SEQ ID NO: 218885 - DNA, 781 bp, Unknown
  Bacterial polypeptide expressing nucleotide sequence isolated from the Sargasso Sea
atggtgcaaatcagtttacctgagaattccaaaacgaaaaaaggtaaatattttaaagataaaaccggctcaaagaatttaagaaaagttaacatttatagatgggatccatcttcaggagaaagtccgagagtcgacacatatgaggttgatatgaataattgcccatcaaaagtattagatattttaaataaaattaaaaatgaaatagaccccactcttgcttacagacgatcatgtgctcacggtgtatgtggatcgtgtgcaatgaacatgggtggtaaaaatggtcttgcttgcacaactcctcatgaaaatattgatggagatattgatatttatccgttgccacacttaaaagttaaaaaagatttaattggagatttagatggattatacaagcaatataaatctattgagccatggttaaaatcgagttcaaaatctgagtcagctgagttaattcagtcaaaagaagatagagctaagcttgatggcgcttatgaatgtattatgtgtgcttgttgttctacttcttgtccaagttattggtggaatggagataagtatttaggacctgcagttttattacaagcttatagatggatcattgacagcagagatgaggaaagacaagccagattaaaaaaagtagctgatgaattaaaattatatcgttgtcatactattctaaactgtactagtgcatgccctaaaggtttaaaccctgcaaaggcgatcgctgaaataaaaaaaatgttagcaacagccaatatttaaa

SEQ ID NO: 218886 - DNA, 775 bp, Unknown
  Bacterial polypeptide expressing nucleotide sequence isolated from the Sargasso Sea
aatggtccaaataaatttacctcaaaattcaaaagtacaaaaaggtaaatattataaagataagactggatcaaaaagtctaagaaaagtaaatatttatagatgggatccatctacaggtgaaaacccaagaatagatacttatgaagtggatatggataattgtccatcaaaggtattagatttgttaaataaaattaaaaatgaaattgacccatcattagcatatagaagatcatgttcacatggagtttgtggatcatgtgcaatgaatatggatggaaaaaatggactggcatgcactaaaccacatgatgagataaaaggagatataaatatttatcctcttcctcatttaaaagtgcttaaagacttaattggcgatttgagtacactttacagacagtacgagtcaattgaaccatggttaaaaaatactagcaacaaaaatgaaaaagaaaacttacaaaccaaagaagatcgatctaaattagacggtttatatgagtgtataatgtgcgcatgttgttcgacttcatgcccaagttattggtggaatggagaaaagtatcttggtcctgcagttctcctgcaagcttacagatggataattgattctagagatgaggatagagaagaaagattaaaaaaagttgcagatgaattaaagttatacagatgccatacaataatgaactgtactaatgcttgtccaaaaggtttaaatccagcaaaagcaatagctgaaataaaaaaaatgttagtaactggttga

SEQ ID NO: 218887 - DNA, 781 bp, Unknown
  Bacterial polypeptide expressing nucleotide sequence isolated from the Sargasso Sea
atggttcaattgagtttacctaaaaattctgaaattaaaaaaggtaagtattttaaagataaaactggatcaaaaaatttaagaaaagtaaatatttatagatgggacccgtccacagatgaaggtcctagaatagatacttatgaagttgacatggataattgtccttcaaaggtcttagatattttaaataaaatcaaaaatgaaatcgattcaaccataacatacagaagatcttgtgctcatggggtatgtggttcatgtgctatgaatatggggggtaaaaatgggcttgcttgcactactccacatgctgaaattgagggagatattgatatttatccattacctcatttaaaagttaaaaaagatttaattggtgatttggatggattgtacaaacagtatcaatcaattgaaccatggttaaaaaacaattcaacaaaagaaactacagaaatttatcaatccaaagaggacagagcaaaattagatggtgcttatgaatgtattatgtgtgcttgttgctctacttcttgcccaagttattggtggaatggtgataaatatttaggtccagcagttttgttgcaggcttatagatggattatagatagcagagatgaagagagaaaagttagattaaaaaaagttgctgatgaattaaaattatacagatgtcataccattttaaattgtacaaatgcttgtccaaagggcttgaatccagcaaaagctatagctgaaataaaaaaaatgttagcaaccgctaatgtttaaa

SEQ ID NO: 218888 - DNA, 771 bp, Unknown
  Bacterial polypeptide expressing nucleotide sequence isolated from the Sargasso Sea
aatggtaaaatttaacttacctcaaagttcaaaaatagaagtgggtaagttttataaagataaaacaaattcaaaaaatttaaaaaaagtaaatgtttatagatgggatccatcaaatggacaaaaccccagaatagatacttttgaagttgatatgaataactgtggtccaaaagttttagatatattatttaaaataaaaaatgaaatcgatccatcacttacattcagaagatcatgtgctcatggagtttgcggttcatgtgcgatgaatattgatggagttaatactttagcatgtataaaatctcacacagacattaatggagatttaaatgtatatcctttaccacatttaaaagtagttaaagatctcattggagatttgactacactttacaaacagtatgagtcgattaaaccatggttacaaactgaacaaactggaaaagaaaaagaggaaattagacaatctcaaaaagatagagaaaaattagatggttattatgaatgtatattatgcgcctgctgctcaacttcttgtccaagctattggtggaatggtgataaatacttagggcctgcagttttattacaagcttaccgctggattaatgatagtagagatggagataaaaaagagagactcaaaaaagttgcggatgaactaaaattatatagatgccatacgattatgaattgtactaattattgcccaaaaggattaaatccagcaaaagctattgggtctattaagaaaatgctgcaaca

SEQ ID NO: 218889 - DNA, 568 bp, Unknown
  Bacterial polypeptide expressing nucleotide sequence isolated from the Sargasso Sea
aatcgacccatctatcgcttatagaagatcttgcgctcatggagtttgtggttcttgcgcaatgaatatggatggaaaaaatgggcttgcttgcactaaaccacactctgaaattaaaggtgatataaatatttatcccttgcctcatttaaaagtgttaaaagatttaattggagatttaagcacattatacaaacaatacgagtcagtagaaccttggcttaaaacttcaaaaaaaaatgatgaaaaagaaaatctacaatccaaaaaggatagagcaaaattagatggtttgtatgaatgcataatgtgcgcttgctgttcaacgtcttgcccaagttattggtggaatggagaaaaatatttaggaccagccgtcttacttcaagcatatagatggatcatagatagtagagatgaagatagaaaagcgagacttaaaaaagttgcagatgagctaaaattatatagatgtcatactatcatgaattgcacaaacgcatgtccaaagggtttaaatccagcaaaagcgattgcatctattaagaaaatgcttgcaacaagctaa

SEQ ID NO: 218890 - DNA, 566 bp, Unknown
  Bacterial polypeptide expressing nucleotide sequence isolated from the Sargasso Sea
aagatcttgtcgtgagggagtttgtggttcatgcgcaatgaatatagatggtgtaaatactcttgcatgtttgaaacctattgaagaagtaagtggtgaaattagaatttaccctttaccgcatatgccagttgttaaagatttggttcctgatttaacaaaagcttatgatcaattagcatcaataaaaccctggcttatacgttcaaaggaaactactaatttagataaaaataattctgaggagaacaaacaaagtcctaaagaaagagaaaaattagatggtcaatgggaatgtgtcctatgtttttgttgtacaacttcttgtccaagctattggtggaatagtgatgaatacttaggtccagcagttttaatgcaagctgcaagatgggttaatgactcaagagactctgaaagaaaaagtagattaaaggcagttaatgactccatgaaactttatagatgtcattctattatgaattgtacacgttcatgtccaaaagggctcaatccagcaaaagctattgctgatttaaagaaggctattgttacagaattataat

SEQ ID NO: 218891 - DNA, 775 bp, Unknown
  Bacterial polypeptide expressing nucleotide sequence isolated from the Sargasso Sea
atggtacaaataaatttacctcaaaattctaaagttcgaaaaggtaaatattataaagataaaactggttcacaaaatattagaaaagttaatatttatagatgggatccctcgagcgatgaaaaccctcgtatagatacatatgaagttgatatggataattgtccatcgaaagtattagaccttttaaataaaattaaaaatgaaatagattcatcaatttcatacagaagatcttgtgcgcacggcgtctgtggttcctgtgcaatgaatatggatggaaaaaatggtttagcgtgtacaaaacctcataatgaaattaaaggtgatattaatatttatcctttacctcatttaaaagtccaaaaagatttaattggagacttaagcaccttatataaacagtatgagtcagttgaaccttggttaaaaatttcaaaaaaagatgaagataaagaaaacttacaatcaattgaagatcggtctaaattagatggactatatgaatgtataatgtgtgcatgttgctcaacttcttgcccaagttattggtggaatggggataaatatttaggtccagcagttttgttgcaagcctatagatggattatagacagtagagacgaagatagaaaagagagattaaagaaagttgctgacgaattaaagctttatagatgccatactattatgaattgtactaatgcatgcccaaaaggcttaaatcctgcaaaagcaatagcttctataaagaaaatgcttgcaacaggttaat

SEQ ID NO: 218892 - DNA, 970 bp, Unknown
  Bacterial polypeptide expressing nucleotide sequence isolated from the Sargasso Sea
catgagtacaaatgaatataaatttattgatcacaaatatgatgttgtggttgttggcgcaggtggcgcgggtctaagggcaactcttggctgcgctgaatctgggctcaaaacggcatgcatatcaaaggtttttcctactcgaagtcatactgttgctgctcaaggtggaatttcagctgcccttggtaatatgggagaagataattggcgctggcatatgtacgatacagttaaaggtgcagattggttaggtgatcaggacgcaattgaatatttatgcaaaaactctcccgaggctgtctatgagttggaacattttggggttcctttttccagaacagaagaaggtaagatttatcaacgaccatttggaggaatgacaactgaatatggtgaaggtcctcctgcgcaaagaacatgtgcagctgcagaccgaacaggccatgcaatccttcatacactttatggtaagtcaattagtaattcagctgacttttttattgagtattttgctattgatttgattatgtcagaatctggtaaatgtgttggtgttgttgctttgtgcatggaaactggtgagttacatagatttcattcttcacaaacaattttagctactggaggatatggaagagcatatttttctgcaacttcagcgcatacttgcacaggagatggttctgctatggtgttaagagcaggtttaccattgcaagatatggaatttgttcaatttcatccgacaggtatatatggcgctggatgcttgattactgagggttgtagaggagaagggggttaccttgtaaactcagaaggcgaacgttttatggaaagatacgctcctaaagctaaggatcttgcttcaagagatgttgtatcaagagcaatgacaattgagattcgtgaaggcagaggggttggagaagataaagaccatatattcttacatcttgatcatata

SEQ ID NO: 218893 - DNA, 781 bp, Unknown
  Bacterial polypeptide expressing nucleotide sequence isolated from the Sargasso Sea
aatggtacaaattaatttacctcaaaattctgaagtaaaaaaaggtaaatatttcaaagacaaaactggatcaaaaaatttaagaagaataaatatttatagatgggacccatctagtggagaaaatccaagagtagatacatacgaagtagatatggataactgtccttctaaagtactagatattctgaataaaattaagaatgaaatagatcctactttggcatacagaagatcttgtgctcatggagtttgtggttcatgtgctatgaatataggtggaaaaaatggtttagcatgtacgacaccacataaagaaataaatggtgatattgatatttacccactaccccatttaaaagtaaaaaaagatttaataggtgatttagacggtttatataaacaatatcaatcaatagaaccgtggttaaaatctaactctaaatcacaaactaaagaaataatccaatctaaagaggatagagcaaagttggatggtgcatacgagtgtattatgtgcgcctgctgttcaacatcatgccctagttattggtggaatggagataaatatttgggtccagcagttttattacaagcatatagatggattatagatagtagagatgaagaaagacaagtgagattaaaaaaggttgctgacgaacttaaattatatcgatgtcacacaattcttaactgtacaagcgcatgtccaaaaggattaaatccagctaaagcaatagcagaaataaaaaaaatgttagcaacagctaacatttaa

SEQ ID NO: 218894 - DNA, 781 bp, Unknown
  Bacterial polypeptide expressing nucleotide sequence isolated from the Sargasso Sea
aatggcacaaataagcttaccaaaaaattcagaggttaaaaaaggaaaatattttgaggataaaactggatcaaaaaatttaagaaaagtaaatatttataggtgggatccatcaactggagaaaatccaagaatagatacttatgaagttgatatggataattgtccttcaaaagttttagatattttaaataaaattaaaaatgaaattgatcctacattagcctacagaaggtcatgcgctcatggtgtttgtggttcgtgcgctatgaatatgggaggtaaaaatggactagcttgcacaactcctcatgcagagatagatggtgacattgatatttatccactacctcatttaaaagttaaaaaagatttgattggtgatttagatggcttgtataaacaatatcaatctattgaaccttggttaaaaaataattcaacaaaagaaacaacagaaatttatcagtctaaagaagacagagcaaaacttgatggtgcttacgaatgtatcatgtgtgcttgttgttctacatcttgcccgagttattggtggaatggagataaatatttaggtccagcagttttactacaggcatatagatggatcattgatagtagagatgaagagagaaaagcaagattaaaaaaagttgcagatgaattaaaattatatagatgtcatactattttaaattgcacaaatgcatgtcctaagggcttgaatccagcaaaagctatagctgaaataaaaaaaatgttagcaactgctaatgtttaa

SEQ ID NO: 218895 - DNA, 781 bp, Unknown
  Bacterial polypeptide expressing nucleotide sequence isolated from the Sargasso Sea
atggctcaattgaatttaccaaaaaattctgaagtcaaaaaaggtaaatattttaaagataaaacaagttctaaaaatcttagaatagtaaatgtttatagatgggatccatctactgaggaaaatccaagaattgatacttatgaagttgatatggataactgtccttcaaaagttttggatattttaaataaaataaaaaacgaaattgatccaacattagcttatagaagatcttgtgctcatggagtttgtggttcttgtgctatgaacatgggtggcaaaaatggtttagcgtgcacaactccacattcagaaattgatggggacatagatatatatccactaccgcacttgaaagttaaaagagatttaattggtgatttagatggtttgtataaacagtatcaatctattgaaccttggctaaaaaataattccaaaaaagaaacaaaagaaatttatcaatcccaagaagatagagcaaaacttgatggcgcttatgaatgtattatgtgtgcatgttgctcaacatcttgtccaagttattggtggaatggagataaatatttaggtccagcagtccttctacaagcatatcgatggatcgttgatagtagagatgaagaaagaaaagcaagattaaaaaaagttgctgatgaattaaaactttacagatgtcatactattttaaattgtacaaatgcttgtcctaaagggctaaatccagcaaaagcaattgcagaaattaaaaaaatgttagctactgctaatgtttaaa

SEQ ID NO: 218896 - DNA, 775 bp, Unknown
  Bacterial polypeptide expressing nucleotide sequence isolated from the Sargasso Sea
gatggtccaaataaacttacctcaaaattcgcaagttaaaaaaggtaaatactacaaagataagactggttcaaaaaacattagaaaagtaaatatttatagatgggatccttcaacaggtgaaaatccacgtatagatacatatgaagttgatatggataattgcccctcaaaagtattagatcttttaaataaaattaaaaatgagatagatccatcaatagcttatagaagatcatgcgctcatggagtttgtggttcttgtgcaatgaatatggatggaaaaaatggattagcttgtaccaagccacataaggaaattaaaggagacattaatatttatcctttgcctcatttaaaagttcaaaaagatttaattggagatttaagcactttatacaaacaatatgaatcagttgaaccttggctaaaagtttctaaaaaaaaacaagataaagaaaattttcaatctatagaagatagatctaagttagatggcctttatgagtgtataatgtgtgcttgctgctcaactgcttgtccaagttattggtggaatggagataaatatttaggtccagcagttttattgcaagcttacagatggataattgatagtagagatgaagatagaaaagaaaggttaaaaaaagttgcagatgaattaaaactttatagatgtcatactattatgaattgcactaatgcatgtccaaaagggctgaatcctgcaaaagcaattgcatctataaagaaaatgcttgcaacaagctaa

SEQ ID NO: 218897 - DNA, 642 bp, Unknown
  Bacterial polypeptide expressing nucleotide sequence isolated from the Sargasso Sea
aatggctgaattttcccttccaaacaattcaaaaatagttaagggagaatatttcaaagacaagacgggctcttcaaacttaaaaaaagttaatgtttatagatggaatcctgatgatggaaaaaatccaagaatagatacttttgaagtggatatggataattgcggaccaaaagtattagatattctatttaaaattaaaaatgaaattgattcgtcgttaacttttagaagatcttgtgcacatggcgtttgcggctcgtgcgctatgaatgtagatggaataaatacattgtcatgtattaagtctcatagtgacatcaaaggagaattgaatatttatcctttaccacatttgaaagttataaaagatttgataggggatttaagtaatttatataaacaatacgagtcaatccaaccatggttaaagacttcgaaaactgacactgaaaaacaagaaattcttcaatctcagaaagatagatcaaaacttgatggatattatgagtgtatattatgtgcttgctgctctacatcatgtccaagttattggtggaatggagataaatatctaggtcctgcagtgctacttcaggcttatcgatggataagtgatagcagagatgaggaaaaaaaaga

SEQ ID NO: 218898 - DNA, 772 bp, Unknown
  Bacterial polypeptide expressing nucleotide sequence isolated from the Sargasso Sea
atggttcaaataaacttaccacaaaattctaaagttgaaaaaggtaagttttttaaagacaagactggctcaaaaaacatacgcaaagtaaatatttataggtgggatccatctacaggagaaaatccaaggattgatacttacgaagtagacatggataattgtccttcgaaagttttagatctattaaataaaattaaaaatgagatagatccatcaattgcttacagaaggtcttgtgcacacggagtgtgtggttcttgtgctatgaatatggatggtaaaaatggattagcttgtacgaagccacattcagaaattaaaggagatattaatatttatccattaccacatttaagagttttaaaagacttgataggtgatctcagtactttatacaaacaatatgagtctgttgaaccttggttaaagacaacctcaaaaactgaaaaagagaatattcaatccaaggaagatagagcaaaactggatgggctttacgagtgtataatgtgtgcatgctgttcaacttcttgcccaagttattggtggaatggtgataaatacttagggcctgcagttcttttacaggcttacagatggataattgattcaagagatgaagacagaaaagagagattaaaaaaagttgcagatgaacttaagttatataggtgtcatactattatgaattgtactaatgcttgccccaaaggtttaaatccagcaaaagcaatagcctcaattaagaaaatgcttgcaactagctaat

SEQ ID NO: 218899 - DNA, 778 bp, Unknown
  Bacterial polypeptide expressing nucleotide sequence isolated from the Sargasso Sea
atggttcaatttagccttcctcaaaattcaaaaattttaaaaggcaaatattataaagacaaatcaggatcaacaaatatcaaaaaagttaatgtttatagatggagcccatctagtaaggaaaatccaagaattgataccttcgaaataaatattaaagaatgtggaccaaaagttctagatatacttttcaaaattaaaaatgaaatagatcctagcttgacctttagaaggtcttgtgctcatggtgtttgcggttcttgcgcaatgaatgttgatggagttaatactttatcttgtataaaatctcattctgatattaaaggagatttaaatatttaccctttacctcacttaaaggtagttaaggatctagttggtgatctaagcactctatataaacaatatgagtctgtcgaaccatggctcaaaacaacagctggagaaaaaacatcagttgaaattcaacagtcgcaagaagatagagcaaaattagacggttactatgaatgcatactttgtgcttgttgttcgacttcatgcccaagttattggtggaatggtgacaaatatttaggaccagctgttttattacaagcttatagatggattacagatagcagggatgaagaaagaaaagctaggcttaaaaaagttgcagatgagttaaaattatataggtgccatacaataatgaattgtactaattcatgtcctaaaggtttaaacccagctaaagcaatagcatctataaaaaaaatgcttgcaacaagttaaa

SEQ ID NO: 218900 - DNA, 781 bp, Unknown
  Bacterial polypeptide expressing nucleotide sequence isolated from the Sargasso Sea
atggttcagctaagcttacctaaaaattcagaggttaaaaaaggcaaatattttaaagataaaactggatctaaaaatttaagaaaagtaaatatttatagatgggatccatcaacagaagaaaatcctagaattgatacatacgaagttaatatggataattgttcatctaaggtgttggatattctaaataaaattaaaaatgaaattgatcctacattggcctacagaaggtcttgtgctcatggtgtttgtggttcttgtgctatgaatatgggaggaaaaaatggactagcttgtacaactcctcatgcagagatagatggtgacatcgatatttatcctctacctcatttaaaagttaaaagagatttgattggcgatttagatggcttatataaacaatatcaatctattgaaccttggttaaaaaataactcaacaaaacagacaacagaaatttatcagtctaaagaagatagagcaaaacttgatggtgcttacgaatgtattatgtgtgcttgctgttctacatcttgcccaagttattggtggaatggagataaatatttaggtccagcagttctgctacaggcttatagatggattattgatagtagagatgaagagagaaaagctagattaaaaaaagtttcagatgaattaaaattatatagatgccatacaatattaaattgtacaaatgcatgtcctaagggcttgaatccagcaaaagctatagctgaaataaaaaaaatgttagcaacagctaatgtttaaa

SEQ ID NO: 218901 - DNA, 781 bp, Unknown
  Bacterial polypeptide expressing nucleotide sequence isolated from the Sargasso Sea
aatggtgcaaatcagtttacctgagaattccaaaacaaaaaaaggtaaatattttaaggacaaaaccggctcaaaaaatttaagaaaagttaatgtatatagatgggatccatcttcaggagaaggtccaagaattgacacttatgaagttgatatggaaaactgtccatccaaagtattggatattttaaataaaattaaaaatgaaatagaccccacccttgcttacagaagatcatgtgctcacggtgtatgtggatcgtgtgcaatgaacatgggtggtaaaaatggtcttgcttgtacaactcctcatgaaaatattgatggagatattgatatttatccgctgccacacttaaaagttaaaaaagatctaatcggagatttagatggattatacaagcaatataaatctattgaaccttggttaaaatcaagttcaaaatctgagtcagctgagttaattcagtcaaaagaagatagagctaagcttgatggtgcttatgaatgtattatgtgtgcatgttgttctacttcttgcccaagttattggtggaatggagataagtacttaggaccagcagttttattacaagcttatagatggattattgatagtagagatgaggaaagacaagctagattaaaaaaagtagcagatgaacttaaattgtatcgttgtcatactattttgaactgtactagtgcatgccctaaaggtttaaaccctgcaaaagcaattgctgaaataaagaaaatgttagcaacagccaatatttaa

SEQ ID NO: 218902 - DNA, 778 bp, Unknown
  Bacterial polypeptide expressing nucleotide sequence isolated from the Sargasso Sea
aatggctgagttttctcttccaaataattcaaaaattttaaagggaacatattataaagacaaaactggctccaaaaatatcaaaaaagtaaatgtttataggtggaaccctgacgatggaaaaaatccacgaatagacacatttgaagtagatatggatgattgtggaccaaaagttttagatattctttttaaaattaaaaatgaaatagactcgtccttaacttttagaagatcttgtgcccatggagtatgtggctcttgtgctatgaatgtagatggagtcaacactctttcatgtattaaatctcatagtgacattaaaggtgagttaaatatttatcccctaccacatttaaaagtaataaaagatctaattggagacctaagtaatttatataagcaatatgagtctattcaaccatggttaaagacctcaaaaacagacacagaaaaacaagaaattttacaatcccaaaatgacagagctaaactcgatggatactatgagtgtattctatgtgcctgctgctctacatcgtgtccaagctactggtggaatggtgacaaatatttaggccccgcggtattgctacaagcctatagatggataagcgacagcagagacgaagagaaaaaagaaagattaaagaaagttgctgatgaattaaaattatatagatgccacactattatgaattgtactaattcatgtcccaagggccttaacccagccaaggcaattggatctataaaaaaaatgcttgcaacaagctaa

SEQ ID NO: 218903 - DNA, 778 bp, Unknown
  Bacterial polypeptide expressing nucleotide sequence isolated from the Sargasso Sea
aatggttcaaataaatctacctgaaaactcaaagattcaaaaaggtaaatattataaagataaaaccggctccaaaaatttaagaaaagtaaatgtttataggtgggatccatctacagatgaaaaacccagaattgatacctatgaaatagatatggataattgtccatcaaaagttttagatattttaaataaaataaaaaatgagatagatcctagtcttgcttaccgaagatcatgtgctcatggagtatgtggatcttgcgcaatgaacatggatggtaaaaatggtttagcatgtacaaaatcacatgcagaaataaaaggagacattaatatttatccacttccacacttgaaagttttaaaagacttaataggtgacttgagcacattatataaacaatatgagtcggtacaaccttggttaaaaacatcaaaaaaacctgagaaagaaaatttacaatctcgagaggacagatcaaaattagatggtctatacgaatgcattatgtgtgcatgctgttcaacttcttgcccgagttactggtggaatggtgataagtatttaggtcctgctgttttgttacaagcttacagatggattatagatagtagggatgaagataggaaggaaagattaaaaaaagtagcagatgaattaaaattgtatagatgtcatactattatgaattgtaccaatgcatgtccaaaaggcttaaacccagcaaaagcgatagcagaaattaaaaagatgttagctacatcaaatatttaa

SEQ ID NO: 218904 - DNA, 1079 bp, Unknown
  Bacterial polypeptide expressing nucleotide sequence isolated from the Sargasso Sea
aatgtcaaacacacataatataaacggaagagagtacacttttgttgaccatacttatgatgtggtcgttgttggcgctggaggggcaggcttaagagccacacttggatgctctgaggcaggtctaaaaacagcatgtgttacaaaactatttccaacaagaagtcatactgtagctgcacaaggtggggtagctgctgcactcggaaatatgggtgaggatgattggaaatggcacatgtatgataccgtgaaaggtgcagactggcttggtgatcaagatgcaattgaatatctatgtaaagaagctccccaagcagtatatgaacttgaacattttggattaccatttagcagaagagaagatgggaaaatctaccaaagaccattcggtggtatgacaacacattatggtgaaggaattgcacaaagaacatgtgctgctgcagaccgaacaggccatgcaatgctgcacacgctttacggcaaagcaataagtaattcagcggagttttttatagaatactttgctattgacctaataatggataaaaatggagcctgccttggcgtagtagcgctatgtttggaagacggtacaattcatagatttcaagcacagaaaacaatccttgccacaggtggctatggacgcgcttatttttcagcgacatctgcgcactcatgcacgggagatggaaatgctatggttctcagagctggcttaccattacaggatatggaatttgttcagtttcatccaacgggaatatatggggctggttgcttaataacagaaggatcaagaggtgaaggtggatatctaacaaactcagaaggtgagagatttatggaaagatacgctccatcagccaaagacttagcaagtagagatgtggtctcgagatccatgacgattgaaattagggaaggtagaggtgttggcaaagataaagatcatattcatctccatctcgagcatttagcaccggaagtactagctgaaagattgccagggatatcagaaacagctaaaatattctcaggggttgacgtaacaaaagagccaatccctgtat

SEQ ID NO: 218905 - DNA, 790 bp, Unknown
  Bacterial polypeptide expressing nucleotide sequence isolated from the Sargasso Sea
catggcggaatttacattacccaagaactcaaaagtagagaaaggcagatacttcagtgccgataaatcggcaacgaatctcaggaaatttcatgtttatcgctacgatccatccgatgattccaacccatgcgtcgatacctatgaaatcgatatggataaatgcggaccaatggttttggatgggctgattaaaattaaatctgattacgattcctcattaacttttagaaggtcatgcagagaaggcatctgcggatcatgctcacacaacatcaatggcgtcaatactttggcttgcatcaagccaatcaaagacttaaaaggagacattcgtatcttccccttgccacacatggatgttgtgaaagatttggtggtcgatttaaccaatttttatgagggatattcctcagtcgagccgtggcttaagtcagacactcctgcacctgatggatcagagaggctccaaagcaaagaagatcagaaaaagatcgatcaaccctcagcttgcattctttgtgcatgttgctctaccagttgccctagttattggtggaatggcgacaagtatcttgggcctgcagcattgcttgcttcctaccggtggcttcaggacagccgcgacgatgccaaaaaagaacgcctaaaagaactcaatgattcgtccaagctctatcgttgtcacacaattatgaattgttctttggcatgcccaaaggatttgaatccagggcaggcaattgcagagatcaagaagatgattgccaccgaagatttgaatgagtga

SEQ ID NO: 218906 - DNA, 352 bp, Unknown
  Bacterial polypeptide expressing nucleotide sequence isolated from the Sargasso Sea
aaaaaataactcaacaaaacagacaacagaaatttatcagtctaaagaagatagagcaaaacttgatggtgcttacgaatgcattatgtgtgcttgctgctctacatcttgcccaagttattggtggaatggagataaatatttaggtccagcagttctgctacaggcttatagatggattattgatagtagagatgaagagagaaaagctagattaaaaaaagtttcagatgaattaaaattatatagatgccatacaatattaaattgtacaaatgcatgtcctaagggcttgaatccagcaaaagctatagctgaaataaaaaaaatgttagcaacagctaatgtttaa

SEQ ID NO: 218907 - DNA, 772 bp, Unknown
  Bacterial polypeptide expressing nucleotide sequence isolated from the Sargasso Sea
atggttcagataaacttgccacaaaattctaaaattgaaaaaggcaagtatttcaaagacaagactggctcaaaaaatattcgtaaagtgaatatatatagatgggatccatcaactggaaaaaatccaaggatcgatacttacgaggtagatatggataattgtccttcaaaagttttggatttgttgaacaaaattaaaaatgaaattgatccatcaattgcttacagaagatcatgtgcacatggagtatgtgggtcatgcgctatgaatatggatggaaaaaatgggttagcttgtacgaagccacacgctgaaattaaaggagatataaatatctatccattaccacatttaaaagttttaaaagatttaattggggacctcagcactttatataaacaatatgagtctgtggaaccgtggttaaaaacaacctcaaaaactgaaaaagagaatattcaatctaaagaagatagagctaaacttgatgggctatacgagtgtataatgtgtgcatgctgctcaacatcttgcccaagttattggtggaatggcgataaatatttaggccctgccgttcttttacaggcttacagatggataattgactcaagagatgaagacagaaaagagagattaaaaaaagttgcagatgaacttaagctatataggtgtcatactattatgaattgtactaatgcttgccccaaaggtttaaatccagcaaaagcaatagcctcaattaagaaaatgcttgcaactagctaat

SEQ ID NO: 218908 - DNA, 328 bp, Unknown
  Bacterial polypeptide expressing nucleotide sequence isolated from the Sargasso Sea
gatactgaacgcctgcaatcgatagatgagagggctagattagatggtatgtgggaatgcgttttgtgctttagttgttctacttcttgtccaagttattggtggaatggggagcgttacctaggaccagcagttctacttcaagcatatcgttggatcgcagattcaagagacgaatatacaggcgaacgtcttgataatttagaggacccatttcgcttatatcgctgccacaccataatgaattgcacaaaaacctgtccaaagggtcttaacccagccaaggcgatcgcagaaatcaaaaaaatgatcgtaatgcgtcaataat

SEQ ID NO: 218909 - DNA, 775 bp, Unknown
  Bacterial polypeptide expressing nucleotide sequence isolated from the Sargasso Sea
atggttcaaattaatttacctcataattcaaaagttcttaagggtgattattataaagataaaacaggttctaaaaatataagaaaggtaaatatatatagatgggatccatctaaaaatgaaaatccaaaaattgatacttatgaagtagatatggacaattgcccttcaaaagttttagatatattaaataaaattaagaatgaaatagacccttctatagcttacagaagatcttgcgctcatggtgtatgtggttcatgtgctatgaatatgaatggaaaaaatggccttgcatgcaccaaatctcattctgaattagaaggtgatataaatatttatcctttgccacatttaaaagttttaaaagatttaataggtgatttaagtacattgtataagcagtacgagtccattgagccatggcttaaatcttctaataaaaataatgaaacagagaatttacaatctatagaagatagagaaaaattagatggactttacgaatgtataatgtgtgcatgctgttcaacttcatgtccaagttattggtggaatggtgaaaaatatctagggcctgcagttttgttgcaagcttataggtggataattgatagcagagatgaagaaagaaaagaacgattacaaaaagtagcagatgaattgaagttatatagatgtcatactattttgaattgtactaatgcatgtcctaaagacttaaatccagcaaaagctatagctgaaataaagaaaatgcttgcaacgacttgat

SEQ ID NO: 218910 - DNA, 439 bp, Unknown
  Bacterial polypeptide expressing nucleotide sequence isolated from the Sargasso Sea
tttcctttgccccatttaaaagtagtcaaggatctagttgctgatctaagcatattgtataagcaatatgaatcaatagaaccttggttaaaaataaaaagttctaaatctgaaaagaaagaaattaatcaatctaaagaaaacagagaaaaacttgatgggctttatgaatgtatcatgtgtgcttgttgctcaacttcttgtccaagctattggtggaacggagaaagttatttggggcctgcagttttactacaggcttatcgttggatatcagatagccgtgatgaggagaaaaaagatagattaaaaatggtagctgataaacttaaattatacaggtgtcatactataatgaattgtactagttcttgcccaaaaggcctaaatccagcaaaggccatagcctcaattaaaaaaatgcttgcaaccagctaga

SEQ ID NO: 218911 - DNA, 781 bp, Unknown
  Bacterial polypeptide expressing nucleotide sequence isolated from the Sargasso Sea
aatggttcaattgagtttacctaagaattctgaaattaaaaaaggtaaatacttcaaagacaaaactggatcaaaaaatttaagaaaagtaaatatttatagatgggatccatctacagatgaaggtcctaggatagacacctatgaagttgacatggataattgtccttcaaaggtcctagatattttaaataaaatcaaaaatgaaatcgattcaactataacatacagaagatcttgcgctcatggagtatgtggttcatgtgcaatgaatatggggggtaaaaatggccttgcttgcaccactccacatgctgaaatagatggagatattgatatttatccattacctcatttaaaagtcaaaaaagatttaattggtgatttggatgggttgtacaaacagtatcaatcaattgaaccatggttaaaaaataattcaacaaaagaaactactgaaatttatcaatccaaagaagacagagcaaaactagatggtgcttatgaatgtattatgtgtgcttgttgctctacttcttgcccaagttattggtggaatggtgacaaatatttaggtccagcagttttgttacaagcatatagatggattattgatagtagagatgaggagcgaaaagcaagattaaaaaaagttgctgatgaattaaaattatacagatgtcatactattttaaattgtacaaatgcatgtcctaaaggcttgaatccagcaaaagctatagctgaaataaaaaaaatgttagcaacggctaatgtttaa

SEQ ID NO: 218912 - DNA, 787 bp, Unknown
  Bacterial polypeptide expressing nucleotide sequence isolated from the Sargasso Sea
tatggctgatttttttttaccaaaaaattcaaaaatccaagaaggaaaaacatattcttttgaaggtaataaagattcaacaaaaaaattaattatataccggtgggatcctgaggagaatgaaaatcctagattagataaatatgaagttgacttaaaaaattgtggtccaatggttttagacgctcttataaaaattaaaaatgaaattgatactactttaacttttagaagatcatgcagagaaggggtatgcgggtcatgtgcaatgaatattgatggagtaaatacattggcttgtttgaaaccaattgaagaaattaagaaagatattaaaatttatcctcttccccatatgcgtgttgttaaagatttggttcctgatttaacagatgcgtataaacaactagagtcaataaaaccatggttgcaaaatgatgaagaaaaaaaagggaaaaatccttccaaaaatattcaaaagccagaagatagggctaaattagatggaagttgggaatgtgttttatgtttttgttgcacaacctcttgtccaagttattggtggaatggagataattatctaggaccagcagttttacttcaagcatcaagatggataaatgacacacgagatactaaaagaaaagagagattagaagaaattaatgactctcttaaattataccgatgccattcaataatgaattgtaccagatcttgtcccaaaggattaaatccagcaaaagcaatagcagatataaagaaggctattgttactgaaaaataa

SEQ ID NO: 218913 - DNA, 448 bp, Unknown
  Bacterial polypeptide expressing nucleotide sequence isolated from the Sargasso Sea
actgaatatttatcctttaccacatttaaaagttgttaaagacttaattggagaccttagcaatttgtataaacaatatgagtcaatccaaccttggttaaagacttcaaaaactgacacagaaaaacaggaaattctgcaatcacaaaaagaaagatccaagcttgacggatattacgagtgcatactatgtgcttgctgctctacatcatgtcctagttattggtggaacggtgacaaatatctaggtccagcagtgttacttcaggcttatagatggataagtgatagtcgagatgaagaaaaaaaagagagattaaaaaaagttgctgatgaattaaagctttatagatgccatactataatgaattgtactaattcttgtcctaaaggacttaatcccgcaaaagctataggctctataaaaaaaatgcttgcaacaagctaa

SEQ ID NO: 218914 - DNA, 778 bp, Unknown
  Bacterial polypeptide expressing nucleotide sequence isolated from the Sargasso Sea
aatgtcacaattcagcttaccaaaaaattcaaaaattttaaaaggtgagttttacgaagacaagacaggatcagataatattaagaaaattaatgtttatagatggaacccagatgatggtagaaatccaagagttgatacttttgaagttgatatgaacaattgtggtccaaaagttttagatattcttttcaaaattaaaaatgagtttgattcttctttaacttttagaagatcatgcgcccatggagtatgcggttcatgtgctatgaatgttgatggtgtcaatactttatcttgtataaaatctcattcagatattaaaggagaaattaatatttatcctttaccccaccttaaagttgttaaagatttaattggagatcttagtaacctttataaacagtatgagtcaattcaaccatggcttaaaacttcaaaaacaaaattagaaaaagaagaaattttacaatctgaaaaggatagatcaaaattagatgggtattacgaatgtattctttgtgcatgttgctcaacttcctgtcctagttattggtggaatggtgaaaaatatcttggtccagcagttcttttacaggcctatagatggatagcagatagtagagacgaagaaaaaaaagaaagattaaaaaaagtagcagatgaatttaaactttatagatgtcatacaattatgaactgtgctaattcttgcccaaaaggtctaaatccagcaaaagccatcgggtctataaaaaaaatgcttgcaacgagttaa

SEQ ID NO: 218915 - DNA, 796 bp, Unknown
  Bacterial polypeptide expressing nucleotide sequence isolated from the Sargasso Sea
tcactccttcctaaaaactcagttccagttaaaggaaaatcatattccaatgtagatcttattgatgagcaggctcaacaaaaccatgatatcaggatcgttaatgtttacagatggtctggtgaagaaggtagcccccctcaaatagatcgatttgaaattgatgtagctaaagcagggacgatggttttggatatattaaataaaattaaagctgaggttgatccaagtctaacttttagaaaatcatgcagagaaggtgtttgtggatcatgtgcaatgaatatagacggtgtcaacactcttgcatgccagaaacatatagaggaatgttctgatgaaattaatatttatcctcttcctcatatgaaagttttaaaagacttagtagtagatttgaaaaaagcttttgaacaatttaaatctataaagccatggttaaacaaaaaatcgccaaataatgaaagagaaaatattcagtcagtcgaagatagagataagctagatggcaaatgggaatgtgtgatgtgcttttcttgtagtacatcttgtccaagctattggtggaatgaagatgaatatttaggacctgctgtattacttcaagcaaaccgctggataaaagatagcagagatgaagagaaaaaagaaaggttgaatgagttggatgatagtcttaaactatatagatgtcattctatcatgaattgtaccaactcttgtccgaaagggttaaacccagctaaagcaatagctgaaataaaatatgagatatccaaaatggataataagtgaa

SEQ ID NO: 218916 - DNA, 775 bp, Unknown
  Bacterial polypeptide expressing nucleotide sequence isolated from the Sargasso Sea
gatggttcaaataaatttgcctaagaattcaaaaatccaaaaaggcaaatattttaaagacacaacaggttctaagaatataagaaaagttaatatttatagatgggatccctcaactggcgaaaacccaagaattgatacttacgaagtggatatggataattgtccatcaaaagtcttagatctactaaataaaataaaaaatgaaattgatcctactatagcctatagaagatcatgtgcacatggagtttgtggttcttgcgcaatgaatatggatggaaaaaatggtttagcttgcactaaacctcattcagagattaaaggagatattaatatttatcctctccctcatttaaaagtattaaaagatctcattggagatttaagtacactttataaacaatatgagtctgtggaaccttggctaaaaaattcaaacgattctagcaaaactgagaacttacaatccaaagaagatagagctaaacttgatggactttatgaatgtattatgtgcgcatgctgttccacgtcatgccctagttattggtggaacggagataaatatcttggtccagctgttttacttcaagcctataggtggataatagactcaagagatgaagatagaaaagcaagactaaaaaaagtagctgacgaactaaaattatataggtgccatacaatcatgaactgtacaaatgcttgtccaaagggtcttaatccagcaaaagctatagcatctatcaaaaaaatgcttgcaacaagctaa

SEQ ID NO: 218917 - DNA, 775 bp, Unknown
  Bacterial polypeptide expressing nucleotide sequence isolated from the Sargasso Sea
aatggttcagataaacttaccagaaaattcaaaagtaaaaaaaggacattattataaagataaaactggatcaaaaaatattagaaaaataaatgtatatagatgggatccttcttcaggagaaaatcctcgaatagatacttatgaagttgatatggataattgtccttctaaagttttggatgttctaaataaaataaaaaatgaaatagacccatcattaagttatagaaagtcatgcgcccatggagtttgtgggtcatgtgcgatgaacatggatggaaaaaatggattagcttgtacgacttctcatgctgacataaatggagacattgatatatttcctttacctcatttaaaagtaaaaaaagatttaataggtgatttagatggtctttataaacaatatgagtcaattgaaccttggttaaaaaataattctaaagataagaatgatgaaatttatcagtctcaaaaagatagagaaaaattagatggtgcttatgaatgtattatgtgtgcctgttgctctacatcttgcccaagctattggtggaatggagataaatatcttggtcctgcagttttgcttcaggcatatagatggataatcgatagcagagatgaagatagaaaagagagacttgaaaaagttgctgatgaattgaagctttatagatgtcatactattttaaattgcacaaatgcttgccctaaaggtttaaatccagcaaaagctatcgctgagataaaaaaaatgcttgcaacgacttaa

SEQ ID NO: 218918 - DNA, 1096 bp, Unknown
  Bacterial polypeptide expressing nucleotide sequence isolated from the Sargasso Sea
catgaataaagtaattaatatctcaaaaaaaaataacatcaaagaatttgatgcacttattgttggtggaggcggatcagggatgagaacctcccttgaactagctaaatcaggtctgaatacagctgttatttctaaagtttttcctaccaggtctcataccgtctcggctcaaggtggaattacatgtgcaatccaaagtgcagatccaaatgatgattggagatggcatatgtacgataccgttaaaggctctgactatattggtgatcaggatgctattgagtatatgtgctcagagggaccaaaagcagtttatgaattagagcacatgggtcttccattttctcgttttgaaaatggaaggatttatcaaagaccatttggtggacaatctaaagattttggaaaaggtggacaggcagctagaacttgtgcagcagcagatagaacaggtcatgcacttcttcatactctctaccaaaacaatgttaaagagggaacaaactttcttaatgaatggtttgctgttgatcttgttaaaaattcaaagaatgagatcactggagttatagctttttctattgaatcgggtgaagtctgttatcttaaagctcaggcaacggttctagctactggcggtgctggaagaatatatgcatctacaacaaatgctttgattaatactggagatggacttggaatgactctcagagcaggttttcctgctcaggatatggaaatgtggcaatttcatccaactggtattcatggtgcaggatctcttgtaactgagggttgcagaggtgaaggtggatatttaattaatgcagatggtgagagatttatggaaagatatgctccaaatgctaaggatcttgcagggagagatgttgttgctagatcaatggttatggaaatacttgaaggtagagggtgtggcccagagaaagatcatgtttacttaaaactcgatcatttgggcgcagatgttcttaattcaaaattaccgggcatatgcgagctctcaaaaacttttgctcatgttgatcctattaaggaaccaattcctgttgttcctacatgtcattacatg

SEQ ID NO: 218919 - DNA, 286 bp, Unknown
  Bacterial polypeptide expressing nucleotide sequence isolated from the Sargasso Sea
tggtgcgtatgaatgcattatgtgtgcatgttgctcgacttcctgtcctagttattggtggaatggagataaatatttaggtccagctgttcttttacaggcttatagatggattgttgatagtagagatgatgaaagaaaagctagattaaaaaaagttgctgatgaactaaaactttatagatgtcatactattctaaattgtaccagcgcatgtcctaaggggctaaatccagctaaagcaattgctgaaatcaagaaaatgttagccacagctaatgtttaa

SEQ ID NO: 218920 - DNA, 661 bp, Unknown
  Bacterial polypeptide expressing nucleotide sequence isolated from the Sargasso Sea
aatggttcaaattaatttaccagaaaattcaaaaatctctaaaggtaaatattataaagacaaaacaggctctaaaaatttgaggagagtaaatatttatagatgggaccctacaactggtggaaatccaagaattgatacctatgaagtagatatggataactgtccttcaaaagtacttgatattttgaataagattaaaaatgaaattgatccatctttagcttatagaagatcatgtgctcatggtgtttgtggttcttgtgcaatgaatatggatggaaaaaatggtctagcatgcacaaaaccccataaagaaattaaaggtgatattaatatttatcctttaccgcatttaaaagttgttaaagatttaatcggagatttaagcacattatataaacaatatgagtcagttgaaccatggctaaagacttcagataataaaagtgaaaaagaaaatatacaaacgaaagaagatagagctaaactagacggattatatgaatgtataatgtgtgcatgctgctctacttcatgcccaagctattggtggaacggtgacaaatatcttggtccagcagttcttttacaagcttatagatggatcatagatagtagagatgaagatagaaaagcaagacttgaaaaagtagctgat

SEQ ID NO: 218921 - DNA, 691 bp, Unknown
  Bacterial polypeptide expressing nucleotide sequence isolated from the Sargasso Sea
aaagttaatatttatagatgggacccttctacaggtgataatccacgtatagatacttatgaggtagatatggataattgtccttcaaaagtattagacttactaaataaaataaagaatgaaattgactcttcattagcttacagaagatcttgtgctcatggtgtctgtggttcttgtgcaatgaatatggatggaaaaaatggattagcttgtacaaaatcacataaagaaatcaaaggagatataaacatttatcccctgcctcatctaaaagttcaaaaagacttaattggtgatttgagtacattatataatcaatataaatcagtagaaccctggcttaaaaactcaaataaagaccaaaataaagaaaattttcaatctatagaagatagatctaagttagatggtttatacgaatgtataatgtgcgcatgctgctcaacttcatgcccaagctattggtggaatggagataaatatttaggaccagcggtgttgttacaagcgtacaggtggataattgatagcagagacgaagagagaaaagaaagactaaaaaaagtagctgacgaattaaaactttatagatgtcatactattatgaattgtacaaatgcatgtccaaaaggcttaaaccccgcaaaagcaatagcagctataaagaaaatgcttgcaacaagctaat

SEQ ID NO: 218922 - DNA, 547 bp, Unknown
  Bacterial polypeptide expressing nucleotide sequence isolated from the Sargasso Sea
gggagtatgtgggtcatgtgcaatgaatattgatggagtaaatacattggcttgtctgaaaccaattgaagaaattaagaaagatattaaaatttatcctcttccacatatgcgtgttgttaaagatttggttcctgatttaacagatgcgtataaacaattagagtcaataaaaccatggttacaaaatgatgaagaaaaaaaagagaataataaaaatttatccaaaaatatacaaaatccagaagatagggctaaattagatggaagttgggaatgtgttttatgtttttgttgtacaacctcttgcccaagttattggtggaatggtgataattatctagggccagcagttttacttcaagcatcaagatggataaatgacacacgagatactaaaagaaaagagagattagaggaaattaatgactctcttaaattataccgatgccattctataatgaattgtactaggtcttgccctaaaggattaaatccagcaaaagcaatagcggatataaagaaggctattgttactgaaaaataa

SEQ ID NO: 218923 - DNA, 625 bp, Unknown
  Bacterial polypeptide expressing nucleotide sequence isolated from the Sargasso Sea
ggatttgcgcttcatccaggggcaactcgatggtgagggcctatcgatcggcaacgagctttttcgctgcatcggccttcgcaaacttcatttggaggttgcgcgactcggcaacggcctgcagatcctccacagcgtctggttccccgatccccactacgacttgccgatcttcggggccgacatcgtggccggccctgcaggcatctccgccgcgatcgtcgatctgtcccccacctccgatgccttgccggagcagctgatccagcggcttgaggccaggccatggccggcgttccgtcaggttcgggagctgccggcctggggatcagccatcttctcgaacaaggtgtgcttcatccgccccgatggtgctgacgaggaagcagcctttcaggaactggtgagccattacctgcaggtgatggccaccagcgtgatcgaggcgactcccgaaccgtccacggctctcactacagtccgccggtacgagggtcagttgaactattgccttcagcagaaacgcaacgacaagacccgccgcgtgctcgagaaggccttcgattcagcctgggccgatcgctacatcgacatgcttctgttcgacaaccctccggaactctga

SEQ ID NO: 218924 - DNA, 745 bp, Unknown
  Bacterial polypeptide expressing nucleotide sequence isolated from the Sargasso Sea
gatgacggacggatccgagggactgcatccgctggttcactccctggcggactgcatccgaaccagctggaggaacctccccgatctacagccgctggcggtggatccagaacttgaatccatcagcggtctgctcgatggcgaacagctgttcatacggaatgaacttcgtcgatgccgcggtctacgcaagttgcacctggagattgccaggctgggtgtcggtctgcagattcttcactgcgtctggtttccagaccctcgcttcgatctccccatcttcggggcagatgtggtcgctggaccggcaggtatctctgcagcaattgtcgatctttcaccagtcggtgaggcccttcccgacatgctcgcgtcgtccctgtcaggattgaaccgtccccgctttcgtcaggagagggcgttaccagggtgggggacgatcttctccccccatgtgtgtttcattcggccggacggtgctgacgaggagcgcttctttcaatgtctggtgatggattatctcgacgtgctgtcttctgccgttgttcaggcggaaggtgaacaagcaaattcattggaaacgctaaagcgatatcaaggtcaactgaattactgcatccagcagaaaagaaacgataaaactcgacgtgtgcttgagaaagcattcaatgtccaatgggctgagcgttacatcaccgaattgttgtttgacgaaccatcgcatccagaccccgtcattgcctga

SEQ ID NO: 218925 - DNA, 745 bp, Unknown
  Bacterial polypeptide expressing nucleotide sequence isolated from the Sargasso Sea
gatgcagtccccgccgtctgagtcttcatcgacggttgctcccctgattccctcccttgccgagacgattcggggtgcctggatcgggttaccagagctgaaaccgctcgacgccgactccgatttctcgagcattgaggggcaactggagggggatgacctgctcattcgcaatgagctgctgtgctgccgcggtgtgcgcaagatccacctggaactagcgcggcttggtcggggtctgcagattctccactgcgtctggttcccggacccccgcttcgatctgccgattttcggtgccgacatcgtggccggtcccgcaggggtctccgctgcaattgtcgatctgtctccggtgtccggaaccttgccgtcgggtattgaaacggccctggcggacactcccagtccggcttttcgccaggtgcgcgatttgccggggtggggcacgattttttccccccatgtctgtttcatccgtccggatggtgctgaggaggaagtgctgttccgctcacgggtggaggaggtgctgaccatcctgcgaacggctgtgctccagacagcctgcgaaccagcgacagcggcttctacgatccgccggtatgagggacaactgagctattgcctccagcagaagcgcaacgacaagacccgcagggtgctggagaaagccttcgacgcctcctgggccgatcgctacatcgaagaactgctgttcgacgatcccttgcctccaagttga

SEQ ID NO: 218926 - DNA, 880 bp, Unknown
  Bacterial polypeptide expressing nucleotide sequence isolated from the Sargasso Sea
ttgatgatgaaagattctgttaaggagtttattgatagagaggtatggccatacaaagatagatttgaaaaaaaagactatgatttcacaaaatcattaatggaaaaagctggagaacttggttttctaggtgtttcaattccagaagaatatggaggaatgggtatgggttttatatcttctatgttggtatgtgattatatatcggggtcaactggatcattatcaactgcttttggtgctcacactggaattggaacacttccagtcttattatatggaacagaggatcaaaagaaaaagtacttacctagattaagctctggcgagtgtttcggttgttattgtctaactgaacccggtgcaggttctgatgctaactcaggaaaaagtaaagctgttttatctgatgatggcaaatattacaaaatatcaggccaaaaaatgtggatatctaatgctggttttgcgtccttaatgatcgtgtttgcaagaatagagaatgataaaaatataactgcatttttagtagattatgatccatcaaatggcataaagcttggtgaagaagagaataaactaggtatacattcttcatctacacgacaggtattttttaatgaaaccgttattcccttagaaaatattttaggcgaaagaaatggaggatttaaaatcgctatgaatgcgttaaacgttggaagagttaaacttggagtagcttgtttggatgcacaaagaagaattactacagaatcaataaaatatgcaaatgaaagagttcaattcaaagtcccaatttcaaaatttggagcgataaaagagaaaatagcaaatatggcaagctcttgctatattggggaatcagcatgttatcgag

SEQ ID NO: 218927 - DNA, 721 bp, Unknown
  Bacterial polypeptide expressing nucleotide sequence isolated from the Sargasso Sea
aatgaaactatctgaagaacaaatagctttttatgatgttgcaaaaaattttgcaattgaaaaaatggcacctcatgcagaaaaatgggatgaagaaaagatccttcctatagaaacattgcaagaattagcacaattaggttttgctggtatttatgtttctcctgatttaggtggatcaggattatcaaggctagattcaacattaatttttgaaggccttagtcagggttgcacatccacagccgcatttttatctatacataatatggcaacatggatgatagataattttggaagtcaggagctaaaagaacgttttgttcctgatctttgttctatgaaaaaaataagttcatattgcttaactgaaccaggcgcaggatcagatgccggtggtttaagaacaaaagcagaaaaatctggcgaccattatattttgaatggaactaaatcatttatttctggcggaggcttttctgatgtatatgttacaatggttaaaaccgatgaaaactctatctcgacccttgttatagaaaaagatagtgaaggcctttcatttggtggacaagaaaagaagatgggctggaattctcaacccacagctcaagtaatttttgaagattgtaaagttcctgtgaaaaatctaattggacaagaaggtgatggttttaaaattgcaatgatgggattagatggaggcagacttaatatgctg

SEQ ID NO: 218928 - DNA, 1132 bp, Unknown
  Bacterial polypeptide expressing nucleotide sequence isolated from the Sargasso Sea
aatgaaactatctgaagaacaaatagctttttatgatgttgcaaagaattttgccattgaaaaaatggcgcctcatgcagaaaaatgggatgaagaaaaaacattacctgtggagacattaaaagaattagcacaattaggttttgctggtatttatgtttctccagacttgggtggatcaggtctatcaagacttgactcaacattaatttttgaaggccttagtcaagggtgtacatctacagcagcatttttatcgatacataatatggcgacatggatgatagatagttttggaagccaggagcttaaagagcggtttgttcctgatctttgttcgatgaaaaaaataagctcttactgcttaactgaaccaggagccggatcagatgctggtgggttaaggacaaaagccgaaaaatcaggtgatcattatattctaaatggaacaaaatcatttatttctggtggtgggttttctgatgtatatgtgacaatggtaaaaactgacgaaaactcgatctctactctagttattgaaaaggatagcgagggactctcatttggtggacaagaaaaaaaaatgggttggaattctcaacctacagcccaagtaatttttgaagattgtaaagttccagttgaaaacttgataggtcaagaaggcgatggcttcaaaattgcaatgatgggattagacggaggcaggcttaatattgctgcctgttctcttggtactgcacaatcagcctatgaaagagcagttcaatatgtcggtgaaagagagcaatttggtaaaaaattacaagaatttcaatctctccagtttaaattagctgatatgtgtactgatttagaaacatcaagattaattttaagagaagctgctacaaaagttgatgaaaatgcttctgataaaacaaaagcagcagctatggccaaaagatttgttaccgattctggtttcaatgttgttaatgaagctcttcaaattcatggcggttatggttacttaaaagattatcctttagagagaaatctcagagatttgcgtgtacatcaaatccttgaaggaactaatgaaattatgagagttataattgctagagaaatactaaaggaaaataaatga

SEQ ID NO: 218929 - DNA, 1132 bp, Unknown
  Bacterial polypeptide expressing nucleotide sequence isolated from the Sargasso Sea
atgaaactatctgaagaacaaatagctttttatgatgttgcaaaaaattttgcaattgaaaaaatggcacctcatgcagaaaaatgggatgaagaaaagatccttcctatagaaacattgcaagaattagcacaattaggttttgcgggtatttatgtttctcctgatttaggtggatcaggattatcaaggctagattcaacattaatttttgaaggccttagtcagggttgcacatccacagccgcatttttatctatacataatatggcaacatggatgatagataattttggaagtcaggagctaaaagaacgttttgttcctgatctttgttctatgaaaaaaataagttcatattgcttaactgaaccaggcgcaggatcagatgccggtggtttaagaacaaaagcagaaaaatctggcgaccattatattttgaatggaactaaatcatttatttctggcggaggcttttctgatgtatatgttacaatggttaaaaccgatgaaaactctatctcgacccttgttatagaaaaagatagtgaaggcctttcatttggtggacaagaaaagaagatgggctggaattctcaacccacagctcaagtaatttttgaagattgtaaagttcctgtggaaaatctaattggacaagaaggtgatggttttaaaattgcaatgatgggattagatggaggcagacttaatattgctgcctgctctcttggtacagcacaatcagcatatgaaagagctgttcaatatgttggtgaaagagaacaatttggaaaaaaattacaagaatttcaagctctccaatttaaactagcagatatgtgtactgaattagaagcctcaagattgatcctaagggaagctgcaataaaagttgatgataatacatcggataaaacaaaagccgcagctatggcaaaaagatttgttactgatgcaggctttaacattgtgaatgaagcattacaaattcatggaggttacggttatttgaaagattatcctctggaaagaaatcttagggatttaagagtacatcaaattcttgaaggaactaatgagatcatgagagtcatcatagctagagaaatactcaaggaaaataaatgag

SEQ ID NO: 218930 - DNA, 418 bp, Unknown
  Bacterial polypeptide expressing nucleotide sequence isolated from the Sargasso Sea
tatgaattcttacaaaattatcgatcatgaatatgatgtgctagtcttaggagcaggtggttctggtttaagagctgcagttggtctaagtgaggcgggattaaaaacagcttgtatttcaaaagtttttccaactagaagtcacacctccgcagcacaaggcggtatttctgctgctttaggaaatatgggcgaggatgattggcgttggcatatgtacgatacagttaaaggagctgattggttaggcgatcaggatagcattgagtatctatgtaaggaggcaccaaaggcagttattgagctagaaaaatacggtgttccatttagcagaactgaagatggaaaaatttatcaaagaccatttggtggtatgactaaaaattatggcaacggaatttgcaaagaactgcgcagc

SEQ ID NO: 218931 - DNA, 339 bp, Unknown
  Bacterial polypeptide expressing nucleotide sequence isolated from the Sargasso Sea
ttcgaaaatgggcgaatttatcaaagaccttttggtggccaatctaaagaatttggtgaaggagggcaagcagcacgaacatgtgcagccgccgatagaacaggacatgctcttttgcatactctttatcaagctaacttgaaagaaggcacaaaatttttaaatgaatggtttgcagtagatctagtaaaagatgctaaagggaatgtgaatggtgttagttgttttgacatggagacgggcgaaatttctatattgaaagcaaatgcagtcgtcctcgcaacaggcggtgctggtcaagtttatgaacaaaaatactacatctttgatatgtacagg

SEQ ID NO: 218932 - DNA, 638 bp, Unknown
  Bacterial polypeptide expressing nucleotide sequence isolated from the Sargasso Sea
cgtcggtctgcacggcgcgaaccgtctgggttccaactccctgtccgagatcgtggtattcggcaaggtagccggtgagcacgccggtgagtttgccaagacccagcaacacggcaacacccaggcgctggccgccaaggccgaggcgctgctcaagcagcacctctccctgctcgatatcgacggcaccgaaaacccggccgatatccgcaacgagttgggcatgtccatggaagccggggtcggtatctaccgtaccgaagagctgatgcagggcaccatcgacaagatcaacgagctgaaagcccgttacaagaagatcaagatcaacgacaagtcctcggtcttcaataccgacctgctgtacgccatcgaactgggctacatgctggacgtggccgaagccatggcgcactccgccctcaaccggaaagagtcccgcggttcccaccagcgtctggacggttacgaagagcgtgatgacgtgaacttcctcaagcacactctctccttctacaacggcgaaggggccccgaccatcgattactccgatgtgaagatcactaaatcccaaccggcgaaacgcgtatacggttccgagggtgagaaacaagacgaggctaagaagaatggctgag

SEQ ID NO: 218933 - DNA, 607 bp, Unknown
  Bacterial polypeptide expressing nucleotide sequence isolated from the Sargasso Sea
tgtttctgttccggagcaaatagacttggttctaattctttaattgatttagtagtatttggaagagcagcagctaaaagagcagctgaattagttaagccaggaacaccccatgaagaaattcctgattcagaaacacaaaaatgtttagatagatttgataaacttagaaatgcgcaaggagataatagtactgcagagcttagactttcaatgcaaaaaacgatgcagtccaaatgtgcagtttttagaacagaaaaaaatcttaaagaaggtgtagatgagattaaaaaaacctatgatggtattgactcaatttcagttaaagataggtctttagtatttaatactgatttagttgaaacattggaatttgataatttaataagacaagcagtaactactgtagaatcagcatatcatagaaaagagagcagaggtgcccacgcgagagatgattttccaaaaagagatgacgaaaattttatgcaacatactcttgcttggtgtgatgggaaaaatacaaagataagttacagagaagtacacaaatcaactttaacaaacgaagttcaatattttccaccacaagagcgagtatattaat

SEQ ID NO: 218934 - DNA, 549 bp, Unknown
  Bacterial polypeptide expressing nucleotide sequence isolated from the Sargasso Sea
catgaaagcatataatattatagaccatgagtacgatgttgttgtacttggagcaggtggatcaggtttaagagcggcagtagggcttagcgaagctggtttaaaaacagcttgtatctcaaaagtatttccaaccagaagccatacatcagctgcgcaaggtggaatatcagcagcacttggaaacatgggagaagatgattggagatggcacatgtatgacactgtcaaaggtgcagattggttaggtgatcaagatagtattgaatatctatgtaaagaagcacctaaagcagttttagaattagagaagtacggagttccatttagtagaactgaagagggaaaaatttatcaaagaccatttggtggaatgacaaaaaattatgggaatggaatagttcaaagaacttgtgcagcagccgatagaacaggacatgctattttacacacattgtatggacaagcgttaaagcataatacagaattttttatagaatattttgcactagatttgttgatgaagaatggagaatgtaaaggtctaat

SEQ ID NO: 218935 - DNA, 586 bp, Unknown
  Bacterial polypeptide expressing nucleotide sequence isolated from the Sargasso Sea
atgagttcatataaaataattgatcacgaatacgatgtagttgttttaggtgctggaggctcaggtttaagagctgcagttggcttaagcgaagcaggattaaaaactgcgtgtatttcgaaagtatttccaacgagaagtcatacctctgcagctcaaggaggaatctcagccgctcttggaaacatgggtgaggatgattggcgatggcacatgtacgatactgtaaaaggtgcagactggttaggtgatcaagacagcattgagtatctttgtaaagaagctcctaaggctgtaattgaattagaaaaatatggtgttccttttagcagaacagaagatggaaaaatttatcagagacctttcggaggaatgacaaaaaattatggaaatggaatagttcagagaacttgtgcagcagcagataggactggtcatgcgatcttacatacgctctacggtcaagctttgaagcacagaaatgaattttttattgaatactttgctctagatcttttaatgaaaggtggcgagtgcaaaggtttaatcgcttggaatttaaacgatggaacccaatacatagatt

SEQ ID NO: 218936 - DNA, 412 bp, Unknown
  Bacterial polypeptide expressing nucleotide sequence isolated from the Sargasso Sea
tatgagttcttacaaaattatagatcatgaatatgacgtagttgttcttggtgcgggaggcgcaggtttaagagcagcagttggtctgagtgaagcaggattaaaaactgcatgcatatctaaggtttttccaactcgtagccacacttcagcagctcaaggaggcatttcagcagctttaggtaacatgggagaagatgattggaggtggcacatgtatgatactgttaaaggagcagactggttaggtgatcaagactgcatagaatatttgtgcaaagaagctccaagagctgttttagaattagaaaaatatggagttccatttagtcgtacagatgatggaaaaatttatcaaagaccttttggtggaatgactaaaaattatggcaatgaaacttacaaagaactg

SEQ ID NO: 218937 - DNA, 412 bp, Unknown
  Bacterial polypeptide expressing nucleotide sequence isolated from the Sargasso Sea
atgacaagttcttatgaaattattgatcatcaatatgatgtaattgttattggtgctggtggatcaggtttacgcgccacattaggtgttgctgaagcagggcttaaaacagcttgtatttctaaagtttttccaactagaagccatacagttgcagctcaaggtgggattggtgccgcacttgggaacatgggtcaagatgattggaaatggcacatgtatgatacagtaaaaggttctgattggttaggtgatcaagatgcaatcgaatatttatgttcaaaagcaagcgaagctgtaatggaattagatcaatatggtatgccatttagtcgtacggaagatggtaaaatttatcaacgtccgtttggaggacatttaacaaaaaatggtgaaggtgcaccagcaatgc

SEQ ID NO: 218938 - DNA, 511 bp, Unknown
  Bacterial polypeptide expressing nucleotide sequence isolated from the Sargasso Sea
atgagttcttataaaatagtcaatcatgagtatgacgttgtcgttttaggtgcgggtgggtctggacttagagctgctgtaggtttaagtgaagcaggattaaaaactgcatgtatttcaaaagtgtttcctaccagaagtcatacttctgcagcgcaaggaggaatatcagctgctcttggtaacatgggagaagatgattggcgttggcatatgtatgacacagtcaaaggtgcagattggttaggcgatcaagacagtatcgagtacttatgtaaagaagcaccaaaggcagtaattgaattagaaaaatacggtgtaccgtttagcagaacggaggatggaaaaatttatcagagaccatttggtggaatgacaaaagattacggaaatggaatcgtccagagaacttgtgcggctgcagatagaacaggacatgcaattttgcatactctctatggacaagctttaaaacacaaaacagaattttttattgaatatttcgcactag

SEQ ID NO: 218939 - DNA, 421 bp, Unknown
  Bacterial polypeptide expressing nucleotide sequence isolated from the Sargasso Sea
ttgattaataaagatggcgaaagattcatggaaagatatgctccaaatgtaaaagacttagctggtcgagatgtcgtcgctcgttcaatggtattagaaattctagaaggtagaggttgtggagataaaagtgatcatatttatcttaagcttgatcatttaggtgctgaagttttaaattctaagcttccaggtatatgtgaattgtctaggacttttgcacatgttgaccctatttatgaaccaattccagttgtgcctacttgccattatatgatgggtggtacacccacaaacatttctggacaagcattcacaagaattaatgatgaggatcatttaatacctggattattttctgctggcgaggctgcttgtgtttctgttcacggagctaatagattgggtggaaactcgcttc

SEQ ID NO: 218940 - DNA, 943 bp, Unknown
  Bacterial polypeptide expressing nucleotide sequence isolated from the Sargasso Sea
cttggagatcaagatagcattgagtatttatgcgcaaatgctgttgactcaattgttgaattggagcattacggtatgccgttttctagaactgaggaaggcaagatatatcaaagaccttttggtgggcacatgacaaaaaatggtaagggtgaacccgcaagtcgagcttgcgctgcagctgatagaacaggacatgcattacttcacaccttatatcagcaaagtcttaaaaataatgttgatttttttaatgaatactttgccattgatttacttaaagacgataatgaagcaatttgtggactcttagcaatcaatattgaagatggttcattacatcgttttattgcaaaaatgacaattttagctaccggtggttatggaagaatatttcaatcctccacaagcgctcatatctgtactggtgatggtgcaggaatcgcgcttagggcaggacttcctttgtctgatatggagtttattcagtttcatcccactggaatatatggtgtgggtgttttaatatcagaggcagctaggggtgagggcggtattttaaaaaataatgagggtacaagatttatgcttgaatatgccccaaatgccaaagaccttgcagctagagatgttatttcaagatttataagtaaggagatcagtgctggcagaggatgtggtcctaataaagattatataaatcttcatttagagcaccttgatgctgatatgcttgctaaaagattacctggtatctctgagtcagttaaagcattttgtggaagagatatttctaaagagccaattcctgttattccaactgttcattattgtatgggaggaatcccaactaatttcaaagcagaagttttgaaacctaatgactctaatactgaagaagtatgtgagggattaatggcaataggtgaagcagcatgtgcat

SEQ ID NO: 218941 - DNA, 679 bp, Unknown
  Bacterial polypeptide expressing nucleotide sequence isolated from the Sargasso Sea
atgagttcttacgaaataatagatcacgagtatgatgtagtagttttaggagctggaggctcagggttaagagctgcagtgggcttaagtgaagctggattaaaaactgcttgtatatcaaaagtttttcctactagaagccatacttcagctgctcaaggaggaatttcagctgcacttggtaatatgggtgaggatgattggcgttggcatatgtatgatacagttaaaggagcagattggttaggagatcaagatagcatcgaatatctttgtaaagaagcgccgaaagcagttattgaattagaaaaatatggtgttccttttagtagaactgaagatggaaaaatttatcaaagaccttttggtgggatgacaaaaaattatggtaatggcactgttcaaagaacttgtgcagctgctgatagaactggtcatgcaattttacatactctttatggacaagctttgaaacataatactaaattttttatagaatactttgcactagatttaattatgaaaaatggtgagtgcaaaggtttaatagcttggaaccttaatgatggcaccattcatagatttagatctcatattacgataattgcaactggcggttacggtaagatttattattctgctacttcagctcatacatgtaccggcgaggaaatgcaat

SEQ ID NO: 218942 - DNA, 464 bp, Unknown
  Bacterial polypeptide expressing nucleotide sequence isolated from the Sargasso Sea
tatgagttcatataaaataatagatcatgaatatgacgttgtagttctaggtgctggtggttctggtttaagagccgctgttggtttaagtgagtcaggattaaaaactgcatgtatttcaaaagtattcccaacaagaagtcatacttctgctgcgcaaggtggaatttcagctgcacttggaaacatgggtgaagacgattggcgttggcatatgtatgatactgtaaaaggagcagattggttaggagaccaagatagcattgagtatctttgcaaagaagctcctaaggcagttattgaattagaaaaatatggtgtcccatttagtagaacagaggatggcaaaatttatcaaagaccttttggaggaatgaccaaaaattatggaaatggaatagttcaaagaacatgtgctgcagctgatcgaacaggacacgcaattttgcacactctatatggtc

SEQ ID NO: 218943 - DNA, 99 bp, Unknown
  Bacterial polypeptide expressing nucleotide sequence isolated from the Sargasso Sea
gtgtgtcagttcacggagctaacagacttggatcaaattctttaattgatttagtagtttttgaagagctgctgcaaaacgagcggcggaattggtaaa

SEQ ID NO: 218944 - DNA, 526 bp, Unknown
  Bacterial polypeptide expressing nucleotide sequence isolated from the Sargasso Sea
actacaaatgctttgattaacacaggtgatggattgggaatgtcattaagagcaggttttccagctcaagacatggagatgtggcaattccatccaacaggcattcatggtgcaggctctctcgtcacagagggttgcagaggagagggtggctatctaataaatgctgacggagaaagattcatggaaagatatgctccaaatgcaaaagatctagcaggtcgagatgttgttgctcgatcgatggtgctggaaatacttgaaggcaggggatgcggtcccaataaagatcatgtcttgttaaaactggatcatttaggtgaggaggttttaaatgcgaagcttccaggtatttgtgaactctcaaaaacatttgctggagtagatcctgtcttcaaacccattccagttgtgccaacttgtcactatatgatgggaggaaccccaacaaatattcatggtcaagcattcacatctgaaaatgaaattgataatgaggttcctggtttattctcagtcggcgaag

SEQ ID NO: 218945 - DNA, 379 bp, Unknown
  Bacterial polypeptide expressing nucleotide sequence isolated from the Sargasso Sea
atgaattcatataatatcatagatcacgaatacgatgtagtagttctaggtgctggaggatcaggattacgagctgctgtggggctgagtgaagctggtttgaaaactgcctgtatttctaaagtttttccaactagaagtcacacttcagctgcccaaggtggcatttcagctgcccttggaaatatgggtgaagatgattggagatggcatatgtacgatacagtcaagggagctgattggctgggtgatcaagatagcatcgaatatttatgtaaggaagctccaaaagcagttttagagctagaaaaatatggagttccgtttagtagaacagatgaaggaaaaatatatcaaagaccatttggaggtatgacta

SEQ ID NO: 218946 - DNA, 520 bp, Unknown
  Bacterial polypeptide expressing nucleotide sequence isolated from the Sargasso Sea
aatgaattcatatgaatatgttgatcatacttacgatgtagtagtagttggggcaggaggctctggattaagagctactttaggaatggcagaacaaggtttcaaaactgcttgtataagcaaggtttttccaactagaagtcataccgtagctgcacagggaggtattgctgcatctctatcaaatatgggaccagatcactggcattggcacatgtacgatactgtaaaaggttcagattggttaggtgacgttgatgcaatggaatatttagctcgagaagccccaaaagcagtttatgaattagagcattatggagtacctttttccagaacagaagaaggtaaaatttatcaaagaccttttgggggacacacaactgaatttggtgaaggtccaccagttcaaagaacatgtgctgcagcggatagaacaggtcatgctattttgcatactttatatggtcaatcattaaaaataacgcagagttttttattgagtattttgctattgatttaa

SEQ ID NO: 218947 - DNA, 463 bp, Unknown
  Bacterial polypeptide expressing nucleotide sequence isolated from the Sargasso Sea
atgagttcatacaatattatagatcacgaatatgacgttgtagtcttaggtgctggtggatcaggactgagagctgccgttggtttgagtgaagcaggattaaaaaccgcatgtatctcaaaagtattcccaaccagaagtcatacgtctgctgcccaaggtgggatatctgctgcgcttggaaacatgggtgaagatgactggagatggcatatgtatgataccgttaagggagctgactggttaggagatcaagatagcatcgagtatttatgtaaagaagcgccaaaagcagtcttagaattagaaaaatatggagttccatttagtcgaacagatgaaggaaaaatttatcaaagaccatttggaggaatgacaaaaaattatggaaatggagtagtccaaaggacatgtgcagccgcagatagaactggacatgctatactacacactctttatgggc

SEQ ID NO: 218948 - DNA, 430 bp, Unknown
  Bacterial polypeptide expressing nucleotide sequence isolated from the Sargasso Sea
atgaattcttataaaattgtagatcatgaatatgatgtggtagttctgggtgccggtggctcaggtttaagagctgcggttggcttgagtgaggcaggactaaaaacagcatgtatttcaaaagtttttcctacaagaagtcatacttctgctgcacaaggaggtatttcagcggcccttggtaacatgggtgaagatgattggcgttggcacatgtatgacacagtgaagggtgcagattggttaggagatcaggacagtatcgagtatctctgcaaagaagcacctaaagcagttattgaattagaaaaatatggtgtgccattcagtagaacagacgacggaaaaatttatcaaagaccatttggtggtatgactaaaaattatggtaatgggattgtacaaagaacttgtgccgctgctgattgaa

SEQ ID NO: 218949 - DNA, 742 bp, Unknown
  Bacterial polypeptide expressing nucleotide sequence isolated from the Sargasso Sea
atgagtgcttacaatattatagatcatgaatatgacgcagttgttctcggagcaggaggatcaggcctaagagctgcagttggattgagtgaagcaggtttaaaaaccgcttgtatctcaaaagtttttcctactagaagtcatacgtcggctgctcaaggtggtatttcagccgctttgggaaatatgggtgaggatgactggagatggcatatgtacgatacggttaaaggtgccgattggcttggggatcaggatagtattgagtatttatgcaaagaagcaccaaaggctgttctagagttagagaaatatggagtacctttcagtagaactgaagagggaaaaatatatcaaagaccatttggtggaatgacaaaaaattatggaaatggaattgttcaaagaacttgtgcagcagcagatagaacaggacatgcaattttacacactctttatggacaggccctcaaacataatacagaattttttatagagtattttgctttagatttattaatgaaagatggagaatgcaaaggattaatagcttggaatttaaatgacggaacaatccataggtttagagcacatacggtaattattgcaacaggtggatatggtaaagtatattattctgcaacatccgcacatacttgtactggagatggaaatgcaatggtgttgagagcaaggtttacctttacaagacatggaatttgttcaattctcccacaggaat

SEQ ID NO: 218950 - DNA, 394 bp, Unknown
  Bacterial polypeptide expressing nucleotide sequence isolated from the Sargasso Sea
aatgagtgcttataaaattattgaccacgaatatgatgttgtagttcttggagctggtggatcaggcttaagagctgcggtaggtttatctgaagcaggattaaaaaccgcgtgtatttcaaaagtttttccaaccagaagtcatacttcagcagctcaaggtggaatttcagctgcactgggaaatatgggtgaagatgattggaggtggcatatgtatgacactgttaaaggttcagattggttaggggatcaagatgcaattgaatatctttgtaaagaagcgcctaaagccgtcaaagagttagacaagtatggagtgccgtttagtagaactaaagaaggaaaaatataccaacgaccttttggaggtatgactaaaaattatggaaat

SEQ ID NO: 218951 - DNA, 563 bp, Unknown
  Bacterial polypeptide expressing nucleotide sequence isolated from the Sargasso Sea
aatggaaattggtggaataactgtatcggaaaaaatctttgatgttgcaatcattggtggaggaggctctggacttagagcttctttagagatatcaaagtcaggattagatgttgcagtcgtttcaaaagtatttccaaccagatcccatactgtcgcggcccagggaggcataacatgtgcaatagcaagtgctgatcctaatgacgattggagatggcatatgtttgatactgttaaaggttctgattacattggcgatcaaaatgcaattgaatatatgtgttccgaaggtccagatgcaatttttgaattagagcatatgggattaccattttctcgttttgaaaatggtcgaatatatcaaaggccgtttggaggccaatcaaaagagtttggcgaaggaggtcaagcagcaagaacatgtgcggctgctgatagaaccggtcatgctcttttgcatactttgtatcaagcaaatcttaaagcaggaactaaatttttaaatgagtggttcgcaatagaccttattaaaaatgacgaaggcgcaataagaggcttaa

SEQ ID NO: 218952 - DNA, 431 bp, Unknown
  Bacterial polypeptide expressing nucleotide sequence isolated from the Sargasso Sea
aatgagtgcatataaaattatagaccatgagtatgatgttgtagtcttaggcgcgggcgggtctggacttagggcagctgttggcttatccgaagctggactaaaaacagcatgcatctcaaaagtttttccaacacgaagccatacttctgctgctcagggaggaatctcagcagctctaggaaatatgggcgaggacgattggagatggcatatgtacgataccgtcaaaggatcagactggttaggagatcaagatgcaattgagtatttatgtaaagaggcacctagagcagttgtagagctagaaagatacggtgttcctttcagcagaacagatgatggaaaaatttatcaaagaccttttggaggtatgacgaaaaattatggaaatggaactgcacaaagaacttgtgctgctgcagatagaa

SEQ ID NO: 218953 - DNA, 481 bp, Unknown
  Bacterial polypeptide expressing nucleotide sequence isolated from the Sargasso Sea
atgagttcatataaaattatagatcacgaatatgatgtagtagtgcttggcgcaggtggttcaggtttaagagcagctgttggattaagtgaagctgggttaaaaactgcatgtatttcaaaagtttttcctacaaggagtcatacttctgcagcccaagggggtatttcagctgccctgggcaatatgggtgaagatgactggcgatggcatatgtatgatactgttaaaggttctgattggctaggtgatcaagattcaattgaatatttatgtaaagaggctcctagagctgttctcgaattagaaaaatatggtgttccttttagtagaactgaagatggtaaaatttaccaacgaccttttggaggtatgactaaaaattatggcaatgaaccagtacaaagaacttgtgctgctgcagatagaacgggtcatgcaattcttcatacactttatggacaagctcttaaacataaaa

SEQ ID NO: 218954 - DNA, 514 bp, Unknown
  Bacterial polypeptide expressing nucleotide sequence isolated from the Sargasso Sea
atgtcctcatacgaaattactgatcaccattatgatgttgtcgttgttggtgcaggtggcgccgggttgcgagcgacgctaggtatggccgcatctgggctgaaaacggcctgtatcaccaaggtgtttccgacccgctctcatacggttgccgcacagggcggcatcggcgcggcgctcaacaatatgggcgagggcgacaactggcagtatcatatgtatgatacggttaaggggtcggactggctcggcgatcaggacgccatcgaatatatgtgccgtaacgcgatcccatcggtaatcgagctggagaattatggtgtgccgttctcgcgtaccgacgagggcaagatctatcagcggccctttggtggccatacgcttgattacggcaagtctatggcacggcgtgcctgtgctgcggctgatcggaccgggcatgccattttgcatacgctctatcagcaatgtctgaagcatcaggcgcatttccatatagaatattttgttcttg

SEQ ID NO: 218955 - DNA, 499 bp, Unknown
  Bacterial polypeptide expressing nucleotide sequence isolated from the Sargasso Sea
atgacatcctatgaaataatcgatcatacctatgacgtagttgttgtcggggccggaggagctggactacgcgcaacacttggcatgaccacagaaggactgaaaactgcctgtattacgaaagtttttccaactcgcagtcacactgttgcggctcagggtggagttggggcagctttagataatatgggcgagggcgacaactggcagtttcacatgtatgatactgtcaaaggctcagactggcttggagaccaagatgctatagagtatatgtgcagaaacgcaatccctgcagtcattgagctcgaacactacggtgttccgttctcccgcactgaagagggaaaaatatatcagcgccctttcggcggacacaccttggataatggtaagcggatggccaagcgggcgtgcgcggcggcagatagaacaggtcacgccatcctgcacacgctatatcaacaatgcctggctaataatgccgaattttttatcg

SEQ ID NO: 218956 - DNA, 724 bp, Unknown
  Bacterial polypeptide expressing nucleotide sequence isolated from the Sargasso Sea
ttgtcgcgttgcgaaataacaaaaatctggaggaatgtcgtgcaaacttttcaagccgatcttgccgtaataggcgctggcggggctggattacgtgctgcgattgctgcagcacaagctaatcccaacgctaaaatcgcattgatttcaaaagtctatccaatgcgtagtcacacagtggcagcagaaggagggtccgccgccgttgcgcaggatcatgacagctttgaataccatttccacgacacggttgcagggggcgactggctttgcgaacaggatgtcgttgactactttgtgcaccattgtcccacggaaatgacccagcttgaacagtggggatgtccgtggagccgccgtccggacggcagcgtcaacgttcgccgctttggcggtatgaagattgaacgcacctggttcgccgccgataaaaccggcttccacatgctgcacaccctgttccagacctccctccagttcccacaaattcagcgcttcgatgaacatttcgtcctcgacattctggttgatgacgggcaggcgcgtggcctggtggcgatgaacatgatggaaggcacgctcgtccagatccgcgccaacgccgtagtgatggcgacgggcggtgcgggtcgcgtttatcgctacaacaccaacggcggcatcgtcaccggtgacggcatgggcatggcgatcggccacggcgtaccgctgcgcgatatggagt

SEQ ID NO: 218957 - DNA, 593 bp, Unknown
  Bacterial polypeptide expressing nucleotide sequence isolated from the Sargasso Sea
aatggaaattggtggaataactgtatcagaaaaaatctttgatgtggcaatcataggcggcggcggctcaggtcttagagcttctttagagatatcaaaatcaggattagatgttgcggtggtctcaaaagtatttccaactcgatctcacactgtcgcggcacaaggtggcattacttgtgcaatagcaagcgctgatcctaatgatgattggagatggcacatgtttgatacagttaaaggttctgattacattggtgaccaaaatgcaattgaatatatgtgttccgagggtccagatgcaatttttgaattagaacacatgggattgccattttctcgctttgaaaatggtcgaatatatcaaaggccgttcggaggtcagtcaaaagagtttggagagggaggccaagcagcaagaacatgtgcggctgccgacagaactggccatgctcttttacatactttatatcaggcaaaccttaaagcaggaactaaatttttaaatgagtggtttgcaatagatcttattaaaaatgacgaaggggcaataagaggcttaagttgtttcgacatggaaactggtgaagttt

SEQ ID NO: 218958 - DNA, 106 bp, Unknown
  Bacterial polypeptide expressing nucleotide sequence isolated from the Sargasso Sea
gtttcagttcatggtgctaacagacttggttcaaactctttaattgatttagtagtttttggaagagcagcagcaaaaagagctgcagaacttattaaaccaggaa

SEQ ID NO: 218959 - DNA, 499 bp, Unknown
  Bacterial polypeptide expressing nucleotide sequence isolated from the Sargasso Sea
aatgactgcttataaaattatagatcacgaatatgatgtagttgttcttggagctggcggttcaggtctaagagcggctgtgggcttaagtgaagctggtcttaaaacagcatgtatctcgaaagtttttccaactagaagtcatacttcagctgctcaaggtggtatttcagctgcacttggaaatatgggagaggatgactggcgttggcatatgtatgatactgtcaaaggtgcagattggctaggtgatcaagacagtattgagtatctgtgcaaagaggctccaaaggcagttattgaattagaaaagtatggtgtcccatttagcagaacagaagatggaaaaatttatcaaagaccgttcggaggaatgactaaaaattatggtaatggaatagttcaaagaacttgtgcagcagcagatagaacaggtcatgcaattttacatactctttatgggcaagcacttaaacataatacagaatttttttattga

SEQ ID NO: 218960 - DNA, 671 bp, Unknown
  Bacterial polypeptide expressing nucleotide sequence isolated from the Sargasso Sea
tatgaaatcttataaaattattgaccatgaatatgacgtagttgtacttggcgcgggtggctcaggtttgagagcagctgtaggtttaagtgaagcaggattaaaaacagcgtgtgtgtcaaaagtttttccaactagaagtcatacttctgctgctcaaggtggaatctctgcagccttgggtaacatgggtgaagatgattggagatggcatatgtacgatacagttaaaggtgctgattggttaggtgatcaagattgtatagaatatttatgcaaagaagcccctagagcagttttagaattagaaaaatatggtgtacccttcagcagaactgaagatggaaaaatatatcagcgtccatttggaggaatgacaaaaaattatggtaatgaacctgttcaaagaacgtgtgcagcagcagatagaactggacatgcaatactgcacactttatatggccaggccttaaaacataaaacagaattttttatcgagtattttgctttggatcttttaatgaaagatggccagtgcaaaggtttaattgcttggaatttaaatgacggaactatacatagattcagatcacacattacaataattgcaacaggtggttatggaaaagtttattactctgccacatcagcacatacttgtacaggagacg

SEQ ID NO: 218961 - DNA, 479 bp, Unknown
  Bacterial polypeptide expressing nucleotide sequence isolated from the Sargasso Sea
tatgaaaagctataaaataattgaacatgaatatgatgtagtagttcttggagctggaggatcaggtctaagagcagcagttggtttatcagaagcaggtttaaaaactgcttgtatttcaaaggtgtttcctactagaagccatacatcagcagcgcaaggtggaatctcagctgctttaggtaatatgggtgaagatgattggagatggcacatgtacgataccgttaaaggttcagattggcttggagaccaagatgctattgaatatctttgtaaagaggctcctaaggcagttaaagaactagataaatatggtgtgccttttagcagaacagaagatggaaaaatatatcaaagaccatttggaggtatgactaaaaattatggcaatggaacagttcaaagaacttgtgctgcagctgacagaactggacatgcaatccttcatactttgtacggacaagcgcttaaacata

SEQ ID NO: 218962 - DNA, 637 bp, Unknown
  Bacterial polypeptide expressing nucleotide sequence isolated from the Sargasso Sea
catgtcggcttatgaaatcaccgatcactattatgatgtcgtcgtcgtaggcgccggcggcgccggtcttcgtgccacgctcggcatggcggcaaccggcctgaaaacggcctgcatcacgaaggtctttccgacccgctcgcacaccgttgccgcgcagggcggcattggcgccgcgctcaacaacatgggcgagggcgacaactggcaatatcacatgtatgacacggtcaagggttccgactggctcggcgaccaggacgcgatcgaatatatgtgccgcaacgccatcccgtcggtgatcgaactcgagaattacggcgttccgttctcgcgcaccgaagaaggcaagatctaccagcgcccgttcggtggccacacgcttgattacggaaagtcgatggcccgccgcgcctgcgccgccgccgaccggaccggccatgccatccttcacacgctgtaccagcagtgcctgaagcatcaggcgcatttccacatcgaattctttgccctcgaccttctgatgaacggggacgacgagtgcgccggcataattgcgctgtgcatggaagacggcacgctgcatcggttctggggccagcagacggtgcttgccaccggcggttacgggcgggtc

SEQ ID NO: 218963 - DNA, 760 bp, Unknown
  Bacterial polypeptide expressing nucleotide sequence isolated from the Sargasso Sea
aagctaaacttgggtggcatccgagaaatctcaattaaattttcaggaattgatcctgccgatgaaccaattgacattagacctgtttgtcattacatgatgggtggaatacacacaaacgttgacggtgcagctgaactccaaggagtttgggctgcaggagaagctgcatgtaatagtgttcatggagcaaatcgccttggtgcaaactctacttctgaatgtattgtatggggaaaaattactggttcacttgcagttgattatattgaaaatgagcacacttctgcacaattcccaactcatctagttactgctgaagagacaagaatctttgatggaatcttccgcggacgcggtgaggtaaatccatatgaagttaaacaagaagtagcagaaactctaaacgcaaaagcctatgtttacagaaatcacaatgatttggctgaaggtctaaaaaaggtccgtgaactaaaacaaaagacttggaagcatgtggatgattcggccaaagaatacaataccaatttccaaaacgttatggagttagattccatgttccgtgtggccgaagtcgtacttttgggcgccttgaacagaaaagagtcccgtggaggtcatgcaagaactgactttccaacacgtgatgacgcaaatttccttcaccacacacttgcatattatgatccaaacgaaccaattatgaagaagcatccagttactataactaaatacaaacctgtggagagaaaatactaat

SEQ ID NO: 218964 - DNA, 418 bp, Unknown
  Bacterial polypeptide expressing nucleotide sequence isolated from the Sargasso Sea
atgacgagtacatataaaattattgatcacgaatatgatgtagtggttctaggagctggtggatcagggttaagagcagctgtaggattatctgagtctggattaaaaacggcttgtatttcaaaagtgtttcctacaagaagtcatacatcggcggctcaaggtggtatttcggcagcacttggaaacatgggagaagacgattggcgttggcacatgtatgatacagttaaaggttcagattggcttggagatcaggatgcaattgagtatttatgcaaagaggctccaagggcagtaatagaacttgaaaggtatggagttccatttagcagaactgatgatgggaaaatctatcaaagaccattcgggggaatgacaaaaaattatggaaatggaacggcgcaaagaacttgtg

SEQ ID NO: 218965 - DNA, 1012 bp, Unknown
  Bacterial polypeptide expressing nucleotide sequence isolated from the Sargasso Sea
gatgcgctcgcatacagtggcggccgaaggtggtgccgcagcggtcaccctgccggaagatagtctggaacagcattttcaggatacagtcgcaggcagcgactggctggccgatcaggatgtggtggattattttgtcagccatgcctatcaggagctggtgcagctggaacgttggggttgcccctggagccggaaggcggatggcacagtgcaagtacggcgttttggtggcatgaaaaccgaacgtacctggtttgccgctgataaaaccggctttcatattctgcataccttgtttcaaacctcgctgaagtatccgaatattcaacgctttgacgaattttttgtactggatttgctggtggctgagcagcaggtggccggagtgctggcgatgcaactgagtaccggcgagctgtttcacattcaggcgaaaagtgtggtactggccacaggcggcgctggccgggtgtttcattacaacaccaatggcggcatagtcacaggcgatggcatggcgctggcgtatcgtcatggcgtggcgctgcgcgatatggagtttgtgcagtatcacccaaccggattacccggttcgggtattttaatcaccgaagcctgtcgtggcgaaagcggcgtactgctgaataaagacggttaccgttatttgcaggattacggcttagggccagaaaccccgctgggccaaccagaaaacaaatgtatggagctgggaccacgcgataagttgtctcaggccttctggcacgaacaacaaaaaggccgcaccggcgactatcaagggcacgctgtggtttatctggatttacgccacttgggctgcgacaaactgaacgaacgtctgccttttatttgtgatctggcgaaatcttatgtcaatgttgacccgcagcatcagctgatcccaatacgcccggctgtgcattacaccatggggggcatacaaactgatgtgcagtgccataccgctattcagggcttatatgccgcg

SEQ ID NO: 218966 - DNA, 474 bp, Unknown
  Bacterial polypeptide expressing nucleotide sequence isolated from the Sargasso Sea
aatgagtgcttataaaataatagatcacgagtatgacgttgtagttcttggagctggcggctcaggattaagagcagctgtcggtttatcagaatcaggtttgaaaactgcttgtatttccaaagtctttccaacaagaagtcatacatctgcagctcaaggaggtatctctgcagctttaggtaatatgggagaagatgattggagatggcacatgtatgataccgttaaagggtctgactggctaggtgatcaagatgctattgaatatttatgcaaagaagcgcctagagctgtcgttgaattggagcgatatggtgttcctttcagtaggaccgatgatggtaaaatatatcaaagaccatttggaggaatgacaaaaaattatgggaatggtactgcccaaagaacttgtgcagcagcagataggacaggacatgcaattctacacactctttatggtcaagctttaaa

SEQ ID NO: 218967 - DNA, 427 bp, Unknown
  Bacterial polypeptide expressing nucleotide sequence isolated from the Sargasso Sea
atggagtttgatggaattattgtgggcggaggaggagctggcatgagggcttcactacaattggctgagtcaggcttaaatactgcagtcatatctaaagtttttccaacaagatctcatacggtctcagctcaaggaggcattacgtgtgctattcaaagtgatgaccctgatgatgattggagatggcacatgtttgataccgtaaaaggatcagattatataggagatcaagaagccattgagtacatgtgcagtgaaggaccaaaagctgtatttgaacttgaacatatgggattaccgttttctagaacagaggaaggaaggatttatcagagaccttttggaggacaatcaaaagattatggcaagggaggtcaagcaacaaggacttgcgcagctgcagacagaacaggacatagtttat

SEQ ID NO: 218968 - DNA, 787 bp, Unknown
  Bacterial polypeptide expressing nucleotide sequence isolated from the Sargasso Sea
tatgagtaaagcgtataatattgttgatcatcactacgatgttattgttgtaggagcaggaggatcaggcttaagagctacactaggagtagctgaatcaggttataaaacagcttgtatatctaaagtatttccaactcgaagtcatactgtagcggcacaaggtggaattggggcagcgttaggtaatatgggcgaagataactggaaatggcatatgtatgatacagttaaaggatccgattggttaggtgatcaagatgctattgaatttctttgttccaaagccccagaagcagtatttgaattagaagaatatggtatgccttttagtagaacagaagatggcaaaatatatcagcgtccatttggaggtcatttaacaaataatggtgaaggatctcctgctatgagagcttgtgctgcagctgatagaactggtcatgccatgttgcatactttgtatcaacagtgtttaaaaaataaagtggagttttatatcgagtattttgtattagatttgttaatggatgatgacggaaactgcaaaggggttttagcttggtgtttagaagatggaactatgcatagatttttatctcatcaaactattttagctactggaggttttggtagagcctatttttcatcaactagcgctcatatttgtactggagatggaagtgctatggttctccgtcaagatttaccgttatcggatatggagtttattcaatttcatccaactggagtatatggcgcaggggtattattaacagaaggtgct

SEQ ID NO: 218969 - DNA, 568 bp, Unknown
  Bacterial polypeptide expressing nucleotide sequence isolated from the Sargasso Sea
tatgagtgcgtacaaaattattgatcatgaatatgatgtagttgttttaggtgcaggtggatctggactaagagcagctgttggtctaagtgaggccggtctaaaaacggcatgtgtatcaaaagtattcccaacaagaagtcatacatctgcagcccaaggtggtatttctgcagcacttggaaatatgggagaagatgactggagatggcacatgtatgacacagtcaaaggtgctgattggttaggagatcaggattctatcgaatatttatgtaaagaagcaccagctgctgttcttgaattagaaaagtatggtgttccatttagtcgaactgaggaaggaaaaatttatcaaagaccttttgggggtatgacaaaaaactatggaaatgaaacagttcaaagaacatgtgcagcagcagacagaactggacatgcaatacttcacacattgtatggacaagctttaaagcacaataccgaatttttcattgaatactttgcgctagatctaataatgaaagatggagcatgcaaaggtataattgctttggaacctcaatga

SEQ ID NO: 218970 - DNA, 412 bp, Unknown
  Bacterial polypeptide expressing nucleotide sequence isolated from the Sargasso Sea
tatgagttcttacaaaataatcaatcatgaatacgatgtggtagtcttgggagcaggtggttctggtctaagggccgcggttggtttaagtgaggctggtttaaaaacagcttgtatttcaaaagtctttccaactagaagtcacacctctgcagcgcaaggtggtatttccgctgctttaggaaatatgggtgaggatgattggcgttggcatatgtacgacacagttaaaggagctgattggttaggtgatcaggatagtattgaatatctctgtaaggaggcaccaaaggctgtaatagagctagaaaaatatggtgttccatttagcagaactgaagatggaaaaatttatcaaagaccatttggtggtatgaccaaaaaattacggcaatggaattgtacaaagaac

SEQ ID NO: 218971 - DNA, 616 bp, Unknown
  Bacterial polypeptide expressing nucleotide sequence isolated from the Sargasso Sea
cagcttgtgtatcagtacatgggtgctaatagattaggatcaaattcattaattgaccttgtggtatttggaagagcagcagctaaaagagcagctgaactcgtaaaacctggaatggcccatgaagaagtatctagttcagaaacagataaatgtttagataggtttgataaaattagaaactcttcgggaactactaagacagcagagttgagattaaatatgcaaaaaacaatgcaatcaaaatgtgctgtgtttagaactgaaaagacacttaaagaaggtgttgatcaaatacgaaaaccttttgatggaatgaaagatatttcagttaaagataaatctctccttttcaatacagaattagttgaaactctggagtttgataatttaattagacaagcattgactactatggactcagcttatagtagaaaagaaagtagaggcgcacatgcaagagaggattatagtaagagagatgataaaaactttatgaagcacactttggcgtggcaaaatgataaaaaagtggaaataaaatatagagatgttcactcaagaacattaactaatgatgttcaatacttcccaccaaaggaaagagtttattaag

SEQ ID NO: 218972 - DNA, 535 bp, Unknown
  Bacterial polypeptide expressing nucleotide sequence isolated from the Sargasso Sea
atgagtgcttataaaattatagatcacgaatatgacgttgtagtattaggtgccggaggatcaggcctaagggctgctgttggcttgagtgaggtaggtttaaaaactgcatgtatctcaaaagtttttccaacaagaagccatacatctgcagctcaaggaggtatttcagctgcccttggaaacatgggagaagatgattggcgatggcacatgtatgatactgtaaaaggtgcagactggttaggtgatcaagatagcattgagtatttatgtaaagaagcaccgcaagcagtaattgaactagaaaaatatggtgtgccttttagtcgaacagaggaaggaaagatttatcaaagaccatttggaggaatgacaaaaaattatggcaatgggatagttcaaagaacttgtgctgcagctgatagaacaggtcatgcaattctacacactctttatggacaagctttaaaacataatacagaatttttttatagaatattttgcattggatttattaatgaaagatggtgag

SEQ ID NO: 218973 - DNA, 724 bp, Unknown
  Bacterial polypeptide expressing nucleotide sequence isolated from the Sargasso Sea
atgaagaataagtatcaagtaatagaacatgaatacgatgttatcgtcgtcggagctggtgggtctgggctgagggcgaccttaggtatggctgcagagggtttaaagacagcgtgtataactaaagtgtttcctaccagaagccatactgttgcagctcaaggtggcatgagtgcagctctagcaaatatgggtgaggatgactggcgatggcacatgtatgacacaatcaaggggtctgactggcttggtgatcaagatgctatagaatacatgtgcaaagaagctataccgtctgtaattgaattagaacattatggggtcccattctcacgaacagagactggtaaaatttaccaaagaccgttcggcggtatgactacaaattttggtgaaggcatagctcaaagaacatgtgcggcagcagatagaactggacatgccatattacatacactatatcaacaatcattgaagtatgatgcggaattttttattgaatattttgctatagaccttttaatggaaaacggagagtgcctcggagtgatggcaattgagctcgcaactgggaagcttcatcttttcaagggtcaagtgactttattagctactggtggttacggaagagcttatttttcagctacctctgctcatacctgtactggcgatggaggtggaatggctcaaagagcaggtattccattgcaagatatggaattta

SEQ ID NO: 218974 - DNA, 535 bp, Unknown
  Bacterial polypeptide expressing nucleotide sequence isolated from the Sargasso Sea
tatgagtgcgtataaaattattgatcatgaatatgatgtagttgttctaggtgcaggtggttctggattaagagcagctgtagggttaagtgaagctggattaaaaacagcatgtgtatccaaagtattcccaacaagaagccatacctctgcagcgcaaggtggaatttcagcagcacttggtaatatgggtgaagatgactggagatggcatatgtacgatactgttaagggtgccgattggttaggggatcaagattcaatagaatacttatgtaaagaagctccagcagcagttctagaattagaaaaatatggagttccatttagtagaacagaagatggcaaaatttatcaaagaccttttggtggtatgacaaaaaactatggaaatgaaactgtacaaagaacatgtgctgcagctgatagaacaggacatgcaatactacatacactgtatggacaagccttaaagcataatacagaattttttatagaatatttcgcattagatttaataatgagagatggggca

SEQ ID NO: 218975 - DNA, 436 bp, Unknown
  Bacterial polypeptide expressing nucleotide sequence isolated from the Sargasso Sea
tatgaaatcttataatattatagatcatgaatacgatgtcgttgtccttggtgctggaggttctggcctaagagctgcggttggcttaagtgaagctggattaaaaactgcatgcatttctaaagtctttccaaccagaagtcatacatcagctgcccaaggtggaatttcagcagcccttggaaacatgggagaagacgattggcgttggcatatgtacgatactgtaaaaggagcagattggttaggcgatcaagatagtattgaatatttgtgtaaggaagctccaaaagcagtactagaattagaaaagtatggtgttccttttagtagaacagaagatggaaaaatttatcaaagaccatttggtggaatgacaaaaaattatggaaatggaattgtacaaagaacttgtgctgcagcagacagaactggt

SEQ ID NO: 218976 - DNA, 1048 bp, Unknown
  Bacterial polypeptide expressing nucleotide sequence isolated from the Sargasso Sea
ttgtatggccaagctcttaaacataataccgaattttttatagaatattttgccttagacctactaatgaaaaaaggggagtgtaaaggtttaatagcttggaatttaaatgatggaactatccatagatttaaatctcacataacaatacttgcaacaggtgggtacggaaaagtttattatacagctacatccgcacatacttgtactggtgatggtaatggaatggccttgagagcaggattgcctttacaagatatggaatttgttcagtttcatccaacaggaatctatggagtaggaactttaatatctgaaggcgtgagaggagaaggcggtttccttttaaactcaaaaggagagaggtttatggaaagatacgctccaaaggcaaaagatttagcttctagggatgtagttagtagatcaattgcagtagaaattaatgaaggaaggggtgttggaaaaaataaagattatgtaaatctgcacctagatcatttagatccgaaagttatagaggagagattgcctggaattgcagagtcagcaaaaacattttgtgaagttgatgttagaaaagatcctattccagtagttcccacagttcattacaacatgggaggaataccaacaaattataaagccgaggttttaaccatgaatggaaaagagtctacagttccgggactaatggctataggagaggctgcatgcgtttctgttcatggagcaaatagattaggatcaaattctttaatagatttagtagtctttggaaaatcagctgcaaatagagctgcagaacttattaaacctggcatacctcatgaaaccgtccctcaaagtgagacagacaaatgcttagacagatttgataaacttcgtaattcatctggttctacaaaaacttctgaacttagattgtctatgcaaagaacaatgcaatctaaatgtgcggtttttagaacagaaaaaacattaaaacaaggaatggatcaaataagagaaccctttaaaggaatgacagacatctctgtttctgata

SEQ ID NO: 218977 - DNA, 859 bp, Unknown
  Bacterial polypeptide expressing nucleotide sequence isolated from the Sargasso Sea
ccactacaagatatggagtttgttcaatttcatccaacaggaatttatggacatggtacactaataacagaaggtgcaagaggtgaaggaggatatctaacaaattctaaaggtgaaaggtttatggaaagatatgcacccaaggcaaaagatttagcatcaagagatgtcgtaagtagatcaatgtctattgaaataaacgaaggaagaggtgttggaaaagaccaagatcatgttcacttgaatttaaatcatttggataaagatataattgagagtagattgccaggaataactgatgcagcaagactatttgcaaatgtagatgttactaaagaaccaattccagttgtgcctactgttcattataacatgggaggcattcccacaaactataaggcagaagtattaacagtgaatggttcagaaaaaactgttccaggactaatggcaattggagaggcagcttgtgtttcagtccatggtgcaaatagacttggctcaaactcattaattgatctagttgttttcggaagagcagcggcaaaaagagctgcggaacttattaaaccaggaacaccacacgaggaaataagtgagacagaaactcaaaaatgtttagatcgttttgataaaatcagaaattctaacggtgaaattggaacatcagaattaagactttcaatgcagaaaacaatgcaatctaaatgtgcagtttttagaacagaaaaaacattgaaagaaggtgtcgatgaaattagagaaacatttgatggtttagatagtttatcagtaaaagataaatctttaatatttaatactgatttagttgaaactttggaatttgataatttaatta

SEQ ID NO: 218978 - DNA, 608 bp, Unknown
  Bacterial polypeptide expressing nucleotide sequence isolated from the Sargasso Sea
tatgaatacctcttataacataattgatcattattatgatgtagttgttgtaggcgcaggtggttcaggtttaagagccactcttgggtgtgctgaagctggattgaaaacagcatgtatctcgaaagtatttcctacaagaagtcatacagtagcagcgcaaggaggaatcggtgctgctcttgggaacatgggagaggataattggaagtggcatatgtatgatacagttaagggctctgattggttgggtgatcaagatgcaattgagtttttatgttcaaaagctcctgaagcagttattgaactcgaagaatatggaatgccttttagtagaactgatgatggaaaaatttatcagagaccatttggaggacacttaacaaataatggagaaggcgcacctgcaatgagagcatgtgctgctgctgatagaacaggtcatgctcttttgcatacgctatatcagcaatccttgaaaaataatgtagagttttttattgaatattttgtattagatttaatttctgatgatgatggtaattgtattggtgttgtagcttggtgtcttgaagatgttcaattcaccgttttttatctcatcagac

SEQ ID NO: 218979 - DNA, 1084 bp, Unknown
  Bacterial polypeptide expressing nucleotide sequence isolated from the Sargasso Sea
tccaacaagaagtcatactgttgcagcacaaggtggaattggagcagcactaggtaatatgggtgaagataattggaagtggcacatgtatgatacagttaagggttccgactggcttggtgatcaagatgcaattgaatacttatgttctaaagcccctgaagcagtaattgaacttgaagaatatggcatgccttttagtagaacagatgatggcaagatctatcaaagaccttttggcggacacttaaccaataatggcgagggagctcctgctatgagagcatgtgcagcagctgatagaacgggacatgctttactccatacactttatcagcaatcacttaaaaataatgtagaattttatattgaatattttgttttagatttaatttctgatgatcaaggtaattgcattggtgtggtaacatggtgcttagaggatggatcaattcatagatttttgtctcatcaaacaattctagctactggtggatatggaagagcttacttctcatccacgagtgctcacatttgtactggtgatggtagtgcaatggctttaagacaaaacctacctctttctgatatggaatttattcagttccatccaacaggagtttacggtgcaggagtgttaatcactgagggagcaagaggagaaggtggatatttaactaatagtgatggtgaaagatttatggaaagatatgctccaaatgcaaaagatctagcatcaagggatgtagtaagcagagcaatgactattgaaattagtgaaaatagaggttgtggagataatgccgatcatgtgcttcttcatcttgagcacattgatgctaatacattacataaaagattacctggtatatcagaaactgcaaaaatatttgccggagttgatctaactaaagatccaataccagttcttccaacagttcattataatatgggtggtataccgacaaattatagaacagaagttataaggccaacaaatgaaaatccagataatgtatgtgaaggtttaatggctgttggtgaggctgcatgtgtttctgtacacggtgctaatagattaaga

SEQ ID NO: 218980 - DNA, 899 bp, Unknown
  Bacterial polypeptide expressing nucleotide sequence isolated from the Sargasso Sea
caaaataatagatcatgaatatgatgttgtagttttaggagctggaggctctggattaagagccgcggttggattgagtgaggctggcttgaaaactgcttgtatttcaaaagtttttccaacaagaagccatacttcagctgcgcaaggtggaatatctgctgctttaggtaatatgggtgaagatgattggcgttggcacatgtatgatactgtaaaaggtgctgattggttgggtgatcaagatagtattgagtatctttgcaaagaagctccaaaggcagtaattgagctagaaaaatacggtgtcccttttagtagaactgaggatggcaagatatatcaaagaccatttgggggtatgacaaaaaattatggtaatggaattgttcagagaacatgtgctgctgctgataggacaggtcacgcaatcttacatacgctgtatggacaagcattaaaacataaaacagaattttttatcgagtattttgcattagatttattaatgaaggatggtgcatgtaaaggattaatcgcttggaatttaaatgatgggaccatccatagatttagggctcattcagtaattatagcaacaggaggttatggaaaggtttactattcggcaacatcagcgcacacttgtactggtgatggtaatgcaatggttttaagagcaggtttgcctttacaggatatggagtttgttcaatttcatccaacaggaatttatggtcatgggactttaataacagagggtgcacgaggtgaaggtggatacctaactaattctaaaggtgaaagatttatggaaagatatgcacctaaggctaaagatttagcatctagagatgttgtcagtagatcaatgtcaattgaaattaacgaaggcagag

SEQ ID NO: 218981 - DNA, 496 bp, Unknown
  Bacterial polypeptide expressing nucleotide sequence isolated from the Sargasso Sea
atgactaaaaattcttacaatataattgatcatcactacgatgtagtcgtagtgggtgctgggggctcaggtttaagagcgacacttggatgtgctgaatctggattgaaaactgcctgtatttcaaaagtatttccaacaagaagtcatacagttgctgcccaaggtggtattggagcagctttaggaaacatgggagaagataattggaaatggcacatgtatgatactgttaaaggctctgattggttaggtgatcaagatgctatagaatatctttgctcaaaagctcccgaagcagttattgagttagaagaatatggaatgccatttagtagaactgacgatggtaaaatttatcagagaccttttggtggacatttaacaaataatggagaaggcgctcctgcaatgagagcatgtgcagcagctgatagaacaggtcatgctcttttacacactttgtatcaacaatccttaaagaataacgttgaat

SEQ ID NO: 218982 - DNA, 619 bp, Unknown
  Bacterial polypeptide expressing nucleotide sequence isolated from the Sargasso Sea
tgaagcagcatgtgtttcagttcatggagctaacagattaggatcaaattcattaattgatttagttgtttttggaagagctgcagcaaaaagggctgcagaactagtgaaaccaggaactccacatgaagaaatctcaaattcggagactgataaatgcttagagaggtttgaaaggttaagaaatggtaatggaactaatagaactgctgatttaagattggctatgcaaaaaacaatgcagtcaaagtgtgcagtatttagaactgaaaaaactttaaaagaaggagtagaagaaataagaaaaccatttgatggaatggactcaatatcagtaaaagataaatctttaatttttaatactgatttagttgaaactttagaatttgataacttaataagacaggcgatagttacaatagattctgcttatgaaagaaaagaaagtagaggagctcatgcaagagaagatcatcctaaaagagatgataataacttcatgaaacacacattatcttggtgtaaagggagtgaaacaaaaatttcttatagagatgttcatagatcaacgttaacaaatgatgtacaatattttccacctcaagaaagagtttactaa

SEQ ID NO: 218983 - DNA, 913 bp, Unknown
  Bacterial polypeptide expressing nucleotide sequence isolated from the Sargasso Sea
gcagaaactggattgaaaacagcttgtatatcaaaagtgtttccaacaagaagtcatactgttgcagcacaaggtggaattggagcagctctaggtaatatgggtgaagataattggaagtggcacatgtatgatacagttaagggttcagactggcttggagatcaagatgcaattgaatacttatgttctaaagcccctgaagcagtaattgaacttgaagaatatggaatgccttttagtagaacagatgatggaaagatctatcaaagaccttttggcggtcacttaactaataatggcgagggtgcacctgcaatgagagcttgtgcagcagctgatagaacggggcatgctttactccatacactttatcagcaatcacttaaaaataatgtagaattttatattgaatattttgttttagatttaatttctgatgatcaaggtaattgtattggtgtggtaacatggtgcttagaagatggatcaatccatcgatttttatctcatcaaacaattcttgctactggtggatatggaagagcttatttctcatctacgagtgctcacatatgtactggtgatggtagtgcaatggctttaagacaaaacctacctctttctgatatggaatttattcagttccatccaactggagtttacggtgcaggagttttaattactgagggagcaagaggagaaggtggatatttaactaatagtgatggtgaaagatttatggaaagatatgctccaaatgcaaaagatctagcatcaagggatgtagttagccgagcaatgactattgaaattagtgaaaatagaggttgtggagaaaatgccgatcacgtgctccttcatcttgagcacattgacgctgatacattgcataaaagattaccaggtattt

SEQ ID NO: 218984 - DNA, 955 bp, Unknown
  Bacterial polypeptide expressing nucleotide sequence isolated from the Sargasso Sea
ttaccattacaggacatggaatttgtccaatttcatccaactggaatttatggagtaggaactcttatatctgaaggtgtaagaggagaaggtggttatcttttaaactccaagggtgagagatttatggaaaaatatgcacctaaagctaaagatttagcttcaagagatgttgtaagtagatcaatagcagttgagatcaatgaaggcagaggagttggtaaaaataaagattatgtcaatttacatttagaccatcttgatccaaaagttatagaggaaagattacctggaattgcagagtcagcaaaaacattttgtgaagttgacgtgagaaaagatccaataccagtagttccaactgttcattataacatgggtgggataccaactaattataaagctgaagttttaacattaaatggaaaagagtccactgtgccagggttaatggccataggagaggcagcttgtgtgtctgtccacggtgcaaatagattaggttcaaactcattaatagatttagtagttttcggaaaatctgctgcaaacagagccgcagaacttgttaaacctggaacacctcacgaagaaatacctcaaagtgaaacagataaatgtttagatagatttgataaacttcgtaacgcttcaggtgcaacaaaaacttctgaactaagattgtctatgcaaagaactatgcaatcgaaatgtgcagtttttagaaccgaaaaaacactaaaagaaggaatggatcaaatcaggaagccttttgaaggaatgtctgatatttcagtttcagacaagtctttattatttaatactgatcttgttgaaactttagaatttgataatcttataagacaggcgatgacgacaatagactcagcttatcatagaaaagagagtagaggagctcatgcaagagaagactacaaaactagagacgataaga

SEQ ID NO: 218985 - DNA, 808 bp, Unknown
  Bacterial polypeptide expressing nucleotide sequence isolated from the Sargasso Sea
tatagatgagaggcttccaggaatatcagaagcatctaaattatttgcaaacgtagatgtaaccaaggaacctataccagtagtacccacagtgcattataatatgggtggaataccaacaaattataaagcagaggttcttacattaaatggatctgaaaaaactgtacccgggttaatggctattggcgaagcagcatgtgtttctgttcacggtgcaaatagattaggttcaaattcattaatagatttagtagtttttggaagagctgcagcgaaaagagcagcagagttagtaaaacccggaatgaagcatgaagaaattgataaaaatgaaacggatagatgtttagatagatttgataaattaagaaactcagaaggttcaaatccaacatctgaactaagactttcaatgcaaaagacaatgcaatcaaagtgtgctgtatttagaactgagaaaacattaaaagaaggcgttgatgaaattagaagaccttatgatggaatggactctctttctgtaaaagataaatcattaatattcaacacagatttagttgaaactctagaatttgataacttaataagacaagcaataacgacaatggattctgcgtatcatagaaaagaaagcagaggagcccatgcaagagaagattttccaaagagagacgatgagaactatatgcaacatactctgtcatggtgtaatggttcaaaaactaaaattaattacagacctgttcatagatcaacacttacaaatgatgtacaatattttcctccacaggaaagagtatattaa

SEQ ID NO: 218986 - DNA, 977 bp, Unknown
  Bacterial polypeptide expressing nucleotide sequence isolated from the Sargasso Sea
atggaatctaaacgatggaacaattcatagatttagagcacattcagttataatcgcaacaggtggttatggaaaagtttattattctgctacctctgcccacacatgtaccggcgatggtaatgcaatggtgcttagagcgggattacctttacaagatatggagtttgttcagttccacccaacaggaatttatggtcatggcacgttaataactgaaggtgctagaggagaaggaggatatcttacgaactctaaaggtgaaagatttatggagaggtatgctcctaatgctaaagatttagcttctagagatgttgtaagtagatctatgtcaatagaaattaatgaaggaagaggtgtaggaaaagatcaagaccatgttcatttaaacttaagtcacttagataaaaaaattatagaaagtagattacctggtataactgatgcagcgcgattatttgctaatgtagatgttaccaaagaaccaattccagtagttcctacagttcattacaatatgggtggaataccgacaaattataagggagaggtattaacagtaaatggatcagaaaaaactgttccaggcttaatggccattggtgaagctgcatgtgtttctgttcatggagcgaacagattaggatctaattcattaattgatcttgtagtatttggaagagctgcagctaaaagagcagcagaattagttacaccaggaatgccacatgaagaaattagtgagtctgaaacacaaaaatgtcttgatagatttgacaaaattagaaacgctgatggtgacattggaactgcagaattaagattatcaatgcaaaaaacaatgcaatctaaatgtgcagtttttagaacagaaaaaactttaaaagagggtgttgaggaaataagaaaaacttatgatggtttagaatccatatcagttaaagataaatcattaatctttaatacagatttgg

SEQ ID NO: 218987 - DNA, 852 bp, Unknown
  Bacterial polypeptide expressing nucleotide sequence isolated from the Sargasso Sea
gctggttgaaattaatgaaggaagaggggttggaaatgaaaaagatcacgtgcacttacatttaaaccatttagatccaaaagttatagaagaaagacttccaggtatatcagagtcctcaagattatttgcgaatgtagatgtaacaaaagaacctattccagtagttccaactgttcactataacatgggaggtattcctacaaattataaagctgaagttttaactttaaatggatcagaaaaaactgttccaggattaatggcaattggtgaggcagcttgtgtgtctgttcatggagctaacaggctcggatcaaactctttaattgatctagttgtttttggaagagctgccgctaagcgtgcagcagagttggtaaaaccaggtacacctcatgaagaaatcccacagtctgagactgataaatgtttagaaagatttgatagacttagaaatgcatctggcacaaataatactgcagatttaagactggcaatgcaaaaaacaatgcaatctaagtgcgctgttttcagaactgaaaagactctaaaagagggtgtaaatgaaattagaaaaccttttgagggcatggatgacctttcggtaaaagataagtctctaatttttaatactgatctagtagagacattagaatttgataatttgattagacaagcaataactacaatggactccgcttatcatagaaaagaaagtagaggagctcacgctagagaagattttccaaagcgaaatgacgaaaaatttatgcagcatacattatcgtggtgtgatggcaaaaagactaaaatcgactatagacctgttcacagatcaacacttcaaat

SEQ ID NO: 218988 - DNA, 1104 bp, Unknown
  Bacterial polypeptide expressing nucleotide sequence isolated from the Sargasso Sea
tgcagctcttggtaacaatggtgaggacgattggagatggcacatgtatgacacagtcaaaggttctgattggctgggtgatcaagatgccattgcttatatgtgtaaggaagcaccaaatgcagttttagaattggaacgttatggtattccattctcaaggacagatgatggaaagatttatcaaagagcatttgggggaatgaccacacattttggtgacggaattgcacaaaggacatgtgctgctgcagatcgaacaggccatgcaatgttgcataccttgtatcaacaatccattaaaaataaagctgaatttttcattgaatattttgcactcgatttaattatggaagagggtgaatgcactggagttgtagcgctagagatggcgactggcaagattcatgcttttcgcgctcaacgggtgatattggccacaggcgggcatggaagagcatatttttcatgtacggctgcacacacttgcaccggagatggttcaggaatggctctcagagcaggtttgccgcttcaagatatggaatttgttcaatttcatccaactggtatctatggtgttggatgtctcatcacagaaggtgttcgaggagaaggaggatatcttaccaactctgatggcgagcgattcatggaacgttatgcgcccaatgcgaaggaccttgcatcaagagatgttgtgagtcgttcaatgacaatggaaatattagaaggaagaggtgtaggagagaaaaaagaccatattcatcttaatcttcagcacttagggcctgaagtaatcgaagagcgtctcccaggtatcgctgaaacagcaagggtatttgctgacgttgatgtaacaaaagaccccattcctgtattacccacagttcattacaatatgggtggtgtgcccacaaatatgcatacagaggtcattaccaaaaactctgctggcgagatggagattgtcccaggattgatggcagttggtgaagctgcttctgtatcggtgcatggagcaaatcgtttagggtctaactcattgcttgaccttgttgtctttggacgagagtctgccatgcaatgccaaaaaacaatcaa

SEQ ID NO: 218989 - DNA, 970 bp, Unknown
  Bacterial polypeptide expressing nucleotide sequence isolated from the Sargasso Sea
cctacacgaagtcatacttcagctgcccaaggaggtatttctgcagccttagggaacatgggagaggatgattggagatggcatatgtacgatactgtaaaagggtctgattggcttggtgaccaagatagtattgaatatttatgtaaagaggcaccaagagcagttttagaattggaaagatacggagttccattcagcagaactgaggatggaaaaatttaccaaagaccttttggtggtatgactaaaaattatggaaatgagacagttcaaagaacttgtgcagcagcagatagaacaggtcatgcaatattacatactatgtatggtcaagcattaaaacataatacagaattttttattgaatattttgcattagatttattaatgaaaaatggagagtgcaaaggcttaattgcttggaatcttaacgacggaactattcatagatttagatctcacataacaattattgcaacaggtggatatggaaaaacatattattcatcaacatccgctcatacatgcactggtgatgggaatgctatggttttaagagctggtttacctttacaagatatggagtttgtacaatttcatcctacaggaatatatggacatggaactttaatttctgagggagttagaggcgaaggaggattcttgctaaattctaaaggagaaagatttatggaaagatatgctcctaaagctaaagatcttgcatctagagatgttgtgagtagatcaatagctgttgaaattaatgaagggagaggagttggaaaagaaaaagatcacgtccatcttcatttaaatcatttagatccagaagtaattgagaaaagacttccaggaatttcagaatcttcaagactgttcgccgacgttgatgttactaaagaaccaataccagttgttccaacagtgcattataatatgggtggtattccaacaaattacaaag

SEQ ID NO: 218990 - DNA, 835 bp, Unknown
  Bacterial polypeptide expressing nucleotide sequence isolated from the Sargasso Sea
aacagaaggtgcaagaggagaaggaggatatctcacaaattctaaaggtgaaagatttatggaaagatacgcacctaatgcaaaagatttggcgtcaagagatgttgtgagtagatcgatgtcaatcgagattaatgagggaagaggtgtcggaaaagatcaagatcatgttcatttgaacttaagtcatttagataaagaaattattgaaagtaggcttccaggaataacagatgcggcaagattatttgctaatgtagatgttacaaaagaaccaattccagtagtgccaacagttcattataatatgggtggcattcccacaaattataaagcagaggtattaacagtaaatggttcagaaaaaacagttccgggattaatggcaataggagaagcggcatgtgtttctgttcatggtgcaaatagacttggatctaattctttgattgacctagtagtatttggaagagcagcagcaaagagagcagctgaattaattaaaccaggaacacctcacgaagaggtttcagaattggaaacacaaaaatgtctagatagatttgataaacttagaaatgctcagggggattatagtactgctgatttaagactttcaatgcaaaaaacaatgcaatctaaatgtgcagtatttagaacagaaaaaaatctcaaagaaggtgttgatgaaatcagaaaaacttatgatgggattgactcaatttcagttaaagataggtctttggtatttaatactgatttagtagaaacattagaatttgataatttgattagacaagctgtaactacagtagattctgcataccatagaaaa

SEQ ID NO: 218991 - DNA, 952 bp, Unknown
  Bacterial polypeptide expressing nucleotide sequence isolated from the Sargasso Sea
tatgaaagtagatgaaatcataaagggatcggatattccagttaaggagtttgatggaattatcataggtggtggaggagctggtatgcgtgcctctttgcaattagctgaatctggattaaatacagcggtaatatctaaagtatttcctaccagatctcatacagtctccgctcaaggtggaattacttgcgctatagcgagtgatgatcctgatgatgattggagatggcatatgttcgatacagttaaaggatcagactacataggagatcaagacgctattgagtatatgtgcgctgaaggcccgaaagctgtttttgagttagagcatatggggttgcctttttctaggacagaagaaggaagaatttatcaaaggcctttcggtggccagtcaaaagattatggaaaaggaggtcaagcatctagaacttgtgcagcagcagatagaactggacatagtttattgcatactctttatcaagctaacctaaaagctggaactaattttttaaatgaatggtttgcaatagatttagttttaaatgcagataacgctgtagtaggtgtaattgcatttgagattgagacaggagaaattttttatataaagtctaaggcaactgtattggcaaccggcggagcaggaaggatttatgcctctactaccaatgcattaataaattctggagatggaattggaatgtctcttagagcaggatttccagttcaagacatagagatgtggcaatttcatccaacaggtattcatggagctggaactttggttacagaaggatgcagaggagaaggaggttatctaattaataaagatggtgaaaggtttatggaaaggtatgcaccgaacgccaaagatttagctagtagagatgttgtggcaagatccatggctctcgagattctcgaagggaagaagttgcggccctaa

SEQ ID NO: 218992 - DNA, 498 bp, Unknown
  Bacterial polypeptide expressing nucleotide sequence isolated from the Sargasso Sea
aatgactaattcatacaaaattattgatcaccattatgacgttgtagttgttggagctggcgggtcaggactgagagctacgcttggatgtgctgaatctggattaaaaacagcctgtatatcaaaagtgtttccaacaagaagtcatactgttgcagcacaaggtggaattggagcagcactaggtaatatgggtgaagataattggaagtggcacatgtatgatacagttaagggttccgactggcttggtgatcaagatgcaattgaatacttatgttctaaagcccctgaagcagtaattgaacttgaagaatatggcatgccttttagtagaacagatgatggcaagatctatcaaagaccttttggcggacacttaaccaataatggcgagggagctcctgctatgagagcttgtgcagcagctgatagaacgggacatgctttactccatacactttatcagcaatcacttaaaaataatgtagaatttta

SEQ ID NO: 218993 - DNA, 763 bp, Unknown
  Bacterial polypeptide expressing nucleotide sequence isolated from the Sargasso Sea
atgagcagttacaaaataatagatcatgaatacgatgttgtagttttgggtgcaggaggatccggacttagagctgcagttggattaagtgaagctggattaaagacagcatgtatttcaaaagtatttccaacacgtagtcatacatctgcagcgcaaggaggtatttcggcagcattaggaaatatgggcgaagacgattggagatggcatatgtatgatactgttaaaggatctgattggttgggagatcaagattgtatagagtatctttgtaaagaagcaccaagagcagttttagagcttgaaaaatatggagtaccatttagcagaacagaagatggtaaaatttatcaaagaccatttggtggtatgacaaaaaattatggaaatggaactgtgcagagaacttgtgcagcagctgatagaacaggtcatgcaattttacacacactttatggtcaagctttgaaacacaacactgaattttttattgaatattttgcattggatctattgatgaaaaatggtgagtgcaaaggactgatagcttggaacttaaatgatggaacaattcataggttcagatcgcatattacaattattgcaactggtggatatggcaaagtttactattcagcaacttcagctcacacttgcacgggcgatggaaatgcaatggttttaagagctggattgccacttcaagatatggaatttgtacaatttcatcctacaggtatttatggtcatggaactttaa

SEQ ID NO: 218994 - DNA, 961 bp, Unknown
  Bacterial polypeptide expressing nucleotide sequence isolated from the Sargasso Sea
ttaaaaactgcatgcatttctaaagtctttccaactagaagtcatacatcagctgcacaaggtggaatttcagcagcccttggaaatatgggagaagatgattggcgttggcatatgtacgatactgtaaaaggagcagattggttaggcgatcaagatagtattgaatatttgtgtaaggaagctccaaaagcagtactagaattagaaaagtatggtgttccttttagcagaactgaagacggaaaaatttatcaaagaccatttggaggaatgacaaaaaattatggaaatggaattgtacaaagaacttgtgctgcagcagacagaactggtcatgcaattcttcatacattgtatggtcaagcacttaaacataacacagaattttttatagaatattttgcattagacttaattatgaaagatggacaatgcaaaggtttaattgcttggaatttaaatgatggaactattcatcgttttagatctcacattacaattatagccacagggggatatgggaaagtgtattactcagcaacatccgcacatacttgtactggtgatggtaatgcaatggtattaagagctggattacctcttcaagatatggagtttgtacaatttcacccaacaggaatatatggacatggaacacttatttctgaaggtgtaaggggtgaaggtggatatttggtaaactctaaaggtgagagatttatggagagatatgctcctaacgctaaagatcttgcatcaagagatgtagttagcagatcaatgtcaattgaaatcaatgagggaagaggtgttggtaaagatcaagaccatgttcatttatatttaagtcatttagataaaaaagttattgaagatagattgccaggcatcacagaagcagcaagattatttgcaaatgtagatgtaactaaagagccaataccagttgttccaactg

SEQ ID NO: 218995 - DNA, 865 bp, Unknown
  Bacterial polypeptide expressing nucleotide sequence isolated from the Sargasso Sea
atgagtgcatacaaaattattgatcatgaatatgatgtagttgttttaggtgcaggtggatctggacttagagcagctgttggcctaagtgaggctggtctaaaaacggcatgtgtatctaaagtatttccaacaagaagtcacacatctgctgcccaaggaggtatttcagctgcacttggaaatatgggagaagatgactggagatggcacatgtatgacacagtcaaaggcgctgattggttgggtgaccaggattccatagaatatctatgtaaagaagcaccagctgctgttcttgaattagaaaagtatggtgttccatttagtcgaactgaggaaggaaaaatttatcaaagaccttttgggggtatgacaaaaaactacggaaatgaaacagttcaaagaacatgtgcagcagcagataggaccggacatgcaatacttcacacattgtatggacaagctttaaaacataataccgaattttttattgaatactttgcgctagatctaataatgaaagatggagcatgcaaaggtataattgcttggaacctaaatgatggaacaattcacagatttaaatcccacacaactattatagcaacagggggttatgggaaagtgtattactcagctacttcagctcatacttgcacgggagatggtaatgctatggctctaagagctggattacctttacaagacatggaatttgtacaatttcatccaacgggaatatatggccatggaacattaatttccgaaggtgtaagaggagaaggtggttatctagtaaattcaaaaggagaaagatttatggagcgttatgctcctaaagcaaaagatttagcatctagag

SEQ ID NO: 218996 - DNA, 1051 bp, Unknown
  Bacterial polypeptide expressing nucleotide sequence isolated from the Sargasso Sea
gagtggtatgcggtagatctcgttaaaaatcaagatggatgcgtagtaggtgtcattgccattgagatagaaagtggcgaaattgtatatataaattcgaaatctactgtcctggcgacaggaggcgctggtcggatctatgcgtccactaccaatgccttgatctgcactggagatggagccggtatggctctcagagctgggtatcccatgcaggacatggaaatgtggcagtttcatcccacaggtatatatggtgccgggactttggtgacagagggttgcagaggggaagggggttatcttatcaacaaggatggtgagagattcatggagcgctatgcaccaaatgcgaaagatttggccggaagagacgtagttgctcgctcgatgatcttggaaattatagaaggaagagggtgcggggaaaagggagatcatgtcatgttgaagcttgatcacctaggcgaggatgtcctaaatgcaaaactccctggaatactcgaactttctcgaacgttcgctcatgttgatcctgtaaaagagccgatccctgtggttccgacatgtcattacatgatgggtggaatcccgacaaacgttcacgggcaagcgctaactcaaaattcagatggtgaagacgtcgaaattcctggcctgtttgccgtaggagaggcggcctgtgtctcagttcatggggcaaataggcttgggggtaatagtcttttagatctagtagtcttcggtcgtgctgcaggtaagcatatagaaaaaatgctatccgacggtatagagcagcgcgttgcgtcggatgcagatgtcgaagttgcactggcccgactaaataggcttaatgaatcaaaaggaggtgaagacgtcgtttctctgagatctgaattgcaggagatcatgcaaaatcactttggagtgttccgaaagggagactttatgaaaaccggcatcgaacggttgcaggaaattggagagcgtataaaaaatatatttcttaaagataagagtaaaacgtttaataccgcgcgaattgaagctt

SEQ ID NO: 218997 - DNA, 950 bp, Unknown
  Bacterial polypeptide expressing nucleotide sequence isolated from the Sargasso Sea
tgagtgtaaaggtttaattgcttggaaccttaatgatggaactatacatagatttagagcacattctgtaatcatagccactggtggttatggtaaagtttactactcagcaacatcagcacatacttgcacaggagatggtaatgctatggttttaagagcaggtttgccattacaagatatggaatttgtgcagtttcatcctacaggaatatatggacatggaacactaattactgagggtgcgcgaggcgaaggtggatatttaactaactccaaaggtgagagattcatggaaagatatgcgccaaaagcaaaagatttagcttcaagagatgtagtaagtagatctatgtcaatcgaaattaatgaaggaagaggtgtaggaaaggatcaggaccatgttcatttaaatctaagtcacttagacaaagaaataatagaaagtagacttccaggaataactgatgcagcaagactttttgcaaatgttgatgttacaaaagaaccaataccagtagtgcctactgtacattacaatatgggtggtattccgacaaactataaaggtgaagttctaacagttaacggatcagaaaaaactgtgccaggcttaatggctattggtgaagccgcatgtgtttcagttcatggtgctaatagactgggatctaactcattaatagatttggtagttttcggaagagctgctgcaaagagagcttcagaacttatcaaaccaggaacccctcatgatgaaattagtgaacaagaaacagaaaaatgccttgatagatttgataaaatcagaaatgcaaatggcgatataggtacagcagaattgagattatcaatgcaaaaaacgatgcaatcaaaatgtgcagtttttagaactgaaaaaacattaaaagagggagttgatgaaatcagaaaaacttatgatggttaaa

SEQ ID NO: 218998 - DNA, 544 bp, Unknown
  Bacterial polypeptide expressing nucleotide sequence isolated from the Sargasso Sea
tatgagcagttacaaaataatagatcatgaatacgatgttgtagttttaggcgcaggaggatccggtcttagagctgcagttggattaagtgaagctggattaaaaacagcgtgtatttcaaaagtatttccaactcggagtcatacatctgcagcgcaaggaggtatttcggcagcattaggaaatatgggcgaagacgattggagatggcatatgtatgatactgttaaaggatctgattggttgggagatcaagattgcatagaatatctttgtaaagaagcaccaagagcagttttagagcttgaaaaatatggagtgccatttagtagaacagaagatggtaaaatttatcaaagaccatttggtggtatgacaaaaaattatggaaatggaacggtgcaaagaacttgtgcagcagctgatagaacaggtcatgcaatcttacacacactttatggtcaagctttgaaacacaacactgaattttttattgaatattttgcattagatctattaatgaaaaatggtgagtgcaaagga

SEQ ID NO: 218999 - DNA, 712 bp, Unknown
  Bacterial polypeptide expressing nucleotide sequence isolated from the Sargasso Sea
atgagcgcatataaaataattgatcacgaatatgatgttgtagttcttggagcaggaggctctggtttaagagcggctgttggtctatcagaggcaggtttaaaaaccgcatgtatatccaaagtctttccaacgagaagccatacatcagcagctcaaggaggtatttccgctgcattaggaaacatgggtgaagatgattggcgatggcacatgtacgacactgttaaaggatccgattggcttggtgatcaggacgcaatagaatatctttgcaaggaagccccgagggcagtagttgaattagaaagatacggagtcccattcagcagaactgatgatggaaaaatctaccaaagaccttttggaggtatgactaaaaattatggtaatgggactgctcaaagaacttgtgcagctgctgatagaactggccacgctatcttgcatactctttatggtcaagctttgaagcaacaaacagaattttttattgaatattttgcattagatttacttatgaagaatggtgaatgcaaaggtgtgatagcttggaatttaactgatgggacaatacatagatttagatcacatattacaattattgcaactggaggatatggtaaagtttattactcagctacatccgctcatacatgtaccggagatggaaatgcgatggttcttagagcaggcttacctttacaagata

SEQ ID NO: 219000 - DNA, 949 bp, Unknown
  Bacterial polypeptide expressing nucleotide sequence isolated from the Sargasso Sea
agcctgtatatcaaaagtgtttccaacaagaagtcatactgttgcagcacaaggtggaattggagcagctttaggtaatatgggtgaagataattggaagtggcacatgtatgatacagttaagggttccgactggcttggtgatcaagatgcaattgaatacttatgttctaaagcccctgaagcagtaattgaacttgaagaatatggcatgccttttagtagaacagatgatggcaagatctatcaaagaccttttggcggacacttaaccaataatggcgaaggagctcctgcaatgagagcttgtgcggcagctgataggacaggacatgctttactccacacactttatcagcaatcacttaaaaataatgtagaattttatattgaatattttgttttagatttaatttccgatgatcaaggtaattgtattggtgtggtaacatggtgcttagaagatgggtcaatacaccgatttttatctcatcaaacaattttagctactggtggatatggaagagcttacttctcatctacgagtgctcacatatgtaccggtgatggtagtgcaatggctttaagacaaaacctacctctttctgatatggaatttattcagttccatccaactggagtttacggtgcaggagtgttaatcactgaaggagcaagaggagaaggtggatatttaactaatagtgatggtgaaagatttatggaaagatatgctcccaatgcaaaagatctagcatcaagggatgtagtaagccgtgcaatgacaattgaaattagtgaaaatagaggttgtggggacaatgccgatcatgtgctccttcatcttgaacacattgatgctgatacattacataaaagattgccaggtatttcagaaactgcaaaaatatttgccggcgttgatctgactaaagatccaataccagtc

SEQ ID NO: 219001 - DNA, 720 bp, Unknown
  Bacterial polypeptide expressing nucleotide sequence isolated from the Sargasso Sea
aatgactgcatataaaattatagatcacgaatatgatgtagttgttcttggagctggcggttcaggtctaagagcggctgtaggcttaagtgaagctggtcttaaaacagcatgtatctcgaaagtatttccaactagaagtcatacttctgctgctcaaggtggtatttcagctgcacttggaaatatgggagaggatgactggcgatggcatatgtatgatactgtcaaaggtgcagattggttaggtgatcaagacagtattgaatatctatgcaaagaggctccaaaggcagttattgaattagaaaagtatggtgtcccatttagtagaacagaagatggaaaaatttatcaaagaccgtttggaggaatgactaaaaattatggtaatggaatagttcaaagaacttgtgccgcagcagacagaacaggtcatgcaattttacatactctttatgggcaagcacttaaacataacacagaattttttattgaatactttgcattagatttattaatgaaagatggtgagtgtaagggactaattgcatggaatttaaatgatggaactatacatagatttagatcacacataactatcattgctactggaggttatggcaaagtatattattcagccacttctgctcatacttgtacaggagatggaaacgctatgggtataagagctggattaccactaccagatatgggaat

SEQ ID NO: 219002 - DNA, 962 bp, Unknown
  Bacterial polypeptide expressing nucleotide sequence isolated from the Sargasso Sea
agctgggtttcctgctcaggatatggaaatgtggcaatttcatccaactggtatttatggtgcagggtctcttgtaactgagggttgcagaggtgaaggtggatatttaattaatgcagatggcgagagatttatggaaagatatgctccaaatgctaaggatcttgcaggaagagatgtagttgctaggtcaatggttatggaaatacttgaaggcagagggtgtggcccacagaaagatcatgttcacttgaaactcgatcatttgggtgcagatgtccttaattcaaaattaccaggtatatgtgagctctcaaaaacttttgctcacgttgatcctattaaggaaccaattcccgttgttcctacatgtcattacatgatgggaggaacaccaacaaatattaatggtcaagcatttagcaggaatgatggaaatgatttcatgctttccgggcttttctctgttggggaagctgcatgtgtatctgttcatggcgccaacaggctgggcggaaactctttattagatttagttgttttcggaagagctgcaggcaaacatataaatgaggagcttaaatctggtggtggcgtagataatgcttccaatgaagatattgaattggccacgagcaggctaaacagattaaatgaatctgaatctggatacgaggttgctgatattaaaaaacaactccaaacctgtatgcagaactactttggtgtttttaggcgtggtgagtttatggagaaaggagtcaaagaacttgaggagataagagagaaatccgaaaatctttacttaaaggataaaagtattgctttcaacactaacagagttgaggcactcgagttacagaatcttttagaggttgcagaggccacagctatttctgcaatgatgagagacgaaagtagaggtgctcatgccagagatgattttcctgaaaagatgatga

SEQ ID NO: 219003 - DNA, 861 bp, Unknown
  Bacterial polypeptide expressing nucleotide sequence isolated from the Sargasso Sea
gaatcaggttacaaaacagcatgtatatcaaaagtttttccaactagaagtcacacagtagcagcacaaggaggtattggtgcagcgcttggtaacatgggtgaagatgattggaaatggcatatgtttgatacagttaaaggatcagactggttaggtgatcaggatgctatagaatatttatgctcaaaagctcctgaggcagtaattgaattagaggaatatggcatgccttttagtcgaacagaagatgggagaatttatcaacggccttttggaggtcatttaacaaataatggcgaaggggcacctgctttgagggcatgtgcagccgcagacagaactggacatgctttgttacacactctttaccaacaatctcttaaaaataatgtagaattttttattgaatattttgttttagatcttttgatggacaacgatggaaattgcaaaggagttttagcctggtctttggaggatggtaaaatgcatcgctttatatctcatcaaacaattttagctactggtggatacggaagagcttatttttcatcaacaagtgcacacatatgtacaggagatggaagtgctatggcacttcgtcaagatttgcctttatcagacatggaatttatacaatttcatccaaccggtatttatggtgcaggtgttctaattactgagggcgctagaggagaaggcgggtacttaactaataaagatggagagcgttttatggaacgttatgctccaaatgctaaagatcttgcatctagagatgttgtcagcagagctatgactatagaaattaatgaaaatagaggatgcggagaaaattcagattacattttaatgcat

SEQ ID NO: 219004 - DNA, 883 bp, Unknown
  Bacterial polypeptide expressing nucleotide sequence isolated from the Sargasso Sea
ggaactttaatatctgaaggagttcgaggtgaaggaggatatttattgaattctaaaggtgaaagatttatggagagatatgctccgaaagctaaagatcttgcgtctagagatgttgtaagtagatcgatagcagttgaaattaatgagggaagaggagttggaaaagaaaaagatcatgtacatcttcatttagatcatttagatccaaaagtaattgagaaaagacttccgggaatttcagaatcttcaagattatttgccgacgttgatgttacaaaagaaccaataccagttgttcctacagtacattataatatgggaggtattccaacaaattataaagctgaagttttaacagtaaacggttcagaaaaaattgtacctggacttatggcaattggtgaagcagcatgtgtttcagttcatggagcaaacagattaggatcaaattcattaattgatttagttgttttcggaagagctgcagcaaaaagggctgcagaacttgtaaaacctggaactcctcatgaggaaatctcaaattcagagactgataaatgcttagaaaggtttgaaaagttaagaaatggaaatggaactaatagaactgctgatttaagattggctatgcaaaaaactatgcagtcaaagtgtgcagtatttagaactgaaaaaactttaaaagaaggagtagaagaaataagaaaaccatttgaaggaatggattcaatatcagtaaaagataagtctttagtttttaatactgatttagttgaaaccttagaatttgataacttaataaggcaagctatagttacattagattctgcatatgaaagaaaagaaagcagaggagctcatgcacgggaagatcacccca

SEQ ID NO: 219005 - DNA, 675 bp, Unknown
  Bacterial polypeptide expressing nucleotide sequence isolated from the Sargasso Sea
aagtattaacttcaaatggtaaagacactgttgtacaaggacttatggctattggagaggctgcatgtgtctcagttcatggagcaaatagactaggatcaaattctttaatcgatttagtagtatttggtaaatcggcagcaacaagagcagcagaaattatacaaccaggatctccccatgaagatttaactcaaagtgaaacagataaatgtttagatagatttgataaattacgtaattcaaatggttctacaaaaacatcagagttaagagtattaatgcaaaaaactatgcagtcaaaatgtgcagtttttagaacagaaaaaactttgaaagaaggcatgaatgagatcaggaaaccctttgaagggatggaggatatttcagttaaagataaatcattactgtttaatactgatttagttgaaactttagaatttgacaatcttataagacaagcaatgacaacaatagactctgcttatcatagaaaagaaagtcgaggagctcatgctagggaagattttaaaaagagagatgacaaaagttacatgacacacacattagcttggcaaaaaggaaatgaagttgaaattgcctatagaccagttcatgctaaaactttaacaaacgatgtgcaatattttcctccaaaagaaagagtgtattaat

SEQ ID NO: 219006 - DNA, 872 bp, Unknown
  Bacterial polypeptide expressing nucleotide sequence isolated from the Sargasso Sea
cggcgcgggtgtgctggtaaccgaaggttgccgtggtgaaggtggctacctgatcaacaagcacggcgagcgtttcatggagcgctatgctcctaatgcgaaagacctggctggtcgtgacgtcgttgcgcgctcgatggtcaaggaaatcctggctggcaatggctgtggcccggatggtgaccacgtgatgctgaagctggatcacctcggtgaagaagtgctgcacagccgcctgccgggcatctgtgaactgtcgaagacctttgcgcatgtcgatccggtgaccgctccggtaccggtcgtgccgacctgtcactacatgatgggtggtatcgccactaatattcatggtcaggccatcacgcaagacgccaatggtaatgacaccatcatcgacggcctgttcgcggtaggcgaagtggcttgtgtatcggtgcatggcgccaaccgcctgggcggcaactcgctgctggatctggttgtgttcggtcgcgccgcaggtctgcacctggagaaagcgctgaaggaaggtatcgaacatcgcggtgccagcgaaaccgatctggacgtcgccctgagccgtcttgccggtctcaacgagcgcaccactggtgaagacgttgccccgctgcgcaaggagctacagaactgcatgcagaactacttcggtgtattccgtaccggcgagtacatgcagaagggtatcgctcagctggtggacctgcgtcagcgtatcgccaatgtcaagatctcggacaagagccaggcgttcaacaccgcgcgcatcgaagcgctcgagctacagaacctgctggaagttgccgaggctactgctattgccgcggagaaccgcaaggaatcccgtggcg

SEQ ID NO: 219007 - DNA, 622 bp, Unknown
  Bacterial polypeptide expressing nucleotide sequence isolated from the Sargasso Sea
catggagtttgttcaatttcatccaacaggaatttacggtcatggtacattgataacagaaggtgcccgaggagagggtggttatcttaccaattctaaaggtgaaagatttatggaaagatatgctccaaatgcaaaagatttagcatcaagagatgttgttagtagatcaatgtctattgaaataaatgaaggaagaggtgttggaaaagatcaagatcatgttcatttgaacttaagtcatttagataaagatattattgaaagtagacttccaggaattactgatgctgcaagattatttgcaaatgtagatgtaactaaagagccaatacccgttgtaccaacagttcattataatatgggaggaattccaacaaattataaagcagaagttttaactgttaatggttcagaaaaaactgttccaggtctgatggctataggagaagcagcatgcgtttctgttcatggcgcaaatagacttggttctaattcactaattgatttagtagtatttggaagagcagcagcaaagagagctgcagaattagttaaacctggaactcctcatgaagagatacctgagtctgagacgcaaaaatgtttagatagattttga

SEQ ID NO: 219008 - DNA, 877 bp, Unknown
  Bacterial polypeptide expressing nucleotide sequence isolated from the Sargasso Sea
tgaaggaagaggagttggaaatgaaaaagatcacgtacacttacatttaaaccatttagatccaaaagttatagaagaaagacttccaggtatatcagagtcctcaagattattcgcgaatgtagatgtaacaaaagaaccaataccagtagttccaactgttcactataatatgggaggcatccctacaaattataaagctgaagttttaactttaaatggatcagaaaaaactgttccggggttgatggcaattggtgaagcagcgtgtgtgtcagttcatggagctaacaggctaggatcaaattctttaattgatctagtagtttttggaagagctgccgctaagcgagcagcagagttagtaaaaccaggtacacctcatgaagaaatctcacaatctgagactgacaaatgcctagagagatttgatagactaaggaatgcatctggatcaaatagtactgcagatttaagattggcaatgcaaaaaacaatgcagtctaagtgcgctgtttttagaactgaaaaaactttaaaagagggtgtaaatgaaatcagaaaaccttatgagggtatggatgacctttctgtaaaagataagtctctaatttttaatactgatcttgtagaaacattagagttcgataatttgattagacaagcgataactacaatggactctgcttatcacagaaaagaaagtagaggagctcacgctagagaagattttccaaagcgaaatgatgaaaaatttatgcagcatacattatcttggtgtgatggtaaaaaaactaagattgactatagacctgtccacagatctacactatcaaatgatgtacagtactttcccccacaagaaagagtttattaa

SEQ ID NO: 219009 - DNA, 868 bp, Unknown
  Bacterial polypeptide expressing nucleotide sequence isolated from the Sargasso Sea
caaggtgaaagatttattggaaagatacgcacctaacgcgaaagacttttcttctagagatgttgtaagcagatcaatggaaatggaaattaatgaaggaagaggtgcaggaaaagataaggatcatataaacctacatttagatcacatagataaaaaagttatagatgagagattaccaggtatttcagaggcagcaaaaacttttgcaaatgttgacgtcagtaaggagcctattccagttgttccaacagttcattataatatgggaggaattcctacaaattacaaagctgaggtgcttactttgaacggttcagaaaaaactgtgcctggattaatggctataggagaagcagcttgtgtttcagtacacggcgctaatagattaggatcaaactctttaattgatctagtagtgtttggcagagcagctgcaaaaagggcagcagagctagtgaagcctggaagtccccatgaagaagtttcaagctctgaaactgataagtgtcttaataggtttgatagaattcgaaattcgaatggctctacaaaaacgtcagaacttaggttaaaaatgcaaaaaactatgcaatcaaagtgtgcggtgtttagaacagaaaaaactctcaaggaaggtgtggatcaaattcgaaaaccttttgaaggaatgagcgatgtctctgttaaagataagtcattattatttaatactgatttagttgaaactttagaatttgacaatttaattagccaggctcttactactatggactcagcttataatagaaaagaaagtagaggcgctcacgctagagaggattttacgaaaagagatgacaaaaattttatgaaacacactttagct

SEQ ID NO: 219010 - DNA, 481 bp, Unknown
  Bacterial polypeptide expressing nucleotide sequence isolated from the Sargasso Sea
catgaataaggcatatcaggtaatagatcatcattatgatgttgttgttgtaggggcgggaggatctggattgcgggcaactttaggttcagcagaagctggtctaaagacagcatgtatctcaaaagtatttccaaccagaagccatacagttgcagctcaaggaggtattggagcagctcttggaaatatgggagacgacaattggaaatggcatatgtatgacacagtcaaaggctccgattggttgggtgatcaagacgccatagaatatttatgtgctaatgctccagaagcagtaattgaacttgaagaatatggcatgccattcagcagaacagatgaaggcaaaatatatcaaagaccatttggtggccacctaactaataatggagaaggagctccagcgatgcgagcatgtgcagcagctgatagaacaggacacgcattgctgcacactctctatcaacaatcacttaaa

SEQ ID NO: 219011 - DNA, 900 bp, Unknown
  Bacterial polypeptide expressing nucleotide sequence isolated from the Sargasso Sea
acagttgcagctcaaggtggaataggtgctgcattaggcaatatgggggatgataattggaaatggcacatgtatgatacagtaaaaggttcagactggttaggagatcaagatgctatagagtatctttgtgctaatgcacctgaggccgtaatagaattagaggaatatggaatgccattcagtagaacagaggatggccgaatataccaaagaccatttggaggtcatttaactaacaatggtgaaggtgcccctgcaatgcgagcttgcgcagctgcagatagaacagggcatgctcttcttcacacactttatcagcagtcactaaaacacaaagttgaattttatattgagtattttgttcttgatttagtaatggacaaagatggtaactgcaaaggagtggttgcatggtgtttagaggatggaacaattcatcgttttctatcgcaccaaacaattctcgctacaggtggttatggtcgagcatatttttcttcaactagtgctcacatttgcacaggtgatggaagtgcgatggcgctcaggcaaaatcttcctttatcagatatggagtttatacaatttcatccaacaggagtttatggtgctggtgtgcttatcactgaaggcgctagaggtgaaggtggttatttaactaatagtgacggtgaaagatttatggagcgatacgctccaaatgccaaagatctagcctcaagagatgtggtgagtagagcaatgacaatagagataaatgaaaaaagaggctgtggtgaaaacgctgatcatgttcttttacatcttgaacatattgattcttctacactgcataagagactgcctggaatttctgaaacagcaaagatttttgctggagttgatctaactaaagaa

SEQ ID NO: 219012 - DNA, 868 bp, Unknown
  Bacterial polypeptide expressing nucleotide sequence isolated from the Sargasso Sea
atgaaatcttataatattattgatcataaatatgacgtagtggttcttggggcgggaggatctggactaagggcagccgtaggtctaagtgaagcaggtttaaaaacagcatgcatatctaaagtttttccgacaagaagtcatacttctgccgctcaaggagggatttctgcagcactgggcaatatgggagaagacgactggagatggcatatgtatgatacagttaaaggttctgactggttaggcgatcaagattctatagagtatttatgtaaagaagcacctagagcagttttagaattagaacaatatggagttccttttagtcgaacagaagatggaaaaatataccaaagaccttttggtggaatgactaaaaactatggaaacgaacctgtagagagaacttgtgcagctgcagatagaactggccatgcaatactacacactttatatggtcaagctttaaaacataatacagaattctttattgaatattttgcactcgatttgttaatgaaaaacggagaatgcaaaggtttaattgcttggaatttaaaagatggaacaattcacagatttagatcgcatattactattatagctacaggcggatatggtaaaatttattattctgctacatctgctcatacttgcacaggagatggaaatgcaatgattttaagagcaggattgcctttacaagatatggaatttgttcaatttcacccaacaggtatttatggtcatggaacacttatatccgaaggagtgagaggagaaggtggatacttattaaattcaaaaggtgaaagattcatggaaagatacgcaccgaaagctaaagacttagcttctagggatg

SEQ ID NO: 219013 - DNA, 784 bp, Unknown
  Bacterial polypeptide expressing nucleotide sequence isolated from the Sargasso Sea
tactgaagcagcaaggttatttgcaaacgtagatgtaactaaagaaccaataccagttgtgcctacagtgcattacaacatgggaggcattccaacaaattataaagctgaagtgttaactgttaatggatcagaaaaaaccgtgccaggtttaatggcaataggtgaagccgcatgtgtttcagttcatggagctaacagacttggttctaactctttaatcgacttagtagtatttggaagagctgctgcaaaaagagcttccgaattagttacgccaggatcaccgcatgaagaaatttcagaaacagaaacacaaaaatgtttagatagattcgataagttaagaaacgcacaaggggataatagcactgcagaattaagactcgcgatgcaaaaaacaatgcagtcaaaatgcgcagttttcagaacggaaaaaaatttagaagaaggtgttaatgaaataagaaaaacttatgattgcatggactctatttctgttaaagatagatctttagtttttaatacagatttagtagaaaccctagagtttgataatttaatcagacaagcggtgactacagttgactctgcatatcatagaaaagagagcagaggtgctcatgcaagagaggattatcctaaaagagatgatgaaaaatttatgcaacacactttggcttggtgtgatggaaaaaatactaaaattacatataggcctgttcataaatcaactttgacaaatgaggtacaatattttccaccacaagaaagagtttattaa

SEQ ID NO: 219014 - DNA, 936 bp, Unknown
  Bacterial polypeptide expressing nucleotide sequence isolated from the Sargasso Sea
ttccccgaccggcatatacggcgcgggcaccttggtcaccgagggttgtcgtggtgaaggcggctacctcattaacaaggatggtgagcggttcatggagcgctatgcaccgaatgcgaaggacctggcgggacgagacgtggttgcccgctccatggtgctcgaaattctcgagggccgcgggtgcggaccaaatggcgatcacgtgaagctcaaactcgaccacctcggagaagaagtacttgaatcccgtctacccgggatctgtgagctgagtaggaccttcgcgcacgttgatcctgtgaaagaaccgattccggttgttccaacctgccattacatgatgggcggaatccctacgaatgtgcacggtcaggcgctgaccgtcgacgatagcggtaacgacgtgattattccggggctttacgcgtgtggtgaggtggcctgtgtctctgttcatggcgctaaccgattgggaggaaattccttgctggatctggtggtttttggtcgcgcatcggggctctatatcgagaaggcgctccgcgagggcatcgaactgcgcgatgcgtctcaaacagatatcgaggaagcgggcagcaggttaaacgccttgaatcagcgtgagacgggcgagcaggtggcgccgctgcgacatgagctacaggagattatgcagaactattttggcgttttccgaacgggtgagttcatgcgagaaggcattgccaagttggctgagctccgtggacgagtagaggacgttgcgttggcggatcgctcaagtgcttttaatacctcacgcattgagtgtctggaactgcagaacctgtttgagacggcagaggcgacggctatagttgcggaggcgcgtggtgagagccgcggggcgcacgcgagagaagactttacagagcgggatgatgaaaactggct

SEQ ID NO: 219015 - DNA, 808 bp, Unknown
  Bacterial polypeptide expressing nucleotide sequence isolated from the Sargasso Sea
tttaagagcagctgttggtttagctgaggcaggtttaaaaactgcatgtatatctaaggtatttccaacacgaagtcacacggcagctgcccaaggtggtatttcagctgcactaggtaatatgggcgaagacgactggcgatggcacatgtatgatacagttaaaggtgcagattggcttggagatcaagacgcaatagaatatctttgtaaagaagctcctgaagcagttattgaattagaaaaatatggagtaccatttagtagaacagaagaaggaaaaatatatcaacgtcctttcgggggtatgactaaaaattacggtaatggagtagctcaaagaacttgtgccgctgctgacagaacgggtcatgcaatattacatacattgtatggtcaagcattgaagaaaaaaacagaattttttatagagcactttgcattagatcttttgatgcataatgacaaatgtcagggagtattaacttggtctctccaagatggaacaataaatagatttagatcaaaaattacaattttagcaacaggtggatatggtagagcttatttttctgcaacatctgcgcatacatgtaccggtgatggaggcggtatggttttaagagcaggattacctctgcaagatatggagtttgttcagtttcaccctacaggaatttatggtgttggttgtttaataactgaaggtagtagaggagaaggaggttttttagttaactccgagggcgaaaggtttatggaaagatatgcaccatctgctaaagatttagcatccagagatgttgta

SEQ ID NO: 219016 - DNA, 689 bp, Unknown
  Bacterial polypeptide expressing nucleotide sequence isolated from the Sargasso Sea
taactataaggcagaagttttaacattaaatggatctgaaaagatagttccaggtttgatggcaataggagaagctgcttgtgtttcagttcatggagcaaatagattaggttctaattccctaatagatcttgtagtttttggaagagctgcagctaaaagagcagctgaacttgtaaagcctggacagcctcacgaagaggtttctaactccgaaactgataaatgtctggatagatttgataaaataagaaattcgagtggatctactaaaacttcagaactgaggctaaagatgcaaaagactatgcaatctaagtgtgcagtatttagaactgaaaaaaccttgaaagaaggtgtagaggagataaggaagccttatgatggaatgaaagatatttctgtaaaagataaatcattattatttaatacagatttagttgaaacactagaatttgataatctaatacgtcaagcactaacaacaatggattccgcatatagcagaaaagaaagtcgaggagcccatgctagagaggattttgccaaaagagacgataaaaattttatgaaacatactttagcttggcaaaatgaaaataaagtacacataaaatatagagatgttcattcgagaacgttaacaaacgatgttcagtattttcccccaaaggagagagtgtattagg

SEQ ID NO: 219017 - DNA, 859 bp, Unknown
  Bacterial polypeptide expressing nucleotide sequence isolated from the Sargasso Sea
atggaaatgtggcaatttcatccaacaggtttatatggaaatggatccttgatgactgagggctgtagaggagaaggtggatacttaataaattctgaaggtgagaggtttatgcctaactatgcacctaaagcaaaagatctagcttcccgagatgttgtatcaagatgcatagtacaagaaattttagcaggaagaggttgcggtgaaaataaagaccacgtcttgttaaagatagatcatttgggcgcagacgcaattatgaaaaaactcccagaaattagagaaatatctatgacttttgcagatgttgacccaattgaagcgccaatacctgtagttccgacttgccattatatgatgggaggaatacccacgaatgtacatggccaagtaattacaacaaaaaatggcaccgattctgtcatagacggattatattcaatcggtgaagcagcaaatgtgtctgtgcacggagcaaataggcttggtggaaattccttgttagatttagttgtttttggaagagcagcaggtcgacacattaatgaaaacgcaaaagaatcaagctcgttaaatctttcgaaatctaatattgaagaatcattaaatgttttcaataaaattcaaagtacaaaaaaaggtgaaactgtatttaatcttagatcagagatgcaaaacgtaatgcaaaattactttggtgtatatagaaatgaaaaacttatgaaagaaggaatttcaaaacttgaggaaattacagatagaactaaaaaaattcacttaatggataaatcaaatcaattcaattctgaaagagttgaagtcttagagtatttaaatcttctggatattgcgaatg

SEQ ID NO: 219018 - DNA, 675 bp, Unknown
  Bacterial polypeptide expressing nucleotide sequence isolated from the Sargasso Sea
taattcatacaaaattattgatcaccattatgacgttgtactttttggagctggaggttcaggactgagagctacgcttggatgtgctgaagctggattaaaaacagcctgtatatcaaaagtgtttccgacaagaagtcatactgttgcagcacaaggtggaattggagcagctttaggtaatatgggtgaagataattggaagtggcacatgtatgatacagttaagggttccgactggcttggtgatcaagatgcaattgaatacttatgttctaacgcccctgaagcagtaattgaacttgaagaatatggcatgccttttagtagaacagatgatggcaagatctatcaaagaccttttggcggacacttaaccaataatggcgagggagctcctgctatgagagcttgtgcagcagctgatagaacgggacatgctttactccatacactttatcagcaatcacttaaaaataatgtagaattttatattgaatattttgttttagatctaatttctgatgatcaaggtaattgcattggtgtggtaacatggtgcttagaggatggatcaatccaccgatttttatctcatcaaacaattctagctaccggtggatatggaagagcttacttctcatccacgagtgctcacatttgtactggtgacgg

SEQ ID NO: 219019 - DNA, 523 bp, Unknown
  Bacterial polypeptide expressing nucleotide sequence isolated from the Sargasso Sea
aaagcagaagttttaacagttaatggatcagaaaaaacagtaccaggcctgatggcaattggagaagcagcatgtgtatcagttcatggagctaatagacttgggtcaaattcattaattgatttagttgtgtttggaagagccgcagcaaaaagggctgctgaactaatcaaaccaggcgcacctcatgaaaaaatctcggagacagaaactcagaagtgtttagatagatttgataaattaagaaatgcacagggagataatagtactgcagaattaagactagcaatgcaaaaaacaatgcagtcaaaatgcgcagtgtttagaacagaaaaaaatttagaggaaggtgttaacgaaattagaaaaacttatgatggcatggactcaatctcagttaaggacagatctttagtttttaatacagatttagtagaaaccttagagtttgataatttaattagacaagcagtaaccacagtagactctgcatatcatagaaaagagagtagaggagctcata

SEQ ID NO: 219020 - DNA, 771 bp, Unknown
  Bacterial polypeptide expressing nucleotide sequence isolated from the Sargasso Sea
tatggaatttgtacaatttcatcccacaggaatctacggacatggcactttaatatctgaaggagttagaggtgaaggaggatatttattgaattccaaaggtgaaagatttatggagaaatatgccccgaaagctaaagatcttgcatctagagatgtggtaagtagatcaatagcggttgaaattaatgagggaagaggagttggaaaagaaaaagatcatgtacatcttcatttagatcatttagatccagatgtaattgagaaaagacttccgggaatttcagagtcctcaagattatttgccgacgttgatgttacgaaagaaccaataccagttgttcctacagtgcattataatatgggtggtattccaacaaattataaagctgaagttttaactgtaaatggttcagaaaaaattgtacctggattaatggcaattggtgaagcggcatgtgtttctgttcatggagcaaatagactaggatcaaattcattaattgatctagtagtttttggaagagctgctgcaaaaagagctgcagaactagtaaaatcaggaactcctcacgaagaaatatcaaaatcagaaacagaaaaatgtttaaatagattcgaaaaattaagaaatggaaatggaacgaatagaactgctgatctaagattggctatgcaaaaaactatgcagtcaaagtgtgcagtatttagaactgaaaaaactttaaaagaaggagtagaagatataagaaaaccatttgaaggaatgga

SEQ ID NO: 219021 - DNA, 771 bp, Unknown
  Bacterial polypeptide expressing nucleotide sequence isolated from the Sargasso Sea
aaactttttctggagttgatgtaactaaagagccaataccagttgtacctaccgttcattataatatgggtgggatacccacaaactataaggcagaggtattaacgttaaacggttcagagcaaacagttccaggtctcatggcaatcggagaagccgcttgtgtgtcagtgcatggagcaaataggttaggatctaattcactgatagatttagtggtatttggaaaagcggcagcaaaaagggctgcagaaatagtcaaagtaggatcttctcatgagagtgtctcaaattccgaaaccgataagtgtttagacagattcgataaaattagaaattctaatgggactacaaaaacttctgaacttagactatcaatgcaaaaaactatgcaaagtaaatgtgcagtttttagaaccgaagagacacttcaacagggagtaaatgatattagaaaaccactagagggtatgaaagatctaaatgtaaaagataaatcattactttttaatacagatctagttgaaagtttagaattcgataatttaataaggcaagcgatgaccacaatggactcggcctttcacagaaaagaaagcagaggagcacacgctagagaggattttacaaaaagagatgataaaaactttatgaaacataccttagcgtggcaaaaagaaaatgaagtcaaagtgagatatagagatgttcactctagaaccctaactaacgatgtacagtattttccaccgaaggaaagagtttattgat

SEQ ID NO: 219022 - DNA, 724 bp, Unknown
  Bacterial polypeptide expressing nucleotide sequence isolated from the Sargasso Sea
tatgaaatcttacaaaattatagatcacaattatgatgttgttgttcttggtgccggaggctcaggacttagagcagctgttgggcttagcgaagctggcttaaagactgcatgtatttcaaaagtttttccaactcgaagtcatacttcagccgcacaaggaggtatatctgcagctttgggaaatatgggtgaagatgactggcgttggcacatgtatgatacagtcaaaggatccgattggcttggagatcaagactccatagaatatttatgtaaagaggcaccaagagcagtgcttgaattagaacaatatggagtgccatttagcagaacagaagatgggaaaatttatcaaagaccttttggaggtatgacaaaaaattacggaaatgaaacagtacaaagaacgtgtgcagctgcggatagaactggacatgcaattcttcatacgctttatggacaagcactaaaacataacacagaattctttattgagtattttgctttagatcttttaatgaaagatgggcagtgcaagggattaattgcttggaatttaaacgatggaactttacatcgttttagatctcatattacaattattgcaaccggaggatatgggaaagtttactattctgctacatctgcacatacttgtactggagatggaaatgcaatggtgttaagagctggccttcctctcccaagatatggaatttgt

SEQ ID NO: 219023 - DNA, 589 bp, Unknown
  Bacterial polypeptide expressing nucleotide sequence isolated from the Sargasso Sea
atgagttcgtataaaattatagatcataactacgatgtggtagttctcggagccggtggttcgggcttaagagcagccgtgggtttatctgaggcaggtttaaaaactgcatgcatttcaaaagtttttccaactcgaagccatacctcagctgctcagggaggaatatcagcagccttaggaaatatgggagaagacgattggcgttggcacatgtatgatacagttaaaggttcagattggcttggagatcaagatgctattgaatatttatgtaaagaggcacctagagccgtggttgaattagagagatacggagttccttttagcagaacagatgatggtaaaatttaccaaagaccttttggtggtatgacaaaaaattacggtaatggcacagctcaaagaacttgtgcagctgcagatagaacagggcatgcaattttgcacactctttacggacaagctttaaaacaacaaactgaattttttattgaatattttgctttagacttaattatgaagaatggagagtgtaaaggtgtaattgcttggaatttaactgatggaacaattcacagatttagat

SEQ ID NO: 219024 - DNA, 795 bp, Unknown
  Bacterial polypeptide expressing nucleotide sequence isolated from the Sargasso Sea
gaaagatttatggaaaggtatgcacctaatgcaaaagatttagcatccagagacgtggtaagcaggtcaatggagatggaaattaatgaaggaagaggcgcaggaaaaaataaagatcatataaaccttcatttagatcacatagataaaaaagtaatagatgaaagattgccgggaatatcggaggcagcaaaaacttttgcaaatgttgatgtaagtaaggaacctattccagttgtacctacagttcattataacatgggaggaattcccacaaattataaagcagaggtgcttactttaaacggtgcagaaaaaactgtaccaggattaatggctatcggagaagcagcgtgtgtttcagttcatggggctaatagattgggatcaaattctttaattgatctagttgtttttggaagagctgctgcaaaaagagctgcagaactagtcaagccaggtagtcctcatgaagaagtatctagctctgaaacggataaatgtttagacagatttgataaaattcgaaattcaaatggttcaacaaaaacatctgaacttaggttaaaaatgcaaaaaacgatgcaaacaaagtgtgctgtgttccgaacagaaaaaactcttaaagagggagtagatcaaattcgaaagccctatgagggaatgagcgatatttctgtaaaagacaaatctttattatttaatactgatttagtggaaaccctagaatttgataatttgatcagccaggcacttacaactatggactctgcatacaacagaaaagaaagtaga

SEQ ID NO: 219025 - DNA, 858 bp, Unknown
  Bacterial polypeptide expressing nucleotide sequence isolated from the Sargasso Sea
aaaataaagatcatattcatttgcatattaatcatatagatccaaaaattatagaaaatcgtttaccaggtatttctgagtctgtggaaacatttgtgcacagagatgttactaaagatccaattcctgttgtcccaaccgttcactataatatgggaggtataccagctaactataaagcagaagttataacttcaaatggaagtgataaaattgtaccaggattaatggctataggagaagccgcatgcgtttctgtgcatggagcaaatagattaggttcaaattcattaatagatttagttgtttttggaaaatcagcagcgaatagagcttcagaattaataaaaccaaactcaccacatgatgaaatttcgaaaagcgaaacagaaaagtcactcaatagatttgatagattaagaaatggcgatggatcgaataggacctcagaacttagactgtctatgcaaaaaacaatgcaagcaaaatgcgcagtatttagaactgaaaaaacactaaaagaaggagttagtgaaattaaaaaaacttttgaaggaatggaatctatagcggttaaagataggtctctaatatttaatacagatttaatggaaactctagagttcgataatcttatacgtcaggcaattaccactatggaatcagcatataatagaaaagaaagccgtggtgctcatgcgcgagaggattttcctaaaagagatgataaaaatttcatgaaacatactttaagctggcataacggcaaagaagttaaaattaattaccgacaagtaaatttatcaacattaacaaatgatgttcaaacttttccaccaaaagaaagagtttactaat

SEQ ID NO: 219026 - DNA, 910 bp, Unknown
  Bacterial polypeptide expressing nucleotide sequence isolated from the Sargasso Sea
agaacagatgatggcaagatttatcagagagcattcggaggaatgaccacgcactttggcgatggcatagctcaaagaacatgtgccgcagctgatcgaaccggacatgcaatgttgcatactttgtatcaacagtccataaagaatcaggcagagtttttcatcgaattctttgctctggatttgattatggaagatggagtatgcactggcgtagttgcgctggagatggccacgggtaagattcatgctttcagatcacaaagagtcatattggctactgggggccacggcagggcttacttttcgtgcacagccgcacacacatgcacaggcgatggttctggaatggcacttagagcgggtttgccgcttcaagacatggaatttgtccaatttcatccaacgggtatttacggcgttggctgtctgatcacagagggtgttcgaggagagggaggatacctcacaaattctgatggcgaacgttttatggaacggtatgcgcccaatgcaaaagaccttgcatcaagagatgttgtcagtcgttcaatgacaatggaaataatagaaggcaggggtgtgggtgaaaagaaagaccacatccatctaaatcttcaacatttgggaccggatgtaattgaggaacgtcttccaggaattgctgagaccgcaagagtctttgcagatgttgatgtaactaaagatccaatccctgtcttgcccactgtccattacaatatgggcggtgtacctacaaacatgcacacggaggtcattaccaagaactccagtggtgatatggaaattgtcccaggattaatggcggtaggtgaagcggcctctgtatcagtccatggcgctaatcgattgggatcaaactcgcttctggatttagtggttttggcag

SEQ ID NO: 219027 - DNA, 748 bp, Unknown
  Bacterial polypeptide expressing nucleotide sequence isolated from the Sargasso Sea
gtaattgaggaacgtcttccaggaattgctgagaccgcaagagtctttgcagatgttgatgtaactagagatccaatccctgtcttgcccactgtccattacaatatgggaggtgtacctacaaatatgcacacggaggtcattaccaagaactccagtggtgatatggaaattgtcccaggattaatggcggtaggtgaagcggcctctgtatcagtccatggcgctaatcgattgggatcaaactcgcttttggatttagtggtctttggaagagagtcttccattcaatgtcaaaaaacaatcaaaccaatggagacacaaaacaaggtcaatcaaaatgaattggataagatcattgataagtttgattccattcgattttcaaaaggatcacttccaacagcagagattagagccgaaatgcaaagcattatgcaaaagcatgcatctgtatttagaacggaagaattaatgaaagagggcgtggaaaaactttcctcatgcatagattcgttcaaagatgtatctgttagtgatcggggtttagtttggaataccgatttgattgaaacccttgaactggaaaatctactaggccaagcgatcattacgattcaaagtggtcaggttagaaaagaaagtcgaggcgcgcatgcaagggatgactatccagatcgagacgatgagaactggttaattcatagtttgggttggatggatgcgaataataatgtgactattggat

SEQ ID NO: 219028 - DNA, 882 bp, Unknown
  Bacterial polypeptide expressing nucleotide sequence isolated from the Sargasso Sea
cggtcttagagctgcggttggtttatcagaagccggcctgaaaacagcttgcattttaaaagtctttccaacgagaagccacacatctgcagctcaaggaggcatttcagcggcacttggaaatatgggagaagacgattggagatggcatatgtatgatacagttaaaggttctgactggttaggcgaccaagatgctatagaatatttatgtaaagaggctccaagagcagtagtagaattagaaagatacggtgttccatttagtagaacagaagatggaaaaatttatcaaaggccctttggtgggatgacaaaaaattatggaaatggcacagcacaaagaacatgtgctgctgctgatagaaccggccatgcgattttgcatactctttatggtcaggcactaaaacataaaacagagttttttattgaatattttgctttagatttaattatgaaaaatggtgagtgcaaaggagttatagcttggaacttaacagatggtacaattcatagatttaggtcgcacattacaataattgcaacaggcggttatggaaaagtttattattcagctacctcagctcatacttgcactggagatggtaacgcgatggtgctaagagctggattgcctttacaagatatggagtttgttcaatttcatccaacaggcatttatggagtaggatgtttaattactgaaggtgcgagaggagaaggaggattcttagttaacggtaagggtgaaagatttatggaacgttacgcaccaaatgcaaaagatttagcatctagagatgtggtaagtagatcaatggaaatggaaattaatgaaggaagaggagttggtaaagataaagatcatataaatttaca

SEQ ID NO: 219029 - DNA, 580 bp, Unknown
  Bacterial polypeptide expressing nucleotide sequence isolated from the Sargasso Sea
atgaataaggcttatcaggtagtagatcatcattatgatgttgttgttgtaggggcaggaggatctggattacgctcaactctaggtttagcagaagctggcttaaagacagcatgtatctcaaaggtatttccaaccagaagtcatacagttgcagctcaaggaggtattggagcagctcttggaaatatgggtgaagacaattggaaatggcatatgtatgacactgtcaaaggctctgattggttgggtgatcaagatgccatagagtatttatgtgccaatgctccagaagcagtaattgaacttgaagaatatggcatgccattcagcagaacagacgatggtaaaatatatcaaaggccatttggtggtcacttaactaacaatggagaaggagcgccagcgatgcgagcatgtgcagcagctgatagaacaggacacgccttgcttcatactctgtaccaacaatcacttaaatacaatgtagagttttttatagaatattttgttttagatttagtcatggataaagatgggaattgcaaaggtattgtcgcttggtgtttagaggacggaa

SEQ ID NO: 219030 - DNA, 967 bp, Unknown
  Bacterial polypeptide expressing nucleotide sequence isolated from the Sargasso Sea
attgaaagcatattctcatgaaacccacgagtatgatgtagttgttgtgggcgccggtggctcaaggcttcgtgcaactttgggcatggctgagcaagggctcaaaacagcttgcataacaaaggttttccctactcgttcgcataccgtagcggctcaaggtggcatagcggcttcacttggaaacatgggtcctgatcattggcagtggcatatgtatgatacggttaaaggctcggattggcttggtgacaccgatgctatggagtatttggctagagaagcacctaaggctgtatatgagctggaacactatggggttcctttcagtagaactgaaaagggtgagatttatcaacgtccgtttggcggtcatacgacagaatttggtgacggaccgccagttcaaagaacgtgtgcggcggcggataggaccggtcatgcaatcctgcatacattatatggtcaatcactgaagcagaacgctgaattctatattgagtactttgctgttgatttgataatggccgaagatgggcgctgccaaggtgttgtttgctggaagttggatgatgggtccttccatgtgtttaactcgaaaatggttgtcctcgcaaccggtggctacgggagagcgtattttagcgcaacatcagctcatacatgtaccggtgatggtggtggcatgattgctcgtgctggacttccgcttcaagatatggagtttgtacaatttcacccaaccggcatttatggttcaggctgtttaattacagaaggggctcgaggtgagggtggttatttgactaattcagagggagaacgtttcatggagcggtacgctccacattataaagacttagctcccagagattacgtaagccgctgcatgactatggaaattcgtgaaggtcgaggcgcgggtaagtcaggagatcacatacatcttaatctgagtcatttatca

SEQ ID NO: 219031 - DNA, 967 bp, Unknown
  Bacterial polypeptide expressing nucleotide sequence isolated from the Sargasso Sea
actggagatggaaatgcaatggtgttaggagcagttttacctttacaagacatggaatttgtacaatttcatccaactggaatttatggagttggttgtttgattaccgagggagttagaggagaaggaggatttttagttaatggtaaaggagaaagatttatggaaagatatgctcctaatgcgaaagacttggcttccagagatgttgtaagcagatcaatggaaatggaaattaacgagggaagaggtgcgggaaaagataaagatcatataaaccttcatttagatcacatagataaaaaagtaatagatgagagattaccaggtatttcagaggcagcgaaaacttttgcaaatgttgatgtcagcaaggagcctattccagttgttccaacagtacattacaatatgggaggaattcccacaaattataaggcagaggtactcactttgaacggttcagaaaaaactgttccaggattaatggctataggagaagcagcttgcgtttcagttcacggagctaatagattaggatcaaactctttaattgatttagtagtttttggaagggctgctgcaaaaagagctgcagaaattttaaaacctggtagcccacatgaagatgtttcgaactcagaaacagataagtgtttgaatagatttgataaaattagaaattcaaatggttcaacaaaaacatcagaacttagattgaaaatgcaaaaaacaatgcaatctaagtgtgctgtattcagaacagaaaaaactttaaaggaaggtgtagatcaaattcgaaagccttatgaagggatgagtgatgtctctgtaaaagataaatcattgttatttaataccgatttagtcgaaaccttggaatttgacaatttaattagtcaagctcttacaactatggactcagcatacaatagaaaagaaagcagaggagctcacgcaagagaag

SEQ ID NO: 219032 - DNA, 622 bp, Unknown
  Bacterial polypeptide expressing nucleotide sequence isolated from the Sargasso Sea
aatgagtgcatataaaattatagatcacgaatacgatgttgttgtactaggtgctggtgggtctggtttaagagcagctgtaggtttatctgaagctggtttaaggactgcgtgtatatctaaagtttttccaacaagaagccatacttcagctgcccaaggtggtatttcagctgctttaggaaacatgggagaagatgattggagatggcacatgtacgatacagtaaaaggctctgactggttaggtgatcaagatgcaatagaatatttatgtaaagaagctcctagagcagttgtagaattagaaagatatggtgttccatttagtagaacagatgatggaaaaatttatcaaagaccttttggaggaatgacaaaaaattatggaaatgggacggctcaaagaacatgtgctgctgctgacagaaccggtcatgcaattttacatactttatatggacaagctttaaaacataacacagaattttttattgaatattttgcattagatttaattatgaaaaatggagaatgtaaaggtgttattgcttggaatttaacagatggaacaattcacagatttagatctcacataactataatcgcaacaggtggttac

SEQ ID NO: 219033 - DNA, 727 bp, Unknown
  Bacterial polypeptide expressing nucleotide sequence isolated from the Sargasso Sea
gatggcacgatacataggttcaaatctcatataacaataatagctacaggcggttatggcaaaatttattattccgctacttcggctcacacttgtactggagacggcaatggaatggttttaagagctggtttgccattacaagatatggaatttgttcagttccaccctactggaatatatggtgttggatgcttaatatcagaaggagtaagaggtgaaggtggttttcttttaaattctaaaggtgaaagatttatggagagatatgctcctaatgccaaagatcttgcttcaagagatgtagtgagcagatctattgctatagaaataaatgaaggaagaggagtaggaaaagaaaaagatcacgtacatcttcacttggatcatctagatcccaaagtaatcgatgataggcttccaggtatagcagagtcagcaaaaactttttcaggagttgatgtaaccaaagaccctataccagtagtgccgactgttcattataacatgggtggaatacctactaattacaaagcagaggttttgacattaaatggatctgagaagacagttcctggacttatggcaataggtgaagccgcttgtgtttccgttcatggtgcaaatagattgggatcaaattcattaatagatttagtagtttttggaaaagctgctgctaaaagagctgctgagttgattaaacctaatacagctcatgacattc

SEQ ID NO: 219034 - DNA, 825 bp, Unknown
  Bacterial polypeptide expressing nucleotide sequence isolated from the Sargasso Sea
tgctgcagctgacagaacaggtcatgccattttacacacactgtacggacaagcactaaaacataaaacagaattttttattgaatattttgccttagatttattaatgaaagatggtgcttgtaaaggattaatcgcttggaatctaaacgatggtactattcatagatttagggcgcatactgtaataatagcgacgggtggatacggaaaagtttattattcagcgacatcagctcatacttgtaccggagatggtaatgcaatggttttaagagcaggacttccattacaagatatggaatttgtgcaatttcatcctacaggaatttatggacacggtactttaatcactgagggtgcaagaggtgaaggtggatatcttacaaattctaagggtgaaagatttatggaaagatatgcaccaaaagcaaaagatttagcatcaagagatgttgttagtagatcaatgtctattgagattaatgaaggaagaggtgtaggaaaagatctagatcacgttcatttaaatttaagtcatttggataaagatatcattgaaagcagattgccaggtattactgatgcagcaagattatttgcaaatgttgatgttactaaagagccaatcccggttgtgcccactgtgcattataatatgggaggtattccaactaattataaagcagaggtcttaacagtaaatggttcagaaaaaacagttccaggattaatggcgattggagaagcggcttgtgtgtctgttcatggagctaaccgactaggttcaaactcattaattgatttagttgtttttggaagagc

SEQ ID NO: 219035 - DNA, 722 bp, Unknown
  Bacterial polypeptide expressing nucleotide sequence isolated from the Sargasso Sea
tgatggaaagatttatcaaagaccatttggtggtatgacaaaaaattatggtaatggaattgttcaaagaacctgtgcagcagcagatagaactggtcatgcaatattgcatactttgtatggtcaagctttaaaacataagacagagttttttatagaatatttcgcgttggatttattaatgaaagatggagagtgtaaaggtttaatagcatggaatctaaacgatggaacaattcatagatttagagcacattcagttataatcgcaacaggtggttatggaaaagtttattattctgctacctctgcccacacatgtaccggcgatggtaatgcaatggtgcttagagcgggattacctttacaagatatggagtttgttcagttccacccaacaggaatttatggtcatggcacgttaataactgaaggcgctagaggagaaggaggatatcttacgaactctaaaggtgaaagatttatggagaggtatgctcctaatgctaaagatttagcttctagagatgttgtaagtagatctatgtcaatagaaattaatgaaggaagaggtgtaggaaaagatcaagaccatgttcatttaaacttaagtcacttggataaaaaaattatagaaagtagattacctggtataactgatgcagcgcgattatttgctaatgtagatgttaccaaagaaccaattccagtagttcctacag

SEQ ID NO: 219036 - DNA, 787 bp, Unknown
  Bacterial polypeptide expressing nucleotide sequence isolated from the Sargasso Sea
atgccttttagtagaacagatgatggcaagatctatcaaagaccttttggcggacacttaaccaataatggcgagggagctcctgcaatgagagcttgtgcagcagctgatagaacaggacatgctttactccatacactttatcagcaatcacttaaaaataatgtagaattttatattgaatattttgttttagatttaatttctgatgatcaaggtaattgtattggtgtggtaacatggtgcttagaagatgggtcaatccatcgatttttatctcatcaaacaattctagctactggtggatatggaagagcttacttctcatctacgagtgctcacatatgtaccggtgatggtagtgcaatggctttaagacaaaacctacctctttctgatatggaatttattcagttccatccaactggagtttacggtgcaggagtgttaatcactgaaggagcaagaggagaaggtggatatttaactaatagtgatggtgaaagatttatggaaagatatgctcccaatgcaaaagatctagcatcaagggatgtagtaagccgtgcaatgacaattgaaattagtgaaaatagaggctgtggggacaatgccgatcatgtgctccttcatcttgaacacattgatgctgatacattacataaaagattgccaggtatttcagaaactgcaaaaatatttgccggcgttgatctgactaaagatccaataccagtccttccaacggttcattataatatgggtggtataccaacaaattatagaa

SEQ ID NO: 219037 - DNA, 837 bp, Unknown
  Bacterial polypeptide expressing nucleotide sequence isolated from the Sargasso Sea
gcatactgtaataatagcgacgggtggatacggaaaagtttattattcagcgacatcagctcatacttgtaccggagatggtaatgcaatggttttaagagcaggacttccattacaagatatggaatttgtgcaatttcatcctacaggaatttatggacacggtactttaatcactgagggtgcaagaggtgaaggtggatatcttacaaattctaagggtgaaagatttatggaaagatatgcaccaaaagcaaaagatttagcatcaagagatgttgttagtagatcaatgtctattgagattaatgaaggaagaggtgtaggaaaagatctagatcacgttcatttaaatttaagtcatttggataaagatatcattgaaagcagattgccaggtattactgatgcagcaagattatttgcaaatgttgatgttactaaagagccaatcccggttgtgcccactgtgcattataatatgggaggtattccaactaattataaagcagaggtcttaacagtaaatggttcagaaaaaacagttccaggattaatggcgattggagaagcggcttgtgtgtctgttcatggagctaaccgactaggttcaaactcattaattgatttagttgtttttggaagagcggcagcaaaaagagctgctgaacttataaagccaggagcacctcatgaggaattaagtgatacagaaactcaaaaatgtttagatcgttttgataaaattagaaatgcaaaaggcgatattggaacagctgaacttagactgtcgatgcaaaaaacaatgcagtcaaaatgtgcagtttttagaactga

SEQ ID NO: 219038 - DNA, 530 bp, Unknown
  Bacterial polypeptide expressing nucleotide sequence isolated from the Sargasso Sea
aatgactaattcatacaaaattatagatcaccattatgacgttgtagttgttggggctggagggtcaggactgagagctacccttggatgtgcagaagccggattaaaaacagcctgtatatcaaaagtgtttccaacaagaagtcatactgttgcagcacaaggtggaattggagcagccctaggtaatatgggtgaagataattggaagtggcacatgtatgatacagttaagggttcagactggctcggagatcaagatgcaattgaatacttatgctctaaagcccctgaagcagtaattgaacttgaagaatatggcatgccttttagtagaacagatgatggaaagatctatcaaagaccttttggtggtcacttaactaataatggcgagggagcacctgctatgagagcttgtgcagcagctgatagaacgggtcatgctttactccatacactttatcagcaatcacttaaaaataatgtagaattttatattgaatattttgttttagatttaatttctg

SEQ ID NO: 219039 - DNA, 711 bp, Unknown
  Bacterial polypeptide expressing nucleotide sequence isolated from the Sargasso Sea
tgctcatacatgtactggcgatggtaatgcaatggttttaagagctggattacctttacaagatatggaatttgttcaatttcatccaacaggaatttatggacatggaacacttatttcagagggagtaagaggcgaaggaggatatttagtaaatgccaaaggtgagagatttatggaaagatacgcacctaatgcaaaagatttagcctctagggatgttgttagtagatcaatgtctatagaaattaatgaaggtagaggtgtgggtgatgaaaaagatcatgttcatttgcatttaagtcatttagacaaaagtataattgaaaataaattaccaggtataacagaggcagcacgattatttgcaaatgttgatgttacgaaagacccaattccagtagttccaacagttcattataatatgggtggaattcctacaaattataaagcagaagttttgactgtaaatggttcagaaaaaactgttccaggtttaatggcaattggtgaagcagcatgtgtatctgttcatggagcaaatagactgggctcaaattcattaattgatttagttgtgtttggaagagctgctgcaaaaagggctgcagaactaattaaaccaggtgaacctcatgaggatattgatgagactgaaacacaaaaatgtttagatagatttgataaattaagaaatgctcaaggaagcaa

SEQ ID NO: 219040 - DNA, 700 bp, Unknown
  Bacterial polypeptide expressing nucleotide sequence isolated from the Sargasso Sea
tggtatacctactaattataaagcagaagtattaactgtaaatggttctgaaaaaacagttcctggactaatggctattggagaggctgcctgtgtttcagttcatggagctaatagattgggttcgaactctttaattgatcttgttgtatttggaagagctgctgcaaaaagagctgccgaattaattaaacctggtatgccacatgaagaaattagtgagttagagacacaaaaatgtttagatcgttttgataaaattagaaattctgaaggaaatgttggcactgctgaattaagattgtccatgcagaagactatgcaatcaaaatgtgctgtattcagaacagaaaaaacacttaaagagggtgttgatgagattaaaaaaacgtttgatggtttagagactatatctgtcaaggataaatctttaatatttaatactgatttagttgagaccttagaatttgataatttaattagacaagcagtagtaactgttgattctgcttttaatagaaaagagagtagaggtgcacatgccagagaagactatcctaaaagagatgatgataaatttatgcaacacactctagcatggtgtgatggaaaaaataccaaaataagctacagagaagtacataaatctaccttaactaatgatgttcaatattttccacctcaggaaagaatttattaa

SEQ ID NO: 219041 - DNA, 937 bp, Unknown
  Bacterial polypeptide expressing nucleotide sequence isolated from the Sargasso Sea
tttgttcaaagctcctgaggctattgaagatttagaagaatatggaatgccatttagcagaactgaggaaggtaagatttatcaacgacctttcggaggccacttaactagtaatggtgagggtccaccagctatgcgagcttgtgctgcagcagatagaacagggcatgctttgttgcacactttataccaacaatctttaaaaaattcagttaaattttttattgaatattttgttttagatttacttatagatgatgatggaacttgcaaaggagtaattgcatggagtctggaagatggaacattgcacagattcttatctcaccaaactattatcgcaacaggagggtatggacgtgcatatttttcttcaacaagtgctcacatctgtactggtgatggaagcgcaatggttttaagacaaggattgccgttatcagatatggaatttattcaatttcatcctactggagtttacggagccggtgttttaataacagaaggtgccagaggagaaggaggttatttaacaaatagtgatggagaacgttttatggagcgttatgcccctaatgcaaaagatttagcttcacgagatgttgtaagtagagcaatgacgattgaaataaatgaaaacagaggatgtggagaaaattttgatcatgtgttacttcatctagagcatattaattcgaacactattcacaaaagattaccaggaatatcagaaacagcaaaaatttttgcaggcgtagatttaactaaagaccctattccagttttacctacagtacactataacatgggaggtattccaacaaattatagaaccgaagtacttaatccaacaactgataatcctgataaaatctgtgagggccttatggcagtcggagaagcagcttgtgtttctgtgcatggagctaatagataa

SEQ ID NO: 219042 - DNA, 893 bp, Unknown
  Bacterial polypeptide expressing nucleotide sequence isolated from the Sargasso Sea
agcatcacgagatgtagtaagcagatcaattgctactgaaattaatgaaggaagaggagtaggtaaagaaaaagatcatgtatatcttcacttaaaccatttagatccaaaagtaattgatgaaagattacctggaattgccgagtcatctagattatttgcaaatgttgacgttaccaaagatccaattccagtagtaccaacagtccattataatatgggtggaattccaacaaattataaagccgaagtgttaactgttaatggatcagaaagtacagttccgggactaatggcaattggagaggcagcatgtgtatctgttcatggagcgaacagattagggtcaaactctttaattgatttagttgtattcggtagatctgccgcaagaagagctgctgaattagtgaaaccaggaatggcacatgaggagatttcaacagcagaaactgataaatgtttagatagatttgataaattaagaaatggagctggagaaaatagaactgccgacttaagactttctatgcaaaaaactatgcagtctaaatgtgcagtttttagaacagaaaaaactttaaaagaaggagttgaggaaatcaggaaaccatttgaaggcataaaatctataaatgttaaagacaagtcccttatatttaatactgatttagtagaaactttagagtttgataatcttatcagacaagcaattgttactatggactcagcatattctcgaaaagaaagcagaggagctcatgctagagaagattatcctaatagaaatgataaaaattatatgaaacatactttatcatggtgtgaaggagctaaatcaaaaattacttatagagatgttcataagtcaactctaacaaatgaggttcaat

SEQ ID NO: 219043 - DNA, 844 bp, Unknown
  Bacterial polypeptide expressing nucleotide sequence isolated from the Sargasso Sea
atttctgaaggtgtaaggggtgaaggtggttatttagtaaattccaaaggagagagatttatggaaagatatgctccaaaagctaaagatcttgcctcaagagatgttgtaagtaggtcaattgcagttgaaattaatgagggaagaggagttggaaatgaaaaagatcatgttcatttacacctgaaccacttagacccaaaagttatagaagaaagacttccaggtatatcagagtcttcaagattattcgcgaacgtagatgtaacaaaagaacctataccagtggttccaactgttcactataacatgggaggtattcctacaaattataaagctgaagttttaactttaaatggatcagaaaaaactgttccaggattaatggctattggtgaggcagcatgtgtgtctgttcatggagctaacaggcttggatcaaactctttaattgatctggttgtttttggaagagctgccgctaagcgtgcagcagagttagtaaaaccaggcacacctcatgaagaaatcccacagtctgagactgataaatgtttagagagatttgatagacttagaaatgcatctggaacaaataatactgcagatttaagattagcaatgcaaaaaacaatgcagtctaagtgtgctgttttcagaactgaaaaaactttaaaagagggcgtaaatgaaatcagaaaaccttatgagggtatggatgatctttctgtaaaagataagtctctaatttttaataccgatcttgtagaaacattagaattcgataatttgatcagacaagcgataactacaatggactctgcttatcatagaaaagaaagta

SEQ ID NO: 219044 - DNA, 832 bp, Unknown
  Bacterial polypeptide expressing nucleotide sequence isolated from the Sargasso Sea
gaaggagtgagaggtgaaggtggatatcttttaaattccaagggcgaaaggtttatggaaaaatatgcgcctaaagcaaaagatttagcttccagagatgttgttagtagatcaatagcaattgaaattaatgaaggaagaggagttggtaaagataaagatcatgtacatcttcacttaaatcacttagacccaaaagttattgatgaaagattacctggaattgcagagtcgtcaagattgtttgcaaatgttgatgtaaccaaagagccaatcccggtagttccaactgttcattataatatgggtggtatacctacaaattataaggcagaagtattaaccgtaaacggttcagagaaaacagtcccaggactgatggcaattggagaagctgcatgtgtttctgttcacggggcaaatagactgggttcaaactcgttaattgatttggttgtttttggtagagctgccgcaaaaagagctgcagagttaattaaaccaggaactccacacgaggatattccaatttcagaaactgaaaagtgtttagaaagatttgatagtttaagaaatggtagtggtgataacagaacagcagatttaagattatctatgcaaaaaactatgcaatcaaaatgtgctgtttttagaactgacaaaacattaaaagaaggagttgaagaaatcagaaaaccatatgaaggaatggataatataaatgtaaaagataaatcgcttatatttaacactgatttagtagaaacattagagtttgataatttaatcagacaggcaataacaacaatggattcagcgtatagtagaaaag

SEQ ID NO: 219045 - DNA, 759 bp, Unknown
  Bacterial polypeptide expressing nucleotide sequence isolated from the Sargasso Sea
aatgagtgcatataaaattatagaacatgaatacgatgtagtagttcttggagctggtggttcaggtttaagagctgccgttggattatcagaggctggtttgaaaaccgcttgtatctcaaaagtttttccgactagaagtcatacttccgcagctcaaggaggtatttctgctgctttaggaaatatgggagaagatgattggagatggcacatgtacgatacagtcaaaggttcggactggcttggagatcaagacgctatagaatatctttgcaaagaagcaccaagagcagttgtcgaattagaaagatatggtgttcctttcagcaggaccgaggatggtaagatttatcaaagaccttttggagggatgacaaaaaattatggcaatggaactgctcaaagaacttgtgctgctgctgacagaactgggcacgctatcctacatacactttatggacaagctttaaagcaaaacacagaattctttatcgaatattttgctctcgacttaataatgaaaaatggtgagtgcaaaggtgttatagcatggaatttaacagacggaactattcatagatttagatcccatataacaattattgctaccggaggatacggaaaagtttattattcagcaacatcagctcatacttgtaccggtgatgggaatgcgatggtacttagagccgggctacctttacaagatatggaatttgttcaatttcatcccacaggaatctatggtgttggttg

SEQ ID NO: 219046 - DNA, 538 bp, Unknown
  Bacterial polypeptide expressing nucleotide sequence isolated from the Sargasso Sea
atgagctcctcatataatataattgatcaccattatgatgtagttgttgttggcgcaggaggttcaggactaagagccacactaggatgtgcagagtctggattaaaaactgcatgtatttcaaaagtatttcctacaagaagccatacagttgcggcacaaggaggaattggagcagctcttggaaatatgggggaagataattggaagtggcatatgtatgatactgttaaaggctctgattggttaggtgatcaagatgcaattgaatatttatgctcaaaagctcctgaggcagtgatcgaacttgaagaatatggtatgccttttagcagaacagatgatggaaaaatttatcaaagaccttttggcggacatttaacaaataatggcgaaggtgcacctgctatgagagcatgtgctgcagctgatagaacgggtcatgcacttcttcacactttgtatcaacaatccttaaaaaataatgttgaattctttatagagtattttgttctagatttaatttctgatgatagcg

SEQ ID NO: 219047 - DNA, 982 bp, Unknown
  Bacterial polypeptide expressing nucleotide sequence isolated from the Sargasso Sea
atatatcaacgtcctttcgggggtatgactaaaaattacggtaacggagtagctcaaagaacttgtgccgctgcagacagaacgggtcatgcaatattacatacattgtatggtcaagcattgaagaaaaaaacagaattttttatagagcactttgcattagatcttttgatgcataatgacaagtgtcagggagtattaacttggtctctacaagatggaacaataaatagatttagatcaaaaattacaattttagcaacaggtggatatggtagagcctatttttctgcaacatctgcacacacatgtactggtgatggaggtggtatggttttaagagcaggattacctctgcaagatatggagtttgttcagtttcaccccacaggaatttatggtgttggttgcttaataactgaaggtagcagaggagaaggaggttttttagttaactccgagggtgaaaggtttatggaaagatatgcaccatctgctaaagatttagcatccagagatgttgtatctcgatctatgactgttgaaattaacgaaggtagaggcgtaggaaaaaataaagatcacatataccttcacttaaaccatttagatccaaaagtattgagtgaaagactgccaggtatctcagagtcggcaaaagtatttgcgggtgttgatgttactaaagaaccaatacctgtattaccaactgttcattataatatggggggaatatcaactaattatcatgggcaagttcttacaaaagatgtaaatggttcggataaaatagtagatggcctaatggctgtaggtgaagcggcttgtgtttcagtacatggcgcaaacagattaggatcaaattcattaattgatctcgtagtatttggaaaggcagcatctaaaaaagctgccgaattggttaaacctaattcaaaacatgaaataattcctgatagtgaaacacaaaaatcttggacag

SEQ ID NO: 219048 - DNA, 649 bp, Unknown
  Bacterial polypeptide expressing nucleotide sequence isolated from the Sargasso Sea
tctgaaaaaactgttccaggacttatggctataggagaagcagcttgtgtttcagttcatggagcaaatagattggggtctaactctttaattgatcttgttgtttttggaagagcagctgcaaaaagagctgccgaactagttaaacctggtacacctcatgaggagatcaatgagtcagaaactcaaaaatgtttagatcgttttgataagattagaaactccgatggagatattggtactgctgaactaagattgtccatgcaaaaaacaatgcaatcaaaatgtgcggtttttagaacagagaaaacacttaaagagggtgttgatgaaatacgacaaacatttgatggattggattctttatcagttaaagataaatcattaatatttaatactgacctagtagaaactttagaatttgataatttaattagacaagctgttgtgacagttgactcagcttataataggaaagaaagcagaggagctcatgctagagaggactatccaaaaagagatgacgagaagtttatgcaacatacattagcttggtgtgatgggaaaaaatcaaaaataagttatagagatgttcataagtcaacgttaactaacgaagtacagtattttccacctcaggagagagtat

SEQ ID NO: 219049 - DNA, 739 bp, Unknown
  Bacterial polypeptide expressing nucleotide sequence isolated from the Sargasso Sea
cgatcccgggttgtacctacctgtcattacatgatgggcggttttcccaccaatgttcacggccaggcgctcaagctgaccggtggccatgaaggcgaagaacagttcgtgaacggtttgttcgcagtgggtgaagtggcctgtgtatccgtacatggcgccaaccgcttaggtggtaactcgttgctggatctggtggtctttggtcgtgcggcgggtctgtacattgaagatgctctgcgtcagggcatgacgcaatacgagccgcgtgatgcagacattgatgaggccctttcccgggttcgtcgttgggatgactccaaaggtggcgagtctgtctccgcactgcgcaaagagctgcagagtgtgatgcagaatcactttggtgtgttccgcaagggcgacctgatggccgaaggtgtagctaagctggccgatctgcgtgagcggattgccaacgcgcacttggatgacaagagcaagccattcaacaccgcgcgcattgaagcgctggagctggataacttgctggaagtggcggaagcgactgccatcgccgcggaaggccgcaccgaaagtcgtggtgcgcattctcgctacgattacccggatcgcgatgatgagaactggctttgccactccatcttcgaccccacagccaaaaagctgggcaagcgcgacgtgaacttcaaaccgaagaccgttgatactttccagcccaaggcgcggacctactaag

SEQ ID NO: 219050 - DNA, 859 bp, Unknown
  Bacterial polypeptide expressing nucleotide sequence isolated from the Sargasso Sea
aaaaacaaagaccatatacatttgcatattaatcatattgatccaaaaattatagaaagtagattaccaggaatatctgagtctgttgaaacttttgttcacagagacgtaaccaaagatccaattccggttgttccaacagttcattataatatgggaggtataccaactaactataaagcagaggtaattacttcaaatggtagtgataaaacagtaccgggattaatgtctataggagaggcagcatgtgtttctgtacatggagcaaacagattgggttcaaattcattaatagatttagttgtctttggaaaagctgcagcaaaaagagctacagaaattataaaaccaaattcttcacatgaaaatatttcaacaagcgaaacagacaaatgccttgatagatttgataaattaagaaatggcagtggttcaatcaaaacctcagaattaagattatcaatgcaaaaaacaatgcagtcaaaatgtgcagtatttagaaatgaaaaaactcttagcgaaggggttaaagaaatcaaaaaacctttggaagaaatgcaaaagatagctatcaaagatagatctatgatttttaatacagatttaatggaagcacttgagttcgataatcttatccgtcaagctgttacaactatagagtcggcgtaccacagaaaagaaagtagaggtgcgcatgctagagaagattttcctaaaagagatgataaaaattttatgaagcacactttaagttggcacaacggtaaagaagttaaaattggttatcgtaaggttaatttatcaacacttactaatgaagttcaaacttttccacccaaagaaagaatttactaat

SEQ ID NO: 219051 - DNA, 790 bp, Unknown
  Bacterial polypeptide expressing nucleotide sequence isolated from the Sargasso Sea
ggaattgcggagtcatcaagattatttgctaatgttgatgtaaccaaagaaccaattcctgtagtcccaactgttcactataatatgggaggaataccaacaaactataaggctgaggttttgacagttaatggttcagagaaaaccgttccaggattaatggcgattggagaagctgcatgtgtttccgttcatggtgccaatcgattaggttcaaattctttaatagatttagttgtctttggaagagccgctgcaaaaagagctgcagagttagttaaaccaggaatgtctcatgaagatatttcaaattcagagacagaaaggtgtatagaaagatttgataatttaagaaatggaaatggagataacagaacagcggatttaagaatttcaatgcaaaaaactatgcaatcaaaatgtgcagtttttagaacagaaaaaactttaaaagagggagtaaatgaaattagaaagccttttcaaggaatggataatataaatgttaaagataaatcattaattttcaatactgatttagtagaaactttagaattcgataatctaataagacaagcaattaccacaatggactcagcatataacagaaaagagagtagaggagctcatgctagagaagattttccaagtagagatgatcaaaaatatatgaaacataccttatcatggtgtgaaggaagcaaatcaaaaattgtttatagggatgttcataaatctacgctcactaatgaagtgcaatactttccaccacaagaaagaatttattaat

SEQ ID NO: 219052 - DNA, 1034 bp, Unknown
  Bacterial polypeptide expressing nucleotide sequence isolated from the Sargasso Sea
ggaatttgttcagtttcatcctacaggtatttatggacatggaactttaatatccgaaggagtaagaggtgaaggtggttaccttctaaattcaaaaggcgaaagattcatggagcgatatgctccaaaagccaaagaccttgcatctagagatgtggttagtaggtcaatagctattgaaattaatgaaggaagaggtgttggaaatgaaaaagatcatgttcatcttcatttagaccatttagatcctaaagttattgaaagtagattgccaggtatatcagagtcttcaaggttatttgcaaatgttgatgttacaaaagaaccgatacctgtagttccaacagttcattataatatgggtggaattccaactaattataaagcagaagttataactttaaatggttcagaaaaagttgttcctggacttatggcaatcggagaagcagcatgtgtttctgtacatggagctaacagattgggttcaaattcattaattgatcttgttgtttttggaagagcagcagcaaaaagagctgctgaattagttaagccaagatctccccatgaagatatttcggataatgaaactaaaaaatgtatagatagatttcatgagttgagaaatgctaagggtgaaaataaaacagctgacttaagattggctatgcaaaaaacaatgcaatcaaaatgtgcagtttttagaactgaaaaaactttaaaagagggtgtagaagaaattagaaaaccctatgatggaatggagtcaatatcagtaaaagacaaatctttaatttttaatactgatttagtagaaacattggagtttgataacttaataagacaggctatagttactatggattcagcatatgaacgaagagaaagcagaggagctcatgccagagaagactatccaaaaagagatgataatcattttatgaaacatactttatcgtggtgtgaaggaagtaaaactaaaattgattataaggaaagtaatagatcaactttatcaaatgatgtttcat

SEQ ID NO: 219053 - DNA, 993 bp, Unknown
  Bacterial polypeptide expressing nucleotide sequence isolated from the Sargasso Sea
agaaagaaaaaatttatcaaaggcctttggggggtatgacgactgagtatgaaaagggaattgcacaaaggacatgtgcggcggcagatgcaactggacatgctatacttcatacgctctacaatcagtctttgaaaaatgatgttgatttcttcgtagaatattttgtcattgatttaatattcgaagaaggaaaatgtgtcggtgtcctagcttggtgtcttgaagatggtaaaatacatctatttcaatctcacatggttattttagcaacaggaggatatggaagagcatatctctcatcaacatcagcacatacatgtactggtgatggtaatggtatggtattgagagctaatctgccactacaagatatggagttcatacaatttcatccaactgggatctatggcgcgggttgcttaatcactgagggtgcaagaggcgagggtggatacttaacaaactctgagggtgacagatttatgcctaaatatgcacctaatgcaaaagatttagcatctcgtgatgttgtcagtagagcaatccaaatggaggtaaatgctggaaggggagttggagcagaaaaggaccacgctcatttacaccttgagcatttagatgtagacacaataaacaataagcttcctggaatagcagagactgctcgaatattcgctggcgttgatgttactaaagatcctattcctgtaatacctacagtacattataatatgggtggcactccaactaatattaatacagaagtactggatgccgataataatgtcgttcctggtttaatggcaattggtgagggagcatgtgtatcagttcatggagctaatcgattgggatctaattctcttcttgaccttgtagtttttggaagatcagcagctaatcgcacattagaagtattaaaagataagcccgatagccatatcgaagtatctaaatctacaatcgataaaattctctccaagatttaac

SEQ ID NO: 219054 - DNA, 864 bp, Unknown
  Bacterial polypeptide expressing nucleotide sequence isolated from the Sargasso Sea
tgtatatcaaaagtttttcctaccagaagccatacctcagcagcgcaaggtggtatttctgctgctcttgggaatatgggtgaagacgactggagatggcatatgtacgatactgttaagggatcagattggctaggtgatcaagactgcatagaatatttatgtaaggaagccccaagagcagtattagaattagaaaggtatggagttccatttagtcgtacagaagatgggaaaatttatcaaagaccttttggaggaatgactaaaaattatggtaatgaaactgtccaaagaacatgtgctgctgcagatagaactggacacgccatattgcatactatgtatggacaagcattaaaacacaatactgaattttttatagaatattttgcattagacttgcttatgaaaaatggtgagtgcaaaggtttaatagcttggaatttaaatgatggaacaattcatagattcaggtctcatataacaataatagcaacaggtggttatggtaaaacatattattcttcgacatcagctcatacatgtacaggcgatggaaatgcaatggtattaagagcaggattgccattacaagatatggaatttgttcagttccatccaacagggatttatggacatggaaccttaatatctgaaggtgttagaggtgaaggagggtatctgttaaattctaaaggagaaagatttatggaacgatacgctccaaaagcaaaggaccttgcatctagagatgtagtaagtagatctatagcgctagaaataaatgaaggaagaggtgttggaaaagaaaaagatcatgttcatctccatttagatcacttagataaagaagttattgaa

SEQ ID NO: 219055 - DNA, 796 bp, Unknown
  Bacterial polypeptide expressing nucleotide sequence isolated from the Sargasso Sea
ccatttagcagaacaaaggatggaaaaatttatcaaagaccttttggtggaatgacaaaaaattatggcaatgaaactgtacaaagaacatgtgcagcagcagatagaacaggccatgcaatattgcatactatgtatggtcaagctttaaaacataatacagaattttttatcgaatactttgcattagatttattaatgaaaaatggagaatgcaaagggttaatagcttggaatttaaatgatggaactattcatagatttagatcccatataacaattatagcaactggtggatatggaaaaacgtattattcatctacttctgctcatacttgtactggtgatgggaatgccatggttttaagagctggtttgcctttacaagatatggaatttgtacaatttcaccccacaggaatttatggacatggaactttaatatctgaaggagttcgaggtgaaggagggtacttattgaattctaaaggtgaaagatttatggagagatatgctccaaaagctaaggatcttgcatctagagatgtagtaagcagatcaatagctgttgaaattaatgaaggaagaggagttggaaaagaaaaagatcatgttcaccttcatttagatcatctagatccagaagtaattgagaaaagacttccaggaatttcagagtcttcaaaattatttgccgatgttgatgttacaaaagagccaataccagttgttcctacagttcattataatatgggtggtattccaacaaattataaagctgaagttttaactgtaa

SEQ ID NO: 219056 - DNA, 709 bp, Unknown
  Bacterial polypeptide expressing nucleotide sequence isolated from the Sargasso Sea
ttgcgtgcaacgcttggtatgcccgcagcaggactcaaaacagcttgtatttccaaggtttttcccacccgaagccatacagtagcagctcaaggcgggattggggcagcattaggtaatatgtctgaagatcactgggaatggcacatgtttgatacggtgaaaggagcagattggttgggagaccaggatgccattgagtatatgtgtagagaagcggtacctgccgtggtcgaattagagcattttggtgtcccgttttctcgaaacgatgagggtaaaatttaccagcgcccttttggtgggcatatgcgaaattatggtgaggcgcccgtgcaaagagcatgtgcagcagcggacagaactggtcatgctattttacatactttgtatcaacaatgcttaaaaaacgaagcagaattttatattgaatatttcgttctggacttgatcatgggcgcagacggtgtttgcgaaggcgttatcacatggaatttagatgacgggacaatccatgtgttccgaagtcatcagattgttttagcgactggcggctatggacgtgcatatttttcagcaacttcagcccatacttgcactggtgatggaaatggaatggttgcacgtgcgggcattccgcttcaggaccatgaatttgttcagtttcacccgacaggtatttatggatcaggctgtttaattaccgagg

SEQ ID NO: 219057 - DNA, 586 bp, Unknown
  Bacterial polypeptide expressing nucleotide sequence isolated from the Sargasso Sea
atgaacgcatacaaaattatagatcatgaatatgatgtagttgttcttggagcaggtggatctggtttaagagcagcagttggtttatctgaagcaggcttaaaaacggcttgtatttccaaagtctttcccacaagaagtcatacctcagcagcacaaggtggaatttcagctgctttaggaaacatgggtgaagatgattggagatggcacatgtatgatactgttaaaggctcagactggcttggagatcaagatgctattgagtacttatgtaaagaagcacctagagctgttgttgaattagaaagatacggagtaccatttagtagaacagatgatggtaaaatatatcaaagaccctttggtggtatgacaaaaaactatggaaatggtacagcacaaagaacatgtgctgcagcagacagaacaggccacgctattcttcatacgctttatgggcaagccttaaaacaaaaaacggaattttttattgagtatttcgccttagacttaattatgaaaaatggtgaatgcaaaggagtaatagcttggaatttaactgatggaacgattcatagattta

SEQ ID NO: 219058 - DNA, 849 bp, Unknown
  Bacterial polypeptide expressing nucleotide sequence isolated from the Sargasso Sea
atcatatcaatttacacttagatcatttggacaaaaaagtgattgatgagagactccctggaatatctgaagctgcaaaaacttttgcaaatgttgatgtgaataaggacccaattcccgttgttcctacagttcattataatatggggggaataccaacaaattataaagcagaagttcttacattgaatggatctgaaaaaactgtgccgggcttaatggctattggggaagcagcttgtgtttcggtgcatggagctaatagattgggctctaattctcttatagaccttgttgtttttggaaaagcggctgcaaaaagagcagcggaaattgtaaaacctggaatgccacatgaagaagtttcaagttatgaaaccgagaagtgcttaagtagatttgataaaattagaaattcaaatggtacaaccaaaacatcagaattgagattaaaaatgcaaaagacgatgcaaacgaagtgtgcagtattcaggaccgaaaaaacattaaaagaaggcgtggatcaaattagaaaaccatatgaaggtatgcaagacatctctgtaaaagataaatctcttttatttaatactgatctagtcgaaactttagaatttgacaatttgataagtcaagcactaactacaatggactctgcatatcacagaaaagaaagtagaggagctcatgctagagaggattttacaaaaagagatgacaaaaattatatgaaacatactttagcttggcaaaaaggtaaaaaagttgaaataaagtatagagatgtacattctagaacattaacaaatgatgttcagtattttcctccaaaggagcgtgtatactaag

SEQ ID NO: 219059 - DNA, 976 bp, Unknown
  Bacterial polypeptide expressing nucleotide sequence isolated from the Sargasso Sea
aaagtttattactcagcaacttccgctcatacctgtacaggagatggtaatgctatggttttaagagctggattgccacttcaggatatggagttcgtccaattccatccaacaggaatatatggtcatggtactttaataaccgagggtgcacgtggagaaggaggatatcttacgaattctaaaggagaaagatttatggaaagatatgcaccgaatgcaaaagatttggcttcaagggatgtagtaagtcgatctatgtcaattgagattaatgagggaagaggtgttggaaaagatcaagatcatgttcatttaaatttaagtcatttagataaagaaattattgaaagcagactacctggaataaccgaggcatcaagattatttgcaaatgtagacgttacaaaagaaccaattcctgttgtaccaacagttcattataacatgggaggtattcctactaactataaagctgaagtcttaactgttaatggttcggaaaaaactgtgcctggattaatggctattggcgaagctgcatgtgtatctgtacatggagctaacagacttggatctaattctttaattgatttagtagtatttggaagatcagcagcaaagagagcagctgaattaataacaccaggaacaccacatgaagaaattcctgagtctgaaacccaaaaatctttagatagatttgataagttaagaaatgccaaaggtgaaaatagtactgcagatttgaggctatcgatgcaaaaaactatgcagtctaaatgtgctgtatttagaacagaaaaaaacttgaaagaaggtgtggatgaaattagaaaaacttatgatagtatagactcaatttctgttaaagatagatccttagtttttaataccgatctagttgaaacattagaatttgataatctaataagacaagctgttacaacagtggattctgcatatcaaagaaaag

SEQ ID NO: 219060 - DNA, 550 bp, Unknown
  Bacterial polypeptide expressing nucleotide sequence isolated from the Sargasso Sea
aatgaccaattcatacaaaattattgatcaccattatgacgttgtagttgtcggagctggagggtcaggactgagagctacgcttggatgtgcagaagccggattaaaaacagcctgtatatcaaaagtgtttccaacaagaagtcatactgttgcagcacaaggtggaattggagcagctctaggtaatatgggtgaagataattggaagtggcacatgtatgatacagttaagggttcagactggcttggagatcaagatgctattgaatacttatgttctaaagcccctgaagccgtaattgaacttgaagaatatggtatgccttttagtagaacagatgatggaaagatctatcaaagaccttttggtggtcacttaactaataatggcgagggagcacctgctatgagagcttgtgcagcagctgatagaacgggacatgctttactccatacactttatcagcaatcacttaaaaataatgtagaattttatattgaatattttgttttagatttaattactgatgatcaaggtaattgtatt

SEQ ID NO: 219061 - DNA, 939 bp, Unknown
  Bacterial polypeptide expressing nucleotide sequence isolated from the Sargasso Sea
aacgcagataaagcagttgtaggagtcattgcttttaaaatcgaaacaggtgagatttattacataaaatcaaaggcaactgttctggcaacaggaggggcaggtagaatttattcatccactactaatgctctaataaattcaggagacggaattggaatggctttaagagctggtatgccggttcaagatatagaaatgtggcagtttcacccaactggaatccatggggcaggaactttagtcactgaggggtgcagaggagaaggcggatatcttttaaataaggatggcgaaagatttatggaaaggtacgctcctaatgcaaaagatttagctagtagagatgtagtagcaagatctatggctttggaaattttagaaggacgagggtgcggaccaaatgctgatcatatcttcctaagattagatcatttgggacctgaagtagttcataaaagattgcctggaattactgaactgtctaagacctttgcaggagttgatcctgctgttcagccaataccagttgtacctacatgccattatatgatgggaggaatacctacgaatatcaatggacaagttatttctgtagagcacggtgaagacaagatagttgacggtttatatgcagctggtgaagtagcttgcgtatcagttcatggaggaaatagattaggtggaaattctcttctagacttagttgtctttggaagggccgctggtctttacatagaagagagcatgaaacagggtgtcgaattaaaagatgcttctaaagatgatattgaaaaagctttagaaagactaaatagattaaatgcctcaacagaaggagatcaagtagctgttcttaaagaaaagatgcaacaaaatatgcagaataattttggtgtatttaggagagggggatctgatgaaaaaggtatcgaagaa

SEQ ID NO: 219062 - DNA, 927 bp, Unknown
  Bacterial polypeptide expressing nucleotide sequence isolated from the Sargasso Sea
ctttcccacccggtcacatacggtggcggcgcaaggtggcatcggtgccgcgttaaacaatatgggtgaaggcgataactggcagtttcatatgtatgacactgtcaaagggtctgattggctaggcgatcaggacgccattgaatatatgtgccgtaatgccattcccgcggttatcgaactggaaaattatggggtgccattttcccgcacggaagaaggtaaaatttatcagcgcccatttggcggtcatacgcttgaccatggcaaatcaatggcaaggcgcgcctgcgccgccgctgatcggacaggccacgctattttgcataccctttatcagcaatgtttaaaacatgcagcgcattttcatattgaatattacgttcttgatctgttgatgaccgacgctggtgaatgtgcgggtgtgattgcgctttgtatggaagatggcaaattgcatcgtttctggggccagcaaacggttttggcaacgggtggctatgggcgggtgtatttctcttgtacatcggcgcatacctgcaccggtgatggaaatgcgatggcgctgcgggcagggttgccgttacaggacatggaatttgtgcaatttcaccccaccggtgtttatggcgctggtgttttgatcaccgaaggagcgcgtggtgaaggtggatatctgacaaattctgaaggcgaacgctttatggaaaggtttgccccaacagcaaaagacttggcgagccgtgatgttgtcagtcgggccatgacaatcgaaattaatgaaggtcgcggggtgggcccgaacaaagaccatatcatgttgcatttggagcatatcgacccagatacgttgcatgttcgtttgcccggcatcaccgaaacagcgcggattttctgtggggtggatgtgacccgcgaacccatccc

SEQ ID NO: 219063 - DNA, 639 bp, Unknown
  Bacterial polypeptide expressing nucleotide sequence isolated from the Sargasso Sea
gtaaaaggatcagattggttaggagaccaagattcaatagaatatttgtgcaaagaggctccaagagctgttttagaattagaaaaatatggagttccatttagcagaacagatgaaggtaaaatttatcaaaggccgtttggtggaatgactaagaattatggaaatgaaccagttcaaagaacttgcgcagccgctgatagaacaggacatgcaattcttcatacattatatgggcaggcattaaaacataatactgaattttttatagagtattttgccctagaccttttaatgaaggacggagcatgtaaaggattaattgcatggaacttaaatgatggaaccatacatagatttagatctcatataacaataattgcaactggtgggtacggtaaagtttattattctgctacatctgcccatacttgtacaggagatggaaatgcgatggtattaagagcaggtttaccattacaagatatggagtttgtgcagtttcatcctacaggaatttatggacatggaactttgatttccgaaggtgtgcgtggcgaaggaggttttttacttaattcaaaaggagaaagatttatggagcgttatgctccaaaagcaaaagattggcatcaagag

SEQ ID NO: 219064 - DNA, 796 bp, Unknown
  Bacterial polypeptide expressing nucleotide sequence isolated from the Sargasso Sea
atggcacttagagcgggattgccattgcaggacatggaatttgttcaattccatccaaccggaatttacggagtgggaactcttatatcagagggcgtaagaggtgaaggtggttttctcttaaattcaaaaggtgaaagatttatggaaaaatatgctccaaaagctaaagatttagcttcaagagatgttgtaagtagatcgatagcagttgaaatcaatgaaggaagaggagttggaaaaaataaagattatgttaatttgcatttagatcatcttgatccaaaagtaatagaggagcgattacccggcattgcagagtccgcaaaaacattttgtgaagttgatgttagaaaagatccaatccctgtagtacccacggttcattataatatgggtggaataccaactaattataaagctgaagttttaacattgaacggaaaagagtctactgtgccaggattaatggctataggagaggcagcttgtgtttctgtccacggcgcaaacagattaggctcaaactcattaatagatttagtagtttttggaaaatcagctgcaaatagagctgcggaacttattaaaccaggaacacctcacgaagaaataccacaaagtgaaacagataaatgtttaaatagatttgacaaacttcgtaacgcttcaggtgcaacaaaaacttcagaactaagattgtccatgcaaagaactatgcaatcaaaatgtgcagtttttagaactgaaaaaacacttaaagaaggaatggatcaaattagaaaaccttttgaag

SEQ ID NO: 219065 - DNA, 841 bp, Unknown
  Bacterial polypeptide expressing nucleotide sequence isolated from the Sargasso Sea
gctggaggagcaggtttgagagctgcagttggccttagcgaggccggattaaaaactgcttgcatatcaaaagtttttccaactagaagccacacttcagcggctcaaggaggcatctcggctgctcttggtaatatgggagaagatgattggagatggcatatgtatgatactgtgaagggatctgattggttaggcgatcaagatagtatagaatatttgtgcaaagaagctccacgagcagtattagaattagaaaggtatggagttccttttagccgtacagaagatggaaaaatataccaaagaccttttggtggaatgactaaaaattatggaaatgaaactgttcaaagaacctgtgcagcagcagatagaactggtcatgctattttacacactatgtatggccaagcattaaagcataacacagaattttttattgaatactttgctttagatttattaatgaaagatggagaatgcaaaggtttaatagcttggaatttaaatgatggaactattcatagatttagatcccatataacaattatagcaactggcggatatggaaaaacatattattcatctacatctgctcatacttgcactggtgatgggaatgctatggttttaagagctggtttacctttacaagatatggaatttgtacaatttcatcccactggtatctatgggcatggaactttaatatccgaaggagttcgaggtgaaggaggatacttattgaattccaaaggtgaaagatttatggaaagatatgctccaaaagctaaagatcttgcatctagagatgtagtaagtagatcaatagcagtga

SEQ ID NO: 219066 - DNA, 904 bp, Unknown
  Bacterial polypeptide expressing nucleotide sequence isolated from the Sargasso Sea
tgaagataattggaagtggcacatgtatgatacagttaagggttcagattggcttggtgatcaagatgcaattgaatacttatgttctaaagcccctgaagcagtaattgaacttgaagaatatggcatgccgtttagcagaacagatgatggcaagatttatcaaagaccttttggtggacacttaaccaataatggggagggagctcctgctatgagagcttgtgcagcagctgataggacgggacacgctttactccacacactctatcagcaatcagttaaaaacaatgtagaattttatattgaatattttgttttagatttaatttctgatgatcaaggtaattgtattggtgtggtaacatggtgcttagaagatgggtcaatccatcgatttttatctcatcaaacaattttagctactggtggatatggaagagcttacttttcatctacgagtgctcacatatgtactggtgatggtagtgcaatggctttaagacagaacttgcctctttctgatatggaatttattcagtttcatccaactggtgtttatggtgcaggagtgttaatcactgagggagcaagaggagaaggtggatatttaactaatagtgatggtgaaagatttatggaaagatatgctccaaatgcaaaagatctagcatcaagggatgtagtaagccgagcaatgacaattgaaattagtgaaaatcggggttgcggagacaatgccgatcacgtgctccttcatcttgagcacattgacgctgatacactgcataaaagattacctggtatttcagaaactgcaaaaatatttgccggagttgatctgactaaagatccaataccagttcttccaactgttcattataatatgggtggtataccgaca

SEQ ID NO: 219067 - DNA, 850 bp, Unknown
  Bacterial polypeptide expressing nucleotide sequence isolated from the Sargasso Sea
gatcatgtacatttacacttaagtcatttagatccaaagataattgagaaaagacttcctggaatttcagagtcatcaagactatttgctaatgttgatgtaacaaaagaaccaataccagttgttccaacagtacattataatatgggtggtatcccaactaattataaagcagaggttttaactttaaatggatcagaaaaaactgttcctggattaatggcaataggagaggcagcttgtgtttcagtacatggagctaatagattaggatcaaattctttgattgatttagtggtatttggtagagctgcagcaaaacgagcttcagaattagttagatctaatatgcctcatgaaagtattggagaatctgaaactgagaaatgtttagagagatttgataagcttagaaatgctaatggagaaaatgctactgcagaacttagagttaatatgcaaaaaactatgcaatcaaaatgtgcagtatttagatcagaaaaaactcttaaagaaggtgttgatgaaattagaaaaacttatgatggaatgggatctttatctgtaaaagataaatctttaatttttaatactgatttagttgaaacattagaatttgataatttaataagacaagcaataacaactatagaatctgcatatcatagaaaagaaagtagaggagcacatgcaagagaagattatccaaaaagagatgatgaaaaatttatgcagcatactcttgcttggtataatggaaaagaaacaaaaattgattatagacctgttcataaaaatactttaactaacgaggttcaatattttccacctcaagaaagggtttattaat

SEQ ID NO: 219068 - DNA, 868 bp, Unknown
  Bacterial polypeptide expressing nucleotide sequence isolated from the Sargasso Sea
atgagagcttataaaattatagatcatgagtatgatgtagtagtcttaggtgccgggggttctggcctaagagcagctgttggattatctgaagctggattaaagacagcttgtatttcaaaagtttttccaacaagaagtcatacttcagcagctcaaggcggaatatctgcagctttaggaaatatgggtgaagatgactggagatggcatatgtacgatacagttaaaggatctgactggcttggtgatcaggatgcaattgaatatttgtgtaaggaagcaccaagagcggttgttgaactcgaaaaatatggagttccatttagcagaacagaagacggtaaaatttatcaaagacctttcggtggtatgactaaaaattatggtaatggaacagctcaaagaacatgtgctgcagctgatagaactggtcacgctatcctccacactttatatggacaagctctaaaacatcagacagaattttttattgagtattttgcgctagacctcataatgaaaaatggggaatgtaaaggaattatcgcttggaacttaaatgatggaacgatacacagatttagagcacatatgactatcattgcgacagggggatatggaaagatatattactcagcgacgtctgcccatacttgcactggagacggtaatgctatggtcctaagagcaggcttacctcttcaagatatggaatttgttcagtttcaccccactggtatttacggtgtaggttgtttaatttccgaaggcgttagaggagaaggtggttatttacttaattcaaaaggggaaaggtttatggaaaggtatgcacctaatgcaaaagacttagcctcaagaagat

SEQ ID NO: 219069 - DNA, 706 bp, Unknown
  Bacterial polypeptide expressing nucleotide sequence isolated from the Sargasso Sea
attgggaggaataccaactaattataaagcagaagttataatttcaaatggtgatgataaaatagtaccgggactaatggccataggagaagcagcatgcgtttctgtacatggcgcaaacagattgggatcaaactccctaatagacttggtagttttcggaaaagctgcagccaacagagctatagaattaataaaaccaaactctccacatgatgaaatttcaaaaaatgaaactgaaaaatgtctagatcgatttgataagttaagaaatggaaatgggtcaaacaaaacttcagaattaagattatctatgcaaaaaacgatgcaagcaaaatgcgcagtatttagaactgaaaaaactcttaaggagggcgttaatgaaattaaaaaaccttttgaaggaatgaaaacaatatccgttaaagatagatctatgatttttaatacagatttaatggagacccttgagtttgataatcttattcgccaggcgattacaactatggagtcagcgtatcatagaaaagaaagtcggggcgctcatgctagggaggattttcctaaaagggatgatcagaattacatgaagcatactttgagttggcataatgataaagaagtcaaaattaattatcgtaaggttaatttatcaacattgacaaatgaagttcaaacttttccacctaaagaaagagtttattaa

SEQ ID NO: 219070 - DNA, 694 bp, Unknown
  Bacterial polypeptide expressing nucleotide sequence isolated from the Sargasso Sea
atgcacacagaggtcattaccaaaaactctgctggcgagatggagattgtcccaggattgatggcagttggtgaagctgcttctgtatcggtgcatggagcaaatcgtttagggtctaactcattgctagaccttgtggtctttgggcgagagtctgctattcaatgccaaaaaacaatcaaaccaatggatattcaagggaaagtgaaccaaagtgaattggataagatcatcgataaatttgattctattcgattctcaaaaggatcacttccaacggcagaaataagagcagaaatgcaaagtatcatgcaaaaacatgcgtctgtttttaggacagaggagctaatgcaagagggtgtggaaaaactctcctcatgcattgagtcattcaaagatgtctctgttagcgatcgaggtttgatttggaatacagacttaattgaaacattagagcttgagaatcttttgggccaagctatcatcacaatgcaaagtggccaggttagaaaagaaagcagaggtgctcatgcaagagatgattatcccgatcgtgatgatgagaactggctgattcatagtatgggttggatggatgagaacaataatgtagccattggatcttcgcctgttcatttagatactcaaacagatgaggtagaatcaatacctctcaaggcaagagtttactaga

SEQ ID NO: 219071 - DNA, 850 bp, Unknown
  Bacterial polypeptide expressing nucleotide sequence isolated from the Sargasso Sea
cgcgatatggagttcgtgcagtatcaccccaccggcctgccgggctccggtattctgatgacggaaggctgccgcggcgaaggcggtattctggtcaacaagaacggctaccgctacctgcaggattacggcatgggtccggaaaccccgctgggcgaaccgaaaaataaatatatggagctgggtccgcgcgataaagtctcccaggctttctggcacgaatggcgcaagggcaacacgatccctacgccgcgaggcgatgtggtctatctcgatctgcgccatttgggtgagaaaaagctgcttgaacgtctgccgtttatctgtgaactctcgaaagcctacgttggcgtcgatccggtaaaagagccgattccggtgcgtccaaccgcacactacaccatgggcgggatcgaaaccgaccagcagtgtgaaacccgtatcaaagggctgtttgccgttggcgagtgttcttctgtgggtctgcacggcgccaaccgccttggctccaactccctggcggagctggtggtctttggtcgtctggccggtgagcaggccatgcagcgcgcaaccgaagcgggcgaagccaatagcgccgcgctggacgcgcaggtcgtcgatatcgagaagcgcctgaaagatctggttaatcaggaaggtaacgagaactgggcgaagattcgcgacgaaatgggtctgtcgatggaagaaggctgcggcatctaccgtacgccggagctcatgcagaaaacggtcgataagctcgccgagctgcaggagcgcttcaagcgcgtgcggatcaccgacacgtccagcgtgttcaataccgacctgctgtacaccatcg

SEQ ID NO: 219072 - DNA, 670 bp, Unknown
  Bacterial polypeptide expressing nucleotide sequence isolated from the Sargasso Sea
tttgactgtaaatggttctgaaaaaactgttccaggacttatggctataggagaagcagcttgcgtttcagttcatggagcaaatagattgggctctaactctttgattgatcttgttgtttttggaagagcagctgcaaaaagagctgctgaactaattaaacctggtactccacatgaagatatcaatgagtcagaaactcaaaaatgtttagatcgtttcgataagattagaaactctgatggagatattggtactgctgaactaagactgtccatgcaaaaaacaatgcaatcaaaatgtgcggtttttagaacagagaaaacacttaaagagggtgttgatgaaatacgacaaacatttgatggattggattctttatcagttaaagataaatcattaatatttaatactgatctagtagaaactttagaatttgataatttaattagacaagctgttgtgacagttgactcagcatataataggaaagaaagtagaggagctcatgcaagagaagattatccaaaaagagatgatgagaagtttatgcaacatacattagcttggtgtgatggaaaaaaatcaaaaataagttatagagatgttcataagtctacattaaccaatgaagtacagtattttccacctcaggagagagtatattaa

SEQ ID NO: 219073 - DNA, 850 bp, Unknown
  Bacterial polypeptide expressing nucleotide sequence isolated from the Sargasso Sea
gatgttgtcagtcgttcaatgacaatggaaataatagaaggcaggggcgtgggtgaaaagaaagaccatatccatctaaatcttcaacatttgggaccggatgtaattgaggaacgtcttccaggaattgctgagaccgcaagagtctttgcagatgttgatgtaactagagatccaatccctgtcttgcccactgtccattacaatatgggaggtgtacctacaaatatgcacacggaggtcattaccaagaactccagtggtgatatggaaattgtcccaggattaatggcggtaggtgaagcggcctctgtatcagtccatggcgctaatcgattgggatcaaactcgcttttggatttagtggtctttggaagagagtcttccattcaatgtcaaaaaacaatcaaaccaatggagacacaaaacaaggtcaatcaaaatgaattggataagatcattgataagtttgattccattcgattttcaaaaggatcacttccaacagcagagattagagccgaaatgcaaagcattatgcaaaagcatgcatctgtatttagaacggaagaattaatgaaagagggcgtggaaaaactttcctcatgcatagattcgttcaaagatgtatctgttagtgatcggggtttagtttggaataccgatttgattgaaacccttgaactggaaaatctactaggccaagcgatcattacgattcaaagtggtcaggttagaaaagaaagtcgaggcgcgcatgcaagggatgactatccagatcgagacgatgagaactggttaattcatagtttgggttggatggatgcgaataataatgtgactattggat

SEQ ID NO: 219074 - DNA, 845 bp, Unknown
  Bacterial polypeptide expressing nucleotide sequence isolated from the Sargasso Sea
caagggtgagagatttatggaaaggtatgctccaaatgctaaagatttatcatcaagggatgttgttagtaggtcaatgtctatagagataaacgaaggaagaggcgttggtgcagaaaaagatcatgttcatttgtatttaagccatttagataaaaaagtaattgaaaacaggcttccagggataacagaagcagcaagattgtttgcaaatgttgatgttacaaaagagccaataccagtagtgccaactgttcattataatatgggaggtataccaactaattataaagcagaggttttgacggtcaatggatctgagaaaactgttcctggtttgatggcaataggagaagcagcatgtgtatcagttcatggtgctaacagactcggatcaaattctttgattgacctagtagtatttggaagagctgcagctaaaagagctgctgaacttataaaaccaaatactccacatgaagaaattagtgagactgaaacagagagatgtatggatagattcgataatcttagaaatgctaatggaagtaactcaacagctgaattacgattagaaatgcaaaaaactatgcagtcaaaatgtgcagtatttagaactgaaaaaaacttaaaagaaggtgtaacagatataagaaaaacttatgatggaatggattcaatatctgttaaagataaatcaatggtatttaatactgacctagtagagaccttagaatttgataatttgattagacaggcaataaccactgtagattcagcatataatagaaaggaaagtagaggagcacatgctagagaggattttcctaaaagagacgaccaaa

SEQ ID NO: 219075 - DNA, 895 bp, Unknown
  Bacterial polypeptide expressing nucleotide sequence isolated from the Sargasso Sea
aacggcagaatctaccaaagaccgtttggaggacaatcaaaagaatttggagagggaggtcaggcagcaagaacttgtgcagctgcagatagaacaggtcacgcattattacacaccctttatcaagcaaatttgaaagcaggaacaaaatttttaaatgagtggtttgctgtagatcttatagaaaatagtgaaggagcaattggtggaattagttgttttgacatggaaactggcgaaatctcaattgtacgatctagtgcagttgttcttgcaaccggaggagcaggccaagtatacgaacaaaatacaacttcattaatttgtactggagatggattaggtatggttctaagaaatggattacctctgcaagatatggaaatgtggcagtttcaccctacagggttgtatggcaatggatcactcatgacagaaggatgccgtggtgaaggaggttatttaatcaattctgaaggcgagagatttatgcctaattatgcaccaaaagcgaaagatcttgcatcaagagatgttgtttcaagatgtatagttcaagaattaattgctggacgtggttgtggagaaaagaaggatcatgttctcttaaaaattgatcaccttggggaagaagcaattaaaagcaagcttccagagataagagaaatatctatgacttttgcaggagtagacccgataaaagaccctattcctgttgttcctacttgccattatatgatgggcgggataccaactaatgtgaatggacaggtactaacaactgatgtgaaaggaaaagatcaaattgttcaaggattgtattctataggagaagcagcaaacgtatcagtgcatggcgcaaatagactgggagggaactcactcttagaccttg

SEQ ID NO: 219076 - DNA, 889 bp, Unknown
  Bacterial polypeptide expressing nucleotide sequence isolated from the Sargasso Sea
cgttcccacacggtgtctgcccagggtggtatcacctgcgcgatcgccagtgcagacccgaacgatgattggcgctggcacatgtatgacaccgtcaagggatccgactatatcggtgaccaggatgccattgaatacatgtgctccaccggcccccaggcggtgttcgagctggagcacatgggcctgcctttctcccgtaccgagcagggacgtatctaccagcgtccgtttggtggccagtccaagggcccggataaccccacccaggcggcccgtacctgtgccgcggctgaccgtaccggccacgctctgctgcacacgctgtatcaggcgaacctgaaaggcggaacctcgttcctgaacgaatggtatgcggtcgatctggtcaagaacagcaagaacgaagtggtcggtgttgtcgccattgagatcgagaccggcgaagtctgctacatcaaatccagggccacggtcctggcgaccggtggtgccggccgcatctacgcttccaccaccaacgccctgatcaacaccggtgacggggttggcatggccctgcgtgccggtttcccggttcaggacatcgagatgtggcagtttcacccgaccggcatctacggtgccggcacactggttaccgaaggctgccggggcgagggtggctatctgatcaactccgaaggtgagcgcttcatggagcgctatgcccccaatgcgaaagatctggccggtcgtgacgttgttgcccgctcgatggtacttgagattctggagggtcgcggttgtggtcccgacaaggatcacgtactgctgaagctggatcacctgggtgaagaaacgctgaatcttcgtttgccgggtatttgcgagcttcacgcaccttgcc

SEQ ID NO: 219077 - DNA, 769 bp, Unknown
  Bacterial polypeptide expressing nucleotide sequence isolated from the Sargasso Sea
gcagctgttggattaagtgaagcaggactaaagacagcttgtatctcaaaagtttttccaactagaagccacacttctgcagctcaaggagggatatctgcagctctgggtaatatgggtgaagatgattggcgttggcacatgtatgatacagttaaaggagcagactggttaggtgatcaagactgtattgagtatctttgtaaagaagctccaagagctgttttggaattagaaaaatatggtgttccttttagtagaacagatgatggtaaaatttatcaaagaccctttggtggaatgacaaagaattatggcaatgaaccagttcaaagaacgtgtgcagcagcagatagaactggtcatgcaattctacacactttatatggccaagctttaaaacataacactgagttttttattgaatattttgctttagatcttttaatgaaagatggtgcatgcaaaggtttaattgcatggaatttaaatgatggcacaattcatagatttagatctcatattacaataatagcaacaggtggctacggaaaagtttattattcagcaacttccgcacatacttgtactggcgatggaaatgctatggttttaagagcagggttacctttacaagatatggagtttgtacaatttcatccaacaggtatttatggtcacggaactttaatatcagagggagttagaggtgaaggaggttatctattaaactctaaaggtgaaagatttatggagaggtatgctccga

SEQ ID NO: 219078 - DNA, 772 bp, Unknown
  Bacterial polypeptide expressing nucleotide sequence isolated from the Sargasso Sea
tatgggagaggatgactggcgttggcatatgtatgatactgttaaaggagctgattggttaggagatcaagactgtattgaatatctttgcaaagaagcacctaaagcagttattgaattagaaaaatatggtgttccttttagtaggactgaagatggaaaaatttatcaaagaccatttggtggaatgacaaaaaattatggtaatggaatcgtccaaagaacttgtgctgctgctgatagaacaggacatgcaattttacatactttgtacggtcaagccttaaaacacaaaacagaattttttattgaatattttgcacttgatttactcatgaaagatggagagtgcaaaggactgattgcatggaatttaaatgatggaaccatacataggtttagagcccatagcgtgattattgcaacaggtggatatggtaaagtttattattctgcaacttcagcacatacttgtactggagatggaaatgcaatgattctaagagcaggattgccattacaagatatggagtttgttcagtttcatccaacaggaatttacggtcatggaacattaattactgaaggagctagaggtgaaggaggatatcttacaaattcaaaaggtgaaagatttatggaaaggtatgcgccaaaagcaaaagatttggcttccagggatgttgtaagcaggtcaatgtcaattgaaattaatgagggtagaggtgtaggaaaagatcaagatcatgttcatttaaatttaagtcacttg

SEQ ID NO: 219079 - DNA, 770 bp, Unknown
  Bacterial polypeptide expressing nucleotide sequence isolated from the Sargasso Sea
tatgaaatcatataaaattatagatcacagttatgatgttgtagttttaggtgctggaggctcaggtcttagagcggcagttggacttagcgaagcaggtttaaggactgcttgtatttctaaagtctttccaactagaagccacacttcagctgcacaaggaggaatttctgcagctttaggaaatatgggtgaagatgattggcgatggcatatgtatgacactgttaaagggtcggactggctaggagatcaagattcaattgaatatttatgcaaggaagcaccgagagcagtgcttgaattagaacaatacggagttccttttagcaggacggaagatggaaaaatttatcaaagaccttttggtggaatgacaaaaaattatggaaatgggactgttcaaagaacttgtgcagcagctgatagaacaggacatgcaattcttcacacactttatggccaagcattaaaacataatacagagttttttattgaatatttcgctttggatcttttaatgaaagatggtcaatgtaaaggtttaattgcctggaatttaaatgacggaactttacatcgttttagatcacatattactattattgctactggaggatatggaaaagtttattattctgcaacatcagctcatacttgcactggagatgggaatgcaatggtgttaagagcaggtcttcctttgcaagatatggaatttgttcaatttcatccaaccggaatttatggtcatggaactttaatatcag

SEQ ID NO: 219080 - DNA, 782 bp, Unknown
  Bacterial polypeptide expressing nucleotide sequence isolated from the Sargasso Sea
agaagcggcaagattgtttgcaaatgtagatgtcgcaaaagagccaattcctgttgtaccaacagttcattataatatgggtggtattccaacaaactataaagctgaagtattaactgtaaatggctcagaaaaaaccgttccaggtttaatggctataggagaagcggcatgtgtctctgttcatggagcaaatagacttggttctaattctttaattgatttagtagtatttggaagagcagcagcaaaaagagcagctgaattagttaagccaggaacacctcatgaggaaattcctgagtcggaaacacaaaaatgtttagatagatttgataagctacggaatgctaaaggagaaaatagtactgctgaacttagactttcaatgcaaaaaactatgcagtctaaatgtgcagtatttagaacagaaaaaaatttaaaagagggtgtagatgaaattagaaaaacttatgacggtatggactcaatttcagttcaagatagatctttagtttttaatacagatttagttgaaacattagaatttgataatttaataagacaagcagtaactactgtagaatctgcatatcatagaaaagagagcagaggtgctcacgcgagagatgactatccaaaaagagatgacgaaaaatttatgcaacatactcttgcttggtgcgatggaaaaaatacaaagattagttacagagcagtacacaaatcaactttaacaaatgaagttcaatattttccaccacaagagcgagtatattaat

SEQ ID NO: 219081 - DNA, 868 bp, Unknown
  Bacterial polypeptide expressing nucleotide sequence isolated from the Sargasso Sea
agaacctgtgccgctgcagacagaacaggtcatgcaatccttcatacattatatggtcaagcactaaaacataatacagagttttttatagaatactttgctctagatcttttaatgaaagatggagaatgcaaaggtttaatagcgtggaacttaaatgatggaacaattcatagatttagatcacatataactattattgccactggaggatatggaaaagtctactatacagcaacatctgctcacacatgtacaggtgatggaaacgcaatggcattacgtgcgggattaccgcttcaagacatggaatttgttcagtttcatccaacaggaatttatggtgtaggaactttaatatcagaaggagttagaggagagggcgggttccttttaaactctaagggtgaaaggtttatggaaagatatgccccaaaagctaaagatttagcatcaagagatgttgtaagtagatctatagcagttgaaattaatgaaggaagaggagttggaaaaaataaagattacgttaatttgcacctagaccatcttgatccaaaagttatagaacaacgattacctggtattgccgagtcagcaaaaacattttgtgaggttgatgtaagaaaagatccaataccagtagttccaactgtgcactacaatatgggtggtataccaacaaattataaagctgaagttttaactttaaatggaaaagaatctacagttccaggattaatggcgattggcgaagctgcttgcgtttccgttcatggagctaataggctagggtcaaactctttaatagatttagtagtttttggaaaatcggcagcaaacagagctgctgaacttattaaacctg

SEQ ID NO: 219082 - DNA, 907 bp, Unknown
  Bacterial polypeptide expressing nucleotide sequence isolated from the Sargasso Sea
gcgggtcgtgacgtagttgcacgttcaatgatgaccgaaattcgtgaaggtcgtggttgtgaaggcccgtggggtacgcacattaagcttaagcttgaccaccttggtaaagacgttcttgaatctcgtctaccgggtattcttgaattatcgcgtacatttgcacacgttgacccagttaaagagccgatcccagtaattcctacttgtcactatatgatgggtggtattcctaccaacgttgatggccaatgtctaactgttgatgaaaacggtaatgataaagtagttaacggtctattcgcatgtggtgaaattgcatgtgtatcggtacacggcgctaaccgccttggcggtaactcgctacttgaccttgttgtattcggtcgtgcgactggcttacatcttggtaagacattatctgaaatggcaccaacacgcgacgcgtctgagtctgatcttgaagcctctatgacacgtttcaatcgttgggaaaattcagagaaaggaaagggcgaagaccctgttcaaattaagaaagacttgcaagaatgcatgcagcttaacttctcagtattccgtgaaggtgaagccatggcggaaggtcttaaggagcttagcgaaattcgcgagcgtcttaagcatgcgcgccttgacgataagagttcagacttcaacactcaacgtattgaatgtttagagcttgataacctaatggaaactgcgtacagcacagcagtagcagcgaacttcagaacggaaagccgtggtgctcacagccgcttcgacttcccggaacgtgatgatgacaactggttatgtcacagcatctacgatccgaacactgataaaatgcttaaacgtgaagtgaatatggcgcccaagcttagggaagcattcccgccta

SEQ ID NO: 219083 - DNA, 604 bp, Unknown
  Bacterial polypeptide expressing nucleotide sequence isolated from the Sargasso Sea
ttcggttcatggcgctaataggctaggatcaaattctttaattgacttagtagtttttggaaaatctgctgcgaatagagctgctgagattgttaaacccggaactccacacgaatcactttcacagacagaaactgataaatgtctagatcgatttgataaacttagaaactctaatggttctacaaagacagcggaacttagattgtctatgcagaaaactatgcagtccaaatgtgcagtttttagaactgaaaaaacattgaaagagggaattgagcaaataagaagaccatttgaaggaatgcaagatatttctgtttcagaccagtcattattatttaatactgatcttgtcgaaacattagaatttgataatctaatcagacaagcaatgacaacaatagactcagcttatcacagaaaagaaagcagaggtgctcatgctagagaagacttcaaaaatagagatgataaaaaatatatgacgcacactttagcatggcaaaaaggaaatgaagttaaaatcgcttatagacctgtgcattctaaaactttgacaaatgatgttcaatactttccaccaagggagagagtttattga

SEQ ID NO: 219084 - DNA, 897 bp, Unknown
  Bacterial polypeptide expressing nucleotide sequence isolated from the Sargasso Sea
aaagtttattattcagcaacttctgctcatacttgtacgggagatggtaatgctatggttttaagagccggattgccacttcaggatatggagttcgtccaattccatccaacaggaatatatggtcatggtactttaataaccgagggtgcacgtggagaagggggatatcttacaaactctaaaggtgaaagatttatggaaagatatgcaccgaatgcaaaagacttagcttcaagggatgtagtaagtcgatctatgtcaattgagattaatgagggaagaggtgttggaaaagatcaagatcatgttcatttaaatttaagtcatttagataaagaaattattgagagtaggctacctggaataaccgaggcagcgagattatttgcaaatgtaaatgtcacaaaagaaccaattcctgtggtaccaacagttcattataacatgggaggcattcctactaactataaagctgaagtgttaactgttaatggttcggaaaaaactgtgcctggattaatggctattggcgaagctgcatgtgtatctgtacatggagctaacagacttggatctaattctttaattgatttagtagtatttggaagatcagcagcaaagagagcagctgaattaataataccagaaacaccacatgaagaaattcctgagtctgaaacccaaaaatgtttagatagatttgataagctaagaaatgccaaaggtgaaaacagtactgcagatttgaggctatcgatgcaaaaaactatgcagtctaaatgcgctgtatttagaacagaaaaaaatttgaaagaaggtgtggatgaaattagaaaaacttatgatagtatagactcaatttctgttaaagatagatctttagtttttaatacc

SEQ ID NO: 219085 - DNA, 631 bp, Unknown
  Bacterial polypeptide expressing nucleotide sequence isolated from the Sargasso Sea
aatggccataggagaggcagcttgtgtgtctgtccacggtgcaaatagattaggttcaaactcattaatagatttagtagttttcggaaaatctgctgcaaacagagccgcagaacttgttaaacctggaacacctcacgaagaaatacctcaaagtgaaacagataaatgtttagatagatttgataaacttcgtaacgcttcaggtgcaacaaaaacttctgaactaagattgtctatgcaaagaactatgcaatcgaaatgtgcagtttttagaaccgaaaaaacactaaaagaaggaatggatcaaatcaggaaaccttttgaaggaatgtctgatatttcagtttcagacaagtctttattatttaatactgatcttgttgaaactttagaatttgataatcttataagacaggcgatgacgacaatagactcagcttatcatagaaaagagagtagaggagctcatgcaagagaagactacaaaactagagacgataagaaatatatgacacatactttagcttggcaaaaaggaaacgaggttaaagtagcttatagacctgttcacgcaaaaacattaacaaacgatgttcaatactttcctccaagagaaagagtttattaa

SEQ ID NO: 219086 - DNA, 781 bp, Unknown
  Bacterial polypeptide expressing nucleotide sequence isolated from the Sargasso Sea
atgggaaaggcttacgaaataattgatcatcattatgatgtagtgattgttggagcaggaggttctggccttagagccactttaggtgcagcagaggcagaattaaaaacagcctgtatatcaaaagtatttccaacaagaagtcacacagttgctgctcaaggtggtattggtgcagctcttggtaatatgagtgatgataattggaagtggcatatgtatgacaccgtaaaaggttctgattggttgggtgatcaagacgccatagagtatttatgtgctaacgcaccagaagcagtaattgaacttgaagaatatggtatgccattcagcagaacagaagatggcaaaatatatcaaagaccatttggtggtcatctaactaacaatggagaaggggctccagcgatgagagcatgtgctgcagctgatagaacaggacacgccttgcttcatactctttatcaacaatcacttaaacacagtgtaaagttttttatagaatattttgttttagacttagttatggataaaaatggaaattgtaaaggtgttgtcgcttggtgtttagaggatggaacaatacatcgttttttatctcatcaaacagttcttgctacaggtggatatggtagggcgtacctttcgtctacaagtgcgcatatttgtacaggggatggaagtgctatggctttgagacaaaatttacccttatctgatatggaatttattcaatttcacccaacaggtgtttatggcgcgaggtgttttaataactgaa

SEQ ID NO: 219087 - DNA, 931 bp, Unknown
  Bacterial polypeptide expressing nucleotide sequence isolated from the Sargasso Sea
gactgcctgcatttcaaaagtttttcctacaagaagtcatacttctgcagctcaaggaggaatatcagcggcattaggaaatatgggtgaagatgattggcgttggcatatgtatgatacggtaaaaggatctgattggttgggagatcaagactctatagaatatttatgtaaagaagctcctagagccgttttagaattggaaaaatatggagttccttttagcagaacaaaggaaggaaaaatttatcaaagaccttttggtggaatgacaaaaaattatggaaatgaaactgttcaaagaacttgtgcggcggcagatagaacaggtcatgcaattcttcatacactttatggacaagctctaaaacataatactgaattttttattgaatattttgctttagatttattaatgaaagatggagcctgcaaaggtttattagcttggaacttaaatgatggcacaatacacagatttagatctcatataacaataattgctacaggaggttatggaaaagtttactattcagcaacttctgcacatacttgcacaggagatggaaatgcaatggtattaagagctggtcttccattacaagatatggaatttgttcaatttcacccaactggaatttatggacatggaactttaatttcagaaggtgtaagaggtgaaggtggatatttattaaattcaaaaggagagagattcatggagcgttatgctcctaaagccaaagacttagcttctagagacgttgttagtagatcaattgctattgaaataaatgaaggaagaggcgttggtactgaaaaagatcatgtacatcttcatttagatcatttagatcccaaagtaatagaaaaaaagattaccaggaatctcagagtcatcaagactatttgcaaatgtagacgtaactaa

SEQ ID NO: 219088 - DNA, 946 bp, Unknown
  Bacterial polypeptide expressing nucleotide sequence isolated from the Sargasso Sea
tgttgtagttcttggagccggtgggtcaggcttaagagctgcggttggattatcagaagcaggtttaaaaactgcatgtatatcaaaagtttttccgactcgaagccacacatcagcagctcaaggaggtatttctgcagctttgggaaacatgggtgaagatgattggagatggcacatgtacgatacggtaaaaggttctgactggcttggtgatcaagatgcaattgagtatttgtgcaaagaagcaccaagagcagttgttgaattagagagatatggtgttccttttagtagaacagatgatggaaaaatttatcaaagaccttttggaggtatgacaaaaaattatggcaatggaacagcacaaagaacatgtgcagctgctgatagaacaggccatgcaattttacatactttgtacggacaagcactaaaacaaaacactgaattttttattgaatactttgctttagatttaattatgaaaaacggagaatgtaaaggagtgattgcttggaatttaacagatgggacaattcatagatttaggtctcacatcactataattgcaactggtgggtacggtaaagtttattattcagctacatctgctcatacttgcacaggtgatggtaacgctatggttttgagggctggtttacctttacaagacatggaattcgttcagtttcatccgactggaatatatggagtaggttgtttgataacagagggtgttagaggcgaaggtggatttttagttaatggtaaaggcgaaaggtttatggaaagatatgcccctaatgcaaaagatttagcatctcgagacgttgtaagcagatctatggaaatggaaataaacgagggaagaggtgcgggaaaaaataaagatcatataaatcttcatttagatcatatagataaaaaagttatagatgaaaga

SEQ ID NO: 219089 - DNA, 774 bp, Unknown
  Bacterial polypeptide expressing nucleotide sequence isolated from the Sargasso Sea
ctaaaacagcctgtgtttcaaaagtatttcccacaagaagtcatactttctgctgcacaaggaggtatttctgcagcgttaggaaatatgggtgaggatgactggagatggcacatgtatgatacagttaaaggtgcagattggttgggcgaccaagactcaattgagtatttgtgtaaagaagccccagcagcagtgttagaattagaaaagtatggagttccatttagtagaacagaggatggaaaaatctatcaaagaccttttggaggtatgacaaaaaattatgggaacgagacagttcagagaacatgtgcggctgctgatagaacaggtcatgcaatacttcacactttgtatggtcaagccctgaagcacaatacagaattttttattgagtactttgctttagatttaataatgaaagatggagcatgcaaaggtttaattgcttggaaccttaacgatggaactatacacagattcagatctcacatcacaattattgcaacaggagggtatggaaaagtatattactcagctacttctgctcatacttgtactggagatggtaatgcgatggttttaagagctggtttacctttacaagacatggaatttgtacaatttcacccaactggcatatacggccatggaactttaatttcagagggtgttagaggtgaaggaggttatttagtaaattcaaaaggtgaaagatttatggagcgttacgcaccaaaagcaaaagatttagcatcaagagacgtagta

SEQ ID NO: 219090 - DNA, 703 bp, Unknown
  Bacterial polypeptide expressing nucleotide sequence isolated from the Sargasso Sea
aatgtataaatcatatcaaattattgatcatcactatgatgttgtcgttattggagctggaggatctggtttaagagcaaccctaggttgtgctgaagcaggtttaagaacagcatgtatatcaaaagtatttcctacaagaagtcacacagttgcagctcagggaggtattggtgcagcactaggcaatatgggagaagataattggaaatggcacatgtatgatacagtaaaaggatcggattggcttggtgatcaagatgcaattgagtatttatgttcaaaagcacctgaggctgtaattgagcttgaggagtatggaatgccttttagtagaactgaagatggaaaaatttatcaaagaccatttggaggccatttaacaaataatggtgaaggcgctcctgctatgagggcatgtgcagctgctgacagaacaggtcatgctttacttcatactttatatcaacaatctttaaaaaataacgtagaattttttattgaatattttgtaattgatctaatttcagatgagaatggcaattgtataggtgtagttgcttggtgtcttgaagatggttcaatacatcgttttttgtctcatcaaactattcttgctactggcggttatggaagagcttatttttcatctacaagtgctcatatttgtactggtgatggaagtgcaatggctttaagacaa

SEQ ID NO: 219091 - DNA, 820 bp, Unknown
  Bacterial polypeptide expressing nucleotide sequence isolated from the Sargasso Sea
atgagctcttataatataatcaatcatgaatacgatgtagtagttttgggtgctggaggctcaggtttaagagccgcagtaggtttaagcgaggcaggattaaaaactgcatgtatttctaaagtttttccaactaggagccatacttcagcagctcagggtggtatctccgcttcacttggcaatatgggagaagacgattggcgttggcatatgtatgataccgtaaaaggagctgattggctgggagatcaagatagtattgaatatctttgtaaggaagccccaaaagcagtaattgaattagaaaaatatggtgttccttttagcagaacagaggatggaaaaatttatcaaaggccattcggcggtatgacaaaaaattatggaaatggaattgttcagagaacttgtgcagcagctgatagaacaggtcacgcaattctacacactttatacggacaagctctaaaacataaaacagaattttttatagaatattttgcattagatttattaatgaaggatggagagtgcaaaggtttaatagcatggaatttaaatgatggaactattcatagatttagagcacattctgtaattattgctacaggtggatatggtaaagtttactattcagcaacttcagctcatacttgtacaggagatggtaatgcaatggttttaagagcaggcttaccattacaagatatggaatttgtacaatttcatccaacaggaatatatggtcatggtactttaattactgaaggtgctagaggagagggaggatatctcacaaattctaaaggtgaaagat

SEQ ID NO: 219092 - DNA, 903 bp, Unknown
  Bacterial polypeptide expressing nucleotide sequence isolated from the Sargasso Sea
ggaaatggaatagttcaaagaacttgtgcagcagctgatagaacaggacatgctattttacacacattgtatggacaagcgttaaagcataatacagaattttttatagaatactttgcattagatttgttgatgaagaatggagaatgtaaaggcctaattgcttggaatttgaatgatggaacaattcatagatttagagcgcatacagtaattattgctacaggtggttatgggaaagtttattattcagcaacatcagcacatacttgcacaggtgatggtaatgcaatggttttaagagctggattaccgcttcaggatatggaatttgttcaatttcatccaactggaatttacggccatggtactttaataacagaaggtgcgcgaggagaagggggctatcttacaaattctaaaggtgaaagatttatggaaaggtacgctccaaatgcaaaagatttagcatcaagagatgttgttagcagatccatgtctatagagattaatgagggaagaggtgttggaaaagatcaagatcatgttcatttgaacctaagtcacttagataaagaggttattgaaagcaggcttcctggaattactgatgcagcaagattatttgcaaatgtagatgtaactaaggaaccaattcccgttgtaccaacagttcattataatatgggtggtattccaacaaactataaagcagaagtattaactgtaaatggctcagaaaaaactgttccaggtttaatggctataggagaagcggcatgtgtttctgttcacggagcaaatagacttggttctaattcattaattgatttagtagtatttggaagagcagcagctaaaagagcagctgaattagttaagccaggaacaccccatgaagaa

SEQ ID NO: 219093 - DNA, 766 bp, Unknown
  Bacterial polypeptide expressing nucleotide sequence isolated from the Sargasso Sea
atttgcagatgttgatgtaacgaaagaaccaataccagttgtccctacagtgcattataatatgggtggaataccaactaattataaagctgaagttttaacggtaaatggatctgaaaaaacagtgccagggcttatggcaataggagaagcagcatgcgtatctgttcatggcgccaatagattaggatcaaattcattaattgatcttgtcgtatttggaagagcagcagcaaaaagagctgccgaaatagtaaaacctggaactcctcatgaagaaatttcgaaaagcgaaacagataaatgcttggatagatttgaaaaattaagaaatggcaatggaaataatagaacagccgatttaagattagcaatgcagaaaactatgcagtccaaatgtgcggtattcagaactgaaaaaactttaaaagaaggtgtagaagaaataagaaagccttacgagggaatgaattctatatctgttaaagataaatctttaattttcaacactgacttagtagaaactcttgaatttgataacttaattagacaagctatagttacaatagattcagcatatgaacgtaaagaaagtagaggcgctcatgcgagagaagatcacccaaaaagagacgataataattttatgaagcacactctatcatggtgcaaaggaagtaaaactaaaattacttatagagatgtacatagatcaactttatcaaatgatgtacagtactttccacctcaagaaagagtatattaa

SEQ ID NO: 219094 - DNA, 580 bp, Unknown
  Bacterial polypeptide expressing nucleotide sequence isolated from the Sargasso Sea
tatgagtgaatacaaaattatagatcacgagtatgatgttgttgtactcggggcgggtggctcaggtcttagagctgctgtaggattaagtgaggctggactaaagacagcctgcatttcaaaagtttttcctacaagaagtcatacttctgcagctcaaggaggaatatctgcagctttaggaaatatgggtgaagacgattggcgttggcatatgtacgatacagtaaaaggatctgattggttgggagatcaagactgtatagaatatttatgtaaagaagctcctagagctgttttagaattggaaaaatacggagttccctttagcagaacaaaggatggaaaaatttatcaaagaccatttggtggaatgactaaaaattatggaaatgaaactgttcaaagaacttgtgctgcagctgatagaactggacacgcaatacttcatactttgtatggtcaagcgcttaaacataatacagaattttttatagagtacttcgctctagatttgctaatgaagaatgggacttgcaaaggtttgattgcatggaatttaaatgatggcactatacat

SEQ ID NO: 219095 - DNA, 847 bp, Unknown
  Bacterial polypeptide expressing nucleotide sequence isolated from the Sargasso Sea
gctccaaatgctaaggatcttgcagggagagatgttgttgctagatcaatggttatggaaatacttgaaggtagagggtgtggcccagagaaagatcatgtttacttaaaactcgatcatttgggcgcagatgttcttaattcaaaattaccgggcatatgcgagctctcaaaaacttttgctcatgttgatcctattaaggaaccaattcctgttgttcctacatgtcattacatgatgggaggaacaccaacaaatattcatggtcaagcatttagcaggaatgatggtaatgatttcatggtttcagggcttttctctgttggggaagctgcatgtgtatctgttcatggcgccaacagactgggcggaaactctttattagatttagttgttttcggaagagctgcaggcaaacatataaatgaggagcttaaatctggtggtggcgtagataatgcttctaacgaagatattgaattagccatgagcaggctaaacaaattaaatgaatctgaatctggatacgaggttgctgatgttaaaaaacaactccaaacatgtatgcagaattactttggtgtctttaggcgtggtgagtttatggagaaaggagtcaaagaacttgaggagataagagagaaatctgaaaatctttacttaaaggataaaagtattgctttcaacacaaacagagttgaagcactcgaattacagaatctattagaggttgcagaggcgacagctatttctgcaatgatgagagacgaaagtagaggtgctcatgcaagagatgattttcctgaaagagatgatgagaattggttatgtcattctttatatgatc

SEQ ID NO: 219096 - DNA, 739 bp, Unknown
  Bacterial polypeptide expressing nucleotide sequence isolated from the Sargasso Sea
atgtcaggacatttaagagttggaaattatgatgtaatagatcatgagtatgatgttgttgtggttggcgctggaggtgctggccttagagctacatttggcatggcgcaaaaaggtctgaaaactgcatgtgtttctaaggtttttcctactagatcccatactgttgctgctcagggtggaatttctgctgcgctaggaaatatgggcgaggatgattggagatggcatgcctatgatacaattaagggctctgattggttgggtgaccaggattgtattgagtatatgtgtagggaggctcctgatgctattattgagttagagcattatggtgttccattttcaagaaacaaagagggaaagatatatcaaaggccatttggtggcatgactactaagtacggtgagggtggggctgcgcaaagaacatgcgctgctgctgatagaactggacatgcgattttacatacactatatcagcagtcattgcgacatgatgcagaattttttattgagtattttgctttggatttaattatggaagatggtgtctgtcgaggaattatcgctctttctttggtggatggtactatacatagatttaaggctcagatggtagtcctggcgactggtggttatggcagagcttatttttcagccacttctgctcatacttgtacaggagatgggaatgcaatggttattagggctggcttacctcttcaggatatggagt

SEQ ID NO: 219097 - DNA, 736 bp, Unknown
  Bacterial polypeptide expressing nucleotide sequence isolated from the Sargasso Sea
ctacctacagtacattacaacatggggcggaataccaacgaattaccatggagaagtggtaacaatcaaggacgataatccggactcagtggttcctggtctgatggcgatcggagaagccgcgtgtgtctcagtgcacggtgccaaccgattggggtcaaattctctattggatatagtcgtattcggaagagcctgtgctaagcgatgcgctgaacttataaaaccagagactaaacactgcgatttagaaaaagaaagcactgacaagattatccaccggcttgatcgccttaggcatgccaatggatctgagagcacagctaaactcaggatggaaatgcaacgtgctatgcaaacacatgcagcagttttcagaacaggagataacttactggaaggaagaaacaaaatagtggacatcgccaacaggtttaaagacgtaaaagtcgctgatcgatcgctaatttggaatactgatctggtcgaaactttagaactcgataatctgttgggaaactccgtaactagtatgttcgcagccgagaataggactgaaagtaggggcgcccacgctagagaagactttccagacagggatgatgaaaactggatgaaacataccatgacgtggttgaacaaagataacagcgtagatttcgactatagaccagtacacatgtacactctaactgacgaggtagaggttgtacctccgaaaaagagagtatactag

SEQ ID NO: 219098 - DNA, 934 bp, Unknown
  Bacterial polypeptide expressing nucleotide sequence isolated from the Sargasso Sea
tatgcaaagaggcaccaagagctgttttgagttagaaaaatatggtgttccatttagcagaactgaagatggtaaaatttatcaaagaccatttggtggaatgactaaaaattacggaaatgaaactgtacaaagaacttgtgcagcagcagatagaacaggtcatgctatactacacaccatgtatggacaggctttaaaacataatacagaattttttattgaatattttgctttagatttactgatgaaaaatggagaatgcaaaggtttaatagcatggaatttaaatgatggaactattcatagatttagatcacatatcacaattatagctacaggtggatatggcaaaacttactattcttcaacatctgctcacacatgcacaggtgacggaaatgctatggtattgagagctggtttacctttacaggacatggagttcgttcaatttcatccaacaggaatttatggtcatggaaccttaatttctgaaggtgttagaggtgaaggtggatatttattaaactctaaaggagaaagatttatggaacgctatgctcctaaagcaaaagatttagcatctagagatgtagtaagtagatcaatagctgtagaaataaacgaaggaaggggagtgggaaaagaaaaagaccatgtccatcttcatttaaaccatttagatccaaaagtaatagaggaaagacttccaggaatatccgagtcttcaagattatttgctgatgttgatgttactaaagaaccaataccagtagtgcctacagtacattataatatgggtggaattcctactaactataaagccgaagttttaacattaaatggatctgataaagttgttcctggactaatggcaatcggagaagcagcctgtgtttcagtccatggcgcgaatagattaggctctaac

SEQ ID NO: 219099 - DNA, 829 bp, Unknown
  Bacterial polypeptide expressing nucleotide sequence isolated from the Sargasso Sea
tttggaacgacttcctggtatttcggaaagcgcaaaaatttttgcgggtgtagatgtaactaaggaaccaattccagtgctgcctacagtacactacaatatgggaggtattcccaccaattattggggtgaagttataaatccaaccgcaaatgatcaaaatgcaattgtgccaggtttaatggctgttggtgaagctggttgtgcttcagttcatggtgcaaataggcttggatctaattcacttattgatttggttgtgttcggtagagccgctgggcttagggctggagaaattgttgacccaaacagtcatattccaccgactaatgtttttgcggttgaagccgcattagatcgttttgataatttaagacacgcaaaaggttctttgtctacatctgagttaagacttgaaatgcagaaaacaatgcaaagagatgctgcagtattccgggcctcagaaaccatgtcgcaaggtttaaatgaaatggtaaatttggcaggcaagataactgatctaagcgttactgatcgatccttggtctggaatagtgacttgatggagacattggaattaacaaatcttatgcctaatgctttggccacaatagcaggtgctgaagctcgtaaagagagccgaggggcccatgcgcatgaggacttcactgttcgagatgatgaaaaatggagggttcactccttggctaaagtagatggccctgagataaagttatcatacagagatgtaatacgcgatccattgtcagatgagtcagagggtggtatcgaactgaaaaagattgcacctaaagaaagaactttttaa

SEQ ID NO: 219100 - DNA, 925 bp, Unknown
  Bacterial polypeptide expressing nucleotide sequence isolated from the Sargasso Sea
tcatcctaccggaatttatggtcatggtactttaatttcagaaggtgtaagaggagaaggaggttatttagtcaacgctaagggtgaaagatttatggagagatatgctcctaaagctaaagatttagcatcaagagatgttgttagtaggtcaatagcagttgagataaatgaaggcagaggtgtaggaaaagaaaaagatcatgttcacttacacttaaatcatttggatccaaaagttattgaagaacgattacctggaatatcagagtcttcaaaattatttgcaaatgtagatgtaaccaaagagccaataccggtggtaccaactgttcattacaatatgggtggaattccaacaaattttaaagcagaagtcttaacaatgaatggatcagaaaaaactgttcctggcctaatggcaattggcgaagcagcatgtgtatcagttcatggagcaaatagactaggttcaaactccttaatagacttagttgtttttggaagagcagcagcgaagagagctgctgaaattgtaaaacctggaatgaaccatgatgatatttcagaaagtgaaactgaaaagtgtttacaaagatttgataaattaagaaattcaaatggaagcaatccaacggctgatcttagattatcaatgcaaaaaactatgcaatcaaaatgtgcagtatttagaactgataagacattaaaagaaggtgttgaagaaataagaaaaccctttgatggtatggaaaatatatctataaaagataaatctttaatatttaatactgacttggttgagacactagagtttgataatttaataaggcaggcaattacaacgatggactctgcttattatagaaaagaaagcagaagtgcacatgctagagaagacttcccaaagagagatgatgaaaaa

SEQ ID NO: 219101 - DNA, 625 bp, Unknown
  Bacterial polypeptide expressing nucleotide sequence isolated from the Sargasso Sea
atgagtaattataaaataattgatcacgaatatgatgtagttgtacttggtgctggaggatcaggattaagagcagccgttggcttaagtgaagctggtttaaaaacagcatgtatatcaaaagtctttcctaccagaagtcatacttctgcagcacagggtggaatatcagctgctttaggtaatatgggagaggatgattggagatggcatatgtatgatactgtaaaaggttcagactggctaggagatcaagactctatagaatatttgtgtaaagaagcaccaagagctgttttagaattagaaaaatatggagttccatttagcagaaccgaagatggaaaaatttatcagagaccctttgggggaatgacaaaaaattatggcaatgaaacagtacaaagaacatgtgcagcagcagatagaactggtcatgctatactgcatacattgtatggccaagctttaaagcataatacagaattttttatagaatattttgcattagacttattgatgaaaaatggagagtgcaaaggattaattgcatggaatttaaatgatggaactattcacagatttcgatctcatataaccattatagctaccggcggttatggaa

SEQ ID NO: 219102 - DNA, 709 bp, Unknown
  Bacterial polypeptide expressing nucleotide sequence isolated from the Sargasso Sea
aacatggggaggtatccctacaaattataaggcagaagttctaactgttaatggttcagaaaaaactgttccaggattaatggcaataggcgaggctgcatgtgtttcagttcatggggcaaatagattaggatcaaactcattaattgacttggtagtttttggaagagctgcagctaaaagagcagcagaacttattaaaccaggatcacctcatgaggaaataagtgatttagaaactcaaaaatgccttgatcgttttgataaaattagaaatgctcaaggtgatatcggaacagccgaattaagattatcaatgcaaaaaacaatgcaatcaaaatgtgctgttttcagaacagaaaaaactcttaaagaaggcgttgatgaaataagaaagacttatgatggtttagattctatatcagtaaaggataaatcattaatatttaatacagatttagttgaaactttagaatttgataatttaattagacaagcagttgtaacagttgactctgcttatcacagaaaagaaagtcgaggcgcacatgcaagagaagattatccaaaaagaaatgatcaaaaattcatgcaacacacacttgcatggtgcaatggtaaaaatacaaaaataagctatagagaagtacataaatctactttaactaatgaagttcaatattttccaccccaggagagagtttattaa

SEQ ID NO: 219103 - DNA, 877 bp, Unknown
  Bacterial polypeptide expressing nucleotide sequence isolated from the Sargasso Sea
ttacaagacatggaatttgttcaatttcatccaacagggatttatggacatggaacattaataacagagggcgctagaggtgaaggaggatatcttacaaattcaaaaggtgagagatttatggaaagatatgcaccaaaggctaaagatttagcatcaagggatgttgttagtagatcaatgtcgatagaaatcaacgagggaagaggtgttggaaaggatcaagatcacgttcacttaaatctaagtcacttagatagagatataattgagagtagattaccaggcataactgatgctgcaaggttatttgcgaatgtagatgttactaaagaaccgattccagtagtaccaactgttcattataacatgggtggaattccaactaattacaaggctgaagttttaacagtaaatggttcagaaaaaactgtaccaggattgatggcaattggagaggcagcgtgtgtttcagttcatggtgcaaatagacttggttcaaactcattaatagatctagttgtttttggaagagcagcagccaaaagagctgcagagcttattaaaccaggaactccacatgaggaaataagtgaaacagaaacccagaaatgtttagatcgttttgataaaattagaaattccaatggagaggttggaaccgcagaattaaggctttcaatgcaaaaaacaatgcaatctaaatgtgcagtatttagaactgaaaaaaatcttaaagaaggtgttgatgagattaaaaaaacgtatgatggtttaaataatttgtctgtaaaagataaatctttaatattcaatactgatttagtagaaactttagaatttgataatttaataagacaagctgttgttactgttg

SEQ ID NO: 219104 - DNA, 709 bp, Unknown
  Bacterial polypeptide expressing nucleotide sequence isolated from the Sargasso Sea
atgactaattcatataagattattgatcaccattatgacgttgtagttgtaggagctggaggttcaggactgagagcaacgcttggatgtgcagaagctggattaaaaacagcctgtatatcaaaagtgtttccaacaagaagtcatactgttgcagcacaaggtggaattggagcagctcttggtaatatgggtgaggataattggaagtggcacatgtatgatacagttaagggttcagactggctcggagatcaagatgcaattgaatacttatgttctaaagcccctgaagcagtaattgaacttgaagaatatggcatgccatttagtagaacagatgatggcaagatctatcaaagaccttttggtggacacttaaccaataatggcgagggagctcctgctatgagagcttgtgcagcagctgatagaacgggacatgctttactccatacactttatcagcaatcacttaaaaataatgtagaattttatattgaatattttgttttagatttaatttctgatgatcaaggtaattgcattggtgtggtaacatggtgcttagaagatggatcaatccatcgatttttatctcatcaaacaattctagctactggtggatatggaagagcttacttctcatccacgagtgctcacatttgtactggtgatggtagcgccaatggctttaagacaaaaccta

SEQ ID NO: 219105 - DNA, 706 bp, Unknown
  Bacterial polypeptide expressing nucleotide sequence isolated from the Sargasso Sea
catgggtggtataccaacaaattataaagcagaagttttgactgtaaatggttctgaaaaaactgttccaggacttatggctataggggaagcagcttgtgtttcagttcatggagcaaatagattgggctctaactctttgattgatcttgttgtttttggaagagcagctgcaaaaagagctgctgaactaattaaacctggtacaccacatgaggagatcagtgaatcagaaactcaaaaatgtttagatcgttttgataagattagaaactctgatggagatattggtactgctgaactaagactgtccatgcaaaaaacaatgcaatcaaaatgtgcggtttttagaacagagaaaacacttaaagagggtgttgatgaaatacgacaaacatttgatggattggattctttatcagttaaagataaatcattaatatttaatactgacctagtagaaactttagaatttgataacttaattagacaagctgttgtgacagttgactccgcttataataggaaagaaagtagaggagctcatgcaagagaagattatccaaaaagagatgatgagaagtttatgcaacatacattagcttggtgtgatggaaaaaaatcaaaaataagttatagagatgttcataagtctacattaaccaatgaagtacagtattttccacctcaggagagagtatattaa

SEQ ID NO: 219106 - DNA, 742 bp, Unknown
  Bacterial polypeptide expressing nucleotide sequence isolated from the Sargasso Sea
attattgcaactggtggatatggcaaagtttactattcagcaacttcagctcacacttgcactggcgatggaaatgcaatggttttaagagctggattgccacttcaagatatggaatttgtacaatttcatcccacaggtatttacggtcatggaactttaatttctgaaggtgttagaggtgagggaggatatttagtaaactctaagggtgaaagatttatggaaaaatacgcgcctaaagcaaaagatcttgcttcgagagatgttgtaagcagatcaatcgcggtcgaaattaatgaagggcgtggtgtcggcaaggataaagatcatgttcatttacatttaaatcatttagaccaaaaagtaattgaggacagattgccaggtatctcggaggcctcaagactatttgcaaacgttgatgtaactaaggaaccaattccagtagtgccaacagttcattataatatgggtggaatacctactaattataaagcagaggtaataacaatgaacggatcagaaaaaaccgttcctggacttatggcaatcggtgaggcagcttgtgtttctgttcatggtgcaaatagattaggatcaaattctttaatcgatttagttgtatttggcagagcagcagcaaaaagagccgctgaacttgtaaaacctggtatgaaacatgaagacattcctcaaagtgaaacagataaatgcttagatagatttgataaattaagaa

SEQ ID NO: 219107 - DNA, 976 bp, Unknown
  Bacterial polypeptide expressing nucleotide sequence isolated from the Sargasso Sea
agaagcaccaaagagctgtttttggaattagaaagatatggagtcccatttagtcgtacaaaggatgaaaaaatttatcagagatcttttggtggtatgacaaaaaattatggtaatgagacagttcaaagaacatgcgctgcagcagacagaacgggccatgccatacttcacactatgtacggccaagcattgaaacataatactgaattttttattgaatattttgccttagatttattaatgaaaaatggagaatgtaaaggcttaatagcttggaatttaaatgatggaacaattcacagatttagatctcatataactataatagcaacaggtggatatggaaaaacatattattcatcaacatctgctcatacatgtaccggagatggtaatgctatggcgttaagagcaggattgccattacaagatatggaatttgttcagtttcatcctacaggtatttatggacatggaactttaatatctgaaggagtaagaggtgaaggtggttaccttctaaattcaaaaggcgaaagattcatggagcgatatgccccaaaagccaaagaccttgcatctagagatgtggttagtagatcaatagctattgaaattaatgaaggcagaggtgttggaaatgaaaaagatcatgttcatcttcatttagatcatttagatcctaaagttattgaaagtagattgccaggtatatcggaatcttcaaggttatttgcaaatgttgatgttacaaaagaaccgatacctgtagttccaacagttcattataatatgggtggaattccaactaattataaagcagaagttataactttaaatggttcagaaaaagttgttcctggacttatggctatcggagaagcagcatgtgtttctgtacatggagctaacagattgggttcaaattcattaattgatcttgttgttttggaagagcagcagcaaaaagagc

SEQ ID NO: 219108 - DNA, 520 bp, Unknown
  Bacterial polypeptide expressing nucleotide sequence isolated from the Sargasso Sea
tatgagttcatacaaaattatagaacatgaatacgatgtagtcgtacttggagctggaggtgcaggtttgagagccgcagttggccttagtgaggctggattaaaaactgcctgtatatcaaaagtttttcctactcgaagccatacttcagcagcacagggtggtatttctgcagccctaggaaatatgggagaagatgactggaggtggcatatgtacgatacagtcaaaggttcagattggctaggggatcaggactgcattgagtatttatgtaaagaggccccaagagctgttttagaactagaaagatatggagttccatttagtagaacagaagatggtaaaatttatcaaagaccttttggaggaatgactaaaaattatggcaatgaaactgttcaaagaacttgtgcggctgcagatagaactggtcatgcaatattgcatactatgtatgggcaagcattaaagcacaatacagaattttttattgaatactttgctttagattattaa

SEQ ID NO: 219109 - DNA, 517 bp, Unknown
  Bacterial polypeptide expressing nucleotide sequence isolated from the Sargasso Sea
cggaatatcagctgcactaggaaacatgtgtgaagatgactggcgttggcacatgtatgacactgtaaagggcgctgattggcttggtgatcaagatgctatcgaatttttatgcaaggaagcaccacaagcagttatagaattagaaaaatatggagtaccatttagccgaacagaagaaggtaaaatatatcaaaggccatttggaggaatgacaaagaattatggaaatggtgttgtacaaagaacctgtgcagcagctgataggacaggacatgcaattttgcatactctatatggtcaagctttaaagagagatacggaattttttatagagtactttgcacttgatctaatcatggaaaacgataagtgccaaggagtgatagcttggaatttgcaagatggatctattcatcgttttagatctaaaacagttattttggcaacaggtggttatggtagagcgtatttttcagctacatcggcgcacacttgtacaggcgatggcggtggg

SEQ ID NO: 219110 - DNA, 724 bp, Unknown
  Bacterial polypeptide expressing nucleotide sequence isolated from the Sargasso Sea
atgaaattgcctgtcagagaatttgatgcagttgtgattggtgccggtggcgcaggtatgcgcgcggcgctgcaaatttcccagagcggccagacctgtgcgctgctctctaaagtgttccctacccgttcccataccgtttccgcgcaaggtggcatcaccgtggcgctcggtaatacccatgaagataactgggaatggcatatgtatgacacggtgaaaggctccgattatatcggtgaccaggacgccatcgaatatatgtgtaagaccggcccggaagcgattctggagcttgaccatatgggtctgccgttctcccgtctggagaatggcaccatttatcagcgtccgtttggcggccagtcgaaaaacttcggcggcgaacaggcggcacgtaccgctgcggcggctgaccgtaccggtcacgcgctactgcataccctgtatcagcagaacctgaaaaaccacaccaccattttctccgagtggtatgcgctggatctggtgaaaaacgccgatggcgcggtggtcggttgtaccgcactgtgcatcgagaccggtgaagtggtttacttcaaagcgcgtgcaaccgtgctggcaaccggcggcgcaggccgtatctaccagtccacaactaacgcccacatcaacaccggtgacggcgtcggtatggcgattcgcgccggcgtgccggtgcaggatatggaaatgtggcagttcc

SEQ ID NO: 219111 - DNA, 801 bp, Unknown
  Bacterial polypeptide expressing nucleotide sequence isolated from the Sargasso Sea
gtcctgaagtggtgcacaaaagactcccaggtataacagaattatcaaaaacgtttgctggagttgaccctgctgttcaacctatcccggtcgttcctacttgtcattacatgatgggagggattcccacaaacatcaatgggcaagttattactatacaagatggtcacgacaaggttattgaaggtttatatgcagctggtgaagttgcatgtgtatctgttcacgggggcaatagattgggaggaaattctttattggatttagtggtatttggaagagctgccggcatttatatagaagaatctatgaaacaaggagtagaattaaaaaatgcttctcatgaagacatagataaagctcttgaaaggcttaataagcttaacgcttcttctgaaggcgaacaagtaagcgctttaaaagaaagaatgcagcaaaacatgcagaataattttggtgtatttagaacaaaagatttgatggaaaaaggcatagaagatttatcccaggtgcgagatgaagttgaaaacatgcatcttaaggataagtcggcaacttttaatacagctagaatagaggcattagaaatgcaaaacttatttgaagtagctgaagctactgcagttactgcaaattcaaggaaagaaagtagaggtgctcattcaagagatgattaccctgatagagatgatgaaaattggttaaagcattcaatttacttttcagaaaataaagaagtaagcaagagagatgttaattacagacctaaaacggtgcaagcattccaacctaatggttagg

SEQ ID NO: 219112 - DNA, 664 bp, Unknown
  Bacterial polypeptide expressing nucleotide sequence isolated from the Sargasso Sea
atgagttcatacaaaattatagaacatgaatatgatgtagttgttctaggagctggaggagctggattaagagcagctgtgggtctaagtgaggctggattaaagactgcctgtatatcaaaagtttttcctactagaagtcatacgtcagcagcacaaggtggcatttccgcagctctcggtaatatgggtgaggatgactggagatggcatatgtatgatactgttaaaggagcagactggcttggtgatcaagactgtatagaatatttatgtaaggaagctccaagagcagtattagaactagaaaaatatggagttccatttagtcgtacagaagatggaaaaatttatcaaagaccttttggaggaatgactaaaaattatgggaatgaaactgtacaaagaacatgcgctgctgcagatagaactggtcatgccatattgcatactatgtatggtcaagcattaaaacataagactgaattttttattgaatattttgcattagacttactaatgaaaaatggagagtgtaaaggtttaatagcctggaatttaaatgatggtactatccacagatttagatctcatataacaatagtagcaacgggcggttatggtaaaacatattattcttctacatcagctcacacatgtacag

SEQ ID NO: 219113 - DNA, 733 bp, Unknown
  Bacterial polypeptide expressing nucleotide sequence isolated from the Sargasso Sea
atgactaactcatacaaaattattgatcaccattatgacgttgtagttgtcggagctggagggtcaggactgagagctacacttggatgtgctgaagctggattaaaaacagcttgtatatcaaaagtgttcccaacaagaagtcatactgttgcagcacaaggtggaattggagcagctctaggcaatatgggtgaagataattggaagtggcacatgtatgatacagttaagggttcagactggctcggagatcaagatgcaattgaatacttatgttctaaagcccctgaagcagtaattgaacttgaagaatatggaatgccttttagtagaacagatgatggaaagatctatcaaagaccttttggtggtcacttaactaataatggcgagggagcacctgctatgagagcttgtgcagcagctgatagaacgggacatgctttactccatacactttatcagcaatcactcaaaaataatgtagaattttatattgaatattttgttttagatttaatttctgatgatcaaggtaattgtattggtgtggtaacatggtgcttagaagatggatcaatccatcgatttttatctcatcaaacaattctagctactggtggatatggaagagcttacttctcatctacgagtgctcacatatgtactggtgatggtagtgcaatggctttaagacaaaacctacctctttctgatatggaatttattc

SEQ ID NO: 219114 - DNA, 871 bp, Unknown
  Bacterial polypeptide expressing nucleotide sequence isolated from the Sargasso Sea
aattactgagggagctagaggtgaaggtggttttttagttaatggaaaaggagaaagatttatggaacgttacgctcctaacgcaaaagatcttgcctctagagatgtagtgagtaggtcaatggaaatggaaataaatgagggaagaggcgtaggaaaaaataaagatcatataagtttacatttggaccatttagacaaagatgttttaaatgagagacttccaggaataacagaggcagccaaaacatttgcaaatgtagatgtaaacaaagaaccgattcctgttgtgcctactgttcattataatatgggaggtataccaacaaactataaagcagaagttttaactttaaatggttcggaaaaaattgtcccaggtctaatggcgattggtgaagccgcttgcgtttctgtacatggtgctaatagattaggctcaaactctctaattgatcttgtagtttttgggagggcagcagcaaaaagagcagcagaaataattaaaccaggagctccacatgaagaggtttctaatacagaaactgacaaatgcttggatagatttgataaaattagaaattcaaaaggttctacaaaaacttctgaattaagactaaaaatgcaaaaaactatgcaatcaaaatgtgcagtttttagaacagaaaaaacgttgaaagaaggtgttgatcaaataaggaaaccttatgagggtatggaagatatttctgttaaagataagtcattactttttaacacagatttagttgaaacattagaatttgataatttaataagacaagctttgactacaatggactctgcttatagtagaaaagaaagtagaggagctcacgcaagagaagatttt

SEQ ID NO: 219115 - DNA, 830 bp, Unknown
  Bacterial polypeptide expressing nucleotide sequence isolated from the Sargasso Sea
ggagatggacttggaatgactcttagagctgtttttcctgctcaggatatggaaatgtggcaattccatccaactggtattcatggtgcagggtctcttgtaactgagggttgcagaggtgaaggtggatatttaattaatgcagatggtgagagatttatggaaagatatgctccaaatgctaaggatcttgcggggagagatgttgttgctagatcaatggttatggaaatacttgaaggtagagggtgtggcccagagaaagatcatgtttacttgaaactcgatcatttgggtgcagatgtcctgaattcaaaattaccgggcatatgcgagctctcaaaaacttttgctcacgttgatcctattaaggaaccaattcctgttgttcctacatgtcattacatgatgggaggaactccaacaaatattcatggtcaagcatttagcaggaatgatggaaatgatttcatggtttccgggcttttctctgttggggaggctgcatgtgtatctgttcatggcgccaacagactgggcggaaactctttattagatttagttgttttcggaagagctgcaggcaaacacataaatgaggagcttaaatctggtggtggcgtagataatgcttctaatgaagatattgaattggccatgagcaggctaaacaaattaaatgaatctgaatctggatatgaggttgctgatgttaaaaaacaactccaaacatgtatgcagaactactttggtgtctttaggcgtggtgagtttatggagaaaggagtcaaagaacttgaggagataagagagaaatctgaaaatcttta

SEQ ID NO: 219116 - DNA, 787 bp, Unknown
  Bacterial polypeptide expressing nucleotide sequence isolated from the Sargasso Sea
ataacagatgctgcaagactatttgctaatgtagatattacaaaagaacctattccagttgtgccaactgttcactacaatatggggggtattcctacaaactataaaggagaagtattaacattgaatggctctgaaaaaattgttcctggattaatggctattggtgaggctgcgtgcgtttcagttcatggagcaaacagattaggttctaattcacttattgatcttgttgtttttggaagagctgctgcaaaaagagcatctgatctaattaaacctggaacaccacatgaggaaattggacagtcagagactcaaaaatgtttagatagatttgataagattagaaattcagatggagacactggcacagcagaattaagattatcaatgcaaaaaaccatgcaatcaaaatgtgcagtttttagaactgaaaaaacacttaaggaaggagttgaagaaattaaaaaaacttatgacggattagaatccttatctgttaaggataaatcattgatatttaatacagatcttgtcgaaactttagaatttgataacttgattagacaagcagttactacagttgattcagcttatcatagaaaagagagcagaggtgctcatgctagagaggattatcctaaaagagacgatgaaaaattcatgcaacatactcttgcttggtgtgatggaaaagaaacaaaaataagttatagagaagttcacaaatcaactttaactaacgaagtacagtatttccctcctcaagagagagtttattaat

SEQ ID NO: 219117 - DNA, 934 bp, Unknown
  Bacterial polypeptide expressing nucleotide sequence isolated from the Sargasso Sea
atgagtgcttataaaattatcgatcatgaatatgatgttgtagttcttggagctggaggttctggcttgagagcagcagtgggtttatccgaagcaggattgaaaacagcatgtatttcaaaagttttcccgacaagaagtcatacttcagctgcacaaggtggaatttctgcagcgcttggaaatatgggagaggatgactggagatggcacatgtatgatacagtgaaaggctctgattggttgggtgatcaagatgcaattgaatatctttgcaaagaagctcctaaagcagttcaagagttagataagtatggagtgccttttagtagaactaaagaaggaaaaatataccaaagaccttttggagggatgactaaaaactatggaaatggaactgttcaaagaacttgtgcagcagcagatagaacaggacacgccattcttcatacattgtatggtcaagctttaaaacacaacacagaattttttatagaatattttgccttagatttgataatgaaaaatggagaatgtaaaggcttgatagcttggaatctaaacgatggtacaattcatagatttaaatctcatataaccataattgctaccggcggttatggtaaaatttattattcagcgacttctgctcatacttgtactggagatggtaatgggatggttttaagagctggtttaccattacaagatatggaatttgttcaatttcatcctactggaatatatggagtgggatgtttgatatctgaaggagttagaggtgaaggtggttttcttttaaattctaaaggagaaagatttatggagagatacgctcctaacgctaaagatcttgcttcaagagatgtggtaagcagatctattgctattgaaataaatgaaggaagaggtgtaggaaaagaaaaagaccatg

SEQ ID NO: 219118 - DNA, 940 bp, Unknown
  Bacterial polypeptide expressing nucleotide sequence isolated from the Sargasso Sea
ctaaagcaaaagattctggcttcaagagatgtagtaagtagatcaatgtctattgaaattaatgaaggtagaggtgttggaaaagaacatgatcatgttcatttaaatttaaatcatttagataaagatattattgaaagtagacttccaggtataacagaagctgctaggttatttgctaatgtagatgttacaaaagaaccgattcctgttgtaccgactgttcattataacatgggtggtatcccaacaaattacaaagcagaagttttaactgtcaatggctctgaaaaaactgtaccaggtttgatggctataggtgaagcggcttgtgtttcagtccatggtgccaatagacttggttcaaactcattaatagatttggtagtttttggaagagctgcagcaaaaagagcagctgaattaattaaacccgggactccacatgaggagattagtgagactgaaacacagaaatgtttagatcgttttgataaaattagaaatgctaaaggtgaaattggaacagctgaattaagactatctatgcagaaaactatgcagtcaaagtgcgcagtttttagaacagaaaaaactcttaaagaaggtgtcaatgaaataggaaaaacttacgatgggttacaatctatatctgtcaaagataaatcgctaatttttaatactgatttagttgagactttagaatttgataatctgattagacaagcagttgttacagtcaattctgcttataacagaaaagaaagtagaggtgctcatgcaagagaggattatccaaaaagggatgatgagaaatttatgcaacatacacttgcttggtgtaatggaaaagaaacaaagataggttatagagaggttcataaatctacattaacaaacgatgttcaatactttccaccccaagaaagagtttattgat

SEQ ID NO: 219119 - DNA, 778 bp, Unknown
  Bacterial polypeptide expressing nucleotide sequence isolated from the Sargasso Sea
acaagaagtcatacttctgcggcacaaggaggtatttctgcagctttaggaaatatgggtgaggatgactggagatggcacatgtatgatacagttaaaggtgcagattggttgggcgaccaggactcaatagaatatttatgtaaagaggctccagcagcggtgctagaattagaaaagtatggagttccattcagtagaacagaggatggaaaaatctatcaaagaccttttggaggtatgacaaaaaattatggaaatgagacagttcagagaacatgtgcggcagctgatagaacaggtcatgcaatacttcacactttgtatggtcaagccctgaagcacaatacagaattctttattgagtactttgcactagatttaataatgaaagatggagcatgtaaaggtttaattgcttggaaccttaacgatggaactatacacagattcagatctcacattacaattatcgcaacaggagggtatggaaaagtatattactcagctacttctgctcatacttgtactggggatggtaatgcgatggttttaagagctggtttacctttacaagacatggaatttgtacaatttcaccctactggcatatacggtcatggaactttaatttcagaaggtgttagaggtgaaggaggttatttagtaaattcaaaaggtgaaagatttatggagcgttacgcaccaaaagcaaaagatttggcatcaagagacgtagtaagtagatcaatagcggtagaaataaatgaaggtagag

SEQ ID NO: 219120 - DNA, 792 bp, Unknown
  Bacterial polypeptide expressing nucleotide sequence isolated from the Sargasso Sea
caggaatatcagagtcggcaaaaacttttgccgatgttgatgtaactaaagaacctattccagtagtacccactgttcattataatatgggaggaattccaacaaattataaagctgaagttttaactataaatggttctgaaaaaattgttccaggactaatggcaattggagaggcagcatgtgtttcagttcatggtgcaaacagattagggtccaattcattaattgatttagtggtatttggtaaagcagcatcaaaaagggcagctgagattgtcaaaccaggaaaacctcatgaaaaaatttcaaattctgaaacagataagtgtttagaaagatttgataaattaagaaatggaaatggaaataataaaacagccgatctaagattggcaatgcaaaaaactatgcaatcaagatgttcagtttttagagatgaaaaaaatttaaaacaaggagcaaatgaaattcaaaaatcatttgaggggatggattcaatttttgtaaaagataaatctcttatttttaatacagatcttgttgaaactttagagtttgataatttaattagacaggcaataacaaccatagaatctgcgagtcatagaaaagaaagtagaggtgcccatgccagagaagattatcctaaaagagatgatgaaaaatttatgcagcataccctatcatggcatgatggcaaacaaacaaaaataaattatagacctgttcataggtctacattaacaaatgatgttcaatattttccaccccaagaaagagtgtattaaa

SEQ ID NO: 219121 - DNA, 499 bp, Unknown
  Bacterial polypeptide expressing nucleotide sequence isolated from the Sargasso Sea
aatgtctaagtcttatgaaattgttaatcataattacgatgttataatcattggtgctgggggctcaggtttaagagcgacattaggtgttgctgaagcaggactaaaaacagcatgcataaccaaagtgtttccaacaagaagccataccgttgctgcccaaggtggtattggagcagctctaggaaatatgggagaagatgattggcgttggcatatgtatgatactgttaaaggctcagattggttaggcgatcaggacgcaatagaatatttatgctcaaatgcttctgaggccgtaattgaactagagcaatatggtatgccttttagtagaactgaagacggcaaaatataccaaagaccatttggtggacatttaacaaataatggagaaggcgctcctgcaatgcgagcatgcgcggcagcagacagaactggacatgcattattacatactttgtatcaacaagccttaaaacacaatgttgaatttttt

SEQ ID NO: 219122 - DNA, 799 bp, Unknown
  Bacterial polypeptide expressing nucleotide sequence isolated from the Sargasso Sea
aattaatgaaggaagaggcataggagaaaataaagaccacgtacatttacatattgaccatatagatcctaaaattatagaggctcgactacctggaatttcagaatcggtatcaacttttgtagatcgagacgtaactaaggacccaataccagttgttccaacggtacattataatatgggaggaattcccaccaaccataaagcagaagttttaaactcaaatggcaaagataaaacagttccaggattaatggctataggtgaagctgcatgtgtgtctgttcacggagcaaacagattaggctcaaattcattaatcgatctggttgtttttggaaaagcagcagcaatgagagcagcagaattagtaaaaccaaattcctctcatgtggaaatttctaaaagtgaaacagacaaatctcttgatagatttgacaaattgaaaaatggaaatggatcaaataaaacttctgaactcagactatcaatgcaaaaaacgatgcaatcaaaatgcgctgtttttagaactgaaaaaacattaaaggaaggagttaaagaaatcaaaaaacctcacgaaggcatgcagtcaattttagttaaagataaatctctgatttttaataccgatttaatggaaaccttagagtttgataatcttattcgacaagctgttacaacgatggagtcggcttaccaaagaaaagaaagccggggcgcgcatgccagagaagactatccaaagagagatgatgaaaattttatgaaacacactttaagttggtataatgaaaaagaa

SEQ ID NO: 219123 - DNA, 778 bp, Unknown
  Bacterial polypeptide expressing nucleotide sequence isolated from the Sargasso Sea
catgaaagcttataatatcatagatcatgagtacgatgttgttgtgcttggagcaggtggctcaggattaagagcagctgtgggattaagcgaagctggtttaaaaacagcctgtatctctaaagtatttccgacaagaagtcacacgtcagccgcacagggtggaatatcagcagctctaggaaatatgggcgaagatgattggagatggcacatgtatgacactgtaaaaggtgcagactggttaggagatcaagatagcattgaatatttatgtaaagaggcacccaaagcagtcttagaattagagaagtatggagttccttttagtcgaacagatgaggggaaaatttatcaaagaccatttggtgggatgacaaaaaattatggtaatggaatcgttcaaagaacttgtgcagctgcagacagaacagggcatgcaatattgcacacattatatggacaagctttgaaacataatacagaattttttatagaatattttgctttggatttactgatgaaagatggagagtgcaaaggattaatagcatggaatcttaatgacggtacgattcatagatttagagcacatacagtaattattgcaaccggaggatatggaaaggtatactactctgctacatcagctcatacttgtacaggtgatggtaatgccatggtcttaagagcaggactacctttgcaagatatggaatttgtacaatttcatccaacaggtatttatggacatggaacacttatatcagaaggagta

SEQ ID NO: 219124 - DNA, 812 bp, Unknown
  Bacterial polypeptide expressing nucleotide sequence isolated from the Sargasso Sea
tgtaggcttgcagctcagccatctgcctgaggcggtattcagagagaaacttcctggtatcaccgaactgtctaacgtttatgctggtgttgatccacgagttgaccccattccagttgtgccaacttgtcactatatgatgggtgggatacctaccaataagtatggtcaggtcattgattattcactcaaaacgggtgaccgagtggtagaggggttatatgctgttggtgaagcagccaatgtatcggtgcatggagccaaccgcctgggtgctaactcattacttgacttggttgtctttggtcgtagcgctggccttgacgttaaagataagcttgaacaaggtgttgatgatgtgcctgtctcaagcgataacatacaacaagctgcagagcgttacttgtcatatgaaaatcgtgataatgtaggaacaactcacaccgttgcttctgtaagagagcgcatgcaggaaatcatgcagtcagacttcggtgtatttagaacgcaggaatccatggagtctgggttacagcagttggttgaaaccaaagagttgatgaaaactgtctccttggctgatcggtctcctagctacaatactgcgagaatcgaactcctggagttggataatatgctagatattgcggtttcaactgcacgatcagctaatttccgtgaagagagccgtggtgcgcactcgcgggttgattttgagaagcgagacgacaagaactggcactgccacacgattgatatagccggtggtgatttgcttaagcggcccatagatatgagtccggagacggttg

SEQ ID NO: 219125 - DNA, 725 bp, Unknown
  Bacterial polypeptide expressing nucleotide sequence isolated from the Sargasso Sea
tcctacagttcactataatatgggaggtatcccaacaaattataaagcagaagtgctaacaatgaatggttcggaaaaaacagttcctggtttaatggctataggtgaagcagcatgtgtttctgttcatggagcaaacagacttggttctaattcattaattgatttagttgtatttggaagagcagctgcaaaaagagcagctgaactagtaaaacctggtacaccacatgaagaaataccagaaactgaaactcaaaagtgtttggatagatttgataaactcagaaatgctcaagggaataatagtactgcagagttaagactctcgatgcaaaaaacaatgcaatctaagtgtgcagtatttagaacagaaaaaaatcttaaacaaggggttgatgagataggtaaaacttatgatggaatggactccatttctgttaaggataaatctttagtatttaacaccgatttagtggaaaccttagaatttgacaatttaattagacaagcggtagcaactgtagattctgcatatcacagaaaagaaagcagaggagctcatgcaagagaagattatccaaaaagagatgatcaaaaatttatgcaacatactcttgcatggtgtgatggcaaaaaaacaaagataagttatagaccagtccatcaatcaactttaactaatgaagtgcaatattttccgcctcaagaacgggtatattaat

SEQ ID NO: 219126 - DNA, 781 bp, Unknown
  Bacterial polypeptide expressing nucleotide sequence isolated from the Sargasso Sea
ggaggatctggtcttagagctgcagttggattaagtgaagctggattaaaaacagcatgtatttcaaaagtatttccaacacggagtcatacatctgcagcgcaaggaggtatttctgcagcattaggaaatatgggcgaagacgattggagatggcatatgtatgatactgttaaaggatctgattggttgggagatcaagattgcatagaatatctttgtaaagaagcaccaagagcagttttagagcttgaaaaatatggagtgccatttagcagaacagaagatggtaaaatttatcaaagaccatttggtggtatgacaaaaaattatggaaatggaacggtgcaaagaacttgtgcagcagctgatagaacaggtcatgcaatcttacacacactttatggtcaagctttgaaacacaacactgaattttttattgaatattttgcattggatctgttaatgaaaaatggtgagtgcaaaggactgatagcatggaacctaaatgatgggacaattcataggttcagatcacatattacaataatagcaactggtggatatggtaaagtttactattcagcaacttctgctcatacttgtactggtgatggaaatgcaatggttttaagagctggattaccacttcaagatatggaatttgtacaatttcatcccacaggtatttatggtcatggaactttaatttctgagggtgttagaggtgagggaggatatttggtaaattctaagggtgaaaggtttatgaaaaatacgc

SEQ ID NO: 219127 - DNA, 1000 bp, Unknown
  Bacterial polypeptide expressing nucleotide sequence isolated from the Sargasso Sea
ggaatgacaaaaaactatgtaaatgaggctgttcaaagaacttgtgctgcagcagatagaacaggtcatgcaatactgcacacaatgtatggtcaagcactaaaacataatacagaattttttattgagtattttgcattagatctgttaatgaaaaatggtgagtgcaaaggtttaatagcttggaatttaaatgatggaactatacacagatttagagctcatataactatagttgctacaggcggttatggaaaaacatattattcatcaacatctgctcacacttgtacaggggatggaaatgctatggttttaagagcagggctaccgttacaagacatggaatttgttcaatttcatccaacaggaatttatggtcatggaactttaatatcagaaggtgttagaggtgaaggaggttacttattgaattctaagggagaaagatttatggaacgatatgctcccaaagctaaagatcttgcatctagagatgtagttagcaggtcaatagcaattgaaattaatgaaggaagaggagttggaaaagaaaaagatcatgttcatcttcacttgaatcatttagatccaaaagtaattgagaaaagacttcctggaatttcagagtcctcaagattgtttgcagatgttgacgtaacaaaagagccaatacctgttgttcctacagtgcactataatatgggaggtattccaaccaattataaagcagaagttataactgtagatggttctgaaagagttgttcctggacttatggcaataggagaagcagcatgtgtttccgtacatggagctaatagattaggatcaaattcgttaattgaccttgtagtttttggaagagccgcagcaaaaagagctgcagaattggtaaaatctggcactccacatgaacaaatctcgaattctgaaacagataaatgtttggaaagattcgaaaaattaagaaatggtaatggcaataatagaacggcag

SEQ ID NO: 219128 - DNA, 871 bp, Unknown
  Bacterial polypeptide expressing nucleotide sequence isolated from the Sargasso Sea
aattatggtaacggtacagctcaaagaacatgcgctgcagctgatagaacgggtcacgcaattttgcacactctttatggccaagcattaaaacataatacagaattttttattgaatatttcgcactagacttaataatgaaaaatggtgagtgcaaaggagtaatagcctggaatttaactgatggaacgattcatagattcagatcacacattacgataattgcgacaggcgggtatggaaaagtttattattcagctacctcagcacatacttgtacaggagatggtaacgcaatggtattgagagctggactacctttacaagatatggagtttgttcaatttcacccaacaggaatttatggcgtgggatgtttaattactgagggtgcaagaggagaaggaggattcttagtaaatggcaaaggtgagagatttatggaacgttacgcgccaaatgcaaaagatttggcatctagagatgtagtaagcagatcaatggagatggaaattaacgaaggtcgaggtgttggaaaagataaagatcatataaatttacacttagatcacttagacaaagaagttttggaagaaagacttccaggcattactgaagctgcaaaaacttttgcaaatgtagacgttaacaagcaaccaattccagttgtacctacagttcactacaacatgggaggtattccaacaaattataaagcagaagttttgactttaaatggttcagagaaaacggtacctggtcttatggcaattggagaagcagcctgtgtatcagttcatggtgctaataggctgggatcaaattcattaatcgacttagtagtatttggaagagctgcagctaaaagag

SEQ ID NO: 219129 - DNA, 827 bp, Unknown
  Bacterial polypeptide expressing nucleotide sequence isolated from the Sargasso Sea
tcacttagacccaaaagttatgatgaaaagattacctggaattgcagagtcatcaagattgtttgcaaacgttgacgtgactaaagagccaatcccagtagttccaactgttcattataatatgggcggtatacctacaaattataaggcagaagttttaaccgtaaatggttcagagaaaacagtcccaggactgatggcaattggagaagccgcatgtgtttctgttcatggtgcaaatagacttggttcaaactcgttaattgatttggttgtttttggtagagctgccgcaaaaagagctgcagagttagttaaaccaggaatgcctcacgaggatattccaatttcagaaactgaaaagtgtttagaaagatttgatagtttaagaaatggtagtggtgataacagaactgcagatttaagattatctatgcaaaaaactatgcaatcaaaatgtgctgtttttagaactgacaaaacactaaaagaaggagttgaagaaatcagaaaaccttttgagggtatggataatataaacgttaaagataagtcacttatttttaacactgatttagtagaaaccttagaatttgataatctaatacgacaggcaataacaacgatggattcagcgtatagtagaaaagaaagtagaggggcgcacgcaagagaagattatccaaccagagatgacaacaattatatgaagcatactctatcttggtgtgaaggaagtaaatctaaaattgcttatagagaagttcataaatctactttatcaaatgaagttcaatattttccaccacaagaaagagtttattaat

SEQ ID NO: 219130 - DNA, 851 bp, Unknown
  Bacterial polypeptide expressing nucleotide sequence isolated from the Sargasso Sea
gtggcagtttcatcctacggggattgccggtgcgggaacccttgtaacggaagggtgccgcggtgaaggtggttaccttataaatcgtgatggagaacggtttatggagcgatatgctccgacagcgaaggatctggctggaagagacgttgttgcgcgatcaatgatattagagattctcgatggcaaagggtgtgatcctgaaaatcctgctaacgatcacgttttgctgaagctcgatcacctaggtgaagaagtcctgaatagcaaacttccaggcattttagagttatcaagaaccttcgcgcatgttgatccagttaaggagccgataccggtgattccaacgtgccattatatgatgggtggtatagcgacccaggtcagcggccaggctctaacacaggttaatggtacagatcaggaggtgcagggtctctacgctgcaggtgaagcggcttgcgtttctgttcatggggcgaaccgattaggaggaaactcattactggatttagttgtttttggtcgtgctgcaggcattcacattgaagaggtgatgcgacaaggggtgtcttatcgcgacgcatccgatagcgacatagagtcctctctagcaagactctctcgttggaatgattcttctagtggggagtcaatttccgatttgaagaaagaattgcaaacgacaatgcagaacagttttggcgttttcagaacagaaaaaaacatgcaagaagggatcgtgaaattacaggatctaaggcaaagaattgatagtgctcatttgccggataagtcggattcatttaatacggctagacttgaagcgctagagttagataacttgcttg

SEQ ID NO: 219131 - DNA, 906 bp, Unknown
  Bacterial polypeptide expressing nucleotide sequence isolated from the Sargasso Sea
ttcttacaaaataattaatcacgagtatgatgttgtcgttttaggagctggaggatcaggtttaagagccgcagtgggcttaagcgaagctggattaaaaactgcatgtatttcaaaagtttttccaactagaagccatacttcagcagctcaaggaggtatttcagcagcgcttggtaatatgggagaagatgattggcgttggcatatgtacgatacagttaaaggagctgattggttaggtgatcaggatagtatcgaatatctttgtaaagaagcaccaaaagcagtgattgaattagaaaaatatggtgtcccttttagtagaactgaagatggaaaaatttatcaaagaccttttggtggtatgacaaaaaactatggtaacggaactgttcaaagaacttgtgcagctgcagatagaacaggtcatgcaattttacatactctttatggacaagctttgaaacataacacagaattttttatagaatactttgcattagatttaattatgaaaaatggtgaatgcaaaggtttaatagcttggaaccttaatgatggtactattcatagatttagatctcatattacaataattgcaactggtggatatggtaaaatatattattctgccacttcagctcatacatgtactggtgatggaaatgcaatgatattgcgagcaggtctacccttacaagatatggaatttgttcaattccatccaacaggaatttatggacatggcactttgatctctgagggcgttagaggagaaggagggtatttagttaattctaaaggtgaaaaatttatggaacgttatgctcccaaagctaaagatttagcatctcgagatgtagttagtagatcaatagcagtagaaattaatgaaggaagagg

SEQ ID NO: 219132 - DNA, 815 bp, Unknown
  Bacterial polypeptide expressing nucleotide sequence isolated from the Sargasso Sea
tataaatcattattatgatgttgttgttataggtgcaggaggttctggtttaagagcaacattaagttcagcagagtctggtttaaaaacagcctgtataactaaagtatttcctacaagaagtcacaccgttgctgctcaaggaggaataggtgctgcacttggaaatatgtcagaagataattggaaatggcacatgtttgatactgtaaagggctctgattggcttggagatcaagatgcaattgaatatttatgttctaatgcaccagaagctgtaattgaattagaaaattatggtatgccatttactagaacaaaagatggaaaaatttatcagcgaccatttggcgggcatttaatgaaaaatggtgaaggtcctccagctatgagagcttgtgctgccgcagatagaactggtcacgctttattgcatacattgtatcagcaatctttaaaaaataatgttgaattttatattgaatattttgtacttgatttgttgatggatgataacaacaattgttttggcgtacttgcatggtctttagaagatggatctatacatagatttttatcacatcaaacaatcatcgctactggtggatatggaagagcgtatttttcctctacaagtgcacacatctgtacaggagatggtaatgcaatggttttgcggcaaaatctgcctctttctgatatggaatttattcaatttcacccaacaggaatatacggggctggtgtattaataactgagggtgcaagaggtgaagggggctatttaacaaattcagatggtgaacggttcatgg

SEQ ID NO: 219133 - DNA, 697 bp, Unknown
  Bacterial polypeptide expressing nucleotide sequence isolated from the Sargasso Sea
tataccaacaaattataaagcagaagttttgactgtaaatggttctgaaaaaactgttccaggacttatggctataggggaagcagcttgtgtttcagttcatggggcaaatagattgggctctaactctttgattgatcttgttgtttttggaagagcagctgcaaaaagagctgctgaactaattaaaccaggtacaccacatgaggagatcagtgagtcagaaactcaaaaatgtttagatcgttttgataagattagaaactctgatggagatattggtactgctgaactaagactgtccatgcaaaaaacaatgcaatcaaaatgtgcggtttttagaacagagaaaacacttaaagagggtgttgatgaaatacgacaaacatttgatggattggattctttatcagttaaagataaatcattaatatttaatactgacctagtagaaactttagaatttgataatttaattagacaagctgttgtgacagttgactccgcttataataggaaagaaagtagaggagctcatgcaagagaagattatccaaaaagagatgatgagaagtttatgcaacatacattagcttggtgtgatggaaaaaaatcaaaaataagttatagagatgttcataagtctacattaaccaatgaagtacagtattttccacctcaggagagagtatattaa

SEQ ID NO: 219134 - DNA, 813 bp, Unknown
  Bacterial polypeptide expressing nucleotide sequence isolated from the Sargasso Sea
ctgagtctgcaaaaatttttgctggagtcgatgtaccaaaagagccaataccagtgctcccaacggttcattataacatgggcggtatccccacaaattattggggtgaggttttgagtcctaaaccagaaaacccaaatgaaattgtgccaggcttaatggctgttggcgaagctggttgcgcttcagttcatggggctaatagattaggttctaattctttaattgacctcgtggtttttggaagagcagcggcaataaaagctggtgaagttgtagattcaagttcatctaatccagaactaaataagctatcaattgaccaagcttttgatcgttttgacaatctccgttatgcgaaaggtgaaattccgacagctgacctcaggttgcaaatgcaaaaaaccatgcaagaggatgcggctgtttttagaacatcagagacgctcgcgaatggtgtcaaaaagatgaataaaattgcatctgatgtaaaagatttgtcagttaccgacagaagtctagtctggaatagtgatttgatggaaacattagagcttacaaatctaatgccaaacgcattaagtactatttggggtgctgaagccaggaaagaaagtcgaggtgcacacgctcatgaagattttgcgagtcgtgatgatgaaaaatggcgtgtgcatacgatcgcaagattttctgacaacgcaaattcaattgatttaagctatcggcctgtaataaaagagcctctttcgtccgaagagcagggaggcataagtttggaaaaaatagcaccgaaagagcggacattttaga

SEQ ID NO: 219135 - DNA, 753 bp, Unknown
  Bacterial polypeptide expressing nucleotide sequence isolated from the Sargasso Sea
cgggcagacttgtgcgctgctctctaaagtgttcccaacccgttcccataccgtatccgcgcagggtggcatcaccgttgcgctcggtaatacccatgaagataactgggaatggcacatgtacgacaccgttaaagggtcggactacattggtgaccaggacgctattgaatatatgtgtaaaaccggtccggaagcgattctggaactggaccacatggggctgccgttctctcgcctcgacaatggcacaatttatcaacgtccgtttggcggccagtcgaagaacttcggcggtgagcaagcggcacgtactgcggcagcggcggaccgtactggtcatgcgctgttgcacacgctgtatcagcagaacctgaaaaaccataccaccatcttctcagaatggtatgcgctggacctggtgaaaaacgccgatggcgcgattgtcggttgtaccgcgttgtgtatcgaaaccggtgaagtggtttacttcaaagctcgcgcaaccgtgctggcgaccggcggtgctggccgtatttatcagtccaccaccaatgcccacatcaatactggtgacggtgttggtatggctatccgcgccggtgttccggtgcaggatatggagatgtggcagttccacccaaccggtatcgccggtgcgggcgttctggtcacagaaggctgccgtggtgaaggtggctacctgctgaacaaacacggtgagcgcttcatggagcgttatgccccgaatgc

SEQ ID NO: 219136 - DNA, 877 bp, Unknown
  Bacterial polypeptide expressing nucleotide sequence isolated from the Sargasso Sea
tcgaggagagggaggatacctcacgaattctgatggcgaacgttttatggaacgatatgctcccaatgcaaaagaccttgcatcaagagatgttgtcagtcgttcaatgacaatggaaataatagaaggcaggggcgtgggtgaaaagaaagaccacatccatctaaatcttcaacatttaggaccggatgtaattgaggaacgtcttccaggaattgctgagaccgcaagagtctttgcagatgttgatgtaactaaagatccaatccctgtcttgcccactgtccattacaatatgggcggtgtacctacaaacatgcacacggaggtcattaccaagaactccagtggtgatatggaaattgtcccaggattaatggcggtaggtgaagcggcctctgtatcagtccatggcgctaatcgattgggatcaaactcgcttttggatttagtggtctttggtagagagtcttccattcaatgtcaaaaaacaatcaaaccaatgcagacacaaaacaaggtcaatcaaaatgaattggataagatcattgataagtttgattccattcgattttcaaaaggatcacttccaacagcagagattagagccgaaatgcaaagcattatgcaaaagcatgcatctgtatttagaacggaagaattaatgaaagagggcgtggaaaaactttcctcatgcatagattcgttcaaagatgtatctgttagtgatcggggtttagtttggaataccgatttgattgaaacccttgaactggaaaatctactaggccaagcgatcattacgattcaaagtggtcaggttagaaaagaaagtcgaggcgcgcacgcaagggatgactatccagatcgagacgat

SEQ ID NO: 219137 - DNA, 714 bp, Unknown
  Bacterial polypeptide expressing nucleotide sequence isolated from the Sargasso Sea
cttgagcatctcggtccagagatactcgctgagcgtctccccgggatttcagagacggctcagatcttcgcaggcatcgacgtctgcaagcagccgattcccgtcattcccactgtgcactacaacatgggcggtattccgaccaacattcatggggagtatgtggggaactcgaaagatggcgccgtccctaacgtcccaggtctaatggcgattggggaggccgcctgcgtctctgtacatggagcaaaccgactgggatcaaacagtcttttggacttaatcgttttcggccgcgcagccggacaacatgctgcgaagaccgtttcgaccgcagacactccgctacagggtgacctgtcaaccgttgacaatattctcgagcggtttgatcgaattcgtttttcgaaagggcccgcaagcaccgcagccatccgcctacgcatgcagcgcgtgatgcagacgaactgtgctgttttccgaaacgaacaggttttgagcgagggcgtcacccagatcgacgaaactgtggggatgtttggagaggtgggagtaactgatcgttcccttatctggaacacggacctggtcgagacactcgaacttgaaaatctcctggcacaggctcaagtgactgtccacagtgcccgcgcccggaccgaaagccgtggcgcgcacgcccgggatgattatcctgatcgtgacgatagtgaa

SEQ ID NO: 219138 - DNA, 685 bp, Unknown
  Bacterial polypeptide expressing nucleotide sequence isolated from the Sargasso Sea
tataaagcagaagttttaacacttaatggatctgaaaaaacggttccaggtttaatggcaattggtgaagcagcttgcgtatcagttcatggagccaatagattaggttctaattctttaatagatcttgtcgtctttggaagagcagcagctaaaagagcagccgagattgtaaaacccggcagcccgcatgaagaagtttcgaattcagaaacagaaaaatgtttagaaagatttgataaaataagaaattcacacggaacaacaaaaacctcagagcttagactgcaaatgcagaaaacgatgcaatcaaaatgcgctgttttcagaactgaaaaaactttaaaggagggcgtagagcaaatcaggaaaccttacgagggtatgagtgatatttcagtaaaagataaatctttgttatttaacacagatctagttgaaactttagaatttgataatttaattagccaagcattaacaactatggactcggcttacaatagaaaagagagcagaggtgcacacgctagagaagattttaccaaaagagatgataaaaattttatgaaacatactttagcatggcaaaatggaaaaaaagttgaaattaaatatagagatgtccactctagaactcttactaacgatgttcaatattttcctccaaaggagagagtttattaat

SEQ ID NO: 219139 - DNA, 658 bp, Unknown
  Bacterial polypeptide expressing nucleotide sequence isolated from the Sargasso Sea
atgacatctgcatacaactttatagatcatcaatatgacgttgttgttgtaggagcaggagggtctgggctccgagctactctaggatcagctgaagcaggtttaaaaactgcttgtatttctaaagtatttccaactagaagccatactgttgcggctcaaggtggaataggtgcagctttaggtaatatgggtgatgataattggaaatggcatatgtatgatactgtaaaaggctcagattggctaggagatcaagatgcaatagagtatctttgttctaatgctcctgaggctgtaatagaattagaagaatatggaatgccgtttagcagaacagatgatggtcgaatataccaaagaccttttggtggtcatttaacagataatggtgaaggtgcacccgctatgcgagcttgcgcagccgcagatagaaccggacacgctctccttcacacactctaccagcagtcgctaaaacataaggttgaattttatattgaatattttgttcttgatttattaatggataaagatggtaactgtaaaggggtggttgcatggtgtttagaagatggaacaatccatcgttttctgtctcatcaaacaattttagctactaggtggttatgggagagcatatttttcttcaactagc

SEQ ID NO: 219140 - DNA, 945 bp, Unknown
  Bacterial polypeptide expressing nucleotide sequence isolated from the Sargasso Sea
ttttggtggaatgactaaaaattatggcaatgaaactgttcaaagaacttgtgcagcagcagatagaacaggtcatgcaatattgcatactatgtatgggcaagcgctaaaacataacacagaattttttattgaatattttgctctagacttattaatgaaagatggtgagtgcaaaggacttattgcctggaatttaaatgacggaactattcatagatttagatctcatataacaattatagcaactgggggatatggaaagacatactattcttcaacatctgcacatacttgcactggagatggtaatgctatggttttaagagcaggacttcctttacaagatatggagtttgtccaatttcatcccacaggtatttatggacatggtactttaatatctgaaggtgtaagaggtgaaggaggctatttattaaattctaaaggagaaagattcatggagaggtatgctccaaaagctaaagatcttgcatctagagatgtagtaagcagatcgattgcaattgaaattaatgaaggaagaggtgttggaaaagaaaaagatcatgtacatcttcatctaaaccacctagatccaaaggtaattgaaaaaagacttccaggaatttcggaatcctcaaaattatttgcagatgttgatgtaacgaaagaaccaataccagttgtacctacagtgcattataatatgggcggaataccaactaattataaagctgaagttttaacggtaaatggatctgaaaaaactgtgccagggcttatggcaataggagaagcagcatgcgtatctgttcatggtgccaatagattaggatcaaattcattaattgatcttgtcgtatttggaagagcagcagcaaaaagagctgccgaaatagtaaagccccggactcctcatgaagaaatttcgaaaagtgaaac

SEQ ID NO: 219141 - DNA, 592 bp, Unknown
  Bacterial polypeptide expressing nucleotide sequence isolated from the Sargasso Sea
atgagtgcgtataaaattatagatcatgaatatgacgttgttgttttaggagccggtggatctggtctaagggcagcggttggcttatcagaagctggattaaaaacagcttgtatttcaaaagttttccccacaagaagtcatacctctgcagctcaaggaggaatctctgcagcactaggtaatatgggagaagatgattggaggtggcacatgtatgatacagttaaaggatcagattggctaggagatcaagacgctatcgaatatttatgcaaggaggctccaagagcagttgttgaattagaaagatatggtgttcctttcagcagaactgatgatggaaaaatttatcaaagaccttttggcgggatgactaaaaattatggtaatggcacggcccaaaggacttgtgctgcagctgacagaactggtcacgcaattttgcatactttatacggtcaagcattgaaacataatacagaattttttattgagtacttcgcattagacttaattatgaaaaatggtgaatgcaagggagtaattgcgtggaatttgacagatgggactatccatagatttagatctc

SEQ ID NO: 219142 - DNA, 877 bp, Unknown
  Bacterial polypeptide expressing nucleotide sequence isolated from the Sargasso Sea
gagggaagaggagtttggaaaagaaaaagatcatgttcatcttcatttagatcatttttttccagatgtaattgagaagagacttccaggaatatcggagtcttcaagactatttgctgacgttgatgttaccaaagaaccaataccagttgttcctacagttcattataatatgggtggtattccaacaaattataaagctgaagttttaactgtaaatggttcagaaaaaattgtacctggacttatggcaattggcgaggcagcatgtgtttcagttcatggagctaacagactaggatcaaattcattaattgatttagtagtttttggaagagctgctgctaaaagagctgcagaacttgttaaaccaggaactccacatgagaaaatctcagattcagaaactgaaaaatgtttagatagatttgaaaaattaagaaatggaaatggaacaaatagaactgccgatctaagactggctatgcaaaaaactatgcaatcaaagtgcgcagtttttagaactgaaaaaactttaaaagaaggggtagaagaaataagaaaaccatttgaaggaatggaatcaatatcagtaaaagataaatcattaatttttaatactgatttggttgaaacgttagaatttgataacttaataagacaagcaatagttacactagactctgcatatgaaagaaaagaaagcagaggagctcatgcaagagaagatcaccctaaaagagatgataataactttatgaaacatacattatcttggtgtaatgggagtgaaacaaaaatttcttatagagaagtgcatagatcgacgttaaacaatgatgtacaatattttccacctcaagaaagagtttactaa

SEQ ID NO: 219143 - DNA, 970 bp, Unknown
  Bacterial polypeptide expressing nucleotide sequence isolated from the Sargasso Sea
aatgacaaaaaattatggaaatggaattgttcaaagaacttgtgcagctgctgatagaacaggtcatgcaatcttacatactttatatggacaagcccttaaacataaaacagaattttttatagaatattttgcacttgatttattgatgaaagatggggaatgtaagggtttgattgcttggaatttaaatgatggaactatacacaggttcagagctcacacagtaattatagcaacagggggttatggaaaagtatattattcagcaacgtctgctcatacttgtacgggagatggaaatgcaatggttttaagagcaggtctaccattacaagatatggaatttgtgcaatttcatccgacaggaatatatggtcatggcactttgattactgagggagtaagaggtgaaggaggttatcttacaaattcaaaaggtgaaaggtttatggaaagatatgcgcctaaggcgaaagatttagcatctagagatgttgtaagtagatcaatgtcgattgagattaatgaaggaagaggtgttggaaaagataaagatcatgttcatttaaacttaagtcatttagacaaagaagttatcgaaagtagattgcctggaataacagatgcagcaagattgtttgctaatgtggatgttacacaagaaccaattcctgttgtaccaacagttcattataacatgggtggtattcccacgaactataaaggagaggtattaacagtaaatgggtctgaaaaaactgtcccaggattgatggctattggtgaagctgcatgtgtttcagttcatggagctaatagactaggatcaaactctctgatagatcttgttgttttcggtagagcagctgcaaaaagagcagcagaattgattaaacctggaacacctcatgaagaaattggagagtcagagacaaaaaaatgtatagatagatttgatagaattaga

SEQ ID NO: 219144 - DNA, 594 bp, Unknown
  Bacterial polypeptide expressing nucleotide sequence isolated from the Sargasso Sea
gatttccgagggtgttcgtggcgaaggcggatatttgttaaattcgaaaggcgaaaggtttatggaacgttatgcccccaaagctaaagatcttgcctcaagagatgttgtgagtagatcgatagctatggaaattaatgagggaagaggagtgggtaaagaaaaagatcatgttcatcttcgtttagatcatttagactctaagatcatagaagaaagacttcctggaatatccgagtcatcaagattatttgccaatgtagatgttaccaaagaaccaattccggtagttccaacagttcattataacatgggaggaattccaacaaattataaagccgaggttatagcaatgaatggatcagaaaaaactgttccgggacttatggctataggtgaagcggcttgtgtttctgttcatggggcaaatagacttggctcaaattcgttaattgatcttgtagtctttggcaaagccgcagccaatagggcttccgatttaattaaacctggcatggcgcatgaagaaatatcaaaatcagaaacagacaagtctttagaaagatttgataatttaagaaatggaaacggtag

SEQ ID NO: 219145 - DNA, 670 bp, Unknown
  Bacterial polypeptide expressing nucleotide sequence isolated from the Sargasso Sea
atgaaaagttataaaataattgatcacgaatatgatgtcgtagttcttggagccggtggatctggcttgagagctgctgtaggtttatcagaggcaggtttaaaaactgcttgtatttcaaaagtatttccaactagaagccacacatcagcagcgcaaggtggaatttcagcagcactaggtaatatgggagaagatgattggagatggcacatgtatgatacagttaaaggctccgattggctaggagatcaagatgcaatcgaatacctatgcaaagaagctcccttagctgttaaggagctggataagtatggcgtgccatttagcagaaccgaagatggaaaaatatatcaaagaccatttggaggaatgactaaaaattatggaaacggtacggtccaaagaacttgtgcagcagcagataggaccggacatgcaattcttcatacattatacggtcaagcattaaaacataatacagaattttttattgaatattttgcactagacttaattatgaaaaaaggtgaatgcaaaggattaattgcttggaacttaaacgatggtactattcatagattcaagtcacatataactataattgcaactggaggctatggaaaaatttactattcggctacttctgctcatacgtgcacaggtgacg

SEQ ID NO: 219146 - DNA, 567 bp, Unknown
  Bacterial polypeptide expressing nucleotide sequence isolated from the Sargasso Sea
catgagtaaggcatatcaggtaatagatcatcattatgatgttgttgttgtaggagcgggaggatctggattgcgtgcaactttaggttcagcagaagttggtttaaagacagcatgtatctcaaaagtatttccaaccagaagccatacagttgcagctcaaggaggtattggggcagctcttggaaatatgggtgacgacaattggaaatggcatatgtatgacaccgttaaaggttccgattggttgggcgatcaagacgccatagagtatttatgtacaaatgctccagaagcagtaattgagcttgaagaatatggtatgccattcagcagaacagatgatggcaaaatatatcaaagaccatttggtggtcacttaactaataatggagaaggagcaccagcgatgcgagcatgtgcagcagctgatagaacaggacacgccttacttcatactctttatcaacaatcacttaaacacaaagtagagttttttatagaatattttgttttagatttagttatggataaagatggaaattgtaaaggtgttgttgcttggtg

SEQ ID NO: 219147 - DNA, 769 bp, Unknown
  Bacterial polypeptide expressing nucleotide sequence isolated from the Sargasso Sea
tatgaaagcatacaaaataatagatcatgaatatgatgtggtagtacttggagctggcggttcaggactaagagctgctgtgggcttatctgaggcaggtttaaaaactgcatgtatttcgaaagtttttccaactcgaagccatacatctgcagctcaaggaggtatatctgcagcgttaggtaatatgggtgaagatgattggagatggcacatgtacgatactgtaaaaggatctgattggcttggagatcaagatgctatcgaatatctttgtaaagaagcacctagagctgtagtcgagttggagcgttacggcgttccttttagtagaactgatgatgggaaaatttatcaaagaccttttggaggcatgacaaaaaactatggaaatggaaccgcacaaagaacttgtgctgctgctgatagaactggacatgcgatattacatactctttatggacaggcactaaaacaaaatacagaatttttcattgaatattttgcacttgatttaattatgaataatggtgagtgcaagggagttatagcttggaatttaacagatggcacaatccacagatttagatctcatataactattattgctactggcggttatggtaaagtatattattctgcaacatcagctcatacttgtacaggtgatggtaacgcaatggtacttcgagcaggattacctttacaagatatggaattcgttcaatttcatccaactggtatatatggagttggttgtttaatacag

SEQ ID NO: 219148 - DNA, 873 bp, Unknown
  Bacterial polypeptide expressing nucleotide sequence isolated from the Sargasso Sea
cgagatcctgacgattgaaattagagaaggtagaggtgtcggcaaagagaaagatcacattcatctccatctcgagcatttagcacctgaagtacttgctgaaagattgccagggatatcagaaacagctaaaatattctcaggggttgacgtaacaaaagagccgatccctgtattaccaacagttcattataatatgggtggaattcctacaaatttccacggggaagtcctcacaaaaatcaacggggatcctgactgtgttgttgatggattaatggctatcggggaagcagcttgcgtttcggtccatggtgcaaacagactaggctcaaactccctcatagatttggtcgtttttggtagagccgcagggctgagagctgcagatacaacgacagcaagtgctaatcagccaccacttcctgataacgctggactgaatgctctagaaagactcgataagtttagatatgcagatggcaatacttcaacctccgaattacgatcccaaatgcaaaaaataatgcaaaataactgtgctgtgtttagaacaggcgaagttttagatgaaggaaaagacctcattaataaaacttggaacggtcttgacgatatcaagattaatgacagatcactaatatggaatacggatctagtagaagctcttgagtgggataacttaattgtacagtctgttgttactgttgaaagtgcagcaaatagaaaagaaagtcgtggctcgcatgcccgcgaagattatacagaaagagatgataagaattggatgaagcatacgctggcgtggatagataatgatgagagaactaccacaatagattataggcctgtgcatgaatatactctgagcaa

SEQ ID NO: 219149 - DNA, 815 bp, Unknown
  Bacterial polypeptide expressing nucleotide sequence isolated from the Sargasso Sea
aaaagtaattgatgagagactacccggaattgctgagtcatctaaattgtttgcaaatgttgacgttaccaaagaaccaattccagtagtaccaacagtccattataatatgggtggaattccaacaaactataaagctgaagtgttaactgttaacggatcagagagcacagttccaggtctaatggctattggagaggcagcgtgtgtatctgttcatggagctaatagattaggatcaaactctttaatcgatttagttgtttttggtagatctgctgcgagaagagctgctgaattagtgaaaccaggaatgacacatgaggagatttcaacttcagaaactgataaatgtttagatagatttgataaattaagaaatggagttggagaaaatagaaccgccgacctaaggctttatatgcaaaaaactatgcaatcaaaatgtgcagtttttagaacagaaaaaactttaaaaaaaggagttgaagagattagaaaaccttttgaaggcatgaaatctataaacgttaaagataagtctcttatatttaataccgatttagtagaaactttagaatttgataatcttatcagacaagcaattgttactatggactcagcatattctcgtaaagaaagcagaggagctcatgctagagaagattatccaaatagaaatgatcaaaattatatgaaacatactttatcatggtgcgatggagataaatcaaagattacttatagagatgttcataagtcaactttaacaaatgaggttcaatattttccacctcaagagagagtatattaat

SEQ ID NO: 219150 - DNA, 792 bp, Unknown
  Bacterial polypeptide expressing nucleotide sequence isolated from the Sargasso Sea
ttctgcagctcaaggtggaatatcagccgctctgggaaatatgggagaggatgattggcgttggcatatgtacgatacagttaaaggtgcagactggcttggtgaccaggattgtattgaatacctttgtaaagaagcaccaagagctgttcttgaattggaaaaatatggcgtcccttttagcagaacagaagatggtaaaatttatcaaagaccgttcggaggcatgacaaaaaattatggaaatgaaccagtccaaagaacttgtgccgctgcagatagaactggccatgcgattttacatacactttatggtcaagcattaaaacataatacagaattttttatagaatattttgcattagatttgttgatgaaaaatggagaatgcaaagggctaattgcgtggaacttaaatgatggaactattcatagatttaaatcacatataaccataatcgcaacaggtggttatggtaaagtatactattctgccacttcagcccacacttgtactggagatggaaatgcaatggttttaagggctggtttaccattacaggatatggagtttgttcagtttcatccaacaggtatttacggccatggaacactaatttcagaaggtgttagaggtgaagggggatatcttttaaattcagagggagaaagatttatggagaggtacgcgccaaaagcaaaagatttagcgtcaagagatgttgttagcagatcaattgcaattgaaataaatgagggaagaggggtaggtaaagaaaaagatcacgttca

SEQ ID NO: 219151 - DNA, 814 bp, Unknown
  Bacterial polypeptide expressing nucleotide sequence isolated from the Sargasso Sea
atgagcggctaccaaggtattgcagaatctgccgaaatattcgcaggcgtcgatgtcaccaaggaacccattcctgtcttacctacggtacattacaacatgggtggaataccgacaaactaccatggcgaagtggtaacaataaagggtgacaatccagattcagtggtcccaggtttaatggctatcggtgaagctgcgtgtgtatcggtacacggtgccaaccgattggggtcgaattccttgttggacatagtcgtttttggcagagcgtgtgccaagcgatgcgcagaactgatcaaaccggagactaaacactgcgatttggataaggaaagcactgacaagatcatcgataggcttgatcgcctcagatatgctaatggctcagagagcacggccaagcttaggatggaaatgcaacgtgccatgcaaacccatgccgcagttttcagaacaggagacaacttactggagggaaggaacaaaatagtagacatcgccaacagatttaaaaacgtgaaagtggctgatcgctcgctgatttggaatactgatctcgttgaaactttagagctcgataatcttttgggaaactctgtcaccagtatgtttgcagctgagaatcggactgaaagcaggggcgcccatgccagagaagactttccagatagagatgatgaaaactggatgaagcatactatgacttggctaaacaaagataatagcgtagatttcgactacaggccggttcacatgtacactctaaccgacgatgtagaggtggtacctcccaagaaaagggtgtactaaa

SEQ ID NO: 219152 - DNA, 931 bp, Unknown
  Bacterial polypeptide expressing nucleotide sequence isolated from the Sargasso Sea
aaagacttagcttctagagatgtagttagcaggtccatagcaattgaaataaatgaaggaagaggagttggaaaagaaaaagatcatgttcatctgcacttgaatcatttagaccccaaggttattgaagaaagattacctggaattgccgaatcttcaagattgtttgcgaacgttgatgtaacaagagaaccaataccagttgtaccaacagttcattacaatatgggcggaattccaacaaattataaagctgaagttttaacagttaatggatcagaaaaaacagttccaggtctaatggcaattggtgaagctgcgtgtgtttcagtacatggtgcgaatagactgggatccaactcattaattgatttagttgtttttggtagggctgctgcaaaaagggctgcagaactagtgaaacctggaacgacacatgagaatatttcaaattcagaaactgaaaaatgtttagaaagattcgataacttaagaaatggcaatggagacaatagaactgcagacttaagaatttctatgcaaaaaactatgcaatcaaaatgtgcagtatttagaactgataaaactttgaaagaaggagtcgaggaaattagaaaatcttatgatggtatggataaaataaacgtaaaagacaaatcgcttatttttaacacagatttagtagaaactttagaatttgataatcttataagacaagcaattactacgatggactcggcgtatagtaggaaagaaagtcgtggtgctcatgctagagaggattatccaaaaagagacgaccaaaattacatgaaacatactttatcttggtgtcatggaagcaaatctaaaattacttatagagaggttcacaaatcaactttaacaaatgaagttcaatattttccaccacaggagagagtttattaat

SEQ ID NO: 219153 - DNA, 628 bp, Unknown
  Bacterial polypeptide expressing nucleotide sequence isolated from the Sargasso Sea
tatgagctcatataaaattattgaccatgaatatgatgttgttgttctaggagcaggaggagcaggtttaagagcggcagttggtcttagtgaggcaggattgaaaactgcttgtatatcaaaggtttttccaactcgaagtcatacttctgctgctcaaggtggaatttcagcagcgcttggaaacatgggagaagatgattggaggtggcatatgtatgatacagttaaaggatcagactggttaggcgatcaagactgtattgaatatttatgtaaggaagccccaagagctgttttagagctggaaagatacggagttccatttagccgaactgaagatggaaaaatttatcaaaggccttttggcggtatgactaaaaactatggcaatgaaactgtacaaagaacttgtgcggcagcagatagaacaggtcatgccatactgcatactatgtatgggcaagcattaaagcataatacagaattttttatcgagtattttgcattagatttattaatgaaagaaggagagtgcaaaggtttaatagcctggaatttaaatgatggaacaattcacagatttagatcccatataacgataatagcaacaggcggatacggaaaa

SEQ ID NO: 219154 - DNA, 934 bp, Unknown
  Bacterial polypeptide expressing nucleotide sequence isolated from the Sargasso Sea
gtccttggagctggaggtgcaggtttgagagccgcagttggccttagtgaggctggattaaaaactgcttgtatatcaaaagttttccctactagaagccatacttcagcagcacaaggtggtatttctgcagcactaggaaatatgggagaagatgattggagatggcatatgtatgatactgtaaaaggatctgattggttgggtgaccaagatagcatagaatatttgtgcaaagaagcaccaagagcagtcttagaattagagagatacggagttccatttagtagaaccgaggatggaaaaatttatcaaagaccttttggtggaatgactaaaaattatggaaatgaaactgttcaaagaacttgtgcagccgcagatagaactggtcatgcaatattacatactatgtatgggcaagcattaaagcataatacggaattttttattgaatactttgctttagatttattaatgaaagatggagagtgtaaaggtttaattgcttggaatttaaatgatggaactattcatagatttagatctcatataacaattattgcaactggtggatatggaaaaacatattactcatccacatctgctcatacttgtacaggtgatgggaatgctatggttttaagagctggtttacctttgcaagatatggaatttgttcaatttcatccaacaggaatttatggccatggtacattaatatctgaaggtgttagaggtgaaggaggttatttgttaaattccaaaggagaaagatttatggagagatatgctccaaaggctaaggatcttgcatctagagatgtggtaagtagatcaatagcagttgaaattaatgaaggaagaggagttgggaaagaaaaagatcatgttcatcttcatttagatcatttagatccaaaagtaattgaga

SEQ ID NO: 219155 - DNA, 937 bp, Unknown
  Bacterial polypeptide expressing nucleotide sequence isolated from the Sargasso Sea
atagatcatcattatgatgttgttgttgtaggggcaggaggatctggattgcgcgcaactttaggttcagcagaagctggtttaaagacagcatgtatctcaaaagtatttccaaccagaagccatacagtcgcagctcaaggtggaattggtgcagctcttggaaatatgggtgacgacaattggaaatggcatatgtacgacacggtcaaaggctctgattggttgggtgatcaagatgccatagagtatctgtgttctaatgcagcagaggcagtaattgagctagaggattatggaatgccatttaccagaacagatgatggcaaaatataccaaagaccttttggtggccacttaactaataatggagaaggtgctccagctatgcgatcatgtgcagcagctgatagaacaggacacgccttgcttcatactctctatcaacaatcacttaaacacaatgtagagttttttatagaatattttgttttagatttagttatggatgaagatggaaattgtaaaggtgttgtcgcttggtgtttagaggatggaacaatacatcgttttttatctcatcaaacagttcttgctacaggcggatatggtagagcatatctttcgtccaccagtgcgcatatttgtacaggtgatggaagtgctatggctttgagacaaaatttacctttatctgatatggaatttattcaatttcacccaacaggcgtttatggtgctggtgttttaattacggaaggagctaggggcgaaggtgggtatttagcaaatagtgatggtgaaagatttatggagcgatacgcaccaaatgccaaagatctagcatcaagagatatagttagtcgtgctatgacaattgagataaatgaaaatagaggctgtggagaagatgccgatcatgttttttacattagag

SEQ ID NO: 219156 - DNA, 946 bp, Unknown
  Bacterial polypeptide expressing nucleotide sequence isolated from the Sargasso Sea
aagatacgctccaagcgcaaaagatcttgcttctagagatgtggttagtagatctatcgcaattgaaataaatgaaggaagaggagttggaaaagaaaaagatcatgtccatctccatctagatcatttggatcccaaagttatcgacaatagattacccggtatagctgagtctgcaaaaactttttcaggagtagatgtaacaaaagatcctataccagtagtcccaactgttcattataatatgggtggaataccaacaaactataaagctgaagttttaactttaaatggttctgaaaaaactgttcctggacttatggcaataggtgaagcagcttgcgtatcagtccatggtgctaatagactaggctcaaattctttaatagacttggttgtttttgggaaagctgccgcaaaaagagctgcagaattagtcaaacccaatactccacatgagtcttctcctcaaagcgaaacagataaatgcctagatagatttgataaaattagaaactcaaatggtggaactagaacctctcaacttagattgtccatgcaaaaaacgatgcaaagtaagtgtgcggtatttagaactgaaaaaactttaaaagaaggtgtggatgaaatcagaaaatcttttgatggactggaagatatatcaactaaagacaaatctcttttatttaatactgacctagtagagtctttagaatttgataacttgataagacaagctatgacaactatggactcagcttatcacagaaaagaaagcagaggagctcatgctagagaagacttttctaaaagagacgataaaaaatttatgaaacataccttggcttggcagaaaggtaaggaagtaaaagttagatatagagatgtgcacgcgagaacattaacaaatgatgtccagtattttccacccaaagagagagtctac

SEQ ID NO: 219157 - DNA, 926 bp, Unknown
  Bacterial polypeptide expressing nucleotide sequence isolated from the Sargasso Sea
ggaaaggtacgcaccatcagcaaaagacttagcttcaagagatgttgtctctcgttctattacaaaagaaattttagagggcagaggcgttggtaaagataaagaccatgcttatcttcatcttgatcatatcgactcagatatattggaagaaagattgcctggtatttcagaatctgcaaaagtttttgcaggggtagacgtaactaaagagccaattcctattattcctacagtccattataatatgggtggaattccaacaaactttcatggagaagtaatgaatcttgaaaaaggaaatgaaacggtcgtacggggtttgatggcggttggtgaagctgcctgtgtgagtgttcatggcgcaaacagacttggatcaaattctctaattgatttagtagtttttggtaaagcggctgcagatagaataaatgatacggtaaataaagatgaacctaacaaggaaattccaagtaatataatagatgaagtcattgcaagatttgatagtacacgatcttctgatggagatatttcaacttcagaattaaggtctcaaatgcagcgagttatgcagaaacattgtgctgtttttagagatgacgagattatgtctgaaggaaaaaaacttattgaagaaacttggttaaactcagagaatatcaaaattaaagacaagtcccttatatggaacactgatttgttagaaacgctcgagtataaaaacctaatcgctcaagctgtagttacaatgaattccgcgcttaatagaaaagaaagcagaggggctcacgctcgtgaagatttcaaaaaaagagatgataaaaattggatgaaacatacaatgtcatggctgaatgataagagttgtgaattggattatcgatcagtgcacgaatacacatttatcaatgaagttaaat

SEQ ID NO: 219158 - DNA, 825 bp, Unknown
  Bacterial polypeptide expressing nucleotide sequence isolated from the Sargasso Sea
tattccctactaggagccatacttctgcggctcaaggtggaatttcagcagcgctaggtaacatgggcgaagatgactggagatggcatatgtatgacactgtaaaaggttctgactggttaggagatcaagatgcaatcgaatacctctgtaaagaggctccaaaagctgtaaaagaactagataagtatggcgtgccatttagtaggactgaagatggaaaaatatatcaaagaccttttggaggaatgactaaaaattatggcaatggaacagttcaaagaacttgcgcagcggcagatagaactggtcatgccattttacatactttgtacggacaagcattaaaacataacacagaattttttattgagtactttgcattagatttaattatgaaaaacggtgaatgtaagggactgatagcttggaatttaaatgacggcacaattcatagatttaaatctcatataacaataattgctactggaggttacggaaaaatttattattcagctacatctgctcatacatgtacaggagatggaaatggaatggttttaagagcaggtttgccattacaagatatggaatttgttcagtttcatcccacaggaatatatggagttggttgtcttatatcagagggagtaaggggagaaggaggatttttgttgaattctaaaggtgaaagatttatggagagatatgcaccgaatgcaaaagatcttgcctcgagagatgttgttagcaggtctatagcaattgaaataaatgagggacgtggagtggaaaagaaaaagatcacgttcatctccatttaga

SEQ ID NO: 219159 - DNA, 892 bp, Unknown
  Bacterial polypeptide expressing nucleotide sequence isolated from the Sargasso Sea
gtttattattcagcaacttctgcgcatacttgtacaggagatggaaatgcaatggtattgagagcaggattaccgttacaagatatggagtttgttcaatttcacccaacaggtatttacggacacggaacattaatctctgaaggtgttagaggagaaggaggatatctagtaaactctaaaggcgaaagatttatggaaagatatgctccaaatgctaaagatctggcatcaagagatgttgtgagtagatcaatgtcgatagaaattaatgagggaagaggtgtaggaaaagatcaggatcatgttcatttacatttgagtcatttagataaaagtgtgattgaaaatagacttccaggtatcactgaagcagcaagattatttgcaaacgttgatgtaactaaggagccaatcccagttgttcctaccgtgcattataatatgggtggaattccaactaattataaagcagaggttctaacagtaaatggatcagaaaaaacagtgccaggcttgatggcaattggagaagcagcatgtgtatcagttcatggagcaaatagacttggatcaaattctttaattgatttagttgtttttggaagagctgcagcaaaaagagcagctgaactaatcaaaccaggcgcaccacatgaagaaattccagacacagaaactcagaagtgcctagatagatttgataaattgagaaatgcacaaggagataatagcactgctgaattaagattagcgatgcaaaaaacaatgcagtcgaaatgtgcagtatttagaacagaaaaaaatttagaagaaggtgttaacgaaattagaaaaacttatgatagtatggactcaatttcagttaaggatagatctttagtttttaata

SEQ ID NO: 219160 - DNA, 913 bp, Unknown
  Bacterial polypeptide expressing nucleotide sequence isolated from the Sargasso Sea
ggtggaatgacaaaaaattatggtaacggtacagcacaaagaacatgtgcagctgccgatagaacgggccatgcgattttacacactctttatggtcaggcactaaaacataatacagagttttttatcgaatactttgcgttagacttaataatgaaaaatggagagtgcaaaggagttatagcttggaatttaacagatggtactattcatagatttagatcacacattacaataatcgcaacaggtggttatggtaaagtttattattcagctacctcagctcatacatgcacaggagatggtaatgcgatggtattaagagctggattgcccttgcaagatatggagtttgttcaattccatccaactggaatttatggagtaggatgtttaataacagagggcgcaagaggagaaggaggtttcttagtaaatggaaaaggtgaaagattcatggaacggtatgcacctaatgcaaaagatttagcgtcaagagacgtagtaagcagatcaatggaaatggaaatcaacgaaggtagaggagttggtaaggataaagatcatataaatttacacttagatcatttggataaggaagttttagatgagaggcttcctggaataacagaggctgcaaaaacttttgcaaatgttgatgtgaacaaacaaccaattccagttgttcctacagttcactataacatgggtggtattccaacgaattataaagcagaagttttaactttaaatggttcagaaaaaacagtacccgggcttatggctataggggaagcagcttgtgtatcagtacatggtgctaacagattaggctcaaattcattaattgaccttgtggtatttggaagagcggctgctaaaagagcagcagaacttgtaaaaccaggaatgg

SEQ ID NO: 219161 - DNA, 934 bp, Unknown
  Bacterial polypeptide expressing nucleotide sequence isolated from the Sargasso Sea
gtagttctcggtgctggtggctcaggcttgagagctgctgtaggtttgagcgaagctggcctaaagactgcttgtatatctaaggtatttccaactagaagtcatacttcagctgctcaaggaggtatatcagcagcattaggaaatatgggtgaagatgattggagatggcatatgtatgatactgttaaaggatcggattggttgggtgatcaagattctatagaatatttatgtaaggaagcacctagggctgttttagaattagaaaaatatggagttccatttagtcgtacagaggatggaaaaatataccaaagaccttttggtggtatgacaaaaaattatggcaatgaacctgtagaaagaacttgtgcagcagcagatagaacaggtcacgcaattcttcatactttatatggtcaggccttaaaacataataccgaattttttattgaatactttgcacttgatttgttaatgaaaaatggagagtgtaaaggtttactggcttggaatttaaacgatggaacaattcacagatttagatctcatataacaataatagcaacaggagggtatgggaagatttactattcagctacatctgcacacacttgtacaggagatggtaatgcaatgatattaagagcaggattacctttgcaagatatggaatttgttcaatttcatccaacaggaatttatggtcatggaacacttatatcagaaggagtcagaggagaaggcggatttttattaaattctaaaggagaaagatttatggaaagatatgctcctaaagcgaaagacttagcatcaagagatgtggttagcagatctatagctttagaaattaatgaaggcagaggtgtaggaaaagaaaaagaccatgttcatcttcacttagatcatttagatcccaatgttattg

SEQ ID NO: 219162 - DNA, 953 bp, Unknown
  Bacterial polypeptide expressing nucleotide sequence isolated from the Sargasso Sea
gcaagaggctccaagagcagtagtggaactagaaagatacggagttccttttagtagaactgatgatggaaagatctatcaaagaccattcggaggaatgacaaaaaattatggtaatggaaccgcgcaacgtacttgtgccgcggctgacagaactggtcacgcaatcttacacactttatatggacaggctttaaaacaaaacacagaatttttcattgaatatttcgcactcgatctaattatgaaaaatggtgagtgtaaaggagttatagcttggaatttaaccgatggcacaatacataaatttagatctcatatgacaattatagcaactggaggctatggaaaagtatattattctgctacctctgcccacacttgtactggtgatggtaacgcaatggtgttgagagctggtttgcctcttcaagatatggaatttgttcaatttcatcctacaggaatttatggcgttggatgtttaatcactgaaggcgtaaggggagaaggtggtttcttggtaaacggtaaaggagaaaggtttatggagagatatgcaccaaatgctaaagatttagcttcaagggatgttgtaagtagatcaatggaaatggaaatcaacgaaggtcgtggtgctggtaagaataaagaccacattaatctccatttagatcatttagataaaaaagtaatagacgaaagacttcctgggatttctgaagcagcaaaaacttttgcaaatgttgatgttagcaaagaaccaatacctgtagtaccaacagtacattataacatgggaggaattccaactaattataaggctgaagttttaacattaaacggatcagaaaaaactgttccaggtttgatggcaattggtgaggccgcatgtgtctctgtgcacggagcaaatagattaggatcaaattcattaatagattttagtggtt

SEQ ID NO: 219163 - DNA, 907 bp, Unknown
  Bacterial polypeptide expressing nucleotide sequence isolated from the Sargasso Sea
ggtgccggaggtgccggacttagagctacactaggcatgacggcagctggctttaaaacagcctgtattaccaaagtcttcccaacacgctctcatactgtcgctgcacagggaggtgttggagcggctttaaataatatgggtgaaggtgataactggcaatatcatatgtatgacacagtcaagggctctgactggcttggtgatcaggatgccattgagtatatgtgccgcaatgccattccatctgtcattgagcttgaacattatggggtgccattctcacgcacagaagaaggcaagatctaccagcgtccctttggtggacatactctggaacatggcaaggccatggcgcgtcgtggttgcgcagcagcagaccgtacagggcatgctatcttacataccttgtatcagcaatgtctgaagtacaaggcagagttttttattgagtattttgccctggatctcctgatggatgatgaggggcgttgttgtggtgttctggctttatgtatggaagatggtaccctgcaccgctttcgcgctcaaaagactgtgcttgccacaggaggatatggacgtgtctacttctcatgtacttctgcacatacatgtacaggtgacggcaatgcaatggttctacgtgctggcttgcctctgcaggatatggagtttgtccagttccatccaacaggtgtctatggtgcaggtgtattaattactgaaggtgcacgtggtgagggaggttatttgactaactctgaaggtgagcgctttatggaacggtatgcaccaactgccaaagaccttgccagccgcgatgttgtcagccgtgccatgacacttgagattaatgaagggcgcggtgtagggaatgataatgatcatatcatgctccatctga

SEQ ID NO: 219164 - DNA, 775 bp, Unknown
  Bacterial polypeptide expressing nucleotide sequence isolated from the Sargasso Sea
tcttctagactgttcgctgatgttgatgttactaaagaaccaataccggttgttccaacagtgcattataatatgggtggtataccaacaaattataaagctgaagttttaaccttaaatggatcggaaaaaattgtacctggattaatggcaataggagaggctgcatgtgtttcagttcatggagctaacagactagggtcaaattcattaatagatttagttgtttttggaagagctgcagcaaaaagagccgcagaaattataaaacctggaactcctcatgaagaaatttcaaactcagaaactgataagtgtttagatagatttgaaaagttaagaaaaggaaatggaactaaccgtacagcagatttaagattggctatgcaaaagacgatgcaatcaaagtgtgcagtttttagaactgaaaaaactttaaaagaaggagtagaagaaataagaaagccatttgagggaatggagtctatttcagtaaaagataaatcattagtttttaacactgatttagttgaaactttagaatttgataaccttataagacaagctatagttacaatagattctgcatatgagagaaaagaaagtagaggagcacatgcaagagaagaccatccaaaaagagatgatgacaattttatgaaacatacattatcttggtgcaagggcagcgaaacaacaatttcttatagagatgtacataaatcaacgttaacaaatgatgtacaatattttccaccacaagaaagagtttact

SEQ ID NO: 219165 - DNA, 877 bp, Unknown
  Bacterial polypeptide expressing nucleotide sequence isolated from the Sargasso Sea
tttacatactttatatgggcaggccttaaaacataaaacagaattttttatagaatattttgcattagatcttcttatgaaagatggagagtgtaaaggcttaatagcatggaatttaaatgatggaactattaataggtttagagcacacacagtaattgttgcgacaggtggatatggcaaggtttattattcagctacctctgcacatacttgtaccggagatggaaatgcgatggttttgagagctggattgcctttacaagatatggagttcgtacaatttcatccaacaggaatttatggtcacggtactttaataacagaaggagcgagaggtgaaggaggatatcttacaaattctaaaggtgaaagattcatggaaagatatgctccaaaagcaaaagatttagcatctcgagatgtagtgagcagatcaatgtcaatcgaaattaatgaaggaagaggtgtaggaaaagatcaagatcatgttcatttaaacttaagtcatttagataaaaaaattattgaaagtagattacctggtataactgatgcagcaagactatttgcaaatgtggatgttactaaagaaccgatccctgttgtgccaacagtccattataatatgggtgggattcctacaaattataagggagaagtgttaactgttaatggttcggaaaaaactgttcctggattaatggcaataggagaggcagcatgcgtttcagtacatggagcaaatagattgggttctaattctttaattgatttagtagtttttggtagagctgctgccaaaagagccgcagagctaattaaacctggaacaccacatgaagaaattagtgagactgaaacaccaaaatgtatt

SEQ ID NO: 219166 - DNA, 971 bp, Unknown
  Bacterial polypeptide expressing nucleotide sequence isolated from the Sargasso Sea
gttattgaattagaaaaatatggtgttccttttagtagaacagaagacgggaaaatttatcaaagaccatttggtggtatgaccaagaattatggtaacggaattgtacaaagaacttgcgctgctgctgatagaactggtcatgcaattttacatactttgtatggacaagcgctaaaacataaaacagagttttttattgaatattttgctttagatttattaatgaaagatggagcttgcaaaggattgattgcatggaatttaaatgatggaactattcatagatttagagctcacacagtgattattgcaacaggaggctacggtaaagtttattattcagcaacttctgctcatacttgtactggagatggaaatgctatggttttaagagcaggtttgccattgcaagatatggagtttgtacaatttcatccaacaggaatttatggtcacggtactcttataacagagggtgccagaggtgagggaggatatcttacaaattctaagggtgagagatttatggaaagatatgcacctaaggcaaaagatttagcatcaagagatgttgtaagtagatctatgtctattgaaataaatgaagggagaggtgttggaaaagatcaagatcatgttcatttaaacttaagtcatcttgataatgatataattgaaagtagattaccgggtattacagatgcagcaagattatttgccaatgtggatgtaactaaagatcctattccagttgtaccaacggtacattataatatgggaggtattccaacaaattacaaagctgaggtactaacagtaaatgggtcagaaaaaactgttccaggattaatggcaataggagaagctgcatgtgtttcagttcatggtgctaatagacttggctcaaattcattaattgatttagtagtttttggaagagcagcagcaaaaagagctgcagaacttat

SEQ ID NO: 219167 - DNA, 730 bp, Unknown
  Bacterial polypeptide expressing nucleotide sequence isolated from the Sargasso Sea
gttgttccgacagttcattataacatggggaggaataccaactaactataaggcagaagttatcacttcaaacggaagtgataaaataattcctggattaatggctataggtgaagccgcatgtgtttctgttcatggagcaaacagactaggctcaaactcactaattgatctagtagtttttggaaaatctgcagcaaaaagagctgcggaattagtaaaaccaaatacaaaacatgaagaaatttcaaaaagtgaaactgataaatctctagaaaggtttgacaagctaagaaatggaaatggttcaaacaaaacctctgaacttagattatctatgcaaaaaacaatgcaatctaaatgtgctgtatttagatctgaaaaaacattaaaagagggtttggatgaaattaaaaaaccttttaatggcatggagtcaatatcagttaaagatagatctttgatttttaatacagatttaatggaaacccttgaatttgataatcttattcgtcaagcaattacaacaatggaatcagcttatcaaagaaaggaaagtcggggtgctcatgctagagaagattttcctaaaagagatgatgagaattatatgaaacatacgttaagctggcacgatggaaaagaagttaaaattaattatcgtaaagttaatttatcaacattgacaaatgacgttcaaacttttcctccaaaagaaagagtttattaa

SEQ ID NO: 219168 - DNA, 807 bp, Unknown
  Bacterial polypeptide expressing nucleotide sequence isolated from the Sargasso Sea
ttagacccaaaagttattgatgaaagattacctggaatagccgagtcatccagattgtttgcaaatgtagatgtaactaaagaaccaatcccagtagttccgactgttcattataatatgggaggaataccaactaattataaggctgaggttttaacagttaatggttcagaaaatacagttccaggattaatggcaataggagaagctgcttgtgtttcagttcatggagcaaatagattaggttcaaactcacttatagatttagttgtctttggtagggctgctgcaaaaagagctgcagaactagtcaaaccaggaatgtctcatgaagatatttcaaattcagaaactgataaatgtttagaaagatttgacagtttaagaaatggaaatggagacaatagaactgcagatttaagagtttctatgcaaaagactatgcaatctaaatgcgcagtatttagaacagataaaactttaaaagaaggaatagaagaaattagaaaacctttcgaaggaatggaaaagataaatgttaaggataaatctttaatatttaatactgatttagtagaaaccttagagtttgataatttgattagacaggcaataaccacaatggactctgcgtataatagaaaagagagtagaggggctcatgcaagagaagattatccaaacagagatgatcaaaattttatgaaacatacgttgtcatggtgcaatggtagcaaatctaaaatagcttatagagaagttcataaatcaacgttaacaaatgaagttcaatattttcctccacaa

SEQ ID NO: 219169 - DNA, 871 bp, Unknown
  Bacterial polypeptide expressing nucleotide sequence isolated from the Sargasso Sea
tatgacactgtaaaaggtgcagactggttaggagatcaagacagcattgaatatttatgtaaagaagcgcccaaagcagttttggaattagaaaagtatggtgttccttttagtcgtacagaagaggggaaaatttatcaaagaccatttggtggtatgaccaaaaattatggaaatggaattgttcaaagaacttgtgcagctgcagatagaacaggccatgcaatattacatactttatatggacaagctttaaaacataacacagaattttttattgaatattttgctttagatttattaatgaaagatggagagtgcaaaggattaatagcatggaatcttaatgacggtacaattcatagatttagagcgcatactgtaattattgcaaccggaggatatggaaaggtatactactctgctacatcagctcatacttgtacaggtgacggtaatgccatggtcttaagagcaggactacctttgcaagatatggaatttgtacaatttcatccaactggtatttatggacatggaacacttatatcagaaggagtaagaggtgaaggtggctatttagtaaattcagaaggtgagagatttatggaaagatacgcgccaaatgcaaaagatttagcgtcaagagatgttgtcagtcgatcaatgtccatagaaattaatgaaggaagaggtgtgggtaaagatcaagatcatgttcatttacatttaagtcatttagacaaaagtgtaattgaaaatcgattaccaggtatcactgaagctgcaagattgtttgcaaatgttgatgttaccaaagatcctatacctgtagttcctacagttcactataacatgggaggtatccaac

SEQ ID NO: 219170 - DNA, 926 bp, Unknown
  Bacterial polypeptide expressing nucleotide sequence isolated from the Sargasso Sea
ttcacatacggtctctgctcaaagagggatcacttgcgctattcaaagtgatgatcctgatgatgactggagatggcatatgttcgataccgtcaaaggctctgattacataggtgaccaagaagctattgaatatatgtgcagtgaaggcccgaaagcagtttttgagctggaacacatgggcttgcctttttctcgcacagaagaaggcagaatctaccaaagaccttttggtggacaatcaaaagattacggaaagggagggcaggctacaaggacttgcgcagcagcggatagaactggacacagccttttacatactctgtatcaagcaaacttaaaagctggtacaaactttttgaatgagtggtttgctgttgaccttgttctgaatgctgacaaagctgtagtaggtgtcatcgcattcaagatagaaacaggtgagatttattacataaaatcaaaagcgacagtcctcgcaactggtggtgctgggcgaatctacgcctcaacaacaaatgcattaataaattctggagatgggattggtatggctcttagggcaggtatgcctgttcaagacatagaaatgtggcagtttcatccaactggtatacatggtgccggaacacttgttacagaaggttgcagaggagaagggggttatttgctcaataaagatggcgaaagatttatggaaagatatgctccaaatgcaaaggatttagccagtagagatgtagttgcaagatctatggctctagaaatcttagaaggaagagggtgtggtccgaacgcagatcatatttttttacgcttagatcatctcggaccagacgttgttcataaacgtttaccgggcattacagagctttctaaaacctttgctggtgttgatcctgcagtacaacccatacccctgtagt

SEQ ID NO: 219171 - DNA, 583 bp, Unknown
  Bacterial polypeptide expressing nucleotide sequence isolated from the Sargasso Sea
atgagcgcatataaaataattgatcacgaatatgacgttgttgttcttggagcaggaggttctggtttaagagcagcagttggtttgtcggaagcaggtttaaaaactgcttgcatatctaaagtctttccaacaagaagccatacatcagcagctcaaggaggtatttctgctgcattaggaaacatgggtgaagatgattggcgatggcacatgtatgatactgttaaaggatctgattggttaggcgaccaagatgcaatagaatatctttgcaaagaagctccaagagctgtagttgaactagagagatatggagttcctttcagcagaactgatgatggaaaaatataccaaagaccctttggaggtatgacaaaaaattatggtaatggaaccgctcaaagaacttgtgcagctgctgatagaactggccacgctatcttgcatactctttatggtcaagctttgaagcaaaaaacagaattttttattgagtattttgcattagatttaattatgaaaaatggtgaatgcaaaggtgtaatagcttggaatttaaccgatgggtacaatacataga

SEQ ID NO: 219172 - DNA, 673 bp, Unknown
  Bacterial polypeptide expressing nucleotide sequence isolated from the Sargasso Sea
ctgcttgtatatcaaaagtttttccttactagaagtcacacttcggcggcacaaggtggtatatcagctgctctgggtaatatgggagaagatgattggagatggcatatgtatgatactgtcaaagggtcagattggctaggtgaccaagatagtatagaatatttgtgtaaagaagctccacgagctgttttagaattagagagatacggagttccatttagccgtaccgaagatggaaaaatatatcaaagaccttttggtggaatgactaaaaattatggcaatgaaactgttcaaagaacttgtgcagcagcagacagaactggtcatgcaatattacacactatgtatggtcaagcattaaagcataatacagaattttttattgaatactttgcattagatttattaatgaaaaatggagagtgcaaaggtttgatagcttggaatttaaatgatggaactattcatagatttagatctcatataacaattatagcaactggtggatatggaaaaacatactactcatctacatctgcacatacttgtactggtgatggtaatgccatggttttaagagctggtttacctttacaagatatggaatttgtacaatttcacccaacaggcatttatggtcatggaactttaatatccgaaggagttc

SEQ ID NO: 219173 - DNA, 792 bp, Unknown
  Bacterial polypeptide expressing nucleotide sequence isolated from the Sargasso Sea
tatgacatcctatgaaattatcgatcatacttatgacgcagttgttgtcggggccgggggagctggactacgcgcaacacttggcatgaccgcagaaggactgaaaactgcctgtattacaaaagtttttccaactcgcagtcacactgttgcggctcagggtggggttggggcagctctagataatatgggcgagggcgacaactggcagtttcacatgtatgacactgtcaaaggatcagactggcttggagaccaagatgctatagagtatatgtgcagaaacgcaatccctgcagtaattgagctcgaacactacggtgttccgttctcccgtaccgaagagggaaaaatatatcagcgcccattcggcggacacacgttggataacggtaagcggatggccaagcgggcgtgcgcggcggcagatagaaccggtcacgccatcctgcacacactatatcaacaatgcctggcaaataatgccgagttttttatcgaatattttgcccttgatcttataatggacgaagaaggtgcctgccgaggtgttatggcaatggatttagcgaccggcacaatccatagatttagggcacatcaaactgtcttagccaccggcggatatggtagggcatatttctcgtgtacttcggcacatacgtgcacgggtgatgggaatggcatggtccttcgcgctggtttaccattgcaagatatggagttcgttcaattccatcccactggcgtttatggggcagggtgcctaataacagaaggtgctagagggga

SEQ ID NO: 219174 - DNA, 534 bp, Unknown
  Bacterial polypeptide expressing nucleotide sequence isolated from the Sargasso Sea
aatgagcgcatataaaataattgatcatgaatacgacgttgttgttcttggagcaggaggctctggcttaagagcggctgttggtctatcagaggcaggtttaaaaactgcatgtatatctaaagtcttcccaacaagaagccatacatcagcagctcaaggaggtatttctgctgcattaggaaacatgggtgaagatgattggcgatggcacatgtatgatactgttaaaggatccgattggcttggtgatcaggatgcaatagaatatctttgtaaggaagccccaagagcagtagttgaattagaaagatacggagttccattcagcagaactgatgatggaaaaatttaccaaagaccttttggaggtatgactaaaaattatggcaatggaactgctcaaagaacttgtgcagctgccgatagaactggccacgctatcttgcatacactttatggtcaagctttgaagcaacaaacagaattttttattgaatattttgcattagatttaattatgaagaatggtga

SEQ ID NO: 219175 - DNA, 745 bp, Unknown
  Bacterial polypeptide expressing nucleotide sequence isolated from the Sargasso Sea
tcgcgaactgaggaaggcaagatttatcagcgtccatttggcggccatacgctggatcacggtaaatcaatggcccggcgggcttgtgctgcagccgaccggacgggtcatgccatcctgcatactctgtatcaacaatgtttaaaatatcaggcgcacttccatatcgagtattttgtccttgacctattgatgaccgatgaaggcgaatgtgcaggcgttctagcactatgtatggaagatggcagccttcatcggttctggggacagcaaacggttctagcaactggtggttacggccgtgtttatttctcatgtacatcggcccacacctgcactggcgatggaaatgctatggcgcttagggctggattgccgcttcaagacatggagtttgttcagtttcacccaaccggtgtttatggcgctggtgttcttattactgaaggcgctcgaggtgaaggtggttatctgactaattctgagggcgaacgttttatggaacggttcgccccaaccgccaaggacctggctagccgtgatgtggtaagtcgggcgatgactattgagattaacgaggggcgcggcgttgggccgaacaaggaccatataatgctgcatcttgagcacattgaccctgcaacgcttcatacgcggcttccgggcatcaccgagacagcaaaaattttctgtggtgttgatgtgacccgagaacccattccagtcttgccaacggttcattata

SEQ ID NO: 219176 - DNA, 742 bp, Unknown
  Bacterial polypeptide expressing nucleotide sequence isolated from the Sargasso Sea
atgagtgcatataaaattatagatcatgaatacgacgttgtggtacttggggcaggtggatccggattaagagcagctgttggtttatccgaggctggtttaaaaactgcatgtatttctaaagtgtttccgactagaagtcacacctcagctgcccaaggtggcatctcagctgctctaggaaatatgggagaagacgactggagatggcatatgtatgatactgttaaaggctccgattggttaggagatcaagatgctatagaatatttgtgtaaagaagctccgagagctgttgttgagctcgagagatatggtgttccatttagcagaaccgaagatggaaaaatttatcaaagaccatttgggggaatgacaaaaaattatggaaatggaactgctcaaagaacttgtgcggcagcagatagaacaggccacgcaattttacacactttgtatggacaagcattaaaacaaaatacagaattttttattgaatactttgccttagatttgattatgaaaaatggtgaatgcaaaggattgattgcttggaatttaacagatggtacaattcatagatttaggtcgcacataactataattgctactggaggatacggaaaagtttattattcagctacttcagctcacacatgtactggcgatggtaatgccatggtgttaagagcgggtttacccttgcaagatatggagttcgttcaatttcatccaactggaa

SEQ ID NO: 219177 - DNA, 790 bp, Unknown
  Bacterial polypeptide expressing nucleotide sequence isolated from the Sargasso Sea
aggaatttatggtgttggttgcttaataactgaaggtagcagaggagaaggaggttttttagttaactccgagggtgaaaggtttatggaaagatatgcaccatctgctaaagatttagcatccagagatgttgtatctcgatctatgactgttgaaattaacgaaggtagaggcgtaggaaaaaataaagatcacatataccttcacttaaaccatttagatccaaaagtattgagtgaaagactgccaggtatctcagagtcggcaaaagtatttgcgggtgttgatgttactaaagaaccaatacctgtattaccaactgttcattataatatggggggaatatcaactaattatcatgggcaagttcttacaaaagatgtaaatggttcggataaaatagtagatggcctaatggctgtaggtgaagcggcttgtgtttcagtacatggcgcaaacagattaggatcaaattcattaattgatctcgtagtatttggaaaggcagcatctaaaaaagctgccgaattggttaaacctaattcaaaacatgaaataattcctgatagtgaaacacaaaaatctttggacagatttgataaattaagaaattcaaatggatcaacatcaacggcacatttaagaagtctaatgcaaaaaactatgcaaaataaatgcgctgtttttagaacaaataaaaccttacaagaaggtgtcaacgaaattagaaaaccttgggatggtttaagcgatttatctgtgaaagatagatcactaatttttaatact

SEQ ID NO: 219178 - DNA, 921 bp, Unknown
  Bacterial polypeptide expressing nucleotide sequence isolated from the Sargasso Sea
gaaaaatggagagtgcaaagtttaatagcctggaatttaaatgatggaactattcatagatttaggtcccatataactataatagcaacaggtggttatggaaaaacatattattcttcgacatcagctcatacatgtacaggtgatggtaatgcaatggtattaagagctggactaccattacaagatatggaatttgttcagtttcatccaacaggaatttatggacatggaaccttaatatccgaaggtgttagaggtgaaggaggttatctattaaattccaaaggagaaagatttatggagcgctatgctccaaaagctaaggatcttgcatccagagatgtagttagtagatctatagcaatagaaataaatgaaggaagaggcgttggaaaagaaaaagatcatgttcacctccatttagatcacttagacaaagaagtaattgaaaaaagacttccaggaatttcagaatcttcaaggttatttgcggatgttgatgtaactaaggagccaataccagttgtaccaacagtacattataatatgggtggtataccaacaaattataaggctgaagttttaacagtgaatggatctgaaaaaattgtacctggacttatggctataggagaggcagcatgtgtgtcagtacacggagccaatagattgggatcaaattcattaattgatcttgtagtttttggaagagcggccgcaaaaagagctgcagagctagtaaaacccggagaccctcatgaggaaatctcagatactgaaacagataaatgtcttgaaagatttgaaaaattaagaaatggcaatggttctaatagaacagctgatctaagattatccatgcaaaaaacaatgcagacaaaatgcgctgtttttagaactgaaaaaactttaaaagaa

SEQ ID NO: 219179 - DNA, 805 bp, Unknown
  Bacterial polypeptide expressing nucleotide sequence isolated from the Sargasso Sea
aaagatctggcttcccgagatgttgtatcaagatgcatagtacaagaaattttagcaggaagaggttgtggtgaaaataaagaccacgtcttgttaaagatagatcatttgggcgcagacgcaattatgaaaaaactcccagaaatcagagaaatatctatgacttttgcagatgttgacccaattgaagcgccaatacctgtagttccgacttgtcattatatgatgggaggaatacctacgaatgtgcatggccaagtaattacaacaaaaaatggcactgattctgtcatagacggattatattcaataggtgaagcagcaaatgtgtctgtgcacggagcgaataggcttggtggaaattctttgttagatttggttgtttttggaagagcagcaggtcgacacattaatgaaaacgcaaaagaatcaagctcattaaatctttccaaatctaatattgaagaatcattaaatgttttcaataaaattcaaagtacaaaaaaaggtgaaactgtatttaatctaagatcagagatgcaaaacgtaatgcaaaattactttggtgtatatagaaatgaaaaacttatgaaagaaggaatttcaaaacttgaggaaattacagatagaactaaaaaaattcacttaatggataaatcaaatcaattcaattctgaaagagttgaagtcttagagtatttaaatcttctggatattgcaaatgctactgcatattctgctatggaaagaaaagaaagtagaggagcacacgcaagagaagatttcccagaaagagacgaccaaa

SEQ ID NO: 219180 - DNA, 683 bp, Unknown
  Bacterial polypeptide expressing nucleotide sequence isolated from the Sargasso Sea
gaagatgattggagatggcacatgtacgattcagtcaaaggatcagattggcttggagatcaggatgcaatagaatatttatgcaaagaagctccgaaggcagttattgaacttgaaagatatggagttccttttagcagaactgaggatggtaaaatttatcaaagaccttttggaggaatgaccaaaaattatggaaatggaacagtacaaagaacatgtgcagctgctgatagaactggtcatgcaatccttcacactctttatggtcaagctttaaaacataatactgaattttttattgaatacttcgcattagatctaataatgaataaaggacagtgcaaaggaattatagcttggaatcttaacgatggaacaatacataggtttaggtctcacataactattattgctactggaggatatggcaaaatatattactcagctacctcagctcatacttgtactggtgatggcaatggaatgattttaagagcaggattacctcttcaagatatggaatttgtgcagtttcatcctacaggcatctatggagtcggttgcttgatttccgaaggagttagaggtgaaggaggttatttgctcaactccgaaggggacagattcatggaaagatatgcgcctaacgctaaagatttggcttcaagagatgtggtgag

SEQ ID NO: 219181 - DNA, 844 bp, Unknown
  Bacterial polypeptide expressing nucleotide sequence isolated from the Sargasso Sea
tgtgctgagtcaggattaaaaacagcatgcatctcaaaagtattcccaacaagaagtcatacagttgcagctcagggggggataggtgcagcattaggaaatatgggagatgataattggaaatggcatatgtacgatactgtaaaaggttcagactggttaggggatcaagatgccatagaatatctttgttctaatgctcctgaggctgttatagaattagaagaatacggaatgccattcagtagaactgatgatgggcgaatataccaaagaccttttggcggtcacttaactaagaatggtgaaggagcacctgcaatgcgagcttgcgcagcagcagatagaacaggacatgctcttcttcacacactttatcagcagtcactaaaacataaagttgaatttcacattgagtattttgttcttgatttagtgatggataaagatggcaactgcaaaggagtggttgcatggtgtttagaagatggaacaattcatcgttttctttctcatcaaacaattttagctacaggtggttatgggcgagcatatttttcttcaacaagcgcgcacatttgcacaggagatggaagcgccatggcacttagacaagatcttcctttgtcagatatggagtttattcaatttcatccaacaggagtttatggtgctggcgtacttattactgagggtgctagaggtgaaggcggttatttaactaatagtgatggtgaaagatttatggagcgatacgctccgaacgctaaagatctagcttcaagagatgtagtaagtagggcaatgactatagaaataaatgaaaatagaggttggtggtgaa

SEQ ID NO: 219182 - DNA, 832 bp, Unknown
  Bacterial polypeptide expressing nucleotide sequence isolated from the Sargasso Sea
tttagtcatctagataaagaaattatagaaaatagattgccaggtataacagatgcagcaagattatttgctaatgtagatgttactaaagaaccgatcccagtcgtacccacagttcattataatatgggtggtataccaactaattacaaagcagaagtattgactgtaaatggttctgaaaaaactgtgccgggactaatggctataggagaagcagcttgtgtttcagttcatggagcgaatagattggggtctaactctttaattgatcttgttgtttttggaagagcagctgcaaaaagagccgcagaactaattaaacctggtgcaccacatgaagagattagtgagtcagaaactcaaaaatgtttagatcgttttgataaaattagaaattctgatggagatattggtactgctgaattaagactgtccatgcaaaaaacaatgcaatcaaaatgtgcagtttttagaacagagaaaacacttaaagagggtgttgatgaaataagacaaacatttgatggattgaactctttatcggttaaagataaatcactgatatttaatactgacctagtagaaactctggaatttgataatttaattagacaagctgttgttacagttgactcagcctataatagaaaagagagcagaggagctcatgcaagagaagattatcccaaaagagatgatgagaagtttatgcaacatacattagcttggtgtgatggaaataaatcaaaagtaagttatagagatgttcataagtctactttgacaaatgaagtacagtattttccacctcaggagagagtatattaat

SEQ ID NO: 219183 - DNA, 925 bp, Unknown
  Bacterial polypeptide expressing nucleotide sequence isolated from the Sargasso Sea
cagagaacttgcgcggcagcagatagaacaggtcatgcaattcttcacacactttatggtcaagcacttaaacacaatactgaattttttattgaatattttgctttagatttattaatgaaagatggagcttgtaaaggtttaatagcctggaatttaaacgatggaacaatacatagatttaggtctcatattacaataattgcaacgggtggttatggaaaagtttactattcagcaacttcagcacatacttgcactggagatggaaacgcaatggtattaagagctggacttccattgcaagatatggaatttgtccaatttcatccaactggaatttatggacatggaacactaatttcagaaggagtaagaggagaaggtggatatttattaaattcaaaaggtgaaagattcatggaacgctatgctcctaaagctaaagatttggcttctagagatgtggttagcagatcaattgctattgaaataaatgaaggaagaggcgttggtaaagaaaaagatcacgtgcatcttcatttagatcatttagatccaaaagtaatagagaatagattgccaggaatctcagaatcatcaagattatttgcgaatgtagatgttactaaagaaccaatacccgtagtgccaactgttcactacaatatgggaggtattcctacaaattataaagctgaagttcttacattaaatggatctgaaaaagttgttccaggtcttatggctattggagaagccgcatgtgtttcagttcatggtgcaaatagacttggttcaaactctttaattgacttagttgtgtttgggaaagcagcagcaaaaagagcatctgaattaattaaaactggaatgaagcatgaagaaatagataatagtgaaacagataaatgtctttggtagg

SEQ ID NO: 219184 - DNA, 832 bp, Unknown
  Bacterial polypeptide expressing nucleotide sequence isolated from the Sargasso Sea
aaaggtggtataagtgctgctttaggtaatatgggcgaggatgactggaaatggcatatgtacgacactattaaaggctcagattggcttggtgatcaagatgctatagcttttatgtgcaaagaagcgccagaagcagtcatagaacttgaacactatggagttccattttccagaactgaggagggaaaaatttatcaacgtccttttggtgggatgactactcattttggcgagggtattgctcaaaggacttgtgctgcagctgatagaaccggtcacgcgatgctacacacgttgtatcaacagtctttatcccatgatgcagaattctttgtagaatatttagtattagacttaataatgaatgataaaaaagaatgtcgtggtgtgttagcatggaatcttcatgacggaaaattatattgtttcaattctaaaatggtaatattagctacaggtggttatggtcgagcatatttctcttgtacttctgctcatacttgcactggtgacggtggggcgatggttttaagggctggtcttcctttacaagacatggaatttactcaattccatccaactggtatttatggtgcgggtgttttgatcaccgaaggtgctagaggtgaagggggatttctaacaaatagtattggcgaaagatttatggaaaaatatgcacctaatgctaaagacttagctagtagagatgttgtttccagatctatgacaactgagataatggaaggcagaggctgtggtcccaaaaaagatcacattcatttaaacttgagccatcttgaaaagagtgtattagaagaaaaattac

SEQ ID NO: 219185 - DNA, 810 bp, Unknown
  Bacterial polypeptide expressing nucleotide sequence isolated from the Sargasso Sea
agatggagagtgtaaaggtttaatagcttggaatttaaatgatggaactattcatagatttagatctcatataacaattatagcaactggtggatatggaaaaacatattattcatctacatctgctcatacttgtaccggtgatggtaatgctatggttttaagagccggtttacctttgcaagatatggaatttgtacaatttcaccctacaggaatttatggacatggaactttaatatccgaaggagttcgaggtgaaggaggatatctattgaattctaaaggtgaaagatttatggaaagatatgctccaaaagctaaagatcttgcatctagagatgtggtaagtagatcaatagcagttgaaataaatgaaggaagaggagttggaaaagaaaaagatcatgttcatcttcatttagatcatttagatcctgaagtaattgagaaaagacttccaggaatttcagagtcttcaagattatttgccgatgttgatgtcacaaaggaaccaataccagttgttcctacagttcattataatatgggtggtattccaacaaattataaagctgaagttttaactgtaaatggttcagaaaaaattgtacccggacttatggcaataggtgaagcagcatgtgtttcagttcatggagctaacagactaggatcaaattctttaattgatttagttgtttttggaagagccgcagcaaaaagggcttcagaattagtgaagccaggaactccacatgagaaaatctcaaattcagagactgataagtctttagataggtttgaaaa

SEQ ID NO: 219186 - DNA, 990 bp, Unknown
  Bacterial polypeptide expressing nucleotide sequence isolated from the Sargasso Sea
attaagagcaggtcttcctctgcaagatatggaatttgttcaatttcatccaacaggaatctatggtgttggatgtttgataactgaaggcgctagaggagaaggaggatacctggtaaatagtgagggagaaaggtttatggaaaggtacgctccatcagcaaaggacttagcctcaagagatgtagtgtcacgatctattaccaaagaaattattgatggaagaggcgttgggaaggataaagatcacatgtatcttcatctggaccatattgactccaatattcttgaagaaagactaccagggatatcagagtctgcaaaagtttttgctggagtggatgtaactaaagatccaatacccataatacctacagttcattataatatgggcggaataccaacgaacttccacggcgaagttatgaatcttgtcaagggtgacgaaacagtcgtacctggcctaatggctgttggggagtcagcttgtgtgagtgtccatggcgcaaataggttaggatctaattcgctaattgaccttgtagtttttggaaaagctgccgcagacagaattaatgatattgttcctaagggcaaaaaaaataaagatattcctaaaccagtcatcgatgatgtaatagcaagatttgatgctaccagaaattctgacggcgatgtaacaacggcggaactgagatctcaaatgcaaaaagttatgcaaaaacattgtgcggtattcagagatgatgaaattatgacagaaggaaaaaaactcatcgaagaaacttggctcgacagtgaaaacttaaagataaaagacaaatcacttgtttggaatacagatttattagaaactttagagtataaaaatcttattgctcaagctgtagtcactatgaattctgctcataatagaaaagaaagcagaggtgcgcatgctagagaagatttcagggaaagagacgataaaaacctggatgaaacatacac

SEQ ID NO: 219187 - DNA, 928 bp, Unknown
  Bacterial polypeptide expressing nucleotide sequence isolated from the Sargasso Sea
catactttatatgaccaagcgctaaaacataacaccgaattttttattgagtattttgctttagatttacttatgaaggacggtgcttgcaaaggtttaatagcatggaacttaaatgatggtacaattcatagatttagatctcatactacaattattgcaacgggtggttatggtaaggtttattattctgcaacatcagctcatacttgtacaggtgatggtaatgctatggtgttaagagcaggactaccattacaagatatggagtttgtacaatttcatccaacaggcatatatggtcatggaactttaatttctgaaggtgtaagaggagaaggtggttatctgttgaattctaaaggtgaaaggtttatggagagatacgctcctaaagctaaggaccttgcatcaagagatgtcgttagcagatctattgcagtagaaataaatgaaggaagaggagttggaaaagaaaaagatcatgttcatttacatttaaatcatctagatccaaaagtaattgaagagagactacctggaatatctgagtcatcaagattatttgcaaacgtagatgtaacaaaggaaccaatcccagttgttccaacagttcattataatatgggtggtattccaactaattacaaagccgaagttttaacagtaaatggatctgaaaaaacagttccaggactaatggcgataggagaagctgcatgtgtatctgtacatggagctaacagattaggatctaactcgctaatagacttggtagtttttggaagagctgctgcaaagagagctgcagagctaatcaagccaggaacgccgcatgaagatataccagtatctgaaactgaaaaatgcttagaaagatttgacaaactaagaaatggtaacggtgataataataccgcagaactaa

SEQ ID NO: 219188 - DNA, 708 bp, Unknown
  Bacterial polypeptide expressing nucleotide sequence isolated from the Sargasso Sea
tgtatttcaaagtatttccaacaagaagtcatactttctgcagcacaaggcggtatttcagcagcacttggaaacatgggtgaagatgactggagatggcatatgtacgataccgttaaaggctctgattggttaggagaccaggatgccatagaatatttatgcaaggaagctccaagagcagtggtggaattagaaagatatggggttccatttagtagaaccgatgatggaaaaatttaccaaagaccatttggtggaatgacaaaaaattatggaaatggcacagcacaaagaacatgtgcagctgctgatagaacaggtcatgcaattttacacactctttatggtcaagcactaaaacataatacagaattttttatcgaatattttgcgctagacttaattatgaaaaacggtgagtgcaaaggagtgatagcttggaacttgacagacgggactattcacagattcagatctcatattacaataatagcaacaggtggttacggaaaagtttattattcagctacctcagcacatacttgtacaggagatggtaacgcgatggtattaagagctggtctacctttacaagatatggagtttgtacaattccatccaactggaatttatggcgtaggatgtttaataactgaaggcgcaagaggagagggaggatttttagtaaacggtaagggtgaaaga

SEQ ID NO: 219189 - DNA, 739 bp, Unknown
  Bacterial polypeptide expressing nucleotide sequence isolated from the Sargasso Sea
acaatttcatcccacaggtatttatggtcatggaactttaatttctgaaggtgttagaggtgagggaggatatttggtaaactctaagggtgaaaggtttatggaaaaatacgcgcctaaagcaaaagatcttgcttcgagagatgttgtaagtagatcaatcgcagtcgaaattaatgaaggtcgtggtgtcggtaaggataaagatcatgttcatttacatttaaatcatttagatcaaaaagtaattgaggacaggttgccaggtatctcagaagcctcaagactttttgcaaacgttgatgtaactaaggaaccaattccagtggtgccaacagttcattataatatgggcggaatacctactaattataaagcagaggtaataacaatgaatggatcagaaaaaactgttcctggacttatggcaatcggcgaggcagcttgtgtttctgttcatggtgcaaatagattaggatcaaattctttaatcgatttagttgtatttggcagagcagcagcaaaaagagcagctgaacttgtaaaacctggcatgaaacatgaagacatacctcaaagtgaaacagataaatgcttagatagatttgataaattaagaaactctaagggatctaatcccactgcagaattaagattagctatgcaaaaaactatgcaatcaaaatgtgcagtatttaggactgaaaaaactttaacagaaggtgtaaatgaaattaga

SEQ ID NO: 219190 - DNA, 784 bp, Unknown
  Bacterial polypeptide expressing nucleotide sequence isolated from the Sargasso Sea
tacagaagcagcaaaaacatttgctaatgttgacgttaataaagaaccaataccagttgtacctacggtgcattacaatatgggaggtataccaacaaattataaagcagaagttttaacattaaacggatcagaaaaaacagttccaggattaatggcaattggcgaagccgcatgtgtttcagttcatggtgcaaatagacttggttctaactctctaattgatcttgttgtatttggaagagcagctgcaaaaagagcggcagaactagtcaaacctggaatgccacatgaagaagttccaaaatctgaaactgacaagtgtttagaaagatttgatagaattagaaactctaatggttcaacaaaaacttcagaacttagattaaaaatgcaaaaaacaatgcaatcaaaatgtgcagtgttcaggacagaaaaaactttaaaagaaggtgttaaagaaattaggagaccttatgacggccttcaagatatatcagttaaagataaatcattactatttaatactgatttagtagaaactttggaattcgataatttaattagacaagctttaactacaatggactctgcatataatagaaaagaaagccgaggtgctcatgctagagaagactatggtaaaagggatgataaaaattttatgaaacacactttagcttggcaaagtgataaaaaagttgagataaagtatagagatgtacattctcgaactttaactaacgatgtacaatactttccaccaaaggaaagagtttattaa

SEQ ID NO: 219191 - DNA, 883 bp, Unknown
  Bacterial polypeptide expressing nucleotide sequence isolated from the Sargasso Sea
ctgcctttttcacgatttgaaaatggaaggatttaccaaagaccttttggaggacaatcaaaagattacggtaaaggcgggcaagctgctagaacttgtgctgcagcagataggactggacacgcccttcttcataccctttatcaaaataatattaaagaaggtacacaattccttaatgagtggtttgcagttgatctagtcttaaatggaaaggatgaaataactggagttattgcattctcaattgaatctggaaaagtgtgttatttaaaagcccaagctacagttcttgctacaggaggtgcagggagaatatatgcctctacaacaaatgctctcattaatacaggtgacggtttaggaatgactctgagagcaggattccctgctcaggatatggaaatgtggcaattccaccctacaggaatttatggtgccggctctttggtaactgaaggctgcagaggtgagggaggctacttaataaatgctgatggggaaaggtttatggaaaggtatgctccaaacgcaaaagaccttgctggaagagatgttgttgctaggtctatggtgcttgaaattcttgagggaagaggttgcggtgagaaaaaggatcatgttttccttaagttagatcatctaggagcagatgttctgaattcaaagttaccaggcatatgtgaattatcaaaaacttttgcacatgttgatcctatttttgacccaattcctgttgtgccaacttgccattatatgatgggaggaactccaacaaatattcacggacaagcatttggaagagataatgacatagactacctaattcctggattgttttctgttggagaggcagcatgtgtctcagtacatggagcaaata

SEQ ID NO: 219192 - DNA, 890 bp, Unknown
  Bacterial polypeptide expressing nucleotide sequence isolated from the Sargasso Sea
aataattgatcatgagtacgatgtggtagttttaggagctggaggctcaggtttaagagctgctgtgggtttaagtgaagctggactgaaaactgcatgtatttcaaaagtttttcctacaagaagccatacttctgcagcacaaggtggaatatctgctgctttaggaaacatgggtgaggacgattggcgttggcacatgtatgacactgtaaaaggtgctgattggttaggtgatcaagatagtattgaatatctttgtaaagaagctcccaaagcagttattgagttagagaaatatggtgttccttttagcagaactgatgatggtaaaatttaccaaagaccttttggtggaatgactaaaaattatggaaatggaatagttcaaagaacttgtgctgcagctgacagaacaggtcatgccattttacacacactgtacggacaggcactcaaacacaaaacagaattttttattgaatattttgccttagatttattaatgaaagatggtgcatgtaaaggattaattgcttggaatctaaacgatggtactattcatagatttagggcacatactgtaataatagcaacaggcggatatggaaaagtttattattcagcgacatcagctcatacttgtaccggagatggaaatgcaatggttttaagagcaggactaccattacaagatatggaatttgttcaatttcatcccacaggaatttatggacacggcactttaattactgagggcgcaagaggcgaaggtggatatcttactaattctaagggtgaaagatttatggaaagatatgcaccaaaagcaaaagatttagcatcaagagatgttgttagtagatcaatgtctattgagattaatgaag

SEQ ID NO: 219193 - DNA, 808 bp, Unknown
  Bacterial polypeptide expressing nucleotide sequence isolated from the Sargasso Sea
tatagatgagaggcttccaggaatatcagaagcatctaaattatttgcaaactttgatgtaaccaaggagcctataccagtagtacccacagtgcattataatatgggtggaataccaacaaattataaagcagaggttcttacattaaatggatctgaaaaaactgtacccgggttaatggctattggcgaagcagcatgtgtttctgttcacggcgcaaatagattaggttcaaattcattaatagatttagtagtttttggaagagctgcagcgaaaagagcagcagagttagtaaaacccggaatgaagcatgaagaaattgataaaaatgaaacggatagatgtttagatagatttgataaattaagaaactcagaaggttcaaatccaacatctgaactaagactttcaatgcaaaaaacgatgcaatcaaaatgtgctgtatttagaactgagaaaacattaaaggagggcgttgatgaaattagaaaaccttatgatggaatggactctctttctgtaaaagataagtcattaatctttaatacagatttagttgaaacactagaatttgacaacttaataagacaagcaataactacaatggactctgcttatcatagaaaagaaagcagaggagctcatgcaagagaagattttccaaagagagatgacgaaaattatatgcaacacactctgtcttggtgtaatggttcaaaaactaaaattaattacagacctgttcatagatctacacttacaaatgatgtacaatattttcctccacaggaaagagtatattaa

SEQ ID NO: 219194 - DNA, 809 bp, Unknown
  Bacterial polypeptide expressing nucleotide sequence isolated from the Sargasso Sea
tcatacatcagcagctcaaggaggtatttcagcagcccttgggaatatgggagaagatgattggagatggcatatgtatgatactgtaaaaggatctgattggttgggtgaccaagatagcatagaatatttgtgtaaagaagctccacgagcagtcttagaattagagaggtatggagttccatttagtcgtactgaagatggaaaaatataccaaagaccttttggtggaatgactaaaaattatggaaatgaaactgttcaaagaacttgtgcagcagcagacagaacgggtcatgccattttacataccatgtatggacaagcattgaagcataatacagaattttttattgaatactttgctttagatttattaatgaaagatggagagtgtaaaggtttaatagcttggaatttaaatgatggaactattcatagatttagatctcatataacaattatagcaactggcggatatggaaaaacatattattcttccacatctgctcatacttgtactggcgatggaaatgccatggttttaagagctggtttacctttgcaagatatggaatttgtacaatttcatccaacaggaatctatggacatggaactttaatatcagaaggagttcgaggagaaggaggatacttattgaattctaaaggtgaaagattcatggagaggtatgctccaaaagcaaaagatcttgcatctagagatgtggtaagcagatcaatagcagttgaaataaatgaaggaagaggcgtggaaaagaaaaagatcatgttcatcttcatttaga

SEQ ID NO: 219195 - DNA, 585 bp, Unknown
  Bacterial polypeptide expressing nucleotide sequence isolated from the Sargasso Sea
tatgagttcatataaaattatagatcatgagtatgatgttgttgttcttggagctggtggcgcaggtttaagagctgcggttggtctaagcgaggaaggattaaaaacagcatgtatatctaaggtttttcctacaagaagccatacttcagctgctcaaggaggtatttctgctgctctaggaaatatgggagaagatgattggcgttggcacatgtatgacacagttaagggttccgattggctaggagatcaagatagcatagaatatttatgtaaagaagctcctagagctgttttagagttagaaagatatggagttccatttagcagaacagaagatggaaaaatttatcaaagaccttttggtggaatgacaaaaaattatggcaatgaaactgtccaaagaacctgcgcagcagcagatagaacaggtcatgctatattacacacaatgtatggccaggctttaaaacataatacggaatttttcattgaatactttgcattagatttattaatgaaaaatggagagtgcaaaggtttaatagcatggaatttaaatgatggaactattcatagatt

SEQ ID NO: 219196 - DNA, 940 bp, Unknown
  Bacterial polypeptide expressing nucleotide sequence isolated from the Sargasso Sea
ccaaccagaagccacaccgttgcagctcaaggtggcataggtgcagcgcttggtaatatgggtgaggataattggaaatggcatatgtttgatacggttaaaggttctgattggcttggagatcaagatgcaatagagtatctttgttcaaaagctcctgaggctattgaagatttagaagaatatggaatgccttttagcagaactgaagaaggtaagatttatcaacgacctttcggaggtcacttaactagtaatggagaaggtccaccagctatgcgagcttgtgcagcagcagatagaacaggacatgctttattacacactttataccaacaatccttaaaaaatgctgttgagttttttattgaatattttgttttagatttgcttatcgatgatgatggaacttgcaaaggagtaattgcgtggagtcttgaagatggaacattgcacagattcttatctcatcagactattatcgcaacaggaggatatgggcgtgcatatttttcttcaacaagtgctcatatctgtactggtgatggaagtgcaatggctttaagacaaggattacctttatctgatatggaatttattcaatttcaccctactggagtttacggagctggggttttaataactgagggagccagaggagaaggaggctacttaacaaatagtgatggagaacgttttatggaacgttatgctcccaatgcaaaagatctagcttcacgagatgttgtaagtagagctatgacgattgaaataaatgaaaacagaggatgcggaaaaaattctgatcatgtattacttcatctagaacatattaattcgaacactatacataaaagattgccaggaatatcagaaacagcaaaaatttttgcaggtgtagatttaactaaagaccctataccagttttacctaccgtac

SEQ ID NO: 219197 - DNA, 774 bp, Unknown
  Bacterial polypeptide expressing nucleotide sequence isolated from the Sargasso Sea
agatggggaatgcaaaggtttaatagcgtggaatttaaatgatggaactattcatagatttagatctcatataacaattatagcaactggtggatatggaaaaacatattattcttctacttccgctcatacttgtactggtgatggaaatgcgatggttttaagagccggtttacctttgcaagatatggaatttgtacaatttcatccaacaggaatttatggacatggaactttaatatccgaaggagttcgaggtgaaggaggatacttattgaattctaaaggagaaagatttatggagagatacgctccaaaagctaaggatcttgcatctagagatgtagtaagtaggtcaatagctgttgaaattaatgaaggaagaggagtcggaaaagaaaaagatcatgttcaccttcatttagatcatttagacccagatgtaattgaaaaaagacttccaggaatttcagagtcttcaagattatttgctgatgtagatgttacaaaagagccgataccagttgttcccacagttcattataatatgggtggcattccaacaaattataaagctgaagttttaacagtaaatggttcagaaaaaattgtacctgggcttatggcaataggtgaagcggcctgtgtttcggttcatggagctaacagactaggatcaaattcattaattgatctagtagtttttggaagagctgcagcaaaaagagctgcagaactggtaaaaccaggaactccacatgagaaaatctcaaa

SEQ ID NO: 219198 - DNA, 899 bp, Unknown
  Bacterial polypeptide expressing nucleotide sequence isolated from the Sargasso Sea
ttaggagatcaagactccatagaatatatgtgcaaaaatgcagttgagtcaataatagaacttgaacactttggcgtacctttttcaagaacagaggaaggcaaaatttatcaaagaccatttggcggaatgactactgaatatggcaaaggtatcgctcaaagaacatgtgcagctgccgataggacaggtcacgctattcttcacactctctacactcaatcacttaaaaataatgtggacttttatattgaatatttcgtaattgatttagtttttgaggaagataaatgcgttggtgttctcgcctggtgcttagatgatggctcaattcatctgtttcaagcacatattgttattttagcgacgggaggtcatggaagaacatatctctcatctacatctgctcatacatgcactggtgatggaaacggtatggttttgagagcaggcttgccgctaatggatatggaatttattcaatttcacccaacaggaatttatggcgcaggttgtcttattactgaaggcgcacgaggtgaagggggttatttaactaactcagaaggagagaggttcatgccaaaatatgctcctaatgcaaaagatttggcttctagagatgttgttagcagggctattcaaatggaagtcaatgcaggaagaggagtcggtcctgagaaagatcatgttctattacacctagaacatttagacgataaagtgattcatgataagttacctggtataacagaaacagcaaaaatattttctggagtagatgctactaaagagcctattccagttataccaactgtacattataatatgggtggcactccaactaatcattataccgaagtaatatcatccgggcgatgggtcaactgtcgaaggtt

SEQ ID NO: 219199 - DNA, 859 bp, Unknown
  Bacterial polypeptide expressing nucleotide sequence isolated from the Sargasso Sea
aaagatcaagaccatgttcatttaaatttaagtcatttagataaagaaattattgagagcaggttaccagggataactgaagcggcaagattgtttgcaaatgtagatgtcacaaaagagccaattcctgttgtaccaacagttcattataacatgggaggaattcctactaactataaagctgaagtgctaactgttaatggttcagaaaaaactgtacctggattgatggctattggcgaagctgcatgtgtctctgttcatggagctaatagacttggatctaattctttaatcgatttagtagtatttggaagatcagcagcacagagagcagccgaattagtaaaacctggaacaccgcatgaagaaattcctgagtcagaaactcaaaaatgtttagatagatttgataagctacggaatgctaaaggagaaaatagcactgcagatttgaggctttcaatgcaaaaaactatgcagtctaaatgtgcagtatttagaacagaaaaaaatttaaaagagggtgtagatgaaattagaaaaacttatgacggtatggactcaatttcagttcaagatagatctttagtttttaatacagatttagttgaaacattagaatttgataatctaatcagacaagctgtgacaacagtagactctgcataccaaagaaaagaaagcagaggagcacatgctagagaagattatccaaaaagagatgatcaaaaattcatgcagcatacccttgcttggtttgatggcaaaaatactaaaattagttatagacctgtgcatcaatcaaccttgactaatgaagtacaatattttccaccacaagaacgggtttattaat

SEQ ID NO: 219200 - DNA, 745 bp, Unknown
  Bacterial polypeptide expressing nucleotide sequence isolated from the Sargasso Sea
cctaacgcaaaagatttagctagtagggatgttgtatcacggtcaatggcactagagatccttgaaggtagaggatgcggacctaatgctgatcatataaaacttagattagaccatttaggcccagaggtagttcataaaaggctaccaggaataacagagctatcaaaaacttttgctcatgtagatcctgctgttgaacctatccctgttgtaccgacttgtcattatatgatgggaggaattccaactaatatccatggtcaagttattacagttgataaaggagaagataaaattgtaaaaggtctttatgctgcaggagaggttgcttgtgtatctgtgcatggaggaaatagattagggggcaactctcttcttgatttagtagtttttggaagagcagcaggaattcatatagaagagtctcttaaggatggaatagatgtgcagaaatcatctaatgaagatgtagatcaagctctaaaaagattaaataaacttaacgcctctaaagaaggtttagaaactgcttatttaaaaaaagaaatgcaagataatatgcaaaataactttggggtatttagaactcaagatcttatggaaaaaggaataaaggatttaagtaattctagagagtccgttgacaacatctatctttcagataaatctgcttcttttaatacagcaaggatagaggcactagaaatgcaaaacctctttgaagttgcagaagcaacagcaa

SEQ ID NO: 219201 - DNA, 877 bp, Unknown
  Bacterial polypeptide expressing nucleotide sequence isolated from the Sargasso Sea
tgctaaggatcttgcagggagagatgttgttgctagatcaatggttatggaaatacttgaaggcagagggtgtggcccagagaaagatcatgtttacttgaaactcgatcatttgggtgcagatgtacttaattcaaaattaccaggcatatgtgagctctcaaaaacttttgctcacgttgatcctattatggaaccaattcctgttgttcctacatgtcattacatgatgggaggaaccccaacaaatattcacggtcaagcatttagcagaaatgatggaaatgatttcatggtttctgggcttttctctgttggggaagctgcatgtgtgtctgtacatggtgccaacaggctgggtggaaactctttattagatttagttgttttcggaagagctgcaggcaaacacataaatgaggagcttaaatctggaggtggagtagataatgcttccaacgaagatattgaattggccatgagcaggctaaacacattaaatgagtctgaatctggatatgaggttgctgatgttaaaaaacaactccaaacatgtatgcagaactacttcggtgtctttaggcgtggcgagtttatggagaaaggagtcaaagaacttgaggagataagagagaaatccgaaaatctttacttaaaggataaaagtattgctttcaacactaacagagttgaagcacttgagttacagaatctattagaggttgcagaggcaacagctatttctgcaatgatgagagacgaaagtagaggtgctcatgccagagatgattttcccgaaagagatgatgagaattggttatgtcattctctatatgatccagttgaaaaaaaatgggcaaaagagatgttaattttt

SEQ ID NO: 219202 - DNA, 842 bp, Unknown
  Bacterial polypeptide expressing nucleotide sequence isolated from the Sargasso Sea
cttcacactatgtatggacaagcattgaaacacaatactgaattttttatcgaatattttgcattagatctattaatgaaaaatggagaatgtaaaggtttattagcttggaatttaaatgatggaacaattcacagatttagatctcatataaccataatagcaacaggtggatatggaaaaacatattattcatcaacttctgcccatacatgtaccggagatggcaatgcaatggcattaagagcgggtttgccattacaagatatggaattcgttcagtttcatccaacaggaatttatggacacggaactttaatatcagaaggagttagaggagaaggcggttacctagtaaactcaaaaggagaaagatttatggagcgctatgctccaaaagctaaagatcttgcatctagagatgtggttagtagatcaatagctgttgagattaatgaaggaagaggtgttggaaatgaaaaagatcatgtacatcttcatttagaccatctagaccctaaagttattgaaagtagattgccaggaatatcagagtcttcaagattatttgcaaatgttgatgttacaaaagaaccgataccggttgtaccaacagttcattataatatgggtggaattcctactaattataaagctgaagttataactttaaatggttcagaaaaagttgttcctggacttatggcaatcggagaggcagcatgtgtttctgtacatggagctaatagattgggttcaaattcattaattgatcttgttgtttttggaagagctgcagcaaaaagagcagctgaattagttaagccaggctctcctcacga

SEQ ID NO: 219203 - DNA, 760 bp, Unknown
  Bacterial polypeptide expressing nucleotide sequence isolated from the Sargasso Sea
aagggttccgattggcttggcgatcaagatgcaatagaatatctatgtaaagaggctccaagagctgttgttgagctagaaaggtatggtgttccttttagtagaactgatgatggaaaaatttatcagagaccatttggaggaatgacaaaaaattatggtaacggcacggcccaaagaacatgtgcagctgctgacagaacaggccacgctattttgcatactctatacggacaagcacttaaacaaaacacagaattttttattgaatactttgctctagatttgattatgaaaaatggagaatgcaaaggagttatagcttggaatttaacagatggaacaattcatagatttagatctcatataaccataattgcaactggaggatacgggaaagtttactattccgctacatctgctcatacatgcactggagatggtaacgctatggtattaagagccggcttgcctttacaagacatggaatttgttcaatttcacccaacaggaatttacggagttggctgtttaattacagaaggtgtaagaggtgaaggcggatttttagtaaacggaaaaggtgagagatttatggaaaggtatgcgcccaatgcaaaagatttagcatctcgggatgtagtaagtagatctatggagatggaaattaatgagggtagaggtgtgggaaaaaataaggaccatattaatttacacttagatcacatagataaaaaagttatagatgagaggcttcctg

SEQ ID NO: 219204 - DNA, 823 bp, Unknown
  Bacterial polypeptide expressing nucleotide sequence isolated from the Sargasso Sea
aagccatacttcagctgctcaaggaggtatttctgctgctctaggaaatatgggagaagatgattggcgttggcatatgtatgacacagttaagggttccgattggctaggagatcaagatagcatagaatatttatgtaaagaagctccaagagctgttttagagttagaaagatatggagttccatttagcagaacagaagatggaaaaatttatcaaagaccttttggtggaatgacaaaaaattatggtaatgaaactgtccaaagaacctgtgcagcagcagatagaacaggtcatgctatattacacacaatgtatgggcaggctttaaaacataatacagaatttttcatcgaatactttgcattagatttattgatgaaaaatggagagtgcaaaggtttaatagcatggaatttaaatgatggaactattcatagatttagagctcatattacaataatagcaacaggtgggtatggaaaaacatattattcatccacatcagctcacacctgtacaggtgatggaaatgctatggttttgagagctggtttacctttacaagatatggaatttgtacaatttcatccaacaggaatttatggacatggaaccttaatatcagaaggagttcgaggcgagggaggatacttattgaattctaaaggtgaaagatttatggagagatatgctccaaaagctaaagatcttgcatctagagatgtagttagtagatcaatagcagttgaaattaatgagggacgaggagttggaaaagaaaaagatcatgttcatcttcatttagatcatttagat

SEQ ID NO: 219205 - DNA, 988 bp, Unknown
  Bacterial polypeptide expressing nucleotide sequence isolated from the Sargasso Sea
atgcactgcagctcatacctgtacaggagatggctctgggatggtcttgagagctggattgcctctacaagatatggaatttgttcaatttcacccaacaggcatatatggggttggttgtttaattactgaaggagtgagaggcgaaggcggatttttgaccaattctgaaggcgaacgattcatggagaaatacgcaccaaatgcaaaagatttagcttcacgagatgtggtcagccggtccattacacttgaaatcctagagggcagaggcgttggaccaaataaggatagaatggacttaaatctgcaacaccttgaccccaaagtaattgaggagagattacctggaatatcagaaacagctagaatattcgcagatgttgacgtgaccaaagaacctatccctgttattcctactgttcactatgacatgggaggcatcccaacaaacaaacacactgaagtggttaccaagaataagaacggtgagatggaagttgtagaaggattgatggcagttggagaggctgcttctgtttctgtccacggtgccaatagactaggctctaactcacttctcgatttggtggtttttggaaaagaggctgcagagcaatgtgcgaggacaattaataaagatgataaagaagaatcactacctcaagatgaaatcgataggatagttgataaatttgattccataagatttgcaaagggatctttagctacagcggatattaggctagagatgcaacagattatgcaaaaccacgcctctgtttttaggacagaagagattctctcagagggggtaaagaaactttcagcttgcctagattcgtttaaagatgtttctgttactgatagaggactaatttggaacactgatctaattgaaacattggaattagaaaatctattaggccaagctatcattacaatggaatctgctttggctaggaaagagagtaggggcgcacacgct

SEQ ID NO: 219206 - DNA, 751 bp, Unknown
  Bacterial polypeptide expressing nucleotide sequence isolated from the Sargasso Sea
atgagtgaatataaaattatagatcatgaatatgatgttgttgttctaggtgctggtggttctggtctaagagcagctgtaggattaagtgagtctggacttaaaacggcatgtatttctaaagtatttccaacaagaagtcatacttctgctgctcagggaggtatatcagcagcattaggaaatatgggagaagacgattggagatggcatatgtatgatacagttaaaggagcagactggttaggtgatcaagattgtatagaatatttatgcaaagaagctccaagagcggtattagaattagaaaaatatggagttccttttagtcgaaccaaagatggtaaaatttatcagagaccatttggtggaatgacaaaaaattatggaaatgagccagtgcaaagaacttgtgcggctgcagacagaactggacatgcaattttacatactttgtatggtcaagctttgaaacataatactgaattttttattgaatattttgctctagacctacttatgaaaaatggagaatgtaaaggtttgattgcttggaatttaaacgatggaactattcataggtttagatctcatataacaataattgccacaggtggttatggtaaagtttattactcagctacttcagcgcatacttgtaccggagatggtaatgccatggtattaagagctggcttgcctttgcaagatatggaatttgtacaatttcaccctactggtatttatggac

SEQ ID NO: 219207 - DNA, 898 bp, Unknown
  Bacterial polypeptide expressing nucleotide sequence isolated from the Sargasso Sea
ggtttatcagaatcaggtttaaaaactgcttgtatttccaaagtcttcccaacaagaagccatacatcagcagctcagggaggtatttctgcggctttaggaaatatgggtgaagatgattggcgatggcacatgtatgacactgttaaaggatccgattggcttggtgatcaggacgcaattgaatatctttgcaaggaagccccgagagcagtcgttgaactagagagatatggagttccttttagtagaactgatgatggaaaaatttatcaaagaccattcggcggaatgactaaaaattacggtaatggtacagctcaaagaacatgtgctgctgctgatagaacgggtcatgcaatattacatactttgtatggacaagcattaaaacaaaacacagagttttttattgaatattttgctcttgatttaattatgaaaaacggtgaatgcaaaggagtgatagcttggaatttaacagatggcacgattcatagatttaggtctcatattactattattgcaactggtggctacggtaaagtttattactcagcaacatccgctcatacatgcactggagatggaaatgcgatggttcttagagcaggcttacctttacaagatatggaattcgtacaatttcatccgactggaatatatggagttggatgtttgataactgaaggagttagaggagaaggtggatttctagtaaatggtaaaggtgaaagatttatggaaagatatgcacctaatgcgaaagacttggcttctagagacgtggtaagcagatcaatggaaatggaaatcaacgagggtagaggtgcgggaaaagataaggatcatataaaccttcatttagatcacatagataaaaaagttatagatgaga

SEQ ID NO: 219208 - DNA, 943 bp, Unknown
  Bacterial polypeptide expressing nucleotide sequence isolated from the Sargasso Sea
gcaacggttctagctactggcggtgctggaagaatatatgcatctacaacaaatgctttgattaatactggagatggacttggaatgactctcagagcaggttttcctgctcaggatatggaaatgtggcaatttcatccaactggtattcatggtgcaggatctcttgtaactgagggttgcagaggtgaaggtggatatttaattaatgcagatggtgagagatttatggaaagatatgctccaaatgctaaggatcttgcagggagagatgttgttgctagatcaatggttatggaaatacttgaaggtagagggtgtggcccagagaaagatcatgtttacttaaaactcgatcatttgggcgcagatgttcttaattcaaaattaccgggcatatgcgagctctcaaaaacttttgctcatgttgatcctattaaggaaccaattcctgttgttcctacatgtcattacatgatgggaggaacaccaacaaatattcatggtcaagcatttagcaggaatgatggtaatgatttcatggtttcagggcttttctctgttggggaagctgcatgtgtatctgttcatggcgccaacagactgggcggaaactctttattagatttagttgttttcggaagagctgcaggcaaacatataaatgaggagcttaaatctggtggtggcgtagataatgcttctaacgaagatattgaattagccatgagcaggctaaacaaattaaatgaatctgaatctggatacgaggttgctgatgttaaaaaacaactccaaacatgtatgcagaattactttggtgtctttaggcgtggtgagtttatggagaaaggagtcaaagaacttgaggagataagagagaaatctgaaaatctttacttaaaggataaaaagtattgctttcaacacaaacagagttgaa

SEQ ID NO: 219209 - DNA, 802 bp, Unknown
  Bacterial polypeptide expressing nucleotide sequence isolated from the Sargasso Sea
tactgtgctagcaacaggcggtgctggccgaatctatgcgtcgacgacaaatgcactaatctgtaccggggacggagttgggatggccctgcgtgcaggatatccgatgcaggacatggagatgtggcagttccatcctactggtatatacggcgctggaactctagtcacagaagggtgtcgcggagaaggtggatatctcatcaataaggatggtgagagatttatggagcgttacgctccgaatgctaaagatcttgcgggaagggacgttgtagcgagatcaatgatcttggagatcattgagggaagaggttgcggtgagaagggggatcatgtgatgctgaaacttgatcatcttggtgaggatgttctcaacgcgaagctacctggaatacttgaactgtcccgaacgtttgcgcatgttgatcccgttgtcgagccaatcccggtggttccaacatgtcattatatgatggggggtatgcccacgaatgttaatgggcaagcgctgactcaagactctaaaggtcaagacatagagattccaggactgttcggtgttggcgaagttgcctgtgtttctgtgcacggggctaatcgtttgggaggtaacagtcttttagacttagtagtgttcggtcgtgctgctggcaagcatattgagaaaatgctttctgacggcctagagcagaggtctgcttctcagtcagatgttgagttatcgttgcagcgcctgaatcgacttaatgattcttctggcggtgaggatctggtctctcttcggactgagttacaaagc

SEQ ID NO: 219210 - DNA, 724 bp, Unknown
  Bacterial polypeptide expressing nucleotide sequence isolated from the Sargasso Sea
ccaactgttcactataacatgggaggtatccccacaaattataaagctgaagttttaactctgaatggatcggaaaaaactgttccaggattgatggcaattggagaagcagcctgcgtgtcagttcatggagctaacagacttggatcaaactctttaattgatctagttgtttttggaagagctgcagccaagagagcggcagagttagttaaaccaggcacacctcatgaggaaatttctcaatctgagactgataaatgtttagagagatttgatagacttagaaatgcatctggaacaaataatactgcagatttaagattagcaatgcaaaaaacaatgcagtctaagtgtgctgttttcagaactgaaaaaactttaaaagagggcgtaaatgaaatcagaaaaccttatgagggtatggatgacctttctgtaaaagataagtctctaatttttaatactgatcttgtagaaacattagaattcgataatttgattagacaagcgataactacaatggactctgcttatcacagaaaagaaagtagaggagctcacgctagagaagattttccaaagcgaaatgatgaaaaatttatgcagcatacattatcttggtgtgatggtaaaaaaactaagattgactatagacctgtccacagatctacactatcaaatgatgtgcagtactttcccccacaagaaagagtttattaat

SEQ ID NO: 219211 - DNA, 850 bp, Unknown
  Bacterial polypeptide expressing nucleotide sequence isolated from the Sargasso Sea
acaggacatgcaatacttcatactttatatgggcaggcactaaaacataatacagaattttttattgaatattttgcactcgatttattgatgaaaaatggagagtgcaagggtttgatagcatggaatttaaatgatggaactatacatagatttagatctcatattactattttagcgacagggggttatggaaaaatttattatacagcaacttctgcacacacttgtactggcgatggaaacggtatggctctaagagcgggactgcctcttcaagacatggaatttgtacagtttcatccaacaggaatttacggagttggtacactcatatcagaaggtgttagaggtgagggaggttttcttctaaactccaagggagagaggtttatggaaagatatgctccaaaagcgaaagatttagcatcaagagatgttgttagtagatcaattgctgtagaaataaatgaaggtagaggtgtcggaaaaaataaagattatgtaaatcttcacttaaaccatctagacccaaaagttatagatgaaagattacctggaattgcagagtctgcaaaaactttttgtgaggttgatgtaaaaaaagatccaatacctgtagttccaactgttcattataatatgggtggaattcctacaaactataaagcggaggtattaactttaaatggcaaggagtcaacagtgccaggattgatggctatcggagaagcagcatgtgtttctgtacatggcgcaaatagactgggatcaaattctttaatagatttggttgtttttggcaaatctgctgctaatagagcagccgaactagttaaacccggaactc

SEQ ID NO: 219212 - DNA, 916 bp, Unknown
  Bacterial polypeptide expressing nucleotide sequence isolated from the Sargasso Sea
agagatgttgtaagcagatcgatgtctattgaaattaatgagggaagaggagttggaaaagatcaagatcatgttcatttaaatttaaatcatttagacaaagatataattgagagtagattaccaggaataactgatgcagcaagattgtttgcgaatgtagatgtcactaaagaaccaattccagttgtaccaaccgttcattataatatgggtggtatccctacaaactataaggcagaagttttaacagtgaacggttcagaaaaaactgttccaggtctaatggcgattggtgaggcagcgtgtgtttcagttcatggagcaaatagactaggctcaaactcattaattgatctagttgtatttggaagagcagcagcaaaaagagctgcggaacttattaagccaggaacaccacatgaggaaataagtgaagcagaaactcaaaaatgtttagatcgttttgataaaatcagaaattctaatggtgaaattggaacagcagaactaagactttcaatgcagaagacaatgcaatccaaatgtgctgtttttagaacagaaaaaactttaaaggaaggtgttgaagaaattagaaaaacatttgatggtttagatagtttatcagtaaaagacaaatctttaatatttaatactgatttagttgaaactttagaattcgataatttaattagacaagcggttgttacagtcgactctgcatataatagaaaagaaagtagaggagctcatgcaagagaagattttcccaaaagagacgatgaaaaatttatgcagcatacacttgcttggtgtgatggaaaggatacaacaataagttatagagatgttcataaatctactttaacaaacgaagtccaatattttccacctcaagaaagagtttattaat

SEQ ID NO: 219213 - DNA, 666 bp, Unknown
  Bacterial polypeptide expressing nucleotide sequence isolated from the Sargasso Sea
aatgaagtcatatgaagtaatcgatcatacatacgacgtggtagtagttggagcaggcggcgccgggttacgtgctacgctagggatgacgatggaaggcctaaagacggcatgtataacaaaagtgtttcccacacgaagccacacggttgccgcacaaggaggagttggagcagcactagacaatatgggtgaaggagataactggcaatttcacatgtacgatacagtcaaaggatcggactggttgggcgatcaagatgctatagagtatatgtgcagaaacgcgataccagctgtgatagaattggagcactacggtgttccgttttctcgcaccgaagagggtaaaatttatcaacgtccttttggtggtcacactttagacaatggtaaaaggatggctaaacgtgcttgcgccgcagctgatagaacaggacatgcaattcttcacaccctgtaccaacaatgcttggccaataatgctgagttttacatcgagtattttgccctagatctgattatggatgatacgggtgcttgcagaggcgtaatggcacttgaccttgccactggcacattgcatcgatttagagcgcatcaaacagttttagcaaccggcgggtatggaagagcatacttttcatgtacctcagcacatacttg

SEQ ID NO: 219214 - DNA, 731 bp, Unknown
  Bacterial polypeptide expressing nucleotide sequence isolated from the Sargasso Sea
tccattcagcagaactgatgatggaaaaatctaccaaagaccttttggaggtatgactaaaaattatggtaatggaactgctcaaagaacttgtgcagccgctgatagaactggtcacgctatcttgcatactctttatggtcaagctttgaagcaacaaacagaattttttattgaatattttgcattggatttaattatgaagaacggtgaatgcaaaggtgtaatagcttggaatttaaccgatggtacaatacatagatttagatcacatattacaattattgcaactggagggtatggcaaagtttattactctgcaacatcagctcatacatgcactggagatggaaacgcaatggtgctcagagcaggtttacctttacaagatatggaatttgttcaatttcatccaactggaatatacggcgtaggttgtttaataacagaaggagttagaggtgaaggtggatttttagttaatggcaaaggcgaaaggtttatggaaagatatgcacctaatgcaaaagatttagcatctcgagacgttgttagcagatctatggaaatggaaataaacgaaggaagaggcgcaggaaaaaataaagatcatataaatcttcacttagatcatatagataaaaaagttatagatgagcgacttccaggaatttctgaagctgcaaaaacgtttgctaatgttgatgtaagcaaagagccaattccggttg

SEQ ID NO: 219215 - DNA, 691 bp, Unknown
  Bacterial polypeptide expressing nucleotide sequence isolated from the Sargasso Sea
accaattataaagctgaagttttaacattgaacggtaaagagaccactgtgccaggattaatggctataggagaggcagcctgtgtttctgttcacggagctaatagattaggttcaaactcattaatagatttagtagtttttggaaaatcagctgcaaatagggctgcagagcttataaagcctggaacacctcatgaagaaataccacaaagcgaaacagataaatgtttagatagatttgataaacttcgtaactcatctggagcaacaaaaacttctgaactgagattatctatgcaaaaaactatgcaatctaaatgtgcagtttttagaactgaaaaaacactaaaagaaggaatgggtcaaatcagaaaaccttttgagggaatgtctgatatttcagtttcagataagtctttgctttttaatactgatcttgttgaaactttagaatttgataatcttataagacaagcaatgacaacaatagactcagcttatcataggaaagaaagtagaggagctcacgcaagagaagactacaaaaatagggatgacaagaaatatatgactcatactttagcttggcaaaaaggaaatgacgttaaagttgcctatagacctgttcatgcaaaaactttgacaaatgatgtacaatactttcctccaagagaaagagtatattaat

SEQ ID NO: 219216 - DNA, 961 bp, Unknown
  Bacterial polypeptide expressing nucleotide sequence isolated from the Sargasso Sea
tttgggtgcaggaggatcgggattaagagcagcagttggactaagtgaagctggtttaaaaacggcatgtatatcaaaagtttttccaacaagaagccatacttctgcagcacaaggtggaatttcagctgcattaggaaatatgggcgaagatgattggcgttggcacatgtatgatacggttaagggatctgattggttaggtgatcaagattgtatagagtatttgtgtaaagaggcacctagagctgttttagaacttgaaaaatatggggttccttttagtcgaacaaaagacggtaaaatttaccaaagaccttttggtgggatgacgaaaaattacggtaatgaacctgtacaaagaacttgtgcagctgcggacagaacaggtcacgcaatacttcacactttgtacggacaagccttaaaacataatacagaattttttattgaatactttgcattagatctattgatgaaaaatggagagtgtaaaggtcttattgcttggaatttaaatgatggaacaattcatagatttagagctcatattaccataattgccactggaggatatggaaaaatttattattcagcaacatcagctcacacatgcacaggcgatggtaatggtatgattttaagagctggtctgcctttacaagatatggaatttgtacaatttcacccgactggaatttatggacatggaactttaatatcagaaggagttagaggtgaaggaggatttttagtaaactcaaataatgaaagattcatggaacattatgctccgaaggcaaaagatttagcgtctagagatgtggtaagtagatcaatagcaattgaaataaaagaaggaagaggagttggtaaagataaagaccatgttcatcttcacttggatcatctagatccaaaagttatcgaagaaagactgcctggcatatctgagtcatct

SEQ ID NO: 219217 - DNA, 847 bp, Unknown
  Bacterial polypeptide expressing nucleotide sequence isolated from the Sargasso Sea
tattcttcgacttctgctcatacatgcactggcgatggtaatgctatgatcttaagagctggattaccattgcaagatatggaatttgttcagttccatccaacaggaatttatggtcatggtaccttaatatctgaaggtgttagaggtgaaggaggatacttattaaattctaaaggtgaaagatttatggaacgttatgctccaaaagctaaagaccttgcatccagggatgtagtaagtagatctatagctatagaaataaatgaaggaagaggtgttggaaaagaaaaagatcatgtccatcttcatttagatcatttagatccagaagtaattgaaaaaagacttccaggaatttctgaatcttcacgattatttgcagatgttgatgtaactaaagaaccaataccagttgtgccaacagtccattataatatgggaggtataccaacaaattataaggctgaagttttaacagtaaatggatctgaaaaagtagtaccaggactcatggcaattggagaagcagcatgtgtttctgttcatggagctaatagattaggatcaaattcgttgattgatcttgtagtttttggaagagccgcagcaaaaagagcagcagaattgataaaacctggagctccacacgaggaaatgtcaaattcagaaacagataaaattttagatagatttgaaaagttaagaaatggaaatggagataacagaactgctgatctaagattatctatgcaaaaaactatgcaatcaaaatgtgcagtctttagaactgaaaaaactttaaaagaaggtgttgaagaaattagaaaaccttatgatgggatgg

SEQ ID NO: 219218 - DNA, 1299 bp, Unknown
  Bacterial polypeptide expressing nucleotide sequence isolated from the Sargasso Sea
aatgagcgcatataaaataattgatcatgaatacgatgttgttgttctcggagcaggaggttctggtttaagagcagcagttggtttgtcggaagcaggattaaaaactgcttgcatatctaaagtctttccaacaagaagtcatacatcagcagctcaaggaggtatttcagcggctttaggtaatatgggcgaagatgattggcgatggcacatgtatgatactgtcaaaggatctgattggttaggtgaccaagatgctatagaatacctttgcaaagaagccccaagagcagtcgtggaactagaaagatatggagttcctttcagcagaacagatgatggaaaaatataccaaaggccttttggaggtatgacaaaaaattatggtaatggaacggctcaaagaacttgtgcagctgctgatagaactggccacgctatcttgcatactctttatgggcaagctttgaagcaacaaacagaattttttattgaatattttgcattagatttaattatgaagaatggtgaatgcaaaggtgtgatagcttggaatttgaccgatggcacaatacatagatttagatcacatattacaattattgcaactggtgggtacggcaaagtttattactctgcaacatcagctcatacatgtactggagacggaaacgcgatggtgctcagagcaggtttacctttacaagatatggaatttgtacaatttcatccaaccggaatttatggagttggttgtttgataactgaaggagttaggggagaaggtggatttttagttaatggtaaaggtgaaagatttatggaaagatatgcacctaatgcgaaagatttagcttctagagacgtggtaagcagatcaatggaaatggaaattaacgaagggagaggtgctggaaaaaacaaagatcacatcaatcttcacttagatcatatagataaaaaagtaatcgatgaaagattacctgggatatcagaggcagcgaaaacctttgcaaatgttgacgtcagtaaggagcctattcctgttgtaccaacggttcattataacatggggggaattcctacaaattataaggcagaggtgctcactttgaacggttcagaaaaaactgtgcctgggttaatggctataggtgaagcagcttgcgtttcagttcacggagctaatagattaggatcaaactctttaattgatctggtggtttttggtcgagcagctgcaaaaagagcagcagagttagtgaagcctggaagtcctcatgaagaggtttccag

SEQ ID NO: 219219 - DNA, 1777 bp, Unknown
  Bacterial polypeptide expressing nucleotide sequence isolated from the Sargasso Sea
tatgagttcttacaaaataatagatcatgaatatgatgtagtagttttaggtgctggtggctctggactaagagcagcagtaggattaagtgaagctggattaaaaactgcatgtatttcaaaagtatttcccactagaagtcatacctctgcagctcaaggtggtatttcagcagcacttgggaatatgggagaagatgattggcgatggcatatgtatgatactgttaagggagcagattggttaggtgatcaagatagcattgaatatctgtgtaaagaagcacccaaagcagttattgaactagaaaagtatggtgtcccttttagtagaacggatgatggaaagatttatcaaagaccatttggtggtatgacaaaaaattatggtaatggaattgttcaaagaacctgtgctgcagcagatagaactggtcatgcaatattgcatactttgtatggtcaagctttaaaacataagacagagttttttatagaatattttgcgttagatttattaatgaaagatggagagtgtaaaggtttaatagcatggaatctaaacgatggaacaattcatagatttagagcacattcagttataatcgcaacaggtggttatggaaaagtttattattctgctacctctgcccacacatgtaccggcgatggtaatgcaatggtgcttagagcgggattacctttacaagatatggagtttgttcagtttcacccaacaggaatttatggtcatggcacattaataactgaaggtgctagaggagaaggaggatatcttacgaactctaaaggtgaaagatttatggaaaggtatgcccctaacgctaaagatttagcttctagagatgttgtaagtagatctatgtcaatagaaattaatgagggaagaggtgtaggaaaagatcaagaccacgttcatttaaacttaagtcacttagataaagaaattatagaaagtagattacctggtataactgatgcagcgcgattatttgctaatgtagatgttaccaaagaaccaattccagtagttcctacagttcattacaatatgggtggaataccgacaaattataagggagaggtattaacagtaaatggatcagaaaaaaccgttccaggcttaatggctattggtgaagctgcatgtgtttctgttcatggagcaaacagattaggatctaattcattaattgatcttgtagtatttggaagagctgcagctaaaagagcagcagaattagttacaccaggaatgccacatgaagaaattagtgagtctgaaacacaaaaatgtcttgatagatttgacaaaattagaaacgctgatggtgacattggaactgcagaattaagactatcaatgcaaaaaacaatgcaatctaaatgtgcagtttttagaacagaaaaaactttaaaagagggtgttgaggaaataagaaaaacttatgatggtttagagtccatatcagttaaagataaatcattaatctttaatacagatttggttgaaactttagaatttgacaatttaatcagacaagcagttgtgactgtagactccgcttataatagaaaagaaagtagaggagcacatgcacgagaggattatcctaaaagagatgatgaaaaatttatgcaacatacacttgcttggtgcgatggaaaagaaacaaaaataagttatagagaagttcataaaactactcttacaaatgaagttcaatattttcctccccaagaaagagtttattaa

SEQ ID NO: 219220 - DNA, 1019 bp, Unknown
  Bacterial polypeptide expressing nucleotide sequence isolated from the Sargasso Sea
tttaatttcagaaggtgttagaggagaaggtggttatttagtaaattccaaaggagaaagatttatggaaagatatgctcctaaagccaaagatttagcttcaagagatgtagtaagtagatctatagctattgaaattaatgaaggaagaggagtaggtaaagaacaagaccatgttcacttgcaccttgatcatctagaccccaaagtaatagatgagagacttcctggaatttcagagtcatcaagattatttgcaaatgttgatgtaactaaagagcccattcctgttgtaccaacagtacattataatatgggtggtatacctacaaattataaagcagaggttttaacactaaatggttcagaaaaaactgttcctggtctaatggcaatcggcgaagctgcatgcgtttcagttcatggcgctaatagattaggttctaactctttaattgatttagttgtatttggcagagcagctgcaaaaagagcatcggaactaattaaaccaggaatgaaacatgaagatattgatcaaagtgaaacagataagtctctaaatagatttgataaacttagaaactcagaaggttcaaatcctacctcagaactaaggttatctatgcaaaaaactatgcaatcgaagtgtgcagtttttagaactgaaaaaacattgaaggaaggtgtgaacgaaattagaaaaccttatgaaggaatggactcaatctcagtaaaagacaaatcactaatatttaatactgacttagtagaaactctagaatttgataatttaataagacaagcaataacaactatggattcagcttattatagaaaggaaagtagaggagcacatgcaagagaagactttccttcaagagatgatgaaaagtttatgcaacatactctttcttggtgtgatggaacaaaaacaaaaattgattacagacccgttcataggtcaactttaacaaatgaagttcaatattttcctccacaagaaagaatatattaat

SEQ ID NO: 219221 - DNA, 1040 bp, Unknown
  Bacterial polypeptide expressing nucleotide sequence isolated from the Sargasso Sea
catgagtaaatataaaattatagatcatgaatatgatgtggttgttttaggagcaggtggatctggtcttagagcagcagtaggcttaagtgaagccgggcttaaaactgcatgcatttcaaaagtttttcctacaagaagtcacacatcagctgcacagggaggaatttctgctgcgctaggtaatatgggagaagatgattggagatggcatatgtatgatactgtaaaaggttcagattggctaggagatcaagattgtattgaatatctttgtaaagaagcaccaagagctgtattggaacttgaaaaatatggggtaccttttagcagaactaaagaaggaaagatttatcaaagaccttttggtggaatgacaaaaaattatggtaatgagcctgtccaaagaacttgtgctgcagcagatagaactggtcatgcaatactccatactctttatggccaagcattaaagcataacactgaattttttatcgaatattttgcactagatttattaatgaaaaatggacaatgcaaaggattgattgcatggaatttgaatgatggaactattcatagattcagatcgcatataacaataattgcgacaggaggatatggaaaggtttactattcagctacttctgcacacacatgcacaggagatggtaatgcaatggtattacgagcaggtttgcctctgcaggatatggaatttgttcaatttcatccaacaggaatttatggtcatggaacactaatatcagaaggagtaagaggagaaggtggatatttattaaattcaaaaggtgaaagattcatggaaagatacgctcctaaagctaaagatttagcatccagggatgttgtaagtaggtctattgctgttgaaataaatgaaggaagaggagtaggtaaagaaaaagatcatgttcatcttcatttaaaccatcttgatccaaaagtaatagaagaaaggttgcctggtatatcggagtcatctcgtttatttgctaatgtggatgtaccaaagaacc

SEQ ID NO: 219222 - DNA, 1534 bp, Unknown
  Bacterial polypeptide expressing nucleotide sequence isolated from the Sargasso Sea
gttgggcgatcaagatgctatcgaatatttatgtaaagaggcaccgaaggcagtaatagagttagaaagttatggggttccttttagcaggacaaaagatggaaaaatttaccaaagagcttttggaggaatgactaaagattatggcaatgaatctgttcaaagaacttgtgcagcagcagacagaactggccatgcaatacttcacacattgtacggacaagctttgaaacataatactgaattttttatagaatatcttgcattagatttattgatgaaaaatggagaatgcaaaggtttgattgcttggaatttaaacgatggaacaattcatagatttagatctcatataactatattggccactggtgggtatggtaaaatttattactcagcaacttctgcacatacctgtacgggagacggaaatggaatggttttacgtgcaggattaccactacaagatatggaatttgttcaatttcatcctacaggaatttatggaaatggtactttaatatctgaaggtgttagaggagaaggtggttttcttttaaattctaaaggagaaagattcatggaaaaatacgctcctaaagctaaagatttagcatcaagggatgtagttagcaggtcaattgctattgaaattaatgagggccgaggagtgggaaaaaataaggatcatgtaaatctacacttagaccatattgatcctaaaattatagaaaaaagattgccaggtattgctgagtcggcaaagactttttgcgaagtggatgtaacaaaagaaccaattccagttgttcctaccgttcattataatatgggtggaattccaacaaattataaagctgaagtattaacttcaaacggtaaagacacaactgttcaaggacttatggctattggagaagcagcttgtgtttcagttcatggagcaaatagattaggatcaaattctttgattgatttagtagtattcggtaaatctgcagcaactagagccgctgaaattataaagccaggatcacctcatgaagaacttgctcagaccgaaacagataaatgtttagatcgttttgataaattgcgtaattcaaatggttcttcaaaaacatctgaattaagattatcgatgcaaaaaactatgcagtccaaatgtgcagtttttagaacagaaaaaactttaaaagaaggaatgagtgagattaggaaaccttttgaaggaatgaaagatatttcagttaaagacaaatcattattattcaatactgatttggttgaaacgctggagtttgacaaccttattagacaagcaatgactacgatagattctgcttaccatagaaaagaaagccgaggagctcatgctagagaagactttcaaaaaagagatgacaaaagctatatgacacacacattggcttggcaaaaaggaaatgaagttaagattgcttatagaccagttcatgctaaaactttaacaaacgatgtgcaatattttcctccaaaagaaagagtatattga

SEQ ID NO: 219223 - DNA, 1164 bp, Unknown
  Bacterial polypeptide expressing nucleotide sequence isolated from the Sargasso Sea
gtggatatgggaaagtttattattcagctacatctgcgcacacttgtactggagatggaaatgcaatggtattaagagctggattgcctcttcaggacatggagtttgttcaatttcatcctacaggaatttacggtcatggtacattgataacagaaggtgcccgaggagagggtggttatcttaccaattctaaaggtgaaagatttatggaaagatatgctccaaatgcaaaagatttagcatcaagagatgttgttagtagatcaatgtctattgaaataaatgaaggaagaggtgttggtaaagatcaagatcatgttcatttgaacttaagtcatttagataaagatattattgaaagtagacttccaggaattactgatgctgcaagattatttgcaaatgtagatgtaactaaagagccaatacccgttgtaccaacggttcattataatatgggaggaattccaacaaattataaagcagaagttttaactgttaatggttcagaaaaaactgttccaggtctgatggctataggagaagcagcatgcgtttcagttcatggcgcaaatagacttggttctaattcactaattgatttagtagtatttggaagagcagcagcaaagagagctgcagaattagttaaacctggaactcctcatgaagagatgcctgagtctgagacgcaaaaatgtttagatagatttgataagttaagaaatgcaaatggaaataatagtactgcagaacttagactttcaatgcaaaaaacaatgcaatctaaatgtgcagtatttagaacagaaaagaatctaaaagaaggagttgatgatattagaaaagcttatgatggaatggactcaatttctgtcaaagatagatctttagtttttaacactgatttagtagaaactttagaatttgataatctaattagacaggcagtaacaacagttgaatctgcatatcacagaaaagaaagcagaggagctcatgcaagagatgattatccaaaaagaaatgacgaaaaatttatgcaacacactcttgcttggtgtgatggaaaaaatacaaaaattagctacagaccagttcacaagtcaactttgaccaatgatgttcaatatttcccaccacaagaacgggtatactaat

SEQ ID NO: 219224 - DNA, 786 bp, Unknown
  Bacterial polypeptide expressing nucleotide sequence isolated from the Sargasso Sea
tatcagaggctgcaaaaacatttgcaaatgttgatgtaaataaacaaccaattccagttgtgcctactgttcattataatatgggtggtataccaacaaattataaggcagaagtattaactttaaatggttcagaaaaaacagttcctggattaatggcaataggtgaagcagcttgcgtatcagtccacggagccaacagattaggatcaaattctctaattgatcttgtagtatttggaagagctgctgctaaaagagcagcagaacttgtgaaaccaggcatggctcacgaagaagtttctagttctgaaacggataaatgtttgagtagatttgataaaatcagaaactctacgggctcaacaaagacttcagaattaagattaaatatgcaaaaaacaatgcaatcaaaatgtgctgtattcagaactgagaaaacactcaaagagggtgtagatcaaattagaaagccttatgaaggaatagaagatatttctgtaaaagataaatctcttctctttaatacagatttagttgagactttggagtttgataacctgattagacaagcgcttacaactatggactcagcttatagcagaaaagagagtagaggcgctcatgccagagaagattatagcaaaagagatgataaaaactttatgaagcacactctagcctggcaaaatggtaaaaaagtagaaataaaatatagagatgtacattcaagaactcttacaaacgatgtgcaatactttccgcctaaggagagagtttattaag

SEQ ID NO: 219225 - DNA, 1345 bp, Unknown
  Bacterial polypeptide expressing nucleotide sequence isolated from the Sargasso Sea
gcttcacacacttatcaaccaatccatatctcatagtgctgaattcttcatcgaacattttgtaatcgatttaattatgaataagaaaaaagaatgtgtgggagttttgaccataaaccttcacgacggtaaatattatcttttttcatctaaaatggtgattcttgcaactggtggctatggacgggcatacttttcatgtacttcagcacatacatgcactggagatggaggaggaatggttttaagggctgatttacctcttcaagacatggagtttacccaatttcatcccacgggaatatatggtgttggagttttaattactgagggtgctaggggtgaaggaggatatttaacaaattcaaaaggtgagagatttatggagcgctatgcaccaaacgctaaagatctagctagtagagatgtagtttcaagatcaatgaccaatgaaattatagaaggaaggggatgtggccaaaaaaaagatcatatccatttgaatttaagtcatttaaaccacaagatacttgaagaaaaattacctggtataacagaatctgcaaaaatattcgctggtgttgatgtgagaaaagaaccaataccagtgcaaccaactgttcattataatatgggtggcattccgacaaacataaatggtgaagttataaaaacaaatactaaaggtgaagaacaaattgttcctggacttatgtcagtaggtgaagccgcatgtgtttctgtccatggggctaatagacttggttcaaactctttacttgacttagtagtttttggtaaatcagcagcaacgcagtgcgcaaaaataatcaaatcaagtaaaaaaaactataaaatattgaaagaagattatgaaaagataattctgaggttcgagaaaataaaaaattccaatggaaaaagttctatttctaaaattagagctgaaatgcagcaaacaatgcaaaactactgcccagtttatagatcagaaaaaaaaatgagggaagggaaaaaaattattcaatctcttttaaaaaaatttaatgatataaaaataaatgataaaacaaccgtgtggaacacagaaataattgaagcacttgagttacacaatcttcttctacaatctctcgccagtatagaatgcgccttgaatagaaaagaaagtagaggagcacactctagagtagactttaaaaatagaaatgacaaaaaatggctcaaacatagcttggtttgggtagattctaatgaaaaatccaaaattggttacaggcgagtaaatctagaaaccaaatcaaaagaaataaaaactattgaacctaaagcaagagtttattaa

SEQ ID NO: 219226 - DNA, 1092 bp, Unknown
  Bacterial polypeptide expressing nucleotide sequence isolated from the Sargasso Sea
agaccctttggtggaatgactaaaaattatggtaacgaaacagttcaaagaacctgtgcagctgccgataggacaggccatgcaatacttcatactttgtacggacaagcattaaaacataatacagaattttttattgaatattttgctcttgatttgctaatgaaaaatggagaatgtaaaggtttaatagcttggaatttaaatgacggaacaatacacagatttagatctcatataacaattattgccaccggtggttatggtaaagtttattattctgcaacctcagcacatacatgtactggtgacggaaatgcaatggttttaagagcaggtttacctttacaggatatggaatttgttcaatttcaccctacaggaatatatggtcacggaactcttatatctgagggtgttcgaggcgaaggtgggtatttattaaattcaaaaggtgagagatttatggagaggtacgctcctaaggcaaaagatttagcttcacgagatgtagttagcagatcaatagcaatagagataaatgaaggaagaggtgttggtaaggaaaaagatcatgttcatcttcatttagatcatttagatccaaaagtaattgaagatagactgcccggtatatctgagtcatcaaaattgtttgcagatgttgatgttacaaaagaacctatacctgtggtaccaacggttcattacaatatgggaggaataccaactaattacaaagctgaagttttaagtgctagtggatcaaaccaaacagtcccaggattaatggctataggcgaagccgcgtgtgtttcagtgcatggtgctaataggcttgggtcaaattcattgatagaccttgttgtctttggaagggcagcagctaaaagagcatctgaactggtaaagccaggaactcctcatgaagttatatctcagtcagaaaccgacaagtgcctaaaaagatttgataaattgagaaactcttcaggaaaaaacacaacagctgaattaagaatttcaatgcaaaaaactatgcaatcaaaatgtgctgtatttagaactgaaaaaacattgagcgagggagta

SEQ ID NO: 219227 - DNA, 1177 bp, Unknown
  Bacterial polypeptide expressing nucleotide sequence isolated from the Sargasso Sea
atttatcaacgggcttttggaggaatgaccaaagattatggaaatgaatctgtccaaagaacttgtgcagctgcagatagaactggtcatgcgatacttcacacattgtatggtcaggctttgaaacataatactgaattttttatagaataccttgcattagatttgttgatgaaaaatggagaatgcaaagggttgattgcttggaatttaaatgatggaacaattcatagatttagatcacacataactatattggccactggtggttatggtaaagtttattacacagcaacttccgcgcatacttgtacaggagatggtaatggaatgattttacgtgcaggattaccacttcaagatatggagtttgttcaatttcatcctacaggaatttatggaaatggcactttaatatctgaaggcgttaggggagaaggtggctttcttttaaattctaaaggagaaagattcatggaaaaatatgctcctaaagctaaagatttagcatcaagggatgttgtcagcaggtctattgctattgaaattaatgagggtcgaggtgtaggaaaaaataaagatcatgtaaatctacacttagatcatattgatccaaatattatagaaaaaagattaccgggtattgctgagtcggcaaagactttttgtgaagtcgatgtaacaaaagatccaataccagttgttccgactgttcattataacatgggtggaattccaacaaactataaggctgaagtattaacttcaaatggaaaagacactgttgtaccaggacttatggctattggtgaagcagcatgtgtttctgttcacggagcaaatagattgggatcaaattccttaattgatttagtagtatttggtaaatctgcagcaactagagctgctgaaattataaaaccaggatcgcctcatgaagagttatctcaaagcgaaacagataaatgtttagatcgttttgataaattacgtaattccaatggttctacaaaaacatcagagttaagattattgatgcaaaaaactatgcaatctaaatgtgcagtttttagaactgaaaaaactttaaaagaaggaatgaacgagatcagaaaaccttttgagggcatggaaaacatttcagttaaagataaatcattactatttaatactgatt

SEQ ID NO: 219228 - DNA, 774 bp, Unknown
  Bacterial polypeptide expressing nucleotide sequence isolated from the Sargasso Sea
ttgctggagttgacgtgacaaaggctccaattcccgttataccaacagttcactataatatgggaggtattcctacaaattatttaggggaagtcttaaaaccaaaagatattaatgatgaaacagttgtcccaggattaatggcaattggtgaagcttcgtgtgtatcggtacatggtgcaaatagattaggatccaactctcttttagatttaatagtttttggaagagctgccgcaaaacaagcttcaaaattagtaaaacctggcgcgaagcatatggatgaaaataaaactgcagttgataaaatagtgggacgtttggataaaattagatactcgtcaggaaaaaatttaccatctaaactaagactgagacttcaaaaagaaatgcaaagaagtgttgctgtttttagaactgagaagactttagacgaaggaagaaaaatcatacacaatatttataaagatttttccgatatcaatctaagtgataattcactaaaatggaatacagaacttctagaaacattagaattagagaatttacttacgcaaggtatagcttctgtagaatcagcatataatagaaaagaatctagaggagctcatgctagagatgattatccggaaaggaatgataaagattggatgaagcacacaattgcatcaatagatgatgatggtatagtagatataggttatagaaaagttgttttaacaactttaacagatgaagtcgaagctgttccacctaagaagagagtttattaat

SEQ ID NO: 219229 - DNA, 888 bp, Unknown
  Bacterial polypeptide expressing nucleotide sequence isolated from the Sargasso Sea
tagaaataaatgaaggtagaggtataggaaaagaacaagatcatgttcatcttcatatagatcatttagatcctaaagttatagatgaaagattaccaggtatttctgaagcttctaaattatttgctaacgttgatgtaactaaggacccaataccagttgttccaactgtgcattataacatgggaggaataccaacaaattataaggctgaagttcttacagttaatggatcggagaaaactgttcctggtttaatggcaattggagaagctgcatgtgtttctgttcacggtgctaatagattaggttcaaactcattaattgatcttgtagtttttggaagagcagctgcaaaaagagcagcagagcttgtaaaaccaggaatgaaacatgatgagatcgacaaaagtgagaatgatagatgtttagatagatttgacaaacttagaaattctgaaggttctaaccccacatctgaacttagactttcaatgcaaaaaacgatgcagtctaaatgtgctgtatttagaactgaaaagacattaaaggaaggtgttgatgaaataagaaaaccttttgagggtatggactcattatccgttaaagataaatcattaatatttaatacagatttagtcgaaactttagaattcgataacttaattagacaagcgattactactatggactcagcttatcacagaaaagaaagcagaggagcacatgcaagggaagactttccgaaaagagatgacgaaaattatatgcaacatactctctcatggtgtagtggctctaaaacaaaaataaattatagaccagttcatagatcaacactaacaaatgatgtacaatattttcctcctcaggaaagagtatattaat

SEQ ID NO: 219230 - DNA, 1774 bp, Unknown
  Bacterial polypeptide expressing nucleotide sequence isolated from the Sargasso Sea
aatgagctcatacaaaataattgatcacgaatatgatgttgtagtccttggggccggaggatctggtctaagagctgcagtaggactgagtgaagctggattaaaaacagcctgcatatcaaaagtatttccaacaagaagccatacttctgctgcacaaggaggtatttctgctgcattaggaaacatgggagaggatgattggagatggcatatgtatgatacagttaaagggtctgattggcttggagatcaagactcaatagaatatttatgtaaagaggcacctaaagcagttctcgagttagaacaatatggagttccatttagtaggacagaggatggtaaaatttatcaaagaccatttggagggatgactaaaaattatggaaatggcactgtacaaagaacatgtgctgcagcagataggactggacatgcaatattacatacattgtacgggcaagcccttaaacataatacagaattttttattgaatattttgcacttgatttactaatgaaagatggagagtgtaaaggactaatcgcctggaatttaaatgatggaactatacaccgtttcagatcacatattacaatcatagctacaggtggatatggaaaagtttattattcagcaacttcagcacacacatgtacaggggatggaaatgctatggttttaagagcaggtttaccattacaagacatggaatttgtacaatttcatccaacaggtatttatggacatggaactttaatttctgagggagttagaggagaaggtggctacttattaaattcaaagggtgaaagatttatggaaagatatgcgccaaaagcaaaagacttagcttcaagagatgttgtaagtagatctattgctgtagaaataaatgaaggaagaggtgttggaaatgaaaaagatcatgttcatctccatttagatcacttagatccaaaagtaattgaagagaggctacctggaatatcagagtcatcaagacttttcgcagatgttgatgttacgaaagagccaattccagttgtaccaacagtgcattacaacatgggaggaattccaactaactataaagctgaagtcttatcagctaacggagcagatacagttcctgggttaatggctattggagaggcagcttgtgtttctgtacatggggctaataggttaggatctaattctttaatagatctggttgtttttggaagagctgcagctaaaagagcagcagaaattataaaaccaggaactcctcatgaagaaatttctcaatcagaaacagataaatgtcttgaaagatttgataaattaagaaattcggatggatcaaacaatacagcagatttaagaatatctatgcaaaaaacgatgcaatctaagtgtgcggtttttagaactgaaaaaaccttaagcgagggagtaaatgaaataagaaaaccatttgagggtatggagtccattaaagtgaaagataaatcattaatcttcaataccgatttagtagaaacgttagaatttgataacttaataagacaagcaataacaactatggactctgcttattacagaaaagaaagtagaggagctcacgccagggaagattttccaaatagagacgatgataaatttatgcaacatacgttatcttggtgcaatggagataaaaccgaaataaagtatagaccagtgacaagatcaactttaactaatgatgttcaatattttcctccccaagaaagagtttactaa

SEQ ID NO: 219231 - DNA, 1387 bp, Unknown
  Bacterial polypeptide expressing nucleotide sequence isolated from the Sargasso Sea
tatgagttcatataaaattatagaacatgaatacgatgtggttgttcttggagccggaggtgcaggcttgagagctgcggttggtcttagtgaggctggattaaaaactgcatgtatatcaaaagtttttcctactagaagccatacttcagcagctcaaggaggtatttcagctgctcttggaaatatgggagaagatgattggagatggcatatgtatgatactgtcaaaggatctgattggctaggtgatcaagacagcatagaatatttgtgcaaagaggctccgcgagcagtcttagaattagaaaggtatggagttccatttagccgtactgaggatggaaaaatatatcaaagaccttttggtggaatgactaaaaattatggcaatgaaactgtccaaagaacttgtgcagcagcagatagaactggtcatgctattttacacacaatgtatggccaagcattaaagcataatacagaattttttattgaatattttgctttagatttattaatgaaagatggagagtgcaaaggtttaatagcttggaatttaaatgatggaactattcatagattcagatctcatataacaattatagcaactggtggatatggaaaaacatattactcatctacatctgctcatacttgcactggtgatggtaatgcaatggtattaagagctggtttacctttgcaggatatggaatttgtacaatttcaccccacaggaatatatggacatggaactttaatatctgaaggagttcgaggtgaaggaggatatttattgaattctaaaggtgaaagatttatggaaagatatgctccaaaagctaaagatctcgcatctagagatgtggtaagtagatcaatagcagttgaaattaatgagggaagaggagttgggaaagaaaaagatcatgttcatcttcatttagatcatttagatccagaagtaattgagaaaagacttccaggaatttcagaatcttcaagattatttgcagatgttgacgttacaaaggaaccaatcccagttgttcctacagttcattataatatgggtggaattccaacaaattataaagctgaagttttaactgtaaatggttcagaaaaaattgtacctggacttatggcaataggtgaagcagcatgtgtttcagtccatggagctaatagattaggatcaaattcattaattgatttagttgtttttggaagagctgcagcaaaaagagctgcagaactagtgaaaccaggaactccacatgaggaaatctcaaattcagagactgataaatgcttagataggtttgaaaaattaagaaatggaaatggaaccaatagaactgctgatctaagattggctatg

SEQ ID NO: 219232 - DNA, 1148 bp, Unknown
  Bacterial polypeptide expressing nucleotide sequence isolated from the Sargasso Sea
ttattacactgcaacttctgcacatacttgtacgggagacggtaatggaatggttttacgtgcaggattacctcttcaagacatggaatttgttcagtttcatcccacaggaatatatggggttggcaccttgatatctgaaggagttcgaggagaaggtggttttcttctaaattctaaaggagaaagatttatggaaagatatgctcctaaggctaaagacctagcctctagagatgttgttagtaggtcaattgcaattgaggttaatgaaggaagaggtgtaggaaaaaataaagatcatgtaaacttgcatttagatcatattgatccgaaaattatagaaaaaaggttacctggtattgcagagtccgcaaagactttttgtgaagttgatgtcacgaaagaaccaattccagttgttcctacagttcactataatatgggcggaattcctacaaactataaagctgaagtattaacttcaaatggaaaagatactactgttccaggacttatggctataggcgaagccgcatgcgtttccgttcatggagcaaatagattaggatcaaattctttaattgatctagtagtatttggtaaatctgcagcaactagagcagccgaaattgttaaaccaggaacccctcatgaagaactttctcaaagtgagaccgataagtgtttggatcgttttgataaactacgtaactctagtgggtctacaaaaacgtcagaacttaggttacaaatgcaaaaaacaatgcaatcaaaatgcgcggtttttagaacagaaaaaactttgaaagaagggatgaacgagattagaaaaccttttgaaggtatggaaaatatttctgttaaggataaatccttattatttaatactgatttagtggagactttagagtttgacaatcttataagacaggcgatgacaaccatagattctgcttaccatagaaaagaaagtcgtggagctcacgctagagaagattttaaaaagagagatgacaaaacttatatgtctcacacactagcttggcaaaaaggaaatgaagttaaagtaggctatagaccagttcatgctaacactttaacaaatgatgttcaatatttccctcctaaagaaagagtttattaat

SEQ ID NO: 219233 - DNA, 1548 bp, Unknown
  Bacterial polypeptide expressing nucleotide sequence isolated from the Sargasso Sea
tctgggagctggtggctcaggcttaagagcagctgtaggtttatctgaagcaggattgaaaacagcatgtatttcaaaagtttttcctactagaagccatacttcagcagctcaaggcgggatatcagcagcgcttggaaatatgggtgaagatgattggagatggcacatgtatgatactgtcaaaggctccgactggctgggagatcaagatgcaattgaatatctttgtaaagaggccccaaaagcagttaaagaattagacaggtatggagttccatttagtagaactaaagatggtaaaatatatcaaagaccttttggagggatgactaaaaactatggcaatggaacagttcaaagaacttgtgcagctgcagatagaacaggacatgctattcttcatactttatatgggcaagctttaaaacataatacagaattttttatcgaatattttgctttagatttgataatgaaaaatggagaatgtaggggattgatagcttggaatttaaatgatggaacaattcacagatttaaatctcacataacaatcatagctacaggtggttacggtaaaatttattattcagctacatcagcgcacacttgcactggtgatggtaatggaatggttttaagagctggcctaccattacaagatatggaatttgttcaatttcatccaactggaatatacggtgtaggatgcttaatatcagagggagttagaggtgaaggaggttttctgttaaattctaaaggagaaaggtttatggagagatacgctccaacggctaaagatcttgcatcaagagatgtagttagcagatctatagctatagaaataaacgaaggtagaggagtgggcaaagaaaaagatcatgtccatcttcacttagaccacctagatccaaaagtaattgatgacagactccctggtatagctgagtctgcaaaaactttttcaggagttgatgttactaaagatcccataccggtagtaccaactgttcattataatatgggagggataccgacaaattataaagctgaggttttaactttaaatggtactgaaaagactgttcctggattaatggctataggagaagctgcctgtgtttcagttcatggagcaaatagattggggtcgaactcattaatagacttagtagtttttggaaaagcagcagcaaaaagagctgcagaattagttaaacctaatacgcctcacgatatttcccctaaaagtgaggcagacaaatgtttagatagatttgataaaattagaaactcaaaaggtgaaacgtctactgctaaattaagattatcaatgcaaaaaacaatgcaaagtaagtgcgcagtatttagaactgaaaaaaccttaaaacagggggttgatgaaataagaaaaccttttgaagggcttgaagatatatctgtaaaagataaatctcttttattcaatacagatcttgtagagtctctagaatttgataatttaataaggcaggctatgacaactatggactctgcctatca

SEQ ID NO: 219234 - DNA, 1405 bp, Unknown
  Bacterial polypeptide expressing nucleotide sequence isolated from the Sargasso Sea
aaacaatttgatgtagtaatcgttggcggcggcggctctggtttaagagcatctctagaaatatcaaagtcaggcttaaatgttgctgttatatcaaaagtttttcctacaaggtcacatacagtagctgctcaaggaggaattacttgtgcaattgcaagtgctgatccaaatgatgattggagatggcatatgtttgatactatcaaaggatctgattacataggtgatcaggatgcaattgaatatatgtgttctgagggtcctgaaactgtatttgagcttgagcatatgggcttgccattttcaagatttgagaatggaagaatatatcaaagaccatttggcggccagtcaaaagaatttggagaaggaggtcaagcagcaagaacatgtgctgcagcagatagaacaggacatgctcttttacatactctttatcaagcaaacctaaaagcaggaacaaattttttaaatgaatggtttgcagcagacataataaaaaatgattctggagtagtttctggtatcagttgttttgatatggaaacaggagaaatatcagtaataaaatgcaacgcaattgttttagctactggaggtgcagggcaagtatatgaacaaaataccacttctttgatctgtacgggagatggtctaggaatggttttaaggcaagatttaccattacaagacatggagatgtggcaatttcacccaaccggtctttacggtaatggatcattgatgactgaaggatgtagaggcgaaggtggatatttaattaattctgaaggaaaaagatttatgcctgattatgctcctaaagcaaaagacttagcatcaagagacgttgtttcaagatgtatagtgcaagaaattttagcaggcagaggttgtggtgaaaaaaaggatcatgtactgctaaagatcgatcatctaggcgcagaagctataacaaaaaaactccctgaaataagagagatatcaatgacttttgcaaatgttgatcctatagaaaatccaataccagttgttccaacttgtcactacatgatgggaggaataccaacaaatattaatggccaagtaattacacaagataatgctggaaatgattcagttgtaaaaggtctttattcgattggtgaagcagcaaatgtttcagtgcatggagctaataggcttggaggcaactctttattagatttagtagttttcggtagagcagcaggcaaacatataaatgaagaattatcgaaccaatcttctcctgagatatcaaatacaaacattgaagaatctctcgaaactttaatccgaattcaagagacagtaaaaggtgaaagcgtctttcaattgagatcagagatgcagagtattatgcagaattactttggagttt

SEQ ID NO: 219235 - DNA, 1051 bp, Unknown
  Bacterial polypeptide expressing nucleotide sequence isolated from the Sargasso Sea
atgagctcatataaaatagtagatcatgaatacgatgttgtcgttcttggtgctggaggatctggtttaagagcagcagtgggattgagtgaagcaggattaaagactgcttgtgtgtccaaggtatttccaacaagaagtcatacttcagctgctcaaggaggaatatcagcagctttaggaaacatgggtgaggatgactggagatggcacatgtatgatacagtaaaaggagcagactggttaggcgaccaagattgtatagaatatttgtgtaaggaagctcctagagcagttttagaattagaaaagtatggagtgccttttagtagaactgaggatggaaaaatttaccaaagaccatttggtgggatgacaaaaaattatggaaatggaactgtccaaagaacttgtgctgcagctgatagaactggtcatgcaatattacacactttgtatggacaagcgttaaaacataatactgaattttttattgaatatttcgcattagaccttttaatgaaagatggcgagtgtaaaggacttatagcttggaatttaaatgatggaactattcacagatttagatcacacataacaattatagcaacaggtggatatggtaaagtttattactccgctacatctgctcacacatgtacaggagatggaaatgctatggttttaagagctggtttgcctttacaggatatggaatttgttcaatttcacccaacaggaatttatggtcatggtactttgatatctgaaggtgtcagaggtgaaggtggatacttagtaaattcaaatggagaaagatttatggaaagatacgctccgaaggcaaaagatcttgcttcaagagatgtagttagtagatcaatagctgttgaaatcaatgagggaagaggtgtaggaaaagagaaagatcatgtacatcttcatttagatcacttggatcccaatgtcatagaggaaaggctacctggaatatctgagtcctctaggttatttgctaatgtggatgtaacaaaagaaccaattccagttg

SEQ ID NO: 219236 - DNA, 1777 bp, Unknown
  Bacterial polypeptide expressing nucleotide sequence isolated from the Sargasso Sea
atgagttcatacaatattatagatcatgaatatgacgtagtagtcttgggtgctggtggatcaggtctaagggctgccgtcggcttgagtgaagcaggattaaaaactgcttgtatctctaaagtatttccgactagaagccatacttctgcagcgcagggtgggatttcagctgcacttggaaacatgggtgaagatgactggagatggcacatgtatgatactgttaaaggggctgattggttaggagatcaagacagcattgagtatctatgtaaagaggcaccaaaagcagttttagaattagaaaaatatggagttccatttagtcgaacagatgagggaaaaatctatcaaagaccattcggaggtatgacaaaaaattatggaaatggaatagtccaaagaacttgcgcggcagcagatagaactggacatgcaatattacacactctttatggacaagctttaaaacataacacagaattttttatagaatattttgcattagatttattaatgaaagatggagagtgtaaaggattaatagcctggaatttaaacgacggaacaattcatcgatttagagctcatacagttattatagcaacaggtggttatggaaaagtttattattcagcaacttctgcgcatacttgtacaggagatggaaatgcaatggtattgagagcaggattgccgttacaagatatggagtttgttcaatttcacccaacaggtatttatggacacggaaccttaatttctgaaggtgtcagaggagagggaggatatctagtaaactctaaaggcgaaagatttatggaaagatacgctccaaatgctaaagatttagcatcaagagatgttgtgagcagatcaatgtctatagaaattaatgaaggaagaggtgtagggaaagatcaggaccatgttcacttacatttaagtcatttagacaaaagtgtaatcgaaaatcgacttccaggtattactgaagcagcaaggttatttgcaaatgttgatgtaactaaagaaccaatcccagttgttcctactgtgcattataatatgggtggaattccaaccaattataaagcggaggttttaaccgtaaatggatcagaaaaaacagtacctggattgatggcaattggagaagcagcatgcgtgtcagttcatggagctaatagacttgggtcaaactctttaattgatttagttgtttttggaagagcggctgcaaaaagagcagctgagctagttaaaccaggagcgcctcatgaagaaatttctgagacagaaacacagaaatgtctagacagatttgataaattaagaaatgcgcagggtgataacagtactgcagaattaagactagcaatgcaaaaaacaatgcaatcaaaatgtgcagtatttagaacagaaaaaaatttagaagagggtgttaacgaaattagaaaaacctatgatggtatagactcaatttcagttaaagacagatctttagtttttaacacagatttagtagaaactttagaatttgataatttaatcagacaggcagtaactacagtagactctgcatatcatagaaaagaaagtagaggagcgcatgcaagagaggattaccctaacagagatgataaaaaatttatgcagcatactcttgcttggtgcgatggaaaagatactaaaataacatacagaccagttcataattcaacattgactaatgaagttcaatatttccctcctcaagaaagagtttattaat

SEQ ID NO: 219237 - DNA, 1336 bp, Unknown
  Bacterial polypeptide expressing nucleotide sequence isolated from the Sargasso Sea
atgaattcttacaaaataattgatcatgaatatgatgttgtagttttaggagctggaggatcaggtttaagagccgcagtaggtttaagtgaagcaggattaaaaactgcttgtatatcaaaagtatttccaacaagaagtcatacttcagctgcccaaggaggtatctccgcagcgctgggcaatatgggggaagatgattggcgatggcatatgtatgatactgtaaaaggagctgactggctaggagaccaagatagcatagaatatctttgtaaagaagcgcccaaagcagtcattgaattggaaaaatatggtgttccttttagtagaacagaagatggaaaaatttatcaaagaccatttggtggtatgacaaaaaactatggaaatggaattgttcaaagaacttgtgcggctgcagatagaacaggtcatgcaattttacacactttatatggacaagccttaaaacataatacagaattttttatagaatattttgcattagacttaattatgaaaaatggtgaatgcaaaggactaatagcttggaatttaaatgacggtacaatacaccgatttaaatcacacataactataatcgctactggcggttacggaaaaatatattattcggcaacatctgctcacacatgtacaggcgatggaaatggaatggttttacgtgcaggtttaccattacaagatatggaatttgtacaatttcatccaacaggaatttatggtgttggatgtctgatatcagagggtgtcagaggagaagggggttttcttttaaattctaaaggtgaaagatttatggaaagatatgctcccagtgcaaaagaccttgcctcgagagatgtagtaagtagatccatagcaattgaaattaatgaaggtaggggcgtaggaaaagaaaaggatcacgttcatctccatttggaccatttagatccaaaagtaatcgatgataggctacctggtatagccgagtcagcaaaaactttttcaggtgttgatgtaactaaagagccaataccagttgtaccaacagttcattataatatgggtggaattcccacaaactataaagcagaagttttgactttaaatggttcagagaaaactgttcctggacttatggcaataggcgaagcagcttgtgtttctgttcatggcgcaaatagattaggatctaattcattaatagatttagtagtttttggtaaagcagcagccaagagagccgctgaactagtgaaaccaaatactccccatgaaaattcacctaaaagtgaacttgataagtgtttagatagattcgatagaa

SEQ ID NO: 219238 - DNA, 1369 bp, Unknown
  Bacterial polypeptide expressing nucleotide sequence isolated from the Sargasso Sea
aagccacacttctgcagctcaaggaggtatttctgcagcactaggaaatatgggtgaagatgattggcgttggcatatgtatgatactgtaaaaggttcagactggctaggagatcaagatagcattgaatatttgtgcaaagaagcaccaagagcggttttagaattagaaaaatatggtgttccttttagccgaactgaggatggaaaaatttaccaaagaccttttgggggtatgacaaaaaattatggaaatgaaactgttcaaagaacatgtgcagcagcggatagaactggtcacgcaatacttcatactttatatggtcaagctttaaaacataatacagaattttttattgaatattttgcattagatttgttaatgaaaaatggagaatgcaaaggattaattgcatggaatttaaatgatggaactattcatagatttagatctcatattacaatcatcgcaactggaggatatggaaaagtttattattcagcaacatctgctcatacttgcacaggagatgggaacgcaatggtattaagagcaggactgccattacaagatatggaatttgttcagtttcatcccacaggaatctatggacatggaactttaatatcagaaggagttagaggtgaaggtggttatttagtaaattcaaaagctgaaagatttatggaacgttatgcaccaaaagctaaagatcttgcttcaagagatgtagtaagtagatctatagcaattgaaattaatgagggaagaggagttggaaaagaaaaagatcatgtttttttacatttagatcatttagatcctgaagttatagaaaaaagacttcctggaatttcagagtcatcaaaactatttgcaaatgttgatgtaacaaaagaaccaataccggttgtaccgactgttcattataatatgggaggaataccaactaattataaagctgaggttcttacagtaaatggttctgaaaaagtagtaccagggttaatggcaattggcgaagcagcatgtgtttcagttcatggagctaatcgacttggatctaattccttaattgatctcgttgtttttggaagagctgcagcagcaagagcttcaagcattgttaaacctggaactcctcatgaagaaatttcacaatcagaaacagaaaaatgtcttcaaagatttgataaattaagaaatggaaatggaacaaatacaactgccgagcttagactttctatgcaaaaaaccatgcaatcaaaatgtgcagtatttagaaatgagaaaactttgaaagaaggaatagaggaaattagaaaaccttataaaggaatggaaaacatatctgtaaaagataaatca

SEQ ID NO: 219239 - DNA, 1012 bp, Unknown
  Bacterial polypeptide expressing nucleotide sequence isolated from the Sargasso Sea
tatgaaatcttataaaattattgatcatacttatgatgttgtagttttaggagctggaggctcaggtcttagagcggcagttggactgagtgaagctggattaaaaaccgcttgtatttcaaaagtatttccgaccagaagccatacttcagctgcacaaggaggaatttctgcagcattaggaaatatgggggaagatgattggcgttggcatatgtatgacactgttaaaggatcagactggttaggagatcaggactcaatagaatatttgtgcaaagaagcaccaagagcagtacttgaattagagcaatatggtgtaccttttagtaggacagaagatggaaaaatttatcaacgaccttttggaggaatgacaaaaaattatggaaatggtaccgttcagagaacttgtgcagcagcagatagaactggacatgcaattcttcatacgctctacggtcaagcactaaaacataataccgagtttttcattgaatattttgctttagatcttttaatgaaagatggtcaatgcaaaggattaattgcatggaatttaaatgatggaactctacatcgttttaaatcacatattacaattattgctacaggtggatatggaaaagtttattattcagctacttctgcacacacttgtactggcgatgggaatgcaatggtattaagagcaggtcttcccctgcaagatatggaatttgttcagtttcatccgactggaatttatggccatggaactttaatctcagagggagtaagaggtgaaggaggatatcttttaaattctaaaggcgaaaggtttatggaaaaatatgctcctaaggcaaaagatttagcttcaagggatgttgtaagtagatcaattgcaattgaaattaacgaaggtagaggagttggaaaagaaaaagatcatgtccatctacacttaaatcatttagatccaaaagtaattgatgaaagattgccagggatagcagagtcatcaagatta

SEQ ID NO: 219240 - DNA, 1581 bp, Unknown
  Bacterial polypeptide expressing nucleotide sequence isolated from the Sargasso Sea
tatgagttcttataaaattatagatcacgaatatgatgttgtagtcttaggtgctggtggttcaggtttaagagctgcggttggtttaagtgaggcaggactaaagacagcatgtatttcaaaagtttttcctactagaagtcatacttctgctgcacaagggggtatttcagctgccctaggcaatatgggtgaagatgattggcgttggcacatgtatgatactgtaaaaggtgcagattggttaggagatcaagatagcattgaatatctttgtaaagaggcgccaaaggcagtaattgaattagaaaaatatggtgttccttttagcagaactgaagatggtaaaatttatcaaagaccatttggtggaatgacaaaaaattatggaaatggaattgtacaaagaacttgtgcagctgctgatagaacaggccatgcaatcctacatacattgtatggacaagctcttaaacataaaacagaattttttattgaatattttgcattagatttgttgatgaaaaatggtgcatgtaaaggattaatagcttggaatttaaatgatgggactattcatagatttagagcacacacagtaattattgcaacaggcggttatggtaaagtttattattcagccacatctgctcatacttgtactggagatggtaatgcaatggttttaagagcaggcttaccattacaagacatggagtttgttcaatttcatccgacaggaatctacggtcatggaacattaataactgaaggcgcaagaggagaaggaggatatttaacaaattctaagggagaaaggtttatggaaagatatgcgcctaaagcaaaagatttagcttcaagagatgtagtgagtagatcaatgtctattgaaattaatgaaggaagaggtgttggaaaagatcaagatcatgttcatttaaatttaagtcacttagataaagatataattgagagtagattgccaggtattactgatgcagcaagattatttgcaaatgtagatgttactaaagaaccaattccagttgtgccaaccgttcattataatatgggcggtataccaacaaattataaagcagaagttttaacggtgaatggttcagaaaaaactgttccagggttaatggcaattggagaagcagcgtgtgtttcagttcatggcgcaaatagacttggttcaaactctttaattgatctagttgtttttggaagagctgcagcaaaaagagctgcagaacttattaaacctggaacagctcatgaagaaataagtgagaccgaaactcaaaaatgtttagatcgttttgataaaataagaaacgctaatggtgatattggaacagcagaattgagactttcaatgcagaagacaatgcaatctaaatgtgcagtttttagaacagaaaaaacacttaaagaaggtgtagacgagattagaaaaacttatgatggtttgaacaatttatctgtaaaagataagtcattaatatttaataccgatttagttgagactttagaatttgataatttaattagacaagcagttgtaacagtaga

SEQ ID NO: 219241 - DNA, 1777 bp, Unknown
  Bacterial polypeptide expressing nucleotide sequence isolated from the Sargasso Sea
atgagcgcatataaaataattgatcacgaatatgatgttgttgttcttggagcaggaggttctggtttaagagcggcagttggtctatcagaggcaggtttaaaaactgcatgtatttccaaagtctttccaacgagaagccatacatcagcagctcaagggggtatttccgctgcattaggaaacatgggtgaagatgattggcgatggcacatgtatgacactgttaaaggatctgattggcttggtgatcaggacgcaatagaatatctttgcaaggaagccccgagagcagtagttgaattagagagatacggagttccattcagcagaactgatgatggaaaaatctaccaaagaccttttggaggtatgactaaaaattatggcaatggaactgctcaaagaacttgtgcagctgctgatagaactggccacgctatcttgcatactctttatggccaagctttgaagcaacaaacagaattttttattgaatattttgcattagatttaattatgaagaatggtgaatgcaaaggtgtgatagcttggaatttaactgatgggacaatacatagatttagatcacatattacgattattgcaactggagggtatggtaaagtttattactcagcaacatccgctcatacatgtactggagatggaaatgcgatggttcttagagcaggcttacctttacaagacatggaattcgtacaatttcatccgactggaatttatggagttggatgtttaataactgaaggagttagaggagaaggtggatttttagtaaatggtaaaggtgaaagatttatggaaagatatgcacctaatgcgaaagacttagcttctagagacgtggtaagcagatcaatggaaatggaaatcaacgaaggtagaggtgcgggaaaagataaggatcatataaaccttcatttagatcacatagataaaaaagttatagatgagagattaccaggtatttctgaggcagcaaaaacttttgcaaatgttgatgttagcaaagagcctattccagttgttccaacagttcattacaacatgggaggaattcctactaattataaggcggaggtgctcactttgaacggttcagaaaaaactgttcctggattaatggctataggagaagcagcttgcgtctcagttcacggagctaatagattaggatcaaactctttgatcgatttagtagtttttggaagggcagctgcaaaaagggcagcagaattagtaaagccaggaagtccacatgaagatgtttcgaaatcagaaacagacaaatgcttagatagattcgataagataagaaactcagatggatctacaaaaacatcagaacttagactacaaatgcagaaaacaatgcaaacaaaatgcgctgtattcagaacagaaaaaaccttaaaagaaggtgtggagcaaattaggaagccatacgatggaattagtgatatttctgttaaagataaatctttgctatttaatactgatttagttgaaactttagagtttgataatttaattagccaggcattaactactatggactctgcctacaacagaaaagagagcagaggtgcacatgctagagaggattttacgaaaagagatgataaaaatttcatgaaacatacattggcctggcaaaacggaaaaaaagtcgaaatcaaatatagagacgttcattctagaactctaactaatgatgttcaatattttcctcctaaggagagagtttattaat

SEQ ID NO: 219242 - DNA, 1777 bp, Unknown
  Bacterial polypeptide expressing nucleotide sequence isolated from the Sargasso Sea
tatgagtgaatataacattatagatcatgagtatgacgttgtcgtactaggtgctggtggttcaggtctaagagctgctgttggtttaagtgaagcaggattaaaaacagcctgtatttctaaagtatttccaacaagaagtcatacttcagcggcccaaggaggaatttctgctgcacttggaaatatgggagaagatgattggcgatggcatatgtatgatactgtaaaaggagctgattggttaggagatcaagatagtatcgaatatttatgtaaagaagctccaaaggcagttattgaattagaaaaatatggtgttccatttagcaggacagaagatggtaagatttatcaaagaccctttggaggtatgaccaaaaattatggaaatggtatagttcaaagaacatgtgcagcagcagatagaaccggccatgcaattctacatacgttatatggccaagcattaaaacatcaaactgaattttttatcgaatactttgcattagatttacttatgaaaaatggagaatgtaaaggtgttattgcctggaacttgaatgatgggactattcacagatttagatcgcatattacaattattgctacaggcggttatggtaaagtatattattctgcaacctctgcacatacttgtactggagatagaaacgcaatggtacttagagctggattaccactgcaagacatggaatttgtccaattccatcctacaggaatttatggtcacggaacacttatttcggagggagtaagaggtgaaggtggatatttagttaattcaaaaggtgaaagatttatggaaagatatgcgcctaatgctaaagatttggcatcaagagatgtggtaagcagatcaatgtctatagaaataaatgaaggaagaggtgttggaaaagaaaaggaccatgttcatttgcatttaagtcatttagataaaaatgtaatagaagatagacttccaggaataacagaagctgcaagattatttgcgaatgtagatgtaaccaaagaaccaattccggtagtacccacagttcactataatatgggtggaattccaacaaactataaaacagaagtaataactgtaaatggatctgaaaaagtagttccagggctaatggctattggagaagctgcttgtgtttctgttcatggagcaaatagattaggctcaaactcattaattgatctagtcgtttttggaagagctgcagctaaaagagcagctgaaattgttaaaccaggaactcctcatgaaagtataagcgagtcagaaacagaaaaatgtattgatagatttgataaattaagaaatgctaaaggagaaaatttaacagctggattacgactcgaaatgcaaaaaactatgcaatcaaaatgtgcagtatttagaacagaaaaaaatcttaaagagggtgttgaggaaataagaaagacctatgatggaatgaaatctatttcagtaaaagatagatcgcttatttttaatacagatttagtagaaactttagaatttgataacctaataagacaagcaattaccactgtagactctgcttattatagaaaagaaagtagaggagcacatgctagggaagactttccaaaacgggatgatgaaaaatttatgaagcatactttggcatggtgtgatggtaaagaaactaagattgagtatagagatgttcataattcgacactcactaatgatgttcaatattttccacctcaggaaagagtttactaa

SEQ ID NO: 219243 - DNA, 1753 bp, Unknown
  Bacterial polypeptide expressing nucleotide sequence isolated from the Sargasso Sea
gatggagtttgatggaattattgtaggtggaggaggggctggtatgagggcctcactgcaattagctgagtcaggcttaaatactgcagttatatctaaagtttttccaacaagatcgcatacggtctctgcccaaggaggtataacatgtgctattcaaagtgatgaccctgatgatgattggagatggcacatgtttgacactgtaaagggttcagactacataggagatcaagaggccattgagtacatgtgcagtgaaggaccgaaagctgtatttgaacttgagcacatgggtttaccgttttctagaacagaggaaggaaggatttatcagagaccttttggaggacaatcaaaagattatggcaagggaggtcaagcaacaagaacttgtgccgcagcagatagaacaggccacagcctattgcatactctttatcaggctaatttaaaagcgggaactaattttctaaatgaatggtttgcggttgatatggttttaaatactgacggagcagttgttggtgttattgcttttaagatcgaaacaggggagatttattacatcaaatcgaaagctactgttttagctactggaggtgcgggtaggatttatgcttctaccactaacgcacttataaattcaggagatggcattggaatggcactaagagctggaatgcctgttcaagacatagagatgtggcaatttcatccgacaggtattcacggagcaggaacgttagttactgaaggctgcagaggagaaggtgggtacttacttaataaagatggtgaaaggttcatggaaagatatgctcctaatgcaaaagatttagcaagcagagatgttgtggcaagatctatggcgttagaaattctagaaggaagaggatgtggaccaaatgcagatcatatctttctaagattagatcatctaggccctgaagtcgtgcacaaaagacttccgggtataactgaattatcaaaaacatttgcaggcgttgacccggccgtgcaacctattccagttgtcccaacctgtcactatatgatgggaggtatcccaacgaatattaatgggcaagttatcacagtacaagatggtcaagacaaggttgtagatggtttgtatgcagctggtgaagtagcgtgtgtctccgttcacggaggcaatagattgggaggaaattctttattggatttagtggtatttggaagagcagcaggtatatatatagaagaatctatgaaacaaggagtagagctaaaaaatgcttctcatgatgatatagataaagcccttgaaaggcttaataaacttaatgcatcttctgaaggagaacaagtaacttctttaaaagaaagaatgcagcaaaatatgcagagtaattttggtgtatttagaacaaaagatttgatggaaaaaggtatagaagatttatccaaagtacgagatgaagttgaaaacatgcatctaaaggataagtcagcaacttttaatacagccagaatcgaggcattagaaatgcaaaacttatttgaagtagctgaagctactgcagtaactgcaaattcaagaaaagaaagtagaggtgcccattccagagatgattatcctgatagagatgatgaaaattggttaaaacattcaatttacttttcagaaaataaagaagtaagcaagagggatgttaattacagacctaaaactgtacaagcattccaaccaatggttaggagttattaa

SEQ ID NO: 219244 - DNA, 1516 bp, Unknown
  Bacterial polypeptide expressing nucleotide sequence isolated from the Sargasso Sea
attgaatatctatgtaaagaggcacccacgagcagttttggaattagaaaaatatggtgtcccttttagtcgaaccgaggatggaaaaatttatcaaagaccttttgggggaatgactaaaaattatggaaatgaaactgtacaaagaacttgtgcagcagcagacagaaccggtcatgctatactacatacaatgtacggtcaggctttaaaacataatacagaattttttattgaatattttgcattagatctattaatgaaaaatggagaatgtaagggtttaattgcatggaatttaaatgatggaactattcatagatttagatcacatattacaattatagctactggtggatatggtaagacttactattcatcaacctctgcacatacatgtacgggcgatggaaatgcaatggttttgagagctggtttacctctacaagatatggagttcgttcagtttcaccctacaggaatttatggtcatggaactctaatttcagagggtgtaagaggtgaaggtggatatctactaaattctaaaggagaaagatttatggaacgttatgctcctaaagcaaaagatctcgcatctagagatgttgtaagtagatcgatagctgtagaaataaacgaaggaagaggagttggaaaagaaaaagatcatgttcatcttcatttaaaccatttagatccaaaagttattgaagaaagattaccaggaatttctgagtcttctaggctatttgctgacgttgatgtaacgaaagagcctataccagtagtacccacagtacattataatatggggggcattcctacaaactataaagctgaagttttaacattaaatgaatctgaaaaaatcgttcctggtcttatggctattggagaagcagcttgtgtttctgttcatggtgcaaatagattgggttccaattctttaatcgatttagtggtttttggaagagcagcagcaaaaagagcatctgaaattgttaaacctggtacagctcatgaagaaatacctcaatctgaaacagataaatgtttagatagatttgaaaagttaagaaatggaaatggaagcaatagaactgcagatttaagactttctatgcagaaaacaatgcaatcaaaatgtgctgtttttagaaccgaaaaaactttaaaagaaggtatagaggaaattagaaagccttatgaaggaatagagtccatttctgtaaaagataagtcattaatttttaatactgatttagtagaaacacttgaatttgataatttaattagacaggctattgttactatagactctgcatatgaacgtaaagaaagtagaggtgcacatgctagagaggatcatcctaaaagggatgacaataattttatgaaacatacgttatcctggtgcgaaggaagtaaaactaagattgcttatagagatgtacatagatctaccttatcaaatgatgtacaatattttccacctcaagaaagagtatattaa

SEQ ID NO: 219245 - DNA, 1147 bp, Unknown
  Bacterial polypeptide expressing nucleotide sequence isolated from the Sargasso Sea
atgagttcatataaaattatagatcatgaatacgatgtcgttgttcttggagctgggggctcagggttaagagcggcagtgggcttaagtgaagcgggattaaaaacagcatgtatttcaaaagtttttcctacaagaagtcatacgtctgcagcacaaggtggtatttcagcagcactaggaaatatgggcgaagatgattggcgctggcacatgtacgatactgtcaagggatcagattggttaggagaccaagattgtattgaatatttgtgcaaagaagctccaaaagctgttttagaactagaaaaatatggggttccttttagcagaactaaagaaggtaaaatttatcaaagacctttcggaggaatgacaaaaaattatggcaatgaacctgttcaaagaacatgtgcagctgcagatagaactggtcatgcaattcttcatacgctttacggacaagcgttgaaacataatacagaattttttattgaatattttgcactagacttattaatgaaagatggagagtgcaagggtttgattgcttggaatttaaacgatgggacaattcacagatttagagctcatataacaattattgctactggtggatatggtaaagtttattattcagctacatctgctcatacctgtactggagatggaaatgcaatggtacttagagcaggcttacctttgcaagatatggaatttgttcaatttcatccaacgggaatttatggacatggaactttaatctcggaaggtgtcagaggagaaggtggttacttactcaactcaaaaggggaaagatttatggaacgctatgctccaaaagcaaaagatttagcatcaagagatgtagttagtagatcaatagctatagaaataaatgaaggaagaggcgtacgtcaacaaaaagatcatgttcatcttcatttaaaccatcttgatccaaaagtaatagaacaaagacttcctggaatatctgagtcttcaaagttgtttgcaaatgtagatgttacaaaagaaccaattccagttgttcctactgttcattataatatgggaggtattcctacaaactttaaagctgaagtcttaactatgaatggctctgacaaaatagttccaggtttaa

SEQ ID NO: 219246 - DNA, 1777 bp, Unknown
  Bacterial polypeptide expressing nucleotide sequence isolated from the Sargasso Sea
aatgaattacgaaattgaatatcacgattatgatgtagttgttgttggtgctggtggatctggtttgagagcgacagtaggcgctgttgagaatggttataagactgcttgtatttcaaaagtattcccaaccagaagtcatacggttgcagcgcagggaggcatctctgctgcacttggaaatatgggtgatgatgattggagatggcacatgtatgataccgtgaaaggctctgattggctcggggatcaggatgcaattgagtatttgtgcaaaaatgcaccaaaagctgttttagaattagagaactatggagttccatttagtcgaacagaggatggaaaaatttatcaaagagcctttggagggatgaccaaaaattatggtgaaggtactgcacaaagaacatgtgctgctgctgatcgaactggccatgcaataattcatactttatacgggcaatcattaaaacacgacgttgactattatattgaatattttgttttggacttattaatggttgagggtgaatgcaggggtgttgttgcatggtgtttagaggacggtaaattacatgtatttaattctaaacaaacaatactagcatctggtggatatggccgtgtttatttttctgcaacttcagctcacacctgcacaggcgatggtaacgctatggttttaagagcaggcctacctttacaagatatggaatttgttcaatttcatccaacaggtatttatggcgttggttgtcttataacagagggcgcaagaggagaaggcggttatttagtaaacagtgaaggcgaacgtttcatggagagatacgcaccatcagcgaaagacttagcttcaagagatgttgtgtctcgttctataacaaaagaaattttagagggcagaggtgttggtaaagataaggaccatgcttatctgcatcttgatcatatagactcagatatattggaagaaagattgcctggtatttcagaatccgcaaaagttttcgcaggggtagatgtaactaaagagccaattcccattatacctacagttcattataatatgggtggaattccaacaaactttcatggagaagtaatgaacctcgaaaaaggaaatgaaacgatcgtacagggtttgatggcggttggtgaagctgcttgtgtgagtgttcatggtgcaaacagactcggatcaaattctcttattgatttagtagtttttggtaaagcagctgcagatagaataaatgatacggtaaataaagatgaaccaaataaggaaattcccagccatgtcatcgatgaagtcattgcaaggtttgatagtacacgatcttctgatggggatatttcaacttcagaattaaggtctcaaatgcagagagttatgcagaaacactgcgctgtttttagagatgatgagattatgtctgaaggaaaaaaactcatcgaagaaacttggttaaactcagaaaatattaaaattaaagacaaatcacttatatggaatactgatttgttagaaacgctcgaatataaaaacctaattgcacaagctgtagttacaatgaactccgcactaaatagaaaagaaagtagaggggctcacgctcgagaagactataaggaaagagatgataaaaattggatgaagcatacaatgtcatggctgaacgataagagttgtgaactggattatagatcagttcacgaatacacattatcaaatgaagttaaatatattgcgccaaaggccagagtttattaa

SEQ ID NO: 219247 - DNA, 958 bp, Unknown
  Bacterial polypeptide expressing nucleotide sequence isolated from the Sargasso Sea
aatgaataaagcttataatattattgatcataattatgatgtagttgttattggtgcaggaggatcaggtttacgttctactttagggttggctgaatctggtttaaatgtagcatgtatatcaaaagtttttccaaccagaagtcacactgttgcagcgcaaggcggtataggcgcagcactaggcaatatgggtgaggataattggaaatggcatatgtttgatacggttaaaggttctgattggcttggagatcaagatgcaatagagtatctttgttcaaaagctccagaagcaattgaagatttagaagaatatggaatgccatttagtaggactgaagagggcaaaatttatcaacgaccttttggaggtcatttaactagtaatggtgagggccctccagctatgcgagcttgtgctgcagcagacagaacaggacatgctttattacacactttgtatcaacaatctttaaagaattctgttgaattttttatagaatattatgttctagatttacttatagatgatgatgggacttgcaaaggagtgattgcttggtgtcttgaagatggaactttacatagattcttatctcaccaaactattatcgcaacaggagggtatggacgtgcatatttttcttcaacaagtgctcacatctgtactggtgatggaagcgcaatggctttaaggcaaggattgccgttatcagatatggaatttattcaatttcaccctactggagtttatggagctggggttttaataacagaaggcgctagaggagagggaggttatttaacaaatagtgatggagaacgttttatggaacgttatgcccctaatgcaaaagatctagcttcacgagatgttgtaagtagagcaatgacgattgaaataaatgaaaacagaggatgtggagaaattctgatcatgtattacttcacctag

SEQ ID NO: 219248 - DNA, 1258 bp, Unknown
  Bacterial polypeptide expressing nucleotide sequence isolated from the Sargasso Sea
gatgaaaaatggacaatgcaaaggtctcattgcatggaacttaaatgatggaactatacatagatttagatcacatataactatccttgcaacaggtggatacggtaaagtttattatactgcaacttcagctcatacatgtactggggatggaaatggaatggcattacgcgcaggattaccacttcaagatatggaatttgttcaattccatccaacaggaatctacggggtaggaactttaatttcagaaggtgtgaggggtgagggcggctatcttttaaattctaaaggcgaaagatttatggaaagatatgcaccaaaggcaaaggatcttgcatcgagagatgtagtaagcagatctatagcggtagaaattaatgagggtagaggtgtaggtaaaaataaggattatgtcaatttacacttagaccatcttgatccaaaagttatagaagagagactacctggaattgctgagtcggcaaaaactttttgtgaagttgatgttagaaaagacccaataccagttgttccaacagttcactataatatgggaggaataccaacaaactacaaagcagaagtcttaactttaaacggcaaagagtctaccgtgcaaggattgatggccataggagaagcagcatgtgtttctgttcatggtgctaatagattaggatcaaattctttaatcgatctggttgtttttggaaaatcagcagcaaatagggcggccgaacttgttaaacctggaactcctcatgaaactatttctcaaagcgaaactgacaaatgtttagaacgttttgatagactaagaaactcatctggttcaacaaaaactgctgaacttagactgtctatgcaaaaaacaatgcaatctaaatgtgcagtttttagaactgaaaaaactttgaaagagggaatggaccaaattagaaaaccttttgacggcatggctgatatttcagtctctgataagtcattactatttaatacagatcttgtcgaaactttagaatttgataatcttataagacaggcaatgacaacaattgactctgcctatcacagaaaagaaagtagaggcgcccatgcaagagaagattttaaaaacagggatgacaaaaaattcatgacccatactctagcttggcaaaaggacaacaaggttaaagtagcttatagaccagttcattccaaaactttgacaaatgatgtacaatatttcccaccaagggagagagtttattaa

SEQ ID NO: 219249 - DNA, 1774 bp, Unknown
  Bacterial polypeptide expressing nucleotide sequence isolated from the Sargasso Sea
aatgagtaaaatacctttttctgaaaaaacttacgatgtagttatcataggcggtgggggctcaggcctcagagcctctcttgaaatagcaaaatctggtttagatgttgctgtaatctcaaaggtttttcctacaagatcgcatacggttgctgcacaaggagggataacatgtgctatagcaagcgcagatcccaatgacgattggagatggcatatgtttgatactgttaaaggttcagactatataggcgatcaagatgccattgaatatatgtgttcagagggcccagagactgtatttgaattagagcatatgggacttcctttctcaagatttgaaaacggcagaatatatcaaagaccttttggtggtcaatcaaaagaatttggagaaggaggtcaagcagctagaacatgtgcagctgcagacagaacaggccatgctttattgcatactctttatcaggctaatttaaaggcaggaacgaactttttaaatgaatggtttgcagttgatctcattgaaggaaagagtggttgtattgcaggtgtaagttgttttgatatggaaactggagaagtttcaataattaaaactcaagcagttgttcttgcaacaggtggtgctgggcaagtatatgagcaaaatacaacttcgttgatttgtactggagatggtttaggaatggtgcttaggaagaactttgcattacaagatatggagatgtggcaatttcatcctacaggcctctatggtaatggttctctaatgacagagggatgcaggggtgagggaggttatctcatcaactcagagggagagcgtttcatgccaacttatgcacctaaggctaaagatctagcttcaagagacgtagtttcgagatgtattgttcaagagataatggcaggacgtggctgcggtgataaaaaagatcatgtccttctgaaaatcgatcaccttggagctgaagcaattatgaaaaagcttcctgaaataagagaaatttcaatgacatttgcaaatgtagatccgataaatgaaccaattcctgtagttcctacatgtcattacatgatgggcggcattccaacaaacatcaatggacaagtaattactcaagagaacggaaatgacagagttgttgatggtctttactcaataggtgaggctgctaatgtttctgtacacggagcgaatagacttggtggaaactcacttcttgatttagtagtttttggaagatctgcaggcaaacacataaataaacaattcaaaaaaggggaagtgtcagatatttcaaatgcagaaattgaaaaatcattatcaatattacaaacacttgaagatacaaagaaaggtgagactgtttatgctcttaggtcagaaatgcaaagcataatgcaaaactattttggtgtttatagaaatgaaaaactcattaaagagggaattaaaaagcttgaggatgtaaacgttagaacaaagaatctccatatgaatgacaagtcaaaacagtttaactcagagaaagttgaaatcttggaatatctaaatttaatagaaattgcaaatgccacagcttattctgcactcgaaagaaaggaaagcagaggagctcatgcaagagaagactatcctgaaagggatgatacaaattggctatgtcattctttattttttaaagatggcaacaaagtttcaaaaagagacgtaaacttaaaccctaaagaagttgaggcatttaaaccaaaggccagagtttattaa

SEQ ID NO: 219250 - DNA, 1191 bp, Unknown
  Bacterial polypeptide expressing nucleotide sequence isolated from the Sargasso Sea
aatgaccacacattttggtgacggaattgcacaaaggacatgtgctgctgcagatcgaacaggccatgcaatgttgcataccttgtatcaacaatccattaaaaataaagctgaatttttcattgaatattttgcactcgatttaattatggaagagggtgaatgcactggagttgtagcgctagagatggcgactggcaagattcatgcttttcgagctcaacgggtgatattggccacaggtggacatggaagagcatatttttcatgtacggctgcacacacttgcaccggagatggttcaggaatggctctcagagcaggtttgccgcttcaagatatggaatttgttcaatttcatccaactggtatctatggtgttggatgtctcatcacagaaggtgttcgtggagaaggaggatatcttactaattctgatggcgagcgatttatggaacgttatgcgcccaatgcaaaagaccttgcctcaagagatgttgtgagtcgatctatgacaatggagatacttgaagggagaggtgtgggagagaaaaaagaccatattcatcttaatcttcagcacttaggacctgaggtaatcgaagagcgtcttcctggtattgctgaaacagcaagggtatttgctgacgttgatgtaacaaaagaccctattcctgtgctacccacagttcattataatatgggcggtgtgccgacaaatatgcatacagaggtcattaccaaaaactctgctggtgagatggagattgtcccaggattgatggcagttggtgaagctgcatctgtatcagtgcatggagcaaatcgtttaggttctaactcacttcttgatcttgtggtatttggacgagagtctgccattcagtgccaaaaaaccattaaaccaatggatattcaaggaaaggtgaaccaaaatcaattggataagatcatcgataagtttgactctattcgattctcaaaaggatcacttccaaccgcagaaataagggcagaaatgcaaagcatcatgcaaaagcatgcgtctgtttttaggacagaggagctaatgcaagagggagtggaaaaactctcctcatgcattgagtcattcaaagatgtttctgtgagcgatcgaggtttgatttggaatacagatttaattgagacactcgagctagagaatctttt

SEQ ID NO: 219251 - DNA, 655 bp, Unknown
  Bacterial polypeptide expressing nucleotide sequence isolated from the Sargasso Sea
gatggagattgtcccaggattgatggcagttggtgaagctgcttctgtatcggtgcatggagcaaatcgtttagggtctaactcattgcttgaccttgttgtctttggacgagagtctgccatgcaatgccaaaaaacaatcaaaccaatggatattcaagggaaagtgaaccaaagtgaattggataagatcatcgataagtttgactctattcgattctcgaaagggtcacttccaacgtcagaaataagagcagaaatgcaaagcatcatgcaaaaacatgcgtctgtttttaggacagaggagttaatgaaagagggtgtggaaaaactctcctcatgcattgagtcattcaaagatgtatctgtgagcgatcgaggcttgatttggaatacagatttaattgagacactagagctagagaatcttttgggtcaagccatcatcacaatgcaaagtggccaggttagaaaagaaagcagaggagcacatgcaagagatgactatcccgatcgtgatgatgagaactggctgattcacagtatgggttggatggatgagaacaataatgtaaccattggttcttcgcctgttcatttagatactcaaacagatgaggtagaatcaatacctctcaaggcaagagtttactag

SEQ ID NO: 219252 - DNA, 1777 bp, Unknown
  Bacterial polypeptide expressing nucleotide sequence isolated from the Sargasso Sea
tatgagccaatataaaattatagaacatgaatatgatgtcgttgtcttaggtgctggtggcgcaggtttgagagcagctgtagggttaagtgaggctggtttaaaaactgcttgtatatcaaaagtatttccaactagaagccatacatcagcagctcaaggaggaatatctgcagcattaggcaatatgggagaggatgactggagatggcacatgtacgatactgtaaaaggatccgattggttaggagaccaagactgtattgaatatttatgcaaagaggcaccaagagctgttttggagttagaaaaatatggcgttccatttagcagaactgaagatggtaaaatttatcaaagaccgtttggtggaatgactaaaaattacggaaatgaaactgtacaaagaacttgtgcggcagcagatagaacaggtcatgctatactacacaccatgtacggacaggctttaaaacataatacagaattttttattgaatattttgctttagatttactgatgaaaaatggagaatgtaaaggtttaatagcatggaatttaaatgatggaactattcatagatttagatcacatatcacaattatagctacaggtggatatggtaaaacttactattcttcaacatctgctcacacatgcacaggtgacggaaatgctatggtattgagagctggtttacctttacaggacatggagtttgttcaatttcatccaacaggaatttatggtcatggaaccttaatttctgaaggcgttagaggtgaaggtggatatttattaaactctaaaggagaaagatttatggaacgctatgctcctaaagcaaaagatttagcatctagagatgtagtaagtagatcaatagctgtagaaataaacgaaggaagaggagtgggaaaagaaaaagaccatgtccatcttcatttaaaccatttagatccaaaagtaatagaggaaagacttccaggaatatccgagtcttcaagactatttgctgatgttgatgttactaaagaaccaataccagtagtacctacagtacattataatatgggtggaattcctactaattataaagccgaagttttaacattaaatggatctgataaaattgttcccggactaatggcaattggagaagcagcctgtgtttcagtccatggcgcgaacagattaggctctaactcattgattgatttagttgtttttggaagagcagcagctaaaagagcatctgaaattgtgaaacctggaacacctcatgaagaaatacctaaatctgaaacagacaaatgtttagatagatttgaaaagttaagaaatggcaatggaagcaatagaactgcagatttaagactagctatgcaaaaaactatgcagtcaaaatgtgcagtttttagaactgaaaaaactttaaaagaaggtgtggaagaaataagaaagccttatgaaggtatggagtctatctcagtaaaagataaatcactaatttttaataccgacttagtggaaactcttgaatttgataatttaataagacaggctattgtcactatagactctgcttatgaacgaaaagaaagcagaggagctcacgcaagagaagatcatcctaaaagggacgataataattttatgaaacatactttatcttggtgtcaaggaagtaagacaaagattgcatatagagacgttcacagatcaactttaagtaatgatgttcaatactttccaccgcaagaaagagtgtattaa

SEQ ID NO: 219253 - DNA, 938 bp, Unknown
  Bacterial polypeptide expressing nucleotide sequence isolated from the Sargasso Sea
agaccttgcatcaagagatgttgtcagtcgttcaatgacaatggaaataatagaaggcaggggtgtgggtgaaaagaaagaccacatccatctaaatcttcaacatttaggaccggatgtaattgaggaacgtcttccaggaattgctgagaccgcaagagtctttgcagatgttgatgtaactaaagatccaatccctgtcttgcccactgtccattacaatatgggcggtgtacctacaaacatgcacacggaggttattaccaagaactccagtggtgatatgcaaattgtcccaggtttaatggcggtaggtgaagcggcctctgtatcagtccatggcgctaatcgattgggatcaaactcgcttttggatttagtggtctttggtagagagtcttccattcaatgtcaaaaaacaatcaaaccaatggagacacaaaacaaggtcaagcaaaatgaattggataagatcattgataagtttgattccattcgattttcaaaaggatcacttccaacagcagagattagagccgaaatgcaaagcattatgcaaaagcatgcatctgtatttagaacagaagaattaatgcaagagggcgtaaaaaaactttcctcatgcatagattcgttcaaagatgtatctgttagtgatcggggtttaatttggaataccgatttgatagaaacccttgaactggaaaatctactaggacaagcgatcattacgattcaaagtggtcaggttagaaaagaaagtcgaggtgcgcacgcaagggatgactatccagatcgagacgatgagaactggttaattcatagtttgggttggatggatgcgaataataatgtgactattggatcttcgcctgtccatttagatactcaaacagatgaggtagaatcaatacctcttaaggcaagagtttactaga

SEQ ID NO: 219254 - DNA, 1777 bp, Unknown
  Bacterial polypeptide expressing nucleotide sequence isolated from the Sargasso Sea
tatgagttacgaaattgaatatcacgactacgatgtagttgttgtaggagctggaggttcaggattaagagctacagttggcgctgtagagaatggatataagacagcttgtatctctaaggtttttcccacaagaagtcatacagttgctgcacagggtggaatatcagctgcgttaggtaatatgggagaagatgattggcgatggcatatgtatgatacggttaaaggctctgattggcttggagatcaggatgcaattgaatacttatgtaagaacgcccctaaagcagttttagagttagaaaattatggtgtgccatttagtcgaacagaagacggtaaaatatatcagcgggcttttggcggcatgacaaaaaattatggtgatggaactgcacaaagaacatgtgctgcagcagatagaactggccatgcgattattcatactctttatggacaatcattaaaacacgatgtggattattatatagagtacttcgttttagatttgcttatggttgaaggagaatgcagaggtgttgttgcctggtgtttagaggacggcaagctacatgtatttaactcaaagcaaaccgtattagcttcaggtggttatggaagagtttatttctccgctacatctgctcacacatgcacaggagatggaaatgcaatggtattaagagcgggacttcctttgcaagatatggaatttgttcaatttcatcctacgggaatttatggcgttggctgtttgataactgagggagccagaggtgaaggtggatacctggtaaatagtgagggagaaaggtttatggaaaggtacgctccatcggcaaaggatttagcttcaagagatgttgtgtcacgatctattaccaaagaaattattgatggaagaggcgtgggaaaggataaagatcacatgtatcttcatctagaccatattgactccaatattcttgaagaaagactaccagggatatcagaatctgcaaaagtctttgctggagtggatgtaactaaagacccgatacctattattccgacagtacattataacatgggtggaataccaactaacttccacggcgaagttatgaatcttgtcaaaggtgacgaaacagtcgtacctggtctaatggccgttggagagtcagcttgtgtgagcgttcatggtgcaaacagattaggatctaattctctaattgaccttgttgtctttggaaaagctgctgcagacagaattgatgatattgttcccaaaggtgaaaaaaacaaagaaattcctaaatcagtcattgatgatgtaatagcaaggtttgatgctactagaaattctgatggcgatgttacaacagctgaactgagatcgcaaatgcaaaaagtcatgcaaaaacattgcgcggtattcagagatgatgaaattatgtcagaaggaaaaaaactcatcgaagaaacttggttagatagtgaaaacttaaagataaaagataagtcgcttgtctggaatacagatttattagaatcgttagagtataaaaatcttattgcccaagctgtggtcaccatgaattctgctcataataggaaagaaagcagaggtgcgcatgctcgagaagactttaaggaaagagacgataaaaactggatgaaacatacactatcctggcttgatgatgaaaaatgtaaattggaatacagatcagttcatgaatataccctttcaaatgaggttaaatacatagaacccaaagcaagagtttattaa

SEQ ID NO: 219255 - DNA, 1807 bp, Unknown
  Bacterial polypeptide expressing nucleotide sequence isolated from the Sargasso Sea
gctgcgcagattctctggagagtgtaaaagaatggctgcaatcaagaattctctgccgcgtcgcaagtttgacgtggttatcgtcggcgcaggcggctcggggatgcgcgcttcgctgcaactcgcgcgcgccggtctgtcggtctgcgtgctgtccaaggtgttcccgacgcgttcgcacacggtggcggctcaaggcggcatcggcgcatcgctcggcaacatgagcgaagacaattggcactatcacttctacgacacgatcaagggttccgactggctcggcgaccaggacgcgatcgagttcatgtgccgtgaagcaccgaacgccgtgtacgagctcgaacacttcggcatgccgttcgaccgcaacgctgacggcacgatttaccagcgcccgttcggcggccacaccgccaactacggcgaaaagccggtgcaacgcgcttgcgcggccgctgaccgtaccggtcacgcgctgctgcatacgctgtaccagcaaaacgtggcggccaagacgcaattcttcgtcgagtggatggcgctggatctgatccgcgacgccgacggcgacgtgctgggcgtgaccgcgctggaaatggaaaccggcgacgtctacatcctcgaaggcaagaccacgctgttcgctacgggtggcgcgggccggatcttcgcggcttcgaccaacgcgttcatcaacaccggtgacggtctgggcatggcggcgcgttcgggcatcgcgctgcaagacatggaattctggcaattccaccccaccggcgtggccggcgcgggtgtgctgattaccgaaggcgtgcgtggtgaaggcggtattctgcgtaactcgaatggcgagcgtttcatggaacgctacgcaccgacgctgaaggatctggcgccgcgcgacttcgtttcgcgttcgatggaccaggaaatcaaggaaggccgcggcgtgggtccgaacaaggatcacgtgctgctcgacctgtcgcacatcggcgccgagacgatcatgaagcgcctgccgtcgatccgcgaaatcgcgatgaagtttgcgaacgtcgattgtattaaagagccgattccggttgtgccgaccatccactatcaaatgggtggtatcccgacgaacatcaacggccaggtcgtcggcacgtcgcgggatcacaaggaagtcgtcaacggtttctacgcagtgggcgaatgctcgtgcgtgtcggtgcacggtgcaaaccgtctcggcacgaactcgctgctcgacctggtggtgttcggccgcgcggccggcaaccacatcgtcaagcacgtgaaggacatcaaggagcacaagccgctgccggcggatgcgggcgatttctcgctggcgcgtctgaacaagctggacaaatcgacgtcgggcgaatactcgcaaaccgtcgcggccgacatccgttccaccatgcaggcacatgccggcgtgttccgcacgtcgaagctgctggccgaaggcgtcgagcggatccgcgaagtggctgaccgggtcgacaacatctacctgaaagacaagtcgaaggtgttcaacacggcacgtattgaagcgctggaagtggagaacctgatcgaagtggcacgcgccacgatggtttccgccgaagcgcgcaaggaaagccgcggtgcgcatgcgcaaaacgacttcgaacatcgcgacgacgaaaactggctgcgtcatacgctgtggttcagcgaaggcgatcgcctcgactacaagccggttcaaatgcaaccgctgaccgtcgaatcggtgccgccgaaagcgcgtaccttctaa

SEQ ID NO: 219256 - DNA, 886 bp, Unknown
  Bacterial polypeptide expressing nucleotide sequence isolated from the Sargasso Sea
catggtattagaaattctagaaggtagaggttgtggagataaaagtgatcatatttatcttaagcttgatcatttaggtgctgaagttttaaattctaagcttccaggtatatgtgaattgtctaggacttttgcacatgttgaccctatttatgaaccaattccagttgtgcctacttgccattatatgatgggtggtacacccacaaacatttctggacaagcattcacaagaattaatgatgaggatcatttaatacctggattattttctgctggcgaggctgcttgtgtttctgttcacggagctaatagattgggtggaaactcgcttcttgatttggttgtttttggaagggcaacaggaaaacatattcagagtgaactaaaatcaggtggtggtgtagattctgctactaaaagtgatattgaaaagtcacttgaaagattaaataaactaaatgactcttctaacggacatgatccagcagatgtaaaaaaagaacttcaagaatgtatgcaaaattactttggagtattcagaagaggtgaatttatgaagaaaggcttggatcaattaaatgagctaaaagaaaaagttgataatcttcatttaaaagataaaagtgatgcatttaatacaagcagagttgaggcaattgaattacaaaatctatttgaggttgcagaatcaacggcaatttctgcataccagagaactgaaagtagaggcgcacatgctagagatgattatcctgacagagatgatgaaaattggttatgtcatactatatatgatcctatctcaaaaaaagtttctaaaaggggagttaattttgaacccaataaggtagaggcttttccgcctaaagtaaggacatattaa

SEQ ID NO: 219257 - DNA, 1789 bp, Unknown
  Bacterial polypeptide expressing nucleotide sequence isolated from the Sargasso Sea
atgagtaaagattacgacattatccaacaccaatatgatgttgtagtggttggcgcaggcggctcaggattaagagcaacacttggtctcgttgaatctggctttaaaaccgcatgtatcaccaaagtatttccaacaagaagtcatactgtagccgctcaaggtggaatcagtgcagctcttggtaacaatggtgaggacgattggagatggcacatgtatgacacagtcaaaggttctgattggctgggtgatcaagatgccattgcttatatgtgtaaggaagcaccaaatgcagttttagaattggaacgttatggtattccattctcaaggacagatgatggaaagatttatcaaagagcatttgggggaatgaccacacattttggtgacggaattgcacaaaggacatgtgctgctgccgatcgaacaggccatgcaatgttgcataccttgtatcaacaatccattaaaaataaagctgaatttttcattgaatattttgcactcgatttaattatggaagagggtgaatgcactggagttgtagcgctagagatggcgactggcaagattcatgcttttcgcgctcaacgggtgatattggccacaggcgggcatggaagagcatatttttcatgtactgctgcacacacttgcaccggagatggttcaggaatggctctcagagcaggtttgccgcttcaagatatggaatttgttcaatttcatccaactggtatctacggtgttggatgtctcatcacagaaggtgttcgaggagaaggaggatatcttaccaactctgatggcgagcgattcatggaacgttatgcgcccaatgcgaaggaccttgcatcaagagatgttgtgagtcgttcaatgacaatggaaatattagaaggaagaggtgtaggagagaaaaaagaccatattcatcttaatcttcagcacttagggcctgaagtaatcgaagagcgtctccccggtatcgctgaaacagcaagggtatttgctgacgttgatgtaacaaaagaccccattcctgtgttacccacagttcattacaatatgggtggtgtgcccacaaatatgcacacagaggtcattaccaaaaactctgctggcgagatggagattgtcccaggattgatggcagttggtgaagctgcttctgtatcggtgcatggagcaaatcgtctaggatctaactcattgcttgaccttgtggtctttgggcgagagtctgccattcaatgtcaaaaaaccatcaaaccaatggatattcaagggaaagtgaaccaaagtgaattggataaaatcatcgataagtttgattctattcgattctcaaaaggatcgcttccaacggcagaaataagagcagaaatgcaaagcatcatgcaaaaacatgcgtctgtttttaggacagaggagttaatgcaagagggtgtggaaaaactttcctcatgcattgagtcattcaaagatgtatctgtgagcgatcgaggtttgatttggaatacagacttaatcgaaacattagagcttgagaatcttttgggtcaagccatcatcacaatgcaaagtggccaggttagaaaagaaagcagaggagcacatgcaagagatgattatcccgatcgtgacgatgagaactggctgattcatagtatgggttggatggatgagaacaataatgtaagcattggttcttcgcctgttcatttagatactcaaacagatgaggtagaatcaatacctctcaaggcaagagtttactaga

SEQ ID NO: 219258 - DNA, 1789 bp, Unknown
  Bacterial polypeptide expressing nucleotide sequence isolated from the Sargasso Sea
ttgtactgtggggggtgtaaggtgactattccaactcgtgaatttgatgcggtggtgatcggtgccggtggcgccggcatgcgcgccgcgctgcagattgcccaatccggcaagagctgcgctctgttatccaaggtattcccgacccgttctcacacggtttctgcccagggcgggatcacggttgcgctgggcaatgcccacgatgacaactggcagtggcacatgtatgacaccgtcaagggctccgattacatcggtgatcaggaagccattgaatatatgtgcaagaccggccccgaggccgtttatgaactggagaacatgggtctacccttctcccgcttcgacaacggtaccgtctatcagcgtccgtttggtggccagtccaagaatttcggtggcgagcaggcggcccgtaccgcggcggcagccgaccgtaccggtcacgccctgctgcacaccctctatcagcagaacgtcaagaacaagaccaccgtcttctccgagtggtatgcgctggatctggtgaagaaccaggacggccacatcgttggctgtaccgccatcgacatggagagcggtgaagtcgtctatttcaaggccaaggccactgtgctcgccaccggcggtgccggtcgcatctaccagtccaccaccaacgcccacatcaacaccggtgatggcgtcggcatggcgctgcgcgccggggttggcgtgcaggacatggagttctggcagttccacccgaccggcatcgccggggcaggggtgctggtgaccgaagggtgccgcggtgaaggcggctacctgctcaataaagacggcgagcgcttcatggagcgttatgcgccgaacgccaaggatctggccggtcgcgacgtggtggcccgctccatcatgatcgagatccgcgaaggccgcggctgtgacggtccctggggcccgcacatcaagctcaagctggatcacctcggcaaagaggtgctggaatcccgtctgccgggcatctgcgagctctctcgcaccttcgcccatgtggatccggtcaaagagccgattccgattatccctacctgccactacatgatgggcggcgtgccgaccaacgtgaacggccagtgcctgacccaggacaaggacggcaacgacgtgccggtagtcggtctgtttgcggtgggcgaaatcgcctgcgtctcggtgcacggtgccaaccgtctgggcggcaactcgctgctggatctggtggtatttggccgcgccgccggcatgcacctggtcaacaccctgagcgagatggagcacggccgcgccgcctccgacgccgatatcgacgccgcgctgtcccgtttcaatcgctgggaaaattgccgtgacggtgaagatccggtgcagatccgcaaggacctgcagcgctgcatgcagaacaacttctccgtattccgggaaggcgatgccatggccgaagggctggccgagctgaaactcatccgcgagcgcctcaagaacgcccgtctggacgacacctccaaggagttcaacacccagcgcatcgagtgtctggagctggacaacctgatggagacggcctatgccaccgcggtggctgccaacttccgtaccgagagccggggcgcccacagccgcttcgatttcccggagcgtgacgatgagagctggctgtgccacagcctctatcatccggacaccgagtccatgacccgtcgcgctgtcaacatgtcacccaagacccgtgaggcgttcccgcccaaggtccggacttactgat

SEQ ID NO: 219259 - DNA, 1420 bp, Unknown
  Bacterial polypeptide expressing nucleotide sequence isolated from the Sargasso Sea
ctgtttagtgaccaggatgcaatagaacatttatgtaaagaggctccaaaagcagtaatcgaattagaaaaatatggtgttccatttagcagaacaaaggaaggaaaaatctatcaaagagcatttggaggaatgacaaaaaattacggaaatgattctgtacaaagaacctgtgcagctgcagacagaactggtcatgcaatactacatactttatacggacaagcattaaaacataatacagaattttttatagaatattttgctttagaccttttaatgaaaaatggtcaatgtaaaggtcttattgcctggaacttaaatgacggaacgatacatagattcagatcgcatattacaatcctggccacaggagggtatggtaaagtttattatacagccacttcagctcatacttgtacgggagatggaaacggtatggtgctacgagcaggattgccactccaagacatggaatttgttcagtttcatcctacaggaatttatggagtgggaactttaatatcagagggagtgagaggcgaaggtggttatcttttaaactcaaaaggcgaaagatttatggagaaatatgctccaaaagctaaagatttagcatcaagagatgttgtaagcagatcaatagcagttgaaataaacgaagggagaggtgttggaaaaaataaagattacgttaacttgcatttagatcaccttgatccaaaagtaatagaagagagactaccaggtattgccgagtcagcaaaaacattttgtgaagttgatgtcagaaaagatccaattccagtagttcctacagttcactataatatgggcggaataccaacaaattataaagctgaagttttaactcttaacgggaaagagtccactgtgccaggattaatggctataggagaagctgcatgcgtttctgttcatggagcaaatagattaggatcaaactctttaattgatctagtagtttttggaaaatcagcagcgaatcgtgcagctgaacttgttaaacccggtacccctcatgaaacaataccagaaagtgaaactgacaaatgcctagacagattcgataaacttcgcaattcatctggttctacaaaaacttctgagcttagattatctatgcaaaagactatgcaatctaaatgcgcagtttttagaactgaaaaaacattaaaagaagggatggatcaaattagaaaacctttcgaaggaatgggagatatttctgtttcagataaatcattattattcaatacagatctcgtagaaactttagaatttgacaatcttataagacaagcaatgacaacaatagactctgcttatcatagaaaagaaagcagaggagcgcacgcaagagaagattttaaaatagagatgacaagaaatatatgac

SEQ ID NO: 219260 - DNA, 1039 bp, Unknown
  Bacterial polypeptide expressing nucleotide sequence isolated from the Sargasso Sea
atgagttcttataaaattattgatcatgaatatgatgtagtcgttctcggcgctggaggatctggtttgagggcagctgtaggtctaagtgaggccgggttaaagacagcatgtatatctaaagtttttccaacgagaagccatacttctgcagcacaaggtggaatttctgcagccctaggaaacatgggtgaagatgactggagatggcatatgtacgacacagtaaaaggctcagattggttaggagaccaagattcaatagaatatttatgcaaagaagctccaagagctgtattagaactagagaaatatggagtcccatttagcagaacagaggatggtaaaatttatcagagaccttttggaggtatgacaaaaaattatggaaacgaaactgtgcaaagaacttgtgcagcagcagatagaacggggcatgcaatattacatactttgtatggtcaagcacttaaacacaatactgaattttttatagaatactttgcattagatttattaatgaaagatggggcatgcaaaggtttgattgcttggaatttgaatgatggaactattcatagatttagatctcatataacaattatcgcgactggtggttatggaaaagtttactattcagctacttctgctcatacttgtaccggagatggtaatgcaatggttctaagagctggattaccattacaggatatggagtttgttcagttccatccgacaggtatttatggtcatggtactttaatttcagaaggtgttagaggagaaggcggttacttagtaaattcaaagggagaaagatttatggaaagatatgcccctaaagccaaagatttagcctcaagagatgtagtaagcagatctatagctattgaaattaacgaaggaagaggagtaggtaaagaacaagaccatgttcacttacatcttgatcacctagatcccaaagtgatagatgagagacttcctggaatttcagagtcatcaagattatttgctaatgttgatgtaaccaaagagc

SEQ ID NO: 219261 - DNA, 1786 bp, Unknown
  Bacterial polypeptide expressing nucleotide sequence isolated from the Sargasso Sea
aatgagtgaatatgattttattgatcatgattatgatgtcattgttgttggtgcaggtggatcaggtttgcgtgccacatttggtctctctcaatctggcctaaaaacaggatgcattacaaaggtttttcctactagaagccatacagttgctgcccaaggagggataagcgctgctttaggaaatatgggtgaagatgattggcgttggcatatgtatgatactgttaaaggtggtgactggcttggagaccaagatgcaatagaatacatgtgtaaagaagctcctgatgccgtgattgagcttgagcattatggggttccattttcgagaaccgaagatggtctaatttatcagagaccgttcggaggaatgactactcattacggtgaaggaatagctcaaagaacctgtgcagcagcagacaggacaggacatgctatgttgcatactctctatcagcaatcactcaaatattcagctgaattttttattgagttttttgctattgatttgatcatgattgatggtgagtgtcgcggagttgttgccctggagatggcgacaggaaaattacatcgatttagatcgcacaaagttatattggcaactggtggttatgggagatcatacttctcatgtacgtcagcgcatacatgcacaggagatggtaatgcaatggtgactagagcaggacttccattgcaggacatggaatttgttcaatttcatccaactggaatttatggcgcaggaatgctcattacagagggagcaagaggtgaaggtggttatctgacaaactcggacggagagcgatttatggaaagatatgcccccaatgcaaaagatctcgcatcaagagatgttgtaagccggtcaatgacaattgaaattcaagaagggaggggtgttggtcctgataaagatcatatttttctgcatctggagcatctgggttcagatgttatagatgaacgtcttcccggtatcgcagaatcagcaaaagttttcgctgatgttgatgtcactgagtcgccaatcccagtgctaccaactgttcactataacatgggaggaattccaaccaattacaatggggaagttgttacgctgcataatggtgatccagagcatgttgtgccgggacttatagctgttggtgaggcaggatgtgtttcagtgcatggtgccaataggttgggatcaaactctttgcttgatctggtggtttttggaagggcggcagcaaaattttgtataaatgatttagaaaataaaggaagtttggaaccatttccaaaagatgccggagaaaatagtatctccaggcttgataaaattcgcaatgcaaaaggttcagtttcaacctctgagttgaggcttgaaatgcaaaagattatgcaaaacttcgcagctgtatttagatcgggcgactctcttaaaaaaggagtttctcttcttagtgaatcctatgagaagtttgaggatatttctgtttcagatcgatctttgatttggaatacagatataattgaaactatggaattagaaaacctcttaataaatgcaaccgcaacaatcgactctgcagaacatagaaaagaaagtcgaggtgcgcatgcaagagaggatttcactgagagggatgaccaaaattggatgaagcatactttgtgctggataaatggaccaggaaaagtaagttttggatatcgtcctgttcatcaggaaacactgactgaagaagtggaagccattccaccaaaagcgagagtgtattga

SEQ ID NO: 219262 - DNA, 1777 bp, Unknown
  Bacterial polypeptide expressing nucleotide sequence isolated from the Sargasso Sea
ttgggcaatattgaattttcagaaaaacaatttgatgtagtgattgtcggaggtggaggctctggtttaagagcttctctagaaatatcaaaatcaggtttaaatgttgctgtcatatcaaaggtttttcctactagatcacatacagtagcagctcaaggaggaattacttgtgcaattgcaagcgctgatccaaacgatgattggagatggcatatgtttgacacagttaaaggttcagactacataggagaccaagatgcaattgagtatatgtgttcagagggccctgaaactgtatttgagcttgaacacatgggactgccattttcaagatttgaaaatggaagaatatatcaaagaccatttggtgggcaatcaaaagaatttggagaaggaggtcaggcagcaagaacatgtgctgcagcagacagaacaggacatgctcttttacatactctttatcaagcaaatctaaaagcaggaacaaatttcttaaatgaatggtttgcagcagacataataaaaaatgattctggtttgatctctggtattagttgttttgatatggagacaggtgaaatatcaataataaagtgcaacgcaattgttttagcaactggaggtgcaggacaagtgtacgaacaaaatactacttctttaatttgcactggagatggcctagggatggcattaagaaaagacttgcctctacaagatatggagatgtggcaatttcatccaactggcctatatggtaatggatcattaatgactgaagggtgtagaggtgaaggtggatatttgattaattctgaaggtaaaaggttcatgcctgattatgcacctaaggcaaaagatctagcatctagagatgttgtctcaagatgtatagtgcaagaaattttagcaggcagaggttgtggagataaaaaggatcacgtgctactaaaaattgatcatcttggagcagaagctataacaaaaaaacttcctgaaataagagagatatcaatgacttttgcaaatgttgaccctatagaaaatccaataccagttgttccaacttgtcactatatgatgggaggaatacctacaaacattaatggccaagtaatcacgcaagacaatgatggaaatgattctgttgtgaatggtctttattcaatcggtgaagcagcaaatgtttcagtgcatggagccaatagacttggtggtaattccttattagatctggtggtttttggtagagcagcaggcaaacatataaatgaagaattatcagagcaatcttctcctgcaatgtcagatacaaatattgaagaatctcttgaaaccttaattagaattcaagaaacagagaaaggtgaaagtgtgtttaatcttagatcagagatgcagaatgttatgcaaaattattttggagtctatagaaacgaggatttaatgaaggaaggcactagcaaattagaagaaataacagagagaacaaaaaatatacatttaaatgataaatcagatcaatttaattcagaaagagttgaagttttagaatatttaaacttacttgatatagctaatgctactgcatactcagcacttgaaagaaaagaaagtagaggtgctcatgcaagggaagatttcccagaaagagatgatgaaaactggttatgccactcattatttttcaaagataataacagagttagcaaaagagctgttaacttaaagcctaaaacagttgaaacttttaaaccaaagccgagagtgtattaaa

SEQ ID NO: 219263 - DNA, 673 bp, Unknown
  Bacterial polypeptide expressing nucleotide sequence isolated from the Sargasso Sea
atgagctcatataaaataatagatcatgaatatgacgttgtcgttttgggagcaggtggctctggtttaagagcagccgtgggtttgagtgaagttggtttgaaaacagcttgtatttcaaaagtattccctactcgtagtcatacatctgctgctcaaggtggaatatctgcagcgctaggaaatatgggagaagatgactggcgttggcacatgtacgacactgttaaaggatccgattggttaggagaccaggactcaatagaatatttatgcaaggaagcaccaagagcagttcttgagttagaaaaatatggggtgcctttcagtagaaccgaagatggaaagatttatcaaagaccatttggcggaatgacaaaaaactatggaaatgagacggtccaaagaacttgtgctgcagctgacagaactggtcatgctattcttcatactttatatggacaagctttaaagcataatactgaattttttattgaatactttgctctagatttactcatgaaagatggagcttgcaagggtttgattgcgtggaatttaaatgatggaactattcacaggtttagatctcatattaccataatagcaacaggcggatatggaaaagtttattattctgcaacgtctgcacacacttgtactggagatggaa

SEQ ID NO: 219264 - DNA, 624 bp, Unknown
  Bacterial polypeptide expressing nucleotide sequence isolated from the Sargasso Sea
gatgttagcttattcctatgacacgcacgactatgatgtagttgttgttggcgctggtggcgccggcttgagagcgactttaggaatggcagaacaaggcctaaagacggcttgtgtcacaaaggtatttccaactaggtcgcataccgtagccgctcagggaggaattgcggcgtcattgtcaaatatgggcccggatcactggcaatggcatatgtatgacactgtgaagggctctgattggcttggtgacacggatgcaatggaatatctagctcgagaagcccccaaagccgtttatgaattagagcattatggggtgccattcagtcgaaccgaggaaggcaaaatataccaacgaccatttggcggtcatacaactgaatttggagaaggtccgcctgttcaaagaacatgtgctgcagcggatagaactggccacgcaattttacacacactttacggccagtctctcaaaaatgaggcagagttctatatagagtattttgcattagatttgatgttttctgacgatggtatttgtacgggagtagtttgctggaaactcgatgacggttcaatacatgtgtttaacgctaaaatggtggttcttgcgacaggtgg

SEQ ID NO: 219265 - DNA, 676 bp, Unknown
  Bacterial polypeptide expressing nucleotide sequence isolated from the Sargasso Sea
atgagcgcatataaaattatagatcatgaatatgacgttgtagttttaggagcaggaggatctggtcttagagctgccgttggcctatcagaagctggattaaaaacagcttgtatttcaaaagtctttccaactagaagtcacacatctgcagctcaaggaggtatctcggctgcacttggaaatatgggagaagatgactggagatggcatatgtacgatacagtaaaaggctccgactggttaggtgatcaagatgcaatagaatatttatgtaaagaggctccaagagcagtagttgaattagaaagatatggtgtcccttttagtagaacagatgatggaaaaatttatcaaagaccgtttggcggaatgacaaaaaattatggtaacggtacagcccaaagaacttgtgctgcagctgatagaacgggccacgcaattttgcacactctttatggccaagcattaaaacataacacagaattttttattgagtatttcgcactagacttaataatgaaaaatggtgagtgcaaaggagttatagcttggaatttaactgatggaacaattcatagatttaaatcgcacattacaataattgcaacaggcggatatggaaaagtctattactctgctacatcagcacatacatgtacgggagacggtaacg

SEQ ID NO: 219266 - DNA, 1746 bp, Unknown
  Bacterial polypeptide expressing nucleotide sequence isolated from the Sargasso Sea
aatgagtgcttatgaaatcactgaccatcaatatgatgttgtcgttgttggtgcgggtggcgccgggttgcgtgcaaccctcggcatggctgctggtggattgaaaacagcctgcattacgaaagtttttcccacgaggtcgcataccgttgccgcccaaggtggtattggggcggcattgaacaatatgggcgagggtgataattggcagtttcatatgtatgatactgttaagggatcagattggcttggcgatcaagacgccattgagtatatgtgccgaaatgccataccgtcggtgatcgagttagaaaattatggcgtgcctttttcgcgaactgaggaaggcaagatttatcagcgtccatttggcggccatacgctggaccacggtaaatcaatggcccggcgggcttgtgctgcggctgaccggacgggtcatgccatcctgcacactttgtatcaacaatgtttaaaatatcaggcgcatttccatattgaatattttgtccttgacctactgatgactgatgaagctgaatgtgcaggcgttctagcactatgtatggaagatggcagccttcatcggttctggggacagcaaacggttctagcaactggcggttacggccgtgtttatttctcctgtacatcggcccacacttgcactggcgatggcaacgctatggcgcttagggctgggttgccgcttcaagatatggagtttgttcagtttcacccaaccggggtttatggcgctggtgttcttattaccgaaggcgctcgaggtgaaggtggttatctgactaattctgagggcgaacgttttatggaacggtttgccccaaccgctaaggacctagcaagccgtgatgtggtaagtcgggcgatgacgattgagatcaacgagggacgcggtgtcgggcctaacaaggaccatataatgctgcatcttgagcacattgactctgcaacacttcatacgcggcttccgggcattactgaaacagcaaagattttctgtggtgttgatgtgacgcgcgaacccattccagtcttgccaacggtccattataatatgggcggtataccaaccaactataatggtgaagtggtggctccaaccaaggataatgaaaatgcagttgtgcccggtcttatggcaattggtgaggcagcctgcgtttcggttcatggagcgaatcgcctcggcacgaactcgcttcttgacattgtggtcttcggccgggccgcagctcaccgtgccactgaaattgttacacctgatgccaccttgaagcgggcaccccaacatgcaacagacaaagcgattgctcgttttgatcgaatgcgtaacgcgaatggcagcaaaagtgcagcatcgattcgactagaaatgcaacatgcgatgcagcgtcacgctgcggtgtttcgatctagcgaatcactagaacgtggtgtcgggacaatggaccagattgctggcaagatgggacatattggcgttgcagataaatcacttatctggaacactgacctaattgaggcactggaactagaaaatttgatgggccaggcgttggttagcataagatctgccgcccaaagacaggagtcacgtggtgcgcacgcgcatgaagattggcctgagcgtgacgatgaaaaatggatgaagcatacggttatgtggcttgatgaacaaaataagtcaaagttggattaccgcagggttgggatgacgacatg

SEQ ID NO: 219267 - DNA, 1213 bp, Unknown
  Bacterial polypeptide expressing nucleotide sequence isolated from the Sargasso Sea
gtatgatacagtcaaaggctctgattggctaggagatcaggatgcaattgaatacttatgtaagaacgcccccaaagcagtcctagagttagaaaattatggtgtgccatttagtcgaacagaagatggcaaaatatatcagcgggcttttggcggcatgacaaaaaattatggtgacggaactgcacaaagaacgtgtgctgcagcagatagaactggtcatgcgattattcatactctttatggacaatcattaaaacacgatgtggattattatatagagtacttcgttttagatttacttatggttcaaggtgaatgcagaggtgtcgttgcctggtgtttagaggatggcaagctacatgtatttaactcaaaacaaaccgtattagcttcaggtggttatggaagggtttatttctctgctacatctgctcacacatgtacaggagatggaaatgcaatggttttaagagcgggactccctttgcaagatatggaatttgttcaatttcatcctacaggagtttatggtgttggctgtttgataactgagggagccagaggtgaaggaggatacttagtaaatagtgagggagaaaggtttatggaaaggtacgctccatcagcaaaggacttagcttcaagagatgtagtttcacgatctatcaccaaagaaattattgatggaagaggcgtagggaaagacaaagatcacatgtatcttcatctagaccatattgatagcaaaattcttgaagaaagattaccagggatatcagagtctgcaaaagtttttgctggagtggatgtaactaaagacccgatacccattattccaacagtccattataatatgggtggtataccaaccaacttccatggcgaagtaatgaatcttgtcaaaggcgatgaaacagtcgtacctggtttaatggctgttggtgagtcagcttgtgtgagcgttcatggcgcaaatagattaggatctaattctctaattgaccttgttgtctttggaaaagcagctgctgacagaatagatgatattgtccctaagggggagaaaaataaagatattcctaaatcagtcatcgatgatgtagtagcaaggtttgatgctaccagaaattctgacggtgatgttacaactgctgaattgagatctcaaatgcaaaaagtcatgcaaaaacattgtgcagtattcagagat

SEQ ID NO: 219268 - DNA, 1488 bp, Unknown
  Bacterial polypeptide expressing nucleotide sequence isolated from the Sargasso Sea
tatggacttagtaaaacacgaacatgatgttctagtagttggcgcaggcgggtcaggattacgtgcatcaatgggcttatcacaatcagatctttcagtagcttgtatatctaaagtttttcctactagaagtcacactgtggctgcacaaggaggcattagtggcgctcttggaaatatgggtgaagatgattggcgatggcatatgtatgatacagtcaaaggctctgattggttgggagatcaagattcaatcgagtacatgtgcaaaaacgcagttgaatccattatagagctcgaacactatggcgtgcctttctcaagaacagaagaaggaaaaatttatcaaaggccttttggaggtatgacgactgaatatggaaaaggaattgcacaaaggacatgtgcagcggcagatgcaactggacatgctatacttcatacgctctacaatcagtctttgaaaaatgatgttgatttcttcgtagaatattttgtcattgatttaatattcgaagagggaaaatgtgtaggtgttctagcttggtgtcttgaagatggtaaaatacatctattccaatcacacatggttattttagcaacaggaggatatggaagagcatatctctcatcaacatcagcacatacgtgtactggtgatgggaatggtatggtattaagagccaatctgccactacaagacatggagttcatacaatttcatccaactggaatatatggcgcaggttgtttgatcactgagggtgcaagaggtgagggcggatacttaacaaattctgaaggtgacagatttatgcctaaatatgcacctaatgcaaaagatttagcatctcgcgatgttgtcagtagagcaattcaaatggaggtaaatgctggaaggggagttggagcagaaaaggaccacgcacacttacatctcgagcatttagatgtagatacaataaacaataagcttcctggaatagcagagactgctcgaatattcgctggtgtagatgttactaaagatcctattcctgtcatacccacagtacattacaacatgggaggcactccaactaatattaatacagaagtattagattccgacaataatgttgttcctggtttaatggcaattggtgagggggcatgtgtatcagttcatggagctaatcgcttaggatctaattctcttcttgatcttgtagttttcggaagatcagcagctaatcgcacactcgaggtattgaaaaataagcccgatagtcatatcgaagtatctgaatctacaatagacaaaattctctcaagatttaactctgtaaggaatgctagtggtgacattaacccatcagaaattagagatagcatgcaaaaaactatgcaaaggtatgcaccagtgtaccgagatcaagcaacgttggataagggtatagagataatgaaaaatctatttgatgatttcagtaatataaaattatcgga

SEQ ID NO: 219269 - DNA, 1792 bp, Unknown
  Bacterial polypeptide expressing nucleotide sequence isolated from the Sargasso Sea
aatgccaaaatatccaatcacagatcatgagtatgatgttttagttgtcggtgctggtggtgctggtcttagagctacattaggcatgacggcagctggctttaaaacagcctgtattaccaaggtcttcccaacacgctctcatactgtcgctgcacaggggggtgttggagcggctttaaataatatgggtgaaggtgacaactggcagtatcatatgtatgacacagtcaagggctctgactggcttggtgaccaggatgccattgagtatatgtgccgcaatgccattccatctgtcatcgagcttgaacattatggtgtgccgttctcacgcacagaagaaggcaagatctaccagcgcccctttggcggccatactctggaacatggcaaggccatggcgcgtcgtgcttgcgcagcagcagaccgtacagggcatgctattttacataccttgtatcagcaatgtctgaagtacaaggcagagttttttattgagtattttgccctggatctcctgatggatgatgaagggcgttgttgtggtgttctggctttatgtatggaagatggtaccctacaccgctttcgcgcccaaaagactgtgcttgccacaggagggtatggtcgtgtctacttctcatgtacttctgcacatacttgtacaggtgatggtaacgcgatggttttacgtgctggcttgcctctacaggatatggagtttgtccagttccatccaacaggtgtttatggagcaggtgtattaattactgaaggtgcacgtggtgagggaggttatttgactaactctgaaggtgagcgctttatggaacggtatgcaccaactgccaaggaccttgccagccgcgatgttgtcagccgtgctatgacacttgagattaatgaagggcgcggtgtaggtaatgataatgatcatatcatgcttcatcttgaacatattgaacctgagacacttcataagcaattgccaggcattacagagacagcaaagatcttctgtggtgttgatgtaacacgggcaccaatacctgtattaccaactgtccattataatatgggcggcattccaaccaattaccatggtgaagtattatcaccaacagctaaagaccagcaccgtacggcccctgggctcatggctattggagaagcagcatgtgtgtctgttcatggagcaaaccgcttgggaacaaactctctattagatattgttgtctttggacgcgctgctgcgcatcgtgctgttgatacaatgaagccaggcgagtctttaccgcctttacctgaatcagttacacaaaaagccattgatcgatttgaccgcattcgccattcaaaaggtgatgtatcaacagctgaactcagactggatatgcaaaaagctatgcaaaagcatgctgctgtgttccgcaatacagagatacttgacgaaggtgtaaagaaactgggtgatattgcaatggatatgaacaatgtccgtatacaagataaatctttgatctggaacacagagctcattgagacattagagcttgataacttgatgggacaggcactggtaacaataagatcagcaagtgagcgtaaagaatcgcgtggtgctcatgcgcatgaggattatccagagagagatgataaagactggatgaaacacactgtaatgtggctcgatgagaagaacaaatcaaaactcggatacagagacgttacattatcaacattaaccaatgaggtgcaaagtattgcacctgttgcacgcgtttactag

SEQ ID NO: 219270 - DNA, 1753 bp, Unknown
  Bacterial polypeptide expressing nucleotide sequence isolated from the Sargasso Sea
atggagtttgatggaatcattgtaggtggcggcggggctggaatgagagcttctctgcaattagctgaatcaggattaaacacagctgttatatcgaaagtattcccaactagatcgcataccgtttcagctcaaggaggaataacttgcgctatccaaagcgatgaccctgatgacgattggagatggcatatgtttgataccgtaaaaggttcagactacatcggagatcaggaagctattgaatacatgtgcagtgaagggccaaaagctgtattcgagcttgaacatatggggttgccattttcaagaacagaggaaggaagaatttatcaaagaccttttggagggcaatcaaaggattacggtaagggtggtcaggcaacaagaacttgtgctgctgcagatagaacagggcatagcttacttcatacactttaccaagctaacttaaaagccgggacaaattttctaaatgaatggtttgctgtcgatatggtcttaaatgcagacggtgccgttgttggggttattgcctttgaaatagagacaggagagatttattacataaagtctaaagcaactgttttagctactggaggtgcaggaagaatttatgcttcaacaactaatgcactcattaactcaggagacggtataggaatggctttgagggcaggaatgccggtccaagatattgagatgtggcaatttcatccaacaggcattcatggtgcaggaactttagttactgaaggctgtagaggagaaggcggataccttttaaataaagatggtgagaggtttatggagagatatgcccctaactcaaaggatttagcaagcagggatgttgttgcaagatctatggctctagaaattttagagggcagaggttgtggaccaaatgaagatcatatctttttgaggctagatcacttaggtcctgaagtcgtacacaaaagacttcccggaataaccgaactgtctaaaacttttgctggtgttgacccagctgtacaacctatcccagtagttcctacttgccattacatgatgggaggaatacctactaacattaatgggcaagttattacggtaaaagaaggtaaagatgaagtagtagagggtttgtacgctgctggtgaggttgcgtgtgtttctgttcacggaggcaataggttgggaggcaattctttattagatttagtggtgtttggaagagcagctggcatttatatagaagagtctatgaaacaaggagttgaactaaaagatgcttcaactgatgatatagataaagctctggaacggttgaacaagttaaattcctccacggaaggagaacaggtgggtgtattgaaggaaagaatgcagcaaaacatgcaaaataatttcggtgtatttagaacaaaagacttgatggagaaaggtatagaagatttgtctaaagtaagaggtgaagttgaaaatatgcacttaaaagacaaatcggcgacatttaatactgcgaggatagaggcattagaaatgcaaaatttatttgaagtagccgaggcaactgcgatcaccgcaaatactagaaaagaaagcagaggagctcattcaagagacgattatcctgatagagatgatgaaaattggttaaaacattctattttcttttctgaaactaaagaagtaagtaaaagggatgtcaattataggcctaaaaccgtacaagcatttcaaccaacggtaaggagttattaat

SEQ ID NO: 219271 - DNA, 994 bp, Unknown
  Bacterial polypeptide expressing nucleotide sequence isolated from the Sargasso Sea
ggaaggtggttatctagtaaatgcaaaaggagaaagattcatggagcgttatgctcctaaagcaaaagatctagcatctagagatgttgtaagtagatcaattgcagtagaaattaatgaaggtagaggtattggaaaagaacaagatcatgttcatcttcacattgatcatttggatccaaaagttatagatgagagacttccaggaatatcagaggcttcaaaattatttgcaaatgttgatgtaacgaaggaacctataccagtagtacctacagtgcattataatatgggtggaataccaacaaattataaagcagaggtccttacattaaatggatctgagaaaacagtacctgggttaatggctatcggagaagcagcatgtgtttctgtccatggcgcaaatagattaggttcaaactcactaatagatttagtagtttttggaagagctgcagcgaaaagagcagcagagttagtaaaacctggaatgaagcatgatgaaattgataaaaatgaaacggatagatgtttagatagatttgacaaattaagaaactcagagggttcaaatccaacatctgaactgagactttcaatgcaaaaaacaatgcaatcaaagtgcgctgtatttagaactgagaaaacattaaaggaaggagttgatgaaattagaaaaccttatgatgggatggactctctttctgtaaaagataagtcattaatctttaatactgatttagttgaaacactagaatttgacaacttaataagacaagcaataactacaatggactctgcgtatcatagaaaagaaagcagaggagctcatgcaagagaagattttccaaagagagatgatgagaattatatgcaacacactctgtcttggtgtaatggttcaaaaactaaaattaattacagacctgttcatagatcaacacttacaaatgatgtacaatatttccctccacaggaaagagtatattaa

SEQ ID NO: 219272 - DNA, 874 bp, Unknown
  Bacterial polypeptide expressing nucleotide sequence isolated from the Sargasso Sea
aggtagaggtgtaggtaaagaaaaagatcatgttcatttgcatttaagtcatctagataaaaatgtaattgaaaatagactgccaggcatatcagaggcagcaagattatttgcaaatgttgatgtaacaaaagatccaatccccgtagttccaacagttcactataatatgggtggaattcctacaaattataaagcagaagttttgactataaatggttcagaaaaaactgttccaggtttaatggcgattggtgaagcagcatgtgtttctgtacatggagcgaatagattgggatcaaattctttaattgatttagttgtttttggaagagctgccgcaaaaagagctgcagaattaatcaaaccaggaacacctcatgaagatattagtgaaattgaaacacaaaaatgtttagatagatttgataagttaagaaatgctaaaggagaaaatagtacagcagagttaagactttctatgcaaaaaactatgcaatctaaatgtgctgtgtttagaactgaaaaaaatcttaaagagggtgtagatgaaattagaaaaacttacgattgtatggactctatttcagttaaagatagatctttagtgtttaacactgatttagttgaaaccttagaatttgataatttaataaggcaagctgtgacaacagtagactctgcttatcacagaaaagaaagcagaggagcacatgctagagaagattatccaaagagagatgatgaaaattttatgcaacacacattggcttggtgtgatggaaaaaatacaaaaataagttatagagcagtacacaagtcaacattgactaacgaggttcaatattttccaccacaggaaagagtttattaa

SEQ ID NO: 219273 - DNA, 1273 bp, Unknown
  Bacterial polypeptide expressing nucleotide sequence isolated from the Sargasso Sea
tttttgctgttgatctttgtgaaaaactcaaagaatgagattactggagttatagctttttctattgaatcgggtgaagtctgttaccttaaagctcaggcaactgttttagcaactggaggcgctggaagaatatatgcatctacaacaaatgctttgattaataccggagatggtcttggaatgactttaagagctggttttcctgcacaagatatggaaatgtggcaatttcatccaactggtatttatggtgcagggtctcttgtgactgagggttgcagaggtgaaggtggatatttaattaactcagatggtgagagatttatggaaagatatgctccaaatgctaaggaccttgctggaagagatgttgttgctagatcaatggttatggaaatacttgaaggtagaggatgtggtcctgaaaaggatcacgttttcttgaaactcgatcatctaggtgcagatgtccttaattcaaaactaccaggcatatgcgagctctcaaaaacttttgctcacgttgatcctatcaaggaagcaattccagttgttcctacatgtcattacatgatgggaggaactccaacaaatattcatggccaagcattcaataggaatgacggaaatgacttcatggtttcagggcttttttctgttggggaagctgcgtgtgtatctgttcatggtgccaacagattgggtggaaactctctattagatttagttgttttcggaagagctgcaggcaaacatataaatgaagagcttaaatctggtggtggagtagataatgcttcgagtgaagatattgaattggctatgagcagactgaactctttaaatgaatctgaatctggatacgaggttgccgatgttaaaaaacaacttcaaacttgtatgcagaactactttggtgtttttaggcgtggagagtttatggagaaaggagtcaaagaacttgaagaaataagagagaaatctgaaaatctttacctaaaggataaaagtattgctttcaacactaatagagttgaagcactcgagttacagaatctattagaggttgcagaggctacagctatttctgcaatgatgagagacgaaagtagaggtgctcatgctagagatgattttcctgaaagagatgatgagaattggttatgtcattctttatatgatccagttgaaaaaaaattgggtaaaagagacgttaattttgttccaaaagaagtagaagcatttccacctaagatgaggtcttattaaa

SEQ ID NO: 219274 - DNA, 1168 bp, Unknown
  Bacterial polypeptide expressing nucleotide sequence isolated from the Sargasso Sea
actggtggttacggaaaaagtttattattcggcaacatcagcacatacttgcactggagatggaaacgcgatggtgcttagagcaggattaccactacaagacatggagtttgtacagtttcaccctacaggaatttacggagttggctgtttaataaccgaaggtgtaaggggggagggaggtttcttagtaaatggtaaaggcgaaagatttatggaaagatatgcacccaatgctaaagatttagcttcaagagacgttgttagtagatcaatggaaatggaaatcaatgaaggaagaggtgcaggaaaaaataaagaccatatcaacttgcatttagatcatatcgacaaaaaagtcatagaagagagactaccaggaatatcagaggcagcaaaaacttttgcaaatgttgatgtaagcaaggaacctattccagttgttccaacagttcattacaatatgggaggtattcctacaaattataaagcagaagttttaacactaaatggatccgaaaaaattgttcctggattaatggcaattggcgagtcagcttgtgtgtcagtccatggagctaataggttaggatcaaactctttaattgatctagtagtttttggaagagcagctgcaaaaagagcagctgagcttattaaaccaggaagccctcacgaagaaatctcgaattcagagacagataaatgtttagggaggtttgataaaattagaaactctaatggatcaacaaaaacatctgagctaagattaaaaatgcaaaaaacaatgcaatctaaatgtgcagtatttagaacagaaaaaactcttaaagagggtgtagaacaaattcgaaaacctttcgaaggaatgaacgatctttctgtcaaagataagtctcttttattcaataccgatttagttgaaactttagaattcgacaatctaattagtcaagctttgacaacaatggactctgcgtacaatagaagagagagtagaggagcacacgcaagagaagattttactaaaagagacgataaaaattttatgaaacacactttagcgtggcaaaaaggaaaaaaagttgaaataaaatatagagatgtacactctagaactttaacaaatgatgtacaatattttccacctaaagagagagtttattaa

SEQ ID NO: 219275 - DNA, 1060 bp, Unknown
  Bacterial polypeptide expressing nucleotide sequence isolated from the Sargasso Sea
atttgtacaatttcatccaacgggaatatatggtcatggaacattaatttccgaaggtgtaagaggagaaggtggttatctagtaaattcaaaaggagaaagatttatggagcgttatgctcctaaagcaaaagatttagcatctagagatgttgtaagtagatcaattgcagtagaaattaatgagggtagaggtattggaaaagaacaagatcatgttcatcttcacattgatcatttggatccaaaagttatagatgagagacttccaggaatatcagaggcttcaaaattatttgcaaatgttgatgttactaaggaacctataccagtagtacctacagtgcattataatatgggtggaataccaacaaattataaagcagaagttttaacattaaacggatctgaaaaaactgtacctgggttaatggctattggagaagcagcatgtgtttctgttcatggcgcaaatagattaggttcaaactcattaatagatttagtagtttttggaagagcggcagcgaaaagagctgcagagttagtaaagcctggaatgaagcatgatgaaattgataaaaatgaaacggatagatgtttagatagatttgacaaattaagaaactcagagggttcaaatccaacatctgaactgagactttcaatgcaaaaaacgatgcaatcaaaatgtgctgtatttagaactgagaaaacattaaaggaaggcgttgatgaaattagaaaaccttatgatggaatggactctctttctgtaaaagataagtcattaatctttaatactgatttagttgaaacactagaatttgacaacttaataagacaagcaataactacaatggactctgcgtatcatagaaaagaaagcagaggagctcatgcaagagaagattttccaaaaagagatgatgagaattatatgcaacacactttgtcttggtgtaatggttcaaaaactaaaattaattatagacctgttcatagatcaacacttacaaatgatgtacaatattttcctccacaggaaagagtgtattaa

SEQ ID NO: 219276 - DNA, 710 bp, Unknown
  Bacterial polypeptide expressing nucleotide sequence isolated from the Sargasso Sea
aatgagtttacccgttcacgagtttgatgcagtagtaattggtgctggcggtgcaggtatgcgcgcagcactacagatttcgcagtctggtaaatcatgtgcactgttatcaaaagtatttccaacccgttctcatactgtgtctgctcaaggtggtattactgtagcacttggtaattcacacgaagacaattgggaatggcacatgtatgacaccgttaagggttctgattatatcggtgaccaagacgctatcgaatacatgtgtaaaactggtccggaagcaattatcgaaatggaaaatatgggtctaccattttctcgtttcgaaaacggtaaaatctaccagcgtccttttggcggtcagtctaagaactttggtggcgagcagggcgctcgtacagcagctgcagctgaccgtactggtcacgcgcttctacaccttctttaccagcaaaacgtaaagaacaaaacaaaagttttctctgagtggtatgcacttgacctagttaagaaccaagacggagacgttgttggttgtaccgcgattgatatcgaatctggtgaagtagtttacttcaagtctcgcgcagttgtacttgcaacaggtggtgcgggtcgtatctacgcatctactacaaatgcacacatcaataccggtgacggtgttggtatggcacttcgtgcaggcgttgcagttcaagatagga

SEQ ID NO: 219277 - DNA, 976 bp, Unknown
  Bacterial polypeptide expressing nucleotide sequence isolated from the Sargasso Sea
aattccaaggtgaaaggtttatgggaaagatatgctcctaaagccaaagatttagcatcaagggatgttgttagcagatcaattgctattgaaatcaaagaaggtcgaggtataggaaaaaataaagattacgtaaatctacatttggatcatattgatcccaaaattatagaaaaaagattaccaggtattgcagagtcagcaaaaactttttgtgatgtcgatgttacaaaagatccaattccagtggttcctaccgttcattataatatgggtggaattccaacaaattataaagcagaagtattaacttcgaatggaaaggacactaccgttccaggacttatggctatcggcgaagctgcatgcgtttctgttcatggtgcaaatagattaggatcaaattctttaattgatttagtagtatttggtaaatctgccgcaaacagagctgctgaaattgtaaagccaggatcaaatcatgaggaacttcctcaaagtgaaactgataagtgcttagatcgtttcgataaattacgtaactcaaatggttctacaaaaacatctgaattaagattatcaatgcaaaaaactatgcagtcgaaatgtgcagttttcagaacagaaaaaactttaaaagaaggaatgagcgatatcagaaagccctttgaaggaatgaaagacatttctgtttcagataaatcattattattcaatactgatcttgttgaaacattagagtttgataatcttataagacaagcaatgacaacaatagactcggcttaccatagaaaagaaagtcgaggggctcatgctagagaggattttaaaaagagagatgatgaaagttatatgacacacacattggcttggcaaaaaggaaatgatgttaaagttgcttacagaccagttcatgctaagactttaacaaatgatgtgcagtattttccgcccaaagagagagtgtattaat

SEQ ID NO: 219278 - DNA, 430 bp, Unknown
  Bacterial polypeptide expressing nucleotide sequence isolated from the Sargasso Sea
tatgagttcatataaaattgtagatcatgaatatgatgttgtagttcttggagctggaggagcaggcttaagagctgcagttggtcttagtgaagctggattaaaaacagcttgcatatctaaggtatttccaactagaagccatacgtctgccgcacaaggaggtatttcagcggctcttggaaatatgggggaagacgattggagatggcacatgtatgatacagtcaaaggatctgattggctaggtgaccaagattgtattgaatatttatgtaaagaagctccaagagcagttttagaattagagagatatggggttccatttagtcgtacagaagatggaaagatatatcaaagaccgtttggaggaatgacaaaaaattatggaaagaaactgtgcaaagaacttgtgctgcagcagacagaa

SEQ ID NO: 219279 - DNA, 679 bp, Unknown
  Bacterial polypeptide expressing nucleotide sequence isolated from the Sargasso Sea
atgactaattcatacaaaattattgatcaccattatgacgttgtagttgttggagctggagggtcaggactgagagctacgcttggatgtgcagaagccggattaaaaacagcttgtatatcaaaagtgtttccaacaagaagtcatactgttgcagcacaaggtggaattggagcagctctaggtaatatgggtgaagataattggaagtggcacatgtatgatacagttaagggttcagactggcttggagatcaagatgcaattgaatacttatgttctaaagcccctgaagccgtaattgaacttgaagaatatggtatgccttttagtagaacagatgatggaaagatctatcaaagaccttttggtggtcacttaactaataatggtgagggagcacctgctatgagagcttgtgcagcagctgatagaacgggacatgctttactccatacactttatcagcaatcacttaaaaataatgtagaattttatattgaatattttgttttagatttaattactgatgatcaaggtaattgtattggtgtggtaacatggtgcttagaagatgggatcaatccatcgatttttatctcatcaaacaattctagctactggtggatatggaagagcctacttctcatctacaagtgctcatatatgtactggtgac

SEQ ID NO: 219280 - DNA, 1081 bp, Unknown
  Bacterial polypeptide expressing nucleotide sequence isolated from the Sargasso Sea
attaccattacaggacatggaatttgttcaatttcatccaacaggaatttacggagtaggaactcttatatcagaaggtgttagaggagaaggcggttatcttttaaactccaagggtgaaagatttatggaaaaatacgcacccaaagctaaagatttagcttcaagagatgtcgtaagtagatcgatagcagttgaaattaatgaaggtagaggagttggtaaaaataaagattatgttaatttacacttagaccatcttgacccaaaagtaatagaggaaagattgcctggaattgcagaatcagcaaaaacattttgtgaagtggacgtgagaaaagatccaataccagtagttccaactgttcattataacatgggtgggataccaactaattataaggctgaagttttaacattaaatggaaaagagtccactgtgccaggattaatggctataggagaagcagcttgtgtttcagtccacggtgcaaatagattaggttcaaactcattaattgatttagtagtttttggaaaatcagcagcaaatagagctgctgagcttgttaaacctggaacacctcatgaagaaataccacagagcgaaacagataaatgtctagacagatttgacaaacttcgtaacgcttcgggtggaacaaaaacttcagaactaagattatctatgcaaagaacgatgcaatcgaaatgtgcagtttttagaaccgaaaaaacactaaaagaaggaatggatcaaatcagaaaaccttttgaaggaatgtctgatatttcagtttcagacaagtctttattatttaatactgatcttgtcgaaactttagaatttgataatcttattagacaggcgatgacgacaatagactcagcttatcatagaaaagagagtagaggagctcatgcaagagaagattttaaaaccagagatgataagaaatatatgacacatactttagcctggcaaaaaggaaacgaagttaaagtagcttatagacctgttcatgcgaaaacattaacaaacgatgtgcaatactttccgccgagagaaagagtatattaa

SEQ ID NO: 219281 - DNA, 1154 bp, Unknown
  Bacterial polypeptide expressing nucleotide sequence isolated from the Sargasso Sea
tttttcctgtacgtccgctcatacgtgcaccggcgacggtaacggaatgattctccttgctgggctaccgcttcaagacatggaatttacgcaatttcaccccaccggcatctacggagccggatgcctaataaccgaaggagtaaggggagaaggcggttacctgacaaactcagatggcgaaaggttcatggaacgctatgcgccaaacgctaaagatttggcatcacgagacgtcgtttctcgttcgatgactatggaaataagggacggcagaggtgtaggcaacctaaatgatcatatacacctacacctagaacatttaggtccagaagtaattaacgaaagattgcctggtatagcagaatcggccgaaatatttgctggcgtcgatgtgactaaagagcctatccctgtattacctacggtgcactacaacatgggaggaatccccacaaactatcatggtgaagttgtcactttgagaaatggggatccggatagtatcgttccaggcttgatgtctataggtgaagcggcgtgtgtttctgttcacggagccaatcgacttggatctaattcactactagatttggtagtgtttggacgagcggcagctaaaagactgtcagaaacaataacacccggcgcgaaacatccgcctctccaaaaaaatgcaacggagcagataatttctcggtttgacggactccgatatgcggatggttctgaatctaccgcttcccttcgactagaaatgcaacgcgtgatgcaaaatcacgctgcggttttcagaaccggggatgttttagaggaaggaaaacaaaagatccgagaaatctataacaaatttaaccacgtaaaagtggccgaccgctctatgatttggaatacagatctagtagaaactctcgaactcgcgaatctgcttggcagttcgttgaccagtatggatgccgcagcgaatcgaaccgaaagtcgcggcgcgcacgctcgcgaagactttcccgaccgtgatgacgaaaactggatgaaacatactttaacctgggtagacgagcagggagaagtctcgtttgactatcgacccgtccacctgtacacactaacagacgaagtagaagtgataccacccaaagcgcgggtttactaat

SEQ ID NO: 219282 - DNA, 1777 bp, Unknown
  Bacterial polypeptide expressing nucleotide sequence isolated from the Sargasso Sea
tatgaattcgtataaaattatagaacatgaatatgatgtggttgtcttaggtgctggaggtgccggattaagagccgcggttggtctaagtgaggcaggattaaaaactgcatgtatatcaaaggtttttccaactcgaagccatacttcagcagcgcagggaggtatttccgcagctttaggaaatatgggtgaagatgattggaggtggcacatgtatgatacagttaaaggatcagactggctaggtgaccaagattgtattgagtacttatgtaaagaggcaccaagagctgttcttgaattagaaagatatggagttccttttagcagaacaaaggatggaaaaatttatcaaagaccatttgggggaatgacaaaaaattatggaaacgaaactgtgcaaagaacttgtgcagcagccgatagaacaggtcatgcaatattacacacaatgtatggtcaagcattaaaacataatacagagttttttatagagtattttgcattagatttattgatgcaaaatggagagtgtaaaggattgatcgcctggaatttgaatgatggaactattcacagatttagagctcatataacaataatagcaactggtggatatggtaaaacatattattcatcaacatctgctcacacatgtacgggtgatggtaatgcaatggttttaagagctggactaccattgcaagatatggaattcgttcaatttcatccaactggtatttatggtcatgggaccttaatatctgaaggtgttaggggtgaaggaggttatctattaaattctaaaggagaaagatttatggagcgctacgctccaaaagcaaaagatcttgcatcgagagatgtggtaagtagatcaatagctttagaaataaatgaaggaagaggagttggaaaagaaaaggatcatgttcatcttcatttaaatcatttagatccaaaagtaattgaagaaagacttccaggaatctcagagtcttcgaggttgtttgcagatgttgatgttactaaagagccaataccagttgtacctacagtacattataatatgggcggtataccaactaactataaagctgaagttatgacggtaaatggatctgaaaaaattgtacctggtcttatggcaataggagaggcagcgtgtgtttccgtgcacggagctaatagattaggatcaaattcattgattgatcttgtagtttttggaagagctgcagcaaaaagagcttcagaattggtaaaacctggcactccgcatgaaaaaatctcaaattctgaaacagataaatgtttggaaagattcgaaaaattaagaaatagtaatggcgataatagaactgcagatctaagattagaaatgcaaaaaactatgcaatcaaaatgtgcagtatttaggacagaaaaaactttaaaagagggtgttgaagaaattagaaaaccatatgagggaatggagtcaatatctgtaaaagataaatctttaatttttaatactgatttagttgaaactttagaatttgataacttaattaggcaagcaatagttacattagactctgcttatgaaagaaaagaaagcagaggagcacatgcaagagaagatcatcctaaaagagatgataataattttatgaaacatacattatcttggtgtgaaggaagtaaaacaaaaatctcttatagagatgtacatagatcaacgctgtcgaatgatgtgcaatactttcctccacaagaaagggtttattaa

SEQ ID NO: 219283 - DNA, 1459 bp, Unknown
  Bacterial polypeptide expressing nucleotide sequence isolated from the Sargasso Sea
tggaaatggcatatgtatgatactgtaaaaggttcagactggttaggggatcaagatgccatcgaatatctttgttctaatgctcctgaagctgttatagagttagaagaatatggaatgccattcagcagaactgatgatggtcgaatatatcaaaggccttttggcggtcatttaacaaataatgggaaaggtgcacctgcaatgcgagcttgcgcagcagcagatagaacagggcatgctcttcttcacacactataccaacagtcactaaaacataaagtcgaattttacattgagtattttgttcttgatttaatcatggataaagatggtaactgtaaaggagtggttgcatggtgtttagaagatggaacaatccatcgttttctttctcaccaaacaattttagccacaggtggttatggacgagcatatttttcttcaacaagcgctcacatttgcacaggtgatggaagcgccatggcccttagacaagatcttcctttatcagatatggagtttattcaatttcatccaacaggagtttatggtgcgggtgtacttattactgaaggtgctagaggtgagggtggttatttaactaatagtgatggtgagagatttatggagcgatacgctccgaatgctaaagatctagcttcaagagatgtagtaagcagggcaatgactatagaaataaatgaaaaacgaggttgtggtgaaaacgcagatcatgttcttttacaccttgaacacattgattcatctacacttcataaaagattgcccggaatatctgaaacagcaaagattttcgctggagttgatttaactaaagagccaattccagtgcttccaactgttcattataatatgggaggcattccaacaaatcatagaactgaagttctacggccaactgcagataatcctgataatgtatgtgaaggcttgttggcggtaggtgaggctgcgtgtgtatcagttcatggggcaaatagattaggaacgaactctctaattgatttagtagtctttggaaaagcatctagtattacagcaaaagagaaaattaaaatcaagagtaaagatatagaaattaataaaagttcattagatccaatattagagcgttttgataaaattcgacataacaaaggtgatagctcaactggagaagtaagaacagcaatgcaaaaagtgatgcaagaaaaatgtgcggttttcagaaacgacgatttaatctctaaaggtattgaagagtttaatgaaattgagagttctatggacaatatagatgtgaaagataagtcaatgatttttaatactgatttaacagagtcacttgagcttcataatcttatggcgcaatctaaggttactttacactctgctttaaatagaactgaaagcagaggagcccatgcaagagaagactttaaagagagagatgaca

SEQ ID NO: 219284 - DNA, 971 bp, Unknown
  Bacterial polypeptide expressing nucleotide sequence isolated from the Sargasso Sea
tatgagttcatacaaaatcattgatcacgaatatgatgtagtagttcttggagcaggtggctcgggcttaagagctgctgttggactaagtgaagctggattaaaaacagcatgtgtatcaaaagtttttccaacaagaagtcatacatctgctgcgcaaggaggtatatctgccgcgttaggaaatatgggtgaagatgattggagatggcacatgtatgatacggttaagggagcagattggttgggagatcaagattgcatagaatatctatgtaaagaagcccctagagctgttctagaattagagaaatatggtgttccatttagcagaacagaggatggaaaaatttatcaaaggccatttggtggaatgacgaaaaattatggaaatggaactgtacaaagaacttgtgcggcagccgacagaacaggacatgcaattttacacacactttatggtcaggcattaaaacataatacggaattttttattgaatattttgctcttgatctgttaatgaagaacggggaatgtaaaggtttaatagcttggaatttaaatgatggaacaatacataggttcagatcacacataacaattatagcgactggcggttatggaaaagtttattattcagcaacatctgctcatacttgcacaggagatggaaacgctatggttttaagagcaggtcttccattacaagatatggaatttgttcagtttcatccaacaggtatttatggacatggtacgttaatatctgaaggtgtaagaggtgaaggaggatatttagtaaattcaaagggagaaagatttatggagagatatgctccaaaagccaaggatttagcctcaagagatgttgttagccgatctattgcagtagaaattaatgaaggtagaggtgtaggaaaagaaaaagatcatgttcatatacacttggatcatttagatcaaaatgtaa

SEQ ID NO: 219285 - DNA, 1753 bp, Unknown
  Bacterial polypeptide expressing nucleotide sequence isolated from the Sargasso Sea
atggaatttgatggaattattgtaggtggaggaggagcaggtatgcgggcttcacttcaacttgcagaatcaggtttaaatactgctgtcatatcaaaggtatttcctactcgatcacatacagtctcagctcaaggtggtatcacctgtgcaatccaaagtgatgaccctgatgacgattggagatggcacatgtttgataccgttaaagggtcagactacataggcgatcaggaagctatcgaatatatgtgtagtgaaggtcctaaagctgtttttgaactagagcacatgggtttacctttctcaagaactgaagaaggaagaatctatcaaagaccttttggtggccaatctaaggattatggtaaaggtggtcaagctactagaacatgtgctgcagccgaccgaactggacacagccttttgcatacactttttcaagctaatctcaaagctggtactaactttctaaatgaatggttcgcagtagatttggttttaaacgcagacaaagcagttgtaggagtaattgccttcaaaattgaaactggagagatctattacataaaatcaaaggcaactgttctggcgacagggggggcaggtagaatttattcatccactactaatgctctaataaattcaggagacggaattggaatggctttaagggctggtatgccagttcaagatatagaaatgtggcagtttcacccaaccggaattcatggggcaggaactttagtcactgaggggtgcagaggagaaggtggatatcttttaaacaaggatggcgaaagatttatggaaagatatgcccctaatgcaaaagatttagccagtagagatgtagtatcaagatctatggctttggaaattttagaaggacgaggatgcggaccaaatgctgatcatattttcctaagattagatcatctaggacctgaagtagttcataagagattgcctggaattaccgaactttctaagacttttgcaggagttgatcctgctgttcagccaatacctgttgtacctacatgccattatatgatgggaggaatacctacgaatattaatggacaagttatttcggtggagcacggtgaagataagatagttgatggtttatatgcagctggtgaagtagcctgcgtatcagttcatggaggaaatagattaggaggaaattctctcctagacttggttgtatttggtagggccgctggtctttacatagaagagagcatgaagcagggtatcgaagtaaaagatgcttctaacgatgatattgaaaaagctttagaaagactaaatagattaaatgcttcaacagaaggggatcaagtatctgttcttaaagaaaaaatgcaacaaaatatgcagaataattttggtgtatttagaagaggagatttgatggaaaaaggtatcgaagaactagccaagactagagaagaagtaaatgacattttccttcaagataagtcggcaacctttaatacagctagaatagaagctttagagatgcaaaacctttttgaggtagcagaagctactgcgataactgctaatgagagaaaagaaagcagaggtgctcatgccagagatgacttcactgaacgtgatgatgaaaattggctaaaacattcaatttactacgccgatacaaaggaagttagcaaaagagatgtgaactatagacctaaaacagttcaagctttccaaccaatggttaggagttattaat

SEQ ID NO: 219286 - DNA, 1807 bp, Unknown
  Bacterial polypeptide expressing nucleotide sequence isolated from the Sargasso Sea
atgttagcttactcttacgaaactcatgaatatgatgtggtagttgttggtgcgggtggggctggattaagggctaccctaggaatggctgaacaaggcctgaaaacagcctgtgtgacaaaggtatttccaacacggtcacacacagttgcagctcagggagggatagctgcttctttgtctaatatgggtccagatcactggcagtggcatatgtacgatacagtaaaagggtcggactggttgggtgataccgacgcaatggaatatctcgctcgtgaagcacctaaggcggtttatgaactcgagcattatggagttccttttagtcgaacagaagaaggcaaaatctaccagcgaccatttggcggtcatacaactgaatttggagagggaccaccagttcaaaggacatgtgctgccgcagatagaactggacatgcaattctgcacacgctctacggtcaatctctgaaaaatgaggctgagttttatatagagtattttgcattagatcttatgttctccgatgatggtgtgtgcacaggtgtagtctgttggaaattagatgatggatccatacatgtttttaatgcaaaaatggttgttcttgctacgggtgggtatggtagagcctactttagtgcgacctcggcacatacttgtaccggcgatggaggaggtatggtggctcgcgcaggtcttccgctccaagatatggagttcgttcaatttcatccaactggaatttacggatcaggatgtttaataacggaaggagctcgcggtgagggcggttatcttactaattctgaaggtgagcgttttatggaacgctatgctcctcactataaagatttagcacctcgagactacgtatcgcgatgtatgacaatggaaatccgagaaggtcgcggtgttggaaaggatggcgatcatatccacctaaatttgagccatctgccacctgacgcccttgcagagcgacttcccggcatttccgagagcgcaaaaatatttgctggcgtggacgtaactaaagagcctattccagtgttgccgacagtgcactacaacatgggtggtattccgactaattattggggcgaagttattaatccaagcgcaaaggaccaaaacgcaatagtgcctggtttgatggccgtcggtgaggcgggttgtgcctctgtgcatggcgcaaatcgattaggatcgaattctctaattgaccttgttgtatttggtagggccgctggtttgagagcaggaaaagttatagatcgaaagagtaaaattccttcaactaatgttttcgcggttgaatctgcattgggccgttttgacaagttaagatacgcaaatggctctattcccacatcagatttgcgtttggaaatgcagaaaacaatgcaaaaagatgctgcggttttccggacctcggagacgatgtcgcaagggcttaaagacatggtaagcctggctgaaaaggtagatgacctaaatgttactgaccgttccttagtttggaacagtgatctgatggaaactttagaattaacaaatcttatgccgaatgctttagctactatagccggagctgaggctcgcaaagaaagtcgaggggcacatgctcacgaagattatacaactcgagatgacgaaaaatggagagtgcatacattggcgcaaatggatgggccaaacataaaattatcttacagagatgtaatacgcgatccattgaccaatgaaacacagggaggcatcgaaattaaaaagattgcacccaaagaaagaactttttaat

SEQ ID NO: 219287 - DNA, 880 bp, Unknown
  Bacterial polypeptide expressing nucleotide sequence isolated from the Sargasso Sea
taatgaaggtcgaggtgtaggtaaaaataaggaccatattaatttacatttagatcatttagataaaaaagttatcgacgaaagattaccaggaatctcggaggctgctaaaacttttgcaaatgttgatgtgaataaagaaccgatcccagttgtacctaccgtacattataatatgggaggcattccaactaattataaagctgaagtactaacactaaatggttcagaaaaaacggttccaggcttgatggcaattggtgaagcagcttgtgtatcagttcatggagcgaatagattaggatctaattctttaattgaccttgtagtgtttggtagagctgctgctaaaagagcagcggaacttgttaaaccaggaacaccccacgaaaaaatttctaaaactgaaactgacaaatgtttggatagatttgataaaattagaaattcgaatggatctactaaaacttctgatttaagaataaaaatgcaaaaaacaatgcaatctaagtgtgcagtttttagaacagaaaatacattaaaagaaggtgtagaacaaataagaaaacctttcgaaggcatgaaagacctttctgtaaaagataaatctttactatttaatactgacttagtcgaaactctagaattcgataacttaatacgtcaagctcttacaacaatggactcagcctataatagaaaagaaagtagaggggctcatgcgagagaagattttagcaaaagagatgataaaaactttatgaaacatactttagcgtggctaaatgatgacaaagtagagattaaatacagagatgttcattcaactactcttacaaatgatgtacaatactttcctccaaaagaaagagtgtactag

SEQ ID NO: 219288 - DNA, 706 bp, Unknown
  Bacterial polypeptide expressing nucleotide sequence isolated from the Sargasso Sea
attggggggaattccaacaaactatagagcagaggttttgactcttaatggctcagaaaaaacagtaccaggtctaatggctattggagaagctgcctgtgtttcagttcatggagcaaatagacttggatcaaactcattaatagatctagttgtgtttggtaaggctgcagccaaaagagctgcagaattagtaaaacctggaatgtctcatgagtctatatctgaaaatgaaactgataagtgccttcaaagatttgataaaatcagaaattcaaaaggtaaaacaaagacttcagaacttaggctatcaatgcagaaaactatgcagagtaaatgtgcagtatttagaactgaaaaaactttaaaggaaggaattgaagatatcagaaaatcacttgatggaatgaacgatatatctgtgaaagataagtcgcttttattcaatacagatttggtagagtcattagagtttgacaatcttattcgtcaagccatgacaacaatggattcagctttccatagaaaagaaagcagaggagcgcacgcaagagaagatttttcaaaaagagatgataaaaactttatgaaacatactctagcttggcaaaatggaaaagaagtaaaagttagatatagagatgtacacgccagaaccctaaccaatgaagttcaatattttccacctaaagaaagagtttattaa

SEQ ID NO: 219289 - DNA, 1204 bp, Unknown
  Bacterial polypeptide expressing nucleotide sequence isolated from the Sargasso Sea
agtggcgaagttgcatatctaaaagcccaggccactgtgctgctacagggaggcgctggaagaattaatgcatcaacaactaatgcgcttattaatactggtgatggactagctatggctttaagagcaggctttcctgcacaagatatggagatgtggcagtttcatcctacaggaatttatggagcgggctcgcttgtgacagaaggttgtagaggcgaaggcggttatttaatcaacaaagatggcgaacgatttatggaaaggtatgccccaaacgttaaagacttagcaggaagagatgttgttgcaagatctatggttcttgaaattcttgaaggaagaggatgtggcgaaaataatgatcatatttttttgaagcttgatcatttagggtctgaagttttaaactcaaaattgcctggaatttgtgaactctctagaacatttgcccatgtagatcctgtatatgagcctattccggtagtaccaacttgtcattatatgatgggtggaacaccaactaatgtttcaggccaagctttcacaagaacgaacaatgaagaccatctaataaatggcttattttctgcaggtgaggcagcatgcgtatcagttcatggagcaaacagactaggcggaaactcactacttgatctggttgtgtttggaagagcaacaggcatgcatattcaaagcgaattaaaatctggcggtggagttagctctgcttcaaagagtgatatcgatcagtcattagaaagattaaataaactaaatgaatctaccaagggctttgatacagctgaagtaaaaaaagaacttcaagaatgcatgcaaaattattttggtgtttttagaagaggagactttatgaaaaaaggtttagatcaactaagcaccttaaaagaaaaagtttataaccttcatcttacagataaaagtgatgcctttaatactagcagagtagaggcaattgaacttcaaaatctttttgaggttgctgaatctactgcaatttctgcatatgaaagaacagaaagcagaggcgctcatgctagagatgattttccagatagagatgatgaaaactggctgtgccataccatttacgatcctcaaaataaaattgttagcaaacgagaggtaaattttaaaccagaaaaagttgaagcttttcctccaatagtaaggacatattaat

SEQ ID NO: 219290 - DNA, 1777 bp, Unknown
  Bacterial polypeptide expressing nucleotide sequence isolated from the Sargasso Sea
tatgagttcatataaaattatagagcatgaatatgatgtagttgtccttggagccggaggtgcaggtttgagagccgcagttggtcttagtgaggctggattaaaaactgcctgtatatcaaaagtttttcctactagaagtcatacttcagcagcacaaggaggtatctcggctgctcttggtaatatgggagaagatgattggagatggcatatgtacgatactgtcaaaggatctgattggttgggtgatcaagacagtatagaatatttgtgcaaagaagctccacgagcagttttagaattagagaggtatggagttccatttagccgtaccgaggatggaaaaatatatcaaagaccttttggtggaatgactaaaaattatggaaatgaaactgttcaaagaacttgtgcagcagcagatagaactgggcatgctattttacacacaatgtatggccaagcattaaaacataatacagaattttttatagaatactttgctttagatttgttaatgaaagatggagagtgtaaaggtttaatagcatggaatttaaatgatggaactattcatagatttagatctcatataacaattatagcaactggtggatatggaaaaacatattactcatctacatctgctcacacttgtactggtgatggtaatgctatggttttaagagctggtttacctttacaagatatggagtttgtacaattccaccctacagggatctatggacatggaactttaatatctgaaggagttcgaggtgaaggaggatacttattaaattctaaaggtgaaagatttatggaaagatacgctccaaaagctaaagatcttgcatctagagatgtagtaagcagatcaatagcagttgaaattaatgaaggaagaggagttggaaaagaaaaggatcatgttcatcttcatttagaccatttagatccagaagtgattgagaaaagacttccaggaatttcagagtcttcaagattatttgctgacgttgatgttacaaaagaaccaataccagttgttcctacagttcattataatatgggtggaattccaacaaattataaagctgaagttttaacagtaaatggttcagaaaaaattgtacctggacttatggcaataggtgaagcagcatgtgtttcagttcatggtgctaacagattaggatcaaattcattaattgatttagtagtttttggaagagctgctgcaaaaagagctgcagaactagttaaaccaggaactccacatgagaaaatctcagattcagaaactgaaaaatgtttagatagatttgaaaaattaagaaaaggaaatggaacaaatagaactgccgatttaagattagctatgcaaaaaactatgcagtcgaagtgtgcagtatttagaactgaaaaaactttaaaagaaggggtagaagaaataagaaagccatttgaaggaatggaatctatatcagtaaaagataaatctttaatttttaatactgatttagttgaaactttagaatttgataacttaataagacaggcgatagttacactagattctgcatatgaaagaaaagaaagcagaggagctcatgcacgagaagatcatccaaaaagagatgataataactttatgaaacacacattatcttggtgtaaagggagtgaaacaaaaatttcttatagagatgtacatagatcaaccttaacaaatgatgtacaatattttccaccacaagaaagagtttactaa

SEQ ID NO: 219291 - DNA, 1309 bp, Unknown
  Bacterial polypeptide expressing nucleotide sequence isolated from the Sargasso Sea
gctgctgcggatagaacaggtcatgccatgcttcataccttgtatcagcaatctatatctaatgacgcagaattttttatagaatattttgcaattgatttaataatgaacgaaaaaaaagaatgttgtggggtccttaccattaatttacacgatggtaagttttatcttttctcatcaaaaatggtcatacttgctactggcggttatggacgggcctacttttcatgtacttctgctcacacgtgtacaggagatggtggaggaatgattttaagagcagggttagatctgcaagatatggaatttactcaatttcacccaactggtatatatggagttggtgtgcttataactgagggtgcaagaggtgaaggtggttttcttactaactcaaagggagagagatttatggaaaggtatgctccctcagcaaaagatttagctagtagagatgtggtatcaaggtcaatgactaccgaaataatggaagggagaggttgtgggcaaaaaaaagaccatatacatcttaatttaaatcatttagaccacaaagtcttagaggagagattacctggtattacagaatcagctaaaatctttgctggagttgatgtaagaaaggatcctatcccagtccaaccaactgttcattataatatgggtggtatacctacgaacgttcatggcgaagttctttattgttcaaaaaatggttccgaaaaaattgttccaggactcatgtcagttggagaagcagcatgtgtatctgttcatggagctaataggcttggatcaaactcactattagatttagtggtttttggaaaatcagcagcaaatagatgtaaagaaattttaaatactaaatcgaaaaacaaagatattaaagaaacatattatggcaatgctattgaaaattttgaaaaaattaaaaattctaaaggaaataaatctgtttcaaaaattaggggaaaaatgcaagagataatgcagaactattgtcctgtttatagatctggtgagcttatgaaagaagggaaaaaaaaacttaattctcttattgatgagtttaaaaatattaaaatcagtgacaaaagtacaatatggaatactgaaattattgaagcttacgagctgcaaaatcttttgttacaatcaatggctagtatcgagtcagcttttaataggaaagaaagtagaggtgcccacgctaggatggactatcagaaaagagatgataaaaaatggatgaaacatactatgatttctgtaaataccgaaggaaattccaagataaattatagat

SEQ ID NO: 219292 - DNA, 1051 bp, Unknown
  Bacterial polypeptide expressing nucleotide sequence isolated from the Sargasso Sea
atttcatccaacaagaatttacggagtaggaactcttatatcagaaggtgttagaggagaaggcggttatcttttaaactccaagggtgaaagatttatggaaaaatacgcacccaaagctaaagatttagcttcaagagatgtcgtaagtagatcgatagcagttgaaattaatgaaggtagaggagttggtaaaaataaagattatgttaatttacatttagaccatcttgatccaaaagtgatagaggaaagattgcctggaattgcagagtctgcaaaaacattttgtgaggtggacgtgagaaaagatccaataccagtagttccaactgttcattataacatgggtgggataccaactaattataaagctgaagttttaacattaaatggaaaagagtccactgtgccaggattaatggctataggagaagcagcttgtgtttcagtccacggtgcaaatagattaggttctaactcattaattgatttagtagtttttggaaaatcagcagcaaatagagctgccgagcttgttaaacctggaacacctcacgaagaaatttcacagagcgaaacagataaatgtctagatagatttgacaaaattcgtaacgcttcaggtggaacaaaaacttcagaactaagattatctatgcaaagaactatgcaatcaaaatgtgcagtttttagaactgaaaaaacactaaaagaaggaatggaccaaatcagaaaaccttttgaaggaatgtctgatatttcagtttcagataagtctttattatttaatactgatcttgttgaaactttagaatttgataatcttattagacaggcaatgacgacaatagactcggcttatcatagaaaagaaagtagaggagctcatgcaagagaagactacaaaactagagatgataagaaatatatgacacatactttagcttggcaaaagggaaatgaagttaaagtagcttatagacctgttcatgcgaaaacattaacaaacgatgtgcaatactttccgccaagagaaagagtatattaa

SEQ ID NO: 219293 - DNA, 1780 bp, Unknown
  Bacterial polypeptide expressing nucleotide sequence isolated from the Sargasso Sea
atggctgcaatcaaaacttccctcccgcgccgcaagtttgacgtcgtgatcgtcggcgcaggcggctccggcttgcgcgcggcgctgcaactgtcgcgcgcgggcctgtcggtcggcgtgctgtcgaaggtgttcccgacccgttcgcacacggtggccgcgcagggcggtatcggcgcgtcgctcggcaacatgagcgaagacaactggcactaccacttctacgacacgatcaagggttccgactggctcggcgaccaggacgcgatcgagttcatgtgccgcgaagcgccgaacgtcgtgtacgaactcgagcacttcggcatgccgttcgaccgtaacgcggacggcacgatctaccagcgcccgttcggcggccacaccgcgaactacggcgagaagccggtccagcgcgcctgcgcggccgccgaccgtaccggtcatgcgctgctgcacacgctgtaccagcagaacgtcgaagcgaagacgcagttcttcgtcgaatggatggcgctcgacctgatccgcgacgcggaaggcgacgtgctcggcgtgacggccctcgagatggagacgggcgacgtctacatcatggaaggcaagacgacgctgttcgcgacggggggcgcaggccggatcttcgcggcatcgaccaacgcgttcatcaacaccggcgacggcctcggcatggcggcgcgttcgggcatcgcgctgcaggacatggagttctggcagttccacccgaccggcgtggccggcgcgggcgtgctgatcaccgaaggcgtgcgcggcgaaggcggtatcctgcgcaacgcgaacggcgagcgcttcatggagcgctatgcaccgacgctgaaggatctggcgccgcgtgacttcgtgtcgcgttcgatggaccaggaaatcaaggaaggccgcggcgtgggtccgaacaaggatcacgtgctgctcgacctgtcgcacatcggcgccgagacgatcatgaagcgtctgccgtcgatccgcgaaatcgcgctgaagttcgcgaacgtcgacgcgatcaaggagccgatcccggtcgtcccgacgatccactaccagatgggcggcatcccgaccaacatccacggtcaggtcgtcggcacgacgcgcggcggtcacaaggatccggtcaacggtttctacgcagtgggcgaatgctcgtgcgtgtccgtgcacggcgcgaaccgcctcggcacgaactcgctgctggacctcgtggtgttcggccgtgcggccggcaaccacatcgtcgagcacgtgaagaaccagaaggaacacaagccgctgccggccgatgcaggcgaattctcgctggcacgcctggcgaagctcgacaagtcgacctcgggtgaatacacgcaggacgtcgcgaacgacatccgctcgacgatgcagaagcacgcaggcgtgttccgcacgtcggaactgctgaaggaaggcgtcgaccagatggccggcctgaaggcacgcgtggaaaacatccacctgaaggacaagtcgaaggtgttcaacaccgcgcgcgtcgaagcgctcgagctggagaacctgatcgaagttgctcgcgcaacgatggtgtcggcggaagctcgcaaggaaagccgtggcgcacacgcccacagcgactacgaacaccgcgacgacgagaactggctgcgccacacgctgtggtacagcgaaggcgatcgcctcgactacaagccggttcaaatgaagccgctgacggtcgaatccgtgccgccgaagccgcgcacgttctaag

SEQ ID NO: 219294 - DNA, 674 bp, Unknown
  Bacterial polypeptide expressing nucleotide sequence isolated from the Sargasso Sea
tatgagcagttacaaaataatagatcacgaatacgatgttgtagttctaggcgcgggaggatctggccttagagctgcagtcggattaagtgaagttggattaaagacagcatgcatctcaaaagtattcccaactcgtagtcatacatctgcagcgcaaggaggaatttcagcagcattaggaaatatgggtgaagatgattggagatggcatatgtatgatactgttaaaggatctgattggttgggagatcaagactgtatagaatatctttgtaaagaagcaccaagagcagttttagagcttgaaaaatatggggtgccatttagcagaactgaagacggcaaaatttatcaaagaccatttggtggtatgacaaaaaattatggaaatggaactgttcagagaacttgtgcagcggctgatagaacaggccatgcaattttacatacactttatggacaagctttgaaacataacaccgagttttttattgaatattttgcattagacttattaatgaaaaatggagagtgtaaaggattaatagcatggaatttaaatgacggaacaattcataggtttagatcacatattacaataattgcaactggaggatatggtaaagtttattattcggcaacttctgctcatacttgtactggtgatggaa

SEQ ID NO: 219295 - DNA, 931 bp, Unknown
  Bacterial polypeptide expressing nucleotide sequence isolated from the Sargasso Sea
accaaatgttaaagatttagctggaagagatgttgtcgcaaggtctatggttcttgaaattcttgaaggaagaggctgtggagaaaacaaagaccatatatatctaaaacttgatcatcttggagctgacgtattaaattcaaaactcccaggaatttgcgaactttcaaaaacttttgcccacgttgatcctatatatgaacctattccagtcgttccaacatgtcattatatgatgggtggcacaccaacgaatgtttcaggccaggcttttacaagaatcaatgatcgtgatgagttagttcctggtttattttcagctggtgaagcagcttgtgtatctgtgcacggagctaatagattaggcggtaactctttacttgaccttgttgtttttggaagagctactggacagcatatacaaaatgaactcaaatctggaggaggggtagatgcagcaacaaaaagtgatattgataattcacttgaaagactgaataaattaaacgaatctgaggaaggattcgatacagctgaagttaaaaaagagttacaagattgtatgcaaaattattttggagtttttagaagaggggaatttatggaaaaaggtttggaaaaacttgaagaactccgagataaagtaagcaacctgcatcttaaagataaaagtgatgcatttaataccagcagagttgaagctattgaactacaaaatctgtttgaagttgcagaagctacagcaatatctgcatataagagaacagaaagtagaggtgctcatgctagagatgattatcctgatagagatgatgaaaattggttgtgccataccatctatgatccagtttctaaagaagttactaaaagagaggttaattttaatcctaaagaagtagaagcttttcctccaaagataaggtcatattaa

SEQ ID NO: 219296 - DNA, 1057 bp, Unknown
  Bacterial polypeptide expressing nucleotide sequence isolated from the Sargasso Sea
tcagctcacacatgtactggagatggaaatggtatggttttgcgtgctggtataccacttcaggatatggaattcactcaatttcatccaaccggtatttatggttcggggtgtttaataacagagggggttcgaggtgaaggagggtatcttacaaattcagaaggtgagcgttttatggaacgatatgctccctcagcaaaagatttagcttctcgagatgttgtgagtcgagccatgacaatggaaattattgagggacgtggtattggtaaagataaagatcatattgaactacatcttgaacatttgggatcagatgtgataaatgaacgcttaccagggattgcagaatctgccgagatttttgctggtgttgatgtaacaaaacaaccaatccctgttatacctacagtgcattacaatatgggtggtatacaaactaattatcaaggtcgagttgtgacgttaaaagataatgatccagattcaattatagaaggcttaatggcaattggtgaagctggttgtgtttctgtacatggagctaatcgactaggttctaattccttattagatttaattgtctttgggcgagctgcagcaaactattgtgccgagaatataaaatctggatcgccacacaaaccactaccaaacgcttgcgaacaagggttatctcgtttggataaattacgtcacaacaaagggaccattaaaactgcggaaattcgtgacaacatgcagaaaacgctacaaagagatgctgcggtttttcgtactggtgaaactcttgaaagagggataaatacgatgtcagaaatctgggattcattttccgacgttgttgtggctgataaaggaatggtttggaatagtgatctggtagaaactttagagctagacaatcttttaggttgtgcgatggtaagtatacattccgcctacaaccgtgaagagagccgtggtgcccatgctagagaagacttcccggaacgcgatgatgaaaattggatgaaacatacattgtctacactaaatgatgatggtagcgtga

SEQ ID NO: 219297 - DNA, 772 bp, Unknown
  Bacterial polypeptide expressing nucleotide sequence isolated from the Sargasso Sea
tatgaaaaacgcttataatattgttgaccattattacgatgtcgttgttattggtgcaggaggttcaggcttaagggcaactttgggatgtgcagaagcaggcttaaggacagcttgtatttctaaagtatttcctaccagaagtcatacggttgctgctcaaggtggtataggagcagcacttggaaatatgggtgaagataattggaaatggcatatgtatgatactgttaagggctcagactggttaggagatcaagatgctatagaatatcttacctctaaagcgccggaagctgttgttgaactagaagaatatggaatgccatttagtagaacagatgatggtaaaatttatcagagaccatttggtggtcatttaacaaataacggagaaggtgctccagctatgagagcctgtgctgctgctgatagaacaggtcatgcacttcttcatactctttatcaacagtcactaaaaaataatgtagaattttttatagaatattttgttttagatttaataaatgataacgatggtaattgtattggagctgtagcatggtgtttagaagatggcacaattcatagatttttgtctcatcaaacaattttagctactgggggatatggtagagcatatttttcttcaacaagtgcacatatttgtactggcgacggcagtgccatggctttagacaaaacttacctttatcagatatggaatttattcaatttcatccaactggtgtttacggagcaggcgttttga

SEQ ID NO: 219298 - DNA, 624 bp, Unknown
  Bacterial polypeptide expressing nucleotide sequence isolated from the Sargasso Sea
taggtgaagcagcatgtgtttctgttcatggagcaaacagacttggttctaattcattaattgatttagtggtatttggaagagcagctgcaaaaagagcagctgaacttgtaaaacctggtacaccacatgaagaaatatcagaaactgaaactcaaaaatgtttggatagatttgataaacttagaaatgctcaaggggacaatagtactgcagagttaagactagctatgcagaaaacaatgcaatctaagtgtgcagtatttagaaccgaaaaaaatcttaaacaaggggttgatgagataggcaaaactttcgatggaatggactccatttctgttaatgataaatctttagtatttaacaccgatttagtagaaaccttagaatttgataatttaatcagacaagcggtagcaactgtagattctgcatatcatagaaaagaaagtagaggagctcacgcaagagaagattatccaaaaagagatgatgaaaaatttatgcaacatactcttgcatggtgtgatggcaaaaatacaaagataagttatagaccagtccatcaatcaactttaactaatgaagtgcaatattttccgcctcaagaacgggtatattaat

SEQ ID NO: 219299 - DNA, 859 bp, Unknown
  Bacterial polypeptide expressing nucleotide sequence isolated from the Sargasso Sea
aaaagataaagatcacataaacttacatctagatcatttggacaaagaagttttagaggaaagacttccaggtatcactgaggctgcaaaaacttttgcaaatgtagacgttaatagacaaccaattccagttgtacctacagttcattacaatatgggcggtatacctacaaattataaagcagaagttttaactttaaatggttcagagaaaacagtacctggtcttatggcaatcggcgaagcggcttgtgtatcagtgcatggagctaataggttgggatcaaattcattaattgacctcgtggtatttggacgagcagcagcaaaaagagcggctgaacttgtaaaaccaggaatgcctcacgaagaagtttccagcgcagaaacagataaatgtttaggcagatttgataaaattagaaattcgaaaggatctagtaagactgcagagcttagattaaatatgcaaaaaacaatgcaatcaaaatgtgcggtatttagaacagaaaaaacattaaaagaaggcgtagatcaaataagaaagccttatgaaggaatggaagatatttctgttaaggataaatctcttctttttaatactgaactggttgaaactttagaattcgacaatctaattagacaagcattaacgacaatggactcagcttatagcaggaaggaaagtagaggagcacatgcaagggaagattatagtgagagagatgataaaaattttatgaagcatactctagcctggcaaaaggataaaaaagtagagattaaatatagagatgttcattccagaacactaacaaacgatgttcaatattttcctcctaaggaaagagtatattaa

SEQ ID NO: 219300 - DNA, 1249 bp, Unknown
  Bacterial polypeptide expressing nucleotide sequence isolated from the Sargasso Sea
cgcgcgacacttggcatgaccgcagaaggactgaaaactgcctgtattacaaaagtttttccaactcgcagtcacactgttgcggctcagggtggagttggggcagctctagataatatgggcgagggcgacaactggcagtttcacatgtatgacactgtcaaaggctcagactggcttggagaccaagatgctatagagtatatgtgcagaaacgcaatccctgcagtcattgagctcgaacactacggtgtaccgttctcccgcactgaagagggaaaaatatatcagcgcccgttcggcggacacacgttagataacggtaagcggatggccaagcgggcgtgcgcggcggcagatagaacaggtcacgccatcctgcacacactatatcaacaatgcctggcaaataatgccgaattttttatcgaatatttcgcccttgatcttataatggacgaagaaggtgcctgccgaggtgttatggcaatggatttagcgaccggcacaatccatagatttagggcacatcaaactgttttagccaccggcggatatggtagggcatatttctcgtgtacttcggcacatacgtgcacgggtgatgggaatggtatggtccttcgcgccggtttaccattgcaagatatggaattcgttcaattccatcccaccggcgtttatggggcagggtgcctaataactgaaggcgctagaggggaaggcggttatctaacaaattcagagggcgaacgatttatggaacggtacgctcccactgccaaagacctggcatccagagatgtcgtcagccggtcaatgacaatagaaattaatgagggtaggggcgttggcccaaaaaatgatcatattaatctccacctggaacacatcgatcccgacgtgctggcgctaagattgcctggtatttctgagacagcaaaggtgtttgctggcgttgatgtcacgcgagaaccgatccccatcatgccaacagttcattataatatgggaggcataccaacaaattatcatggcgaggtccttgctccttcatcggatgatccagatagagtatgccctggcctcatggcaattggtgaggctgcttgcgtgtccgtacatggtgctaaccggttaggtactaatagtttgcttgatattgtcgtttttggacgagccgccgcctatcgagcggtagagacaatttcaccaggcgctgctcacaaacctcttcaggaagcgctga

SEQ ID NO: 219301 - DNA, 1231 bp, Unknown
  Bacterial polypeptide expressing nucleotide sequence isolated from the Sargasso Sea
tattgccatctgtattgaaacaggtgaggttgtctatgtgagctctaaagccacggtgctggcaacaggtggagctggacgcatttatgcctcgactaccaatgcgctgatgaataccggtgatgggacaggtatggccctgagggctggtgtacccatgcaggatatggagatgtggcagtttcatcctacgggtattgccggtgcggggacacttgtaacggaagggtgccgcggtgaaggtggttaccttataaatcgtgatggagaacgttttatggagcgatacgctccgacagccaaggatctggctggaagagacgttgttgcacgatcaatgatactggaaattctcgatggcaaagggtgtgatcctgaaaatcctgctaacgatcacgttttgttgaagctcgatcacctaggtgaagaggttctgaatagcaaacttccaggcattttagagttatcaagaaccttcgcgcatgttgatccagtcaaggagccgataccggtgattccaacgtgccattatatgatgggtggtatagcgactcaggtcagcggtcaggcactaacacaggtcaatgggacagatcaggaggtgcagggtctctacgctgcaggtgaagcggcctgcgtttctgttcatggggcgaaccgattaggaggaaactcattactggatttagtggtttttggtcgtgctgcaggcattcacattgaagaggttatgcggcaaggggtgtcttatcgcgacgcatccgatagcgacctagagtcctctctagcgagactctctcgttgggatgattcttctagtggcgagtcaatttccgatttgaagaaagaattgcaaacgacaatgcagaacagttttggcgttttcagaacggaaaaaaacatgcaagaagggatcgtgaaattacaggatctcaggcaaagaattgatagtgctcatttgccggataagtcggattcatttaatacggccaggctcgaagcgctagagttagataacttgcttgaggtggctgaggctaccgcagtagcggctgaagagcgtaaagaaagcagaggcgctcatgctcgtgacgattatggtgagcgagatgatgacaattggttatgccattcaatgtatttcccggaagaaaagcgggtaggtaagagagacgtgaattttactccgaagactgtcgaaacgtttgagccaaaggaaagggtgtattag

SEQ ID NO: 219302 - DNA, 889 bp, Unknown
  Bacterial polypeptide expressing nucleotide sequence isolated from the Sargasso Sea
tctatggcgttagaaattctagaaggtagaggatgtggaccaaatgcagatcatatctttttgagattagatcatttaggtcccgaagtcgtgcacaaaagactcccaggcataacagaattatcaaaaacatttgcaggtgttgacccagctatgcaacctattccagttgttccaacctgtcactacatgatgggagggattcccacgaacattaatggacaagtaataacagttcaagacggtcaggataaggttgttgaaggtttgtatgcagctggtgaagttgcatgtgtatctgttcacgggggcaatagattgggaggaaattctttattagatttagtggtatttggaagagcagctggcatctatatagaagaatctatgaagcaaggagtggagctaaaaaatgcttcttatgaagacatagataaagctcttgaaaggctcaataaacttaacgcttcttctgaaggagaacaagtaactgctttaaaagaaagaatgcaacaaaacatgcagagtaattttggtgtatttagaacaaaagatttaatggaaaaaggcatagaagatttatctaaggtaagagatgaagttgaaaacatgcatcttaaggataagtcggctacttttaatacggccagaatagaggcattagaaatgcaaaacttatttgaagtagctgaagctacagcagtaactgcaaattcaaggaaagaaagtagaggtgctcattcaagagatgattaccctgatagagatgatgaaaattggctaaagcattcaatttacttttcagaaactaaagaagtaagcaagagagatgttaattacagacctaaaactgtacaagcattccaaccaacggttaggagttattaat

SEQ ID NO: 219303 - DNA, 664 bp, Unknown
  Bacterial polypeptide expressing nucleotide sequence isolated from the Sargasso Sea
ttaaatggatctgaaaaagttgtaccaggtttaatggctattggagaagcggcatgtgtttctgttcacggcgctaataggctcggctcaaactctttgattgatctagtagtttttggaagagcggcagcaaaaagagcttcagaattaattaaaactggaatgaaacatgaagaaatagataaaaatgaaacagataaatgccttgatagatttgacaaacttagaaattctaatggaacaagcccaacttcagaattaagattgtcaatgcaaaaaacaatgcaatcaaaatgcgcagtatttagaaatgaaaaaacattaaaagaaggtgtggaagaaattagaaagccttttgaaggcatggagtcactttcagttaaagataaatctttaatatttaacactgatttagttgaaacgcttgaatttgataatttaataagacaagcaataacaacaatagattctgcttataatagaaaagagagcagaggtgctcatgctagagaagattttccaaatagagatgacaaaaaatttatgcaacatactctaacgtggcttaatggtatgaatactaaaattgattatagaccagtccacacttcaacattaacgaatgaagttcaatattttccaccacaagagagaatttattaat

SEQ ID NO: 219304 - DNA, 442 bp, Unknown
  Bacterial polypeptide expressing nucleotide sequence isolated from the Sargasso Sea
tatgagttcatataaaattatagagcatgaatatgatgtagttgtccttggagccggaggtgcaggtttgagagccgcagttggtcttagtgaggctggattaaaaactgcctgtatatcaaaagtttttcctactagaagtcatacttcagcagcacaaggaggtatctcggctgctcttggtaatatgggagaagatgattggagatggcatatgtacgataccgtcaaaggatctgattggttgggtgatcaagacagtatagaatatttgtgcaaagaagctccacgagcagttttagaattagagaggtatggagttccatttagccgtaccgaggatggaaaaatatatcaaagaccttttggtggaatgactaaaaattatggaaatgaaactgttcaaagaacttgtgcagcagcagatagaactgggcatgct

SEQ ID NO: 219305 - DNA, 1783 bp, Unknown
  Bacterial polypeptide expressing nucleotide sequence isolated from the Sargasso Sea
atgaagttaggcaacattgaattttcagaacaacaatttgatgtagtgattattggaggaggaggctctggtttaagagcatctcttgaaatatcaaaatcaggcttaaacgttggtgtagtatcaaaagtgtttcctactagatctcatacagtagctgcccagggtggtattacttgtgcaattgcaagtgctgatccaaatgatgattggagatggcatatgtttgatactgtaaaagggtctgactatataggtgaccaagatgcaattgaatatatgtgttcagaaggtccagaaacagtatttgaacttgagcatatggggctaccattctctagatttgaaaatggaagaatatatcaaaggccatttggtggacaatcaaaagaatatggagaaggagggcaggctgctagaacttgtgctgcagctgatagaactggacatgctcttttacatactctctaccaagcaaatctaaaagcaggaacaaatttcttaaatgagtggtttgctgtggacatagtaaaaaatgattctggtttggtttctggagttagttgttttgatatggaaacaggtgaaatatcaataattaagtgtaatgccattgtgttagcaacaggaggtgcaggacaagtgtacgaacaaaataccacttctttaatttgcactggagatgggctaggtatggtattgagaaaagacttacctttacaagatatggaaatgtggcagtttcatccaactggcctgtatggcaatggatcattaatgaccgaaggttgcagaggtgaaggtgggtatttaattaattctgaaggcaaaagatttatgcccgattatgctcctaaggcaaaagatttagcatctagagatgtagtctcaaggtgcatagtacaagaaattctagcaggcagaggatgtggcgcgaaaaaagatcatgttttattaaaaattgatcatcttggatcagaaaccataacaaagaagcttcctgaaataagagaaatatcaatgacttttgctaatgttgatcctatagaaaacccaataccagtggttccaacttgtcactatatgatgggaggaatacccacaaatattaatggtcaagtaatcactcaagataacaatggaaatgattctgttgtaaatggcctttactcaataggtgaagctgcaaatgtctcagtacatggtgctaatagacttggaggtaactctttattggatctggttgtttttggtagagcagcaggcaaacatataaatgaagagctatcagaacaatcttcacctgatatatcaaatacaaatatcgaggaatctttagaaaccttgattaggattcaagagacagagaaaggtgaaagtgtattcagccttagatcagaaatgcaaaatgttatgcagaattattttggagtatatagaaatgaagatttaatgagagaaggaataaacaaactagaggagataacagaaaggactaaaaacatacatttaaatgataagtctcaccaatttaattcagaaagagttgaagttttagaatatttaaacttacttgatatagctaatgcgacagcatactcagcacttgaaagaaaagaaagtagaggtgcacatgcaagagaagattttccagacagggacgatgaaaattggttatgccattcacttttttttaaaaataaaaatatagttagcaaaagagctgttaatttaaaacctaaaacagttgaaacttttaaaccaaaaccaagggtatattaat

SEQ ID NO: 219306 - DNA, 727 bp, Unknown
  Bacterial polypeptide expressing nucleotide sequence isolated from the Sargasso Sea
tatgaaatcttacaaaattattgaccatgaatatgacgtagttgtccttggtgcaggtggctcaggtttgagagccgctgtaggtttaagtgaagcaggattaaaaactgcgtgtgtttcaaaagtttttccaactagaagtcatacttctgctgctcaaggtgggatctctgcagccttaggtaacatgggtgaagatgattggagatggcatatgtacgatacagttaaaggtgctgattggttaggtgatcaagattgtatagaatatttatgcaaagaagcccctagagcagttttagaattagaaaaatatggtgtacccttcagcagaactgaagatggaaaaatatatcagcgtccatttgggggaatgacaaaaaattatggtaatgaacctgttcaaagaacgtgtgcagcagcagatagaactggacatgcaatactgcacactttatatggccaggccttaaagcataaaacagaattttttatcgagtattttgctttggatcttttaatgaaagatggtcagtgcaaaggtttaattgcttggaatttaaatgatggaactatacatagattcagatcacacattacaataattgcaacaggtggttatggaaaagtttattactctgcaacatcagcacatacttgtacaggagacggaaatgcaatggtacttagagctggtttacctttgcaggatatggagttcgtacaa

SEQ ID NO: 219307 - DNA, 991 bp, Unknown
  Bacterial polypeptide expressing nucleotide sequence isolated from the Sargasso Sea
gggaggatatttagtaaactctaaaggtgaaagatttatggaaaaatatgcacctaaagcaaaagatcttgcctccagagatgttgtaagtagatcaattgcagttgaaattaatgaaggtcgtggtgtcggcaaggataaagatcatgttcatttacatctaaatcatttagaccaaaaagtaattgaagacagattgccaggtatctccgaagcttcaagactttttgcgaatgttgatgtaactaaggaaccaattccagtagtaccaacagttcattataatatgggtggaatacctactaattataaagcagaagtaataacaatgaacggatcagaaaaaactgtgccaggacttatggcaattggtgaggctgcttgcgtttctgttcatggtgcaaatagactgggatcaaattctttaattgatttagttgtctttggtagagcagcagcaaaaagagcagctgaacttgtaaaacctggcatgaaacacgaagacataccccaaagtgagacagataaatgcttagatagatttgataaattaagaagctccaagggatcaaatcctactgcagaattaagattagcaatgcaaaagactatgcaatcaaaatgtgcagtatttagaactgaaaaaactttaacagaaggtgtcaatgaaattagaaaaccttttgaaggtatggaaaatatttctgtgaaagatagttctttaatttttaatacagatttagttgaaacacttgaatttgataatttaattagacaagcaatcacaaccatggactctgcatatagcagaaaagagagcagaggcgctcatgcaagggaagattttcctaaaagagatgacaaatcttttatgaaacataccttgtcttggtgtgatggtacaaaaactaaaattgactacagaccagtaaatatttcaacacttacaagtgatgttcagtactttcccccacgagaaagagtatattaa

SEQ ID NO: 219308 - DNA, 1765 bp, Unknown
  Bacterial polypeptide expressing nucleotide sequence isolated from the Sargasso Sea
gatgagtaaagattacgaaatcattcagcatcaatacgacgtggtagtcgtaggtgcaggtggctccggattgagatcaacacttggactagttgaatccggttttagaactgcgtgcatcacgaaggtttttccaacaagaagccataccgttgcagcacaaggtggaatcagtgccgcgctcggtaataacggtgaggatgattggagatggcatatgtatgacactgtcaaaggttctgactggttgggcgatcaagacgcaattgcttacatgtgtaaagaggcaccaaatgcagtactggagctagaacaatatggaattcccttctcaagaacagatgatggcaagatttatcagagagcatttggaggaatgaccacgcactttggcgatggcatagctcaaagaacatgtgccgcagctgatcgaaccggacatgcaatgttgcataccttgtatcaacagtccattaagaatcaggcagagtttttcatcgaattctttgctctggatttgattatggaagatggagtatgcactggcgtagttgcgctggagatggccacgggtaagattcatgctttcagatcacaaagagtcatattggctactgggggccacggcagggcttacttttcgtgcacagccgcacacacatgcacaggcgatggttctggaatggcacttagagcgggtttaccgcttcaagacatggaatttgtccaatttcatccaacgggtatttacggcgttggatgcctgatcacagaaggtgttcgaggagagggaggatacctcacgaattctgatggcgaacgttttatggaacggtatgcgcccaatgcaaaagaccttgcatcaagagatgttgtcagtcgttcaatgacaatggaaataatagaaggcaggggcgtgggtgaaaagaaagaccacatccatctaaatcttcaacatttgggacccgatgtaattgaggaacgtcttccaggaattgctgagaccgcaagagtctttgcagatgttgatgtaactagagatccaatccctgtcttgcccactgttcattacaatatgggaggtgtacctacaaacatgcacacggaggtcattaccaagaactccagtggtgatatggaaattgtcccaggattaatggcggtaggtgaagcggcctctgtatcagtccatggcgctaatcgattgggatcaaactcgcttttggatttagtggtctttggtagagagtcttccattcaatgtcaaaaaacaatcaaaccaatggagacacaaaacaaggtcaatcaaaatgaattggataaaatcattgataagtttgattccattcgattttcaaaaggatcacttccaacagcagagattagagccgaaatgcaaagcattatgcaaaagcatgcatctgtatttagaacggaagaattaatgaaagagggcgtggaaaaactttcctcatgcatagattcgttcaaagatgtatctgttagtgatcggggtttagtttggaataccgatttgattgaaacccttgaactggaaaatctactaggccaagggatcattacgattcaaagtggtcaggttagaaaagaaagtcgaggcgcgcacgcaagggatgactatccagatcgagacgatgagaactggctaattcatagtttgggttggatggatgcaaataataatgtgactattggatcttcgcctgtccatttagatactcaaacagatgaggtagaatcaata

SEQ ID NO: 219309 - DNA, 1201 bp, Unknown
  Bacterial polypeptide expressing nucleotide sequence isolated from the Sargasso Sea
tatgagtgaatataacattatagatcatgagtatgacgttgttgtactaggtgctggtggttctggtttaagagctgcagttggattaagtgaagctgggttaaaaactgcctgtatttccaaagtatttccaacaagaagccacacttcagcggcccagggaggaatttctgctgctctaggaaatatgggggaagatgattggcgttggcatatgtacgatactgtaaaaggagctgattggttaggcgatcaagatagcatcgaatacttgtgtaaagaagcccctaaggctgtaattgaattagaaaaatatggtgttccttttagcagaacagaggaaggaaaaatttatcaaagaccttttggaggtatgactaaaaattatggaaatggtattgttcaaagaacatgtgctgctgcagacagaactggccatgcaattttacatactttatatggtcaagcattaaaacataaaactgaattttttattgaatactttgcattagatttgcttatgaaaaatggtgaatgcaaaggccttattgcttggaatttaaatgatggcactatccatcgatttagatctcatattacaattattgctactggtggttatggaaaagtatattattctgcaacttcagcacatacatgtacaggtgatggaaatgctatggtgcttagagctggtttgccattacaagatatggaatttgttcaattccacccaactggtatttatggtcatggaactctaatctcagaaggagtcagaggagagggaggatatttagtaaactcaaaaggtgaaagatttatggaaagatatgcgccaaatgctaaagatctagcatcaagagatgtagttagcagatcaatgtctatagaaattaatgaaggtagaggagttggaaaagataaagatcatgttcatttacatttaagccatttggataagaatgtaattgaagatagacttccaggtattacagaagccgcaagattatttgctaatgtagatgtaactaaggaaccaattccagttgttcctacagttcattataatatgggaggaataccaacaaactataaagctgaagtaataaccgtaaatggatctgaaaaagtagttccaggtctaatggcaataggagaagcggcatgtgtttctgttcatggagcaaatagactaggt

SEQ ID NO: 219310 - DNA, 1027 bp, Unknown
  Bacterial polypeptide expressing nucleotide sequence isolated from the Sargasso Sea
tgtttgatcaccgagggagttagaggagaaggtggctatctaacaaattcagaaggtgaaagatttatggagaggtatgcgccaaatgctaaagatttagcatctcgggatgtagtaagtaggtcaatgacaattgaaatcaatgaaggaaggggtgttggaaaagacaaagatcatattttccttcatttagagcatttgggtaaggaaacaataaacgaaagattgcctggtattgcggaatcagcaaaaatttttgctggcgtcgatgtagcaaaatcaccaattccagttttaccaactgttcattataatatggggggtattccaactaattatcatggtgaagttgtatctccaaaagatttaaatgatcaaagtgtggtcccaggattaatggcaatcggagaagccgcatgtgtttctgtccatggagccaatagactaggttcaaattctttgctagatcttattgtatttggtagagctgcagctaagagagctgctaacataataaaaaaagactctaaagctaaagagccaaaaaaacaaacagttgataaaattattaacaaacttgataatttattacattctgaaggagaaaataatccttttgaaattagagctgaacttcaaaaagcaatgcaaacttacgctgcagtatttagaacaggggatacgttaaatacgggttttgataaagtaaaagacctaagtgattcattccaagacataaaaattaatgataaatcattgttatggaacacagaacttgtagaaactttagagttagaaaaccttttaagtcaaggattgattactgttgcctcagcgttaaatagaactgaatctagaggcgcacatgctagagatgattttcctgaaagagatgatgcggaatggttaaaacattctctcgtcaagcttgatggtaatgatatttctgtatcttatcgaaaagttaatttagaaaccatgaccgatgaggttgaatctgttccaccaaaaaggagagtttattaat

SEQ ID NO: 219311 - DNA, 1342 bp, Unknown
  Bacterial polypeptide expressing nucleotide sequence isolated from the Sargasso Sea
aacaggtcatgcacttcttcataccctctaccaaaataatgttaaagagggaacaaactttcttaatgaatggtttgctgttgatcttgtaaaaaattcaaagaatgagatcactggagttatagctttttctattgaatcgggtgaagtctgttacctaaaagctcaggcaacggttctagctaccggcggtgctggaagaatatatgcatccacaacaaatgctttgattaataccggagatggactaggaatgactcttagagctgggtttcctgcacaagatatggaaatgtggcaatttcatccaactggtattcatggtgcagggtctcttgtaactgagggttgcagaggtgaaggtggatatttgattaatgcagatggtgagagatttatggaaagatatgctccaaatgctaaggatcttgcaggaagagatgttgttgctagatcaatggttatggaaatacttgaaggcagagggtgtggcccagagaaagatcatgtttacttgaaactcgatcatttgggtgcagatgtccttaattcaaaattaccaggcatatgcgagctctcaaaaacttttgctcacgttgatcctattaaggaaccaattcccgttgttcctacatgtcattacatgatgggaggaaccccaacaaatattcatggtcaagcatttagcaggaatgatggaaatgatttcatggtttccgggcttttctctgttggggaagctgcatgtgtatctgttcatggtgccaacaggctgggcggaaactctttattagatttagttgttttcggaagagctgcaggcaaacatataaatgaggagcttaaatctggtggtggcgtagataatgcttccaatgaagatattgaattggccatgagcagactaaacacattaaatgaatctgaatctggatacgaggttgctgatgttaaaaaacaactccaaacctgtatgcagaactactttggtgtctttaggcgtggagagtttatggagaaaggagtcaaagaacttgaggagataagagagaaatctgaaaatctttacttaaaggataaaagtattgctttcaacactaacagagttgaagcacttgagttacagaatctattagaggttgcagaggcaacagctatttctgcaatgatgagagacgaaagtagaggtgctcatgccagagatgattttcctgaaagagatgatgagaattggttatgtcattctttatatgatccagttgaaaaaaaattggataaaagagatgttaattttgttcctaaagaagtagaagcattcccacctaaaatgaggtcttattaa

SEQ ID NO: 219312 - DNA, 1063 bp, Unknown
  Bacterial polypeptide expressing nucleotide sequence isolated from the Sargasso Sea
ggagttcgtacaattccatccaacaggaatatatggtcatggtactttaataacagagggcgcacgtggagaaggaggatatcttacgaattctaaaggtgaaagatttatggaaagatatgcaccaaatgcaaaagatttagcttcaagggatgtagtaagtcgatctatgtcaattgagattaatgagggaagaggtgttggaaaagatcaagatcacgttcatttaaatttaagtcatttagataaagaaattattgagagtaggctacccggaataactgaggcagcaagattatttgcaaatgtaaatgtcacaaaagaaccaattcctgttgtaccaacagttcattataacatgggaggcattcctactaattataaagctgaagtgttaactgttaatggttcagaaaaaactgtgcctggattaatggctattggtgaagctgcatgtgtatctgtacatggggcaaacagacttggatctaattctttaatagatttggtagtctttggaagatcagcagcaaagagagcagctgaattaataacaccaggaacaccacatgaagaaattcctaagtctgaaactcaaaaatgtttagatagatttgataagctaagaaacgctaaaggtgaaaatagcactgcggatttgaggttatcgatgcaaaaaactatgcaatctaaatgtgcagtatttagaacagaaaaaaaccttaaagaaggtgtggatgaaattagaaaaacttatgatggtaaagactcaatttctgttaaagatagatctttagtttttaataccgatctagttgaaacgttagaatttgataatctaataagacaagccgttacaacagtggattctgcatatcaaagaaaagaaagcagaggtgcacatgctagagaggattatccaaagagagatgatcaaaaatttatgcaacacactctcgcttggtttgatggcaaaaataccaaaattagttacagacctgtacatcaatcaactttgactactgatgtacaatattttccaccacaagaaagggtttattaa

SEQ ID NO: 219313 - DNA, 823 bp, Unknown
  Bacterial polypeptide expressing nucleotide sequence isolated from the Sargasso Sea
tatgagttcacataaaattatagaacatgaatatgatgtggtcgtgcttggagctggaggtgcaggtctgagagctgccgttggtcttagtgaggcagggcttaaaactgcctgtatatcaaaagtttttcctacacgaagtcatacttcagctgctcaaggaggtatttctgcagccctagggaatatgggagaggatgattggagatggcatatgtacgataccgtgaaaggatccgattggcttggtgaccaagatagtattgaatatttatgcaaagaggctcctagagcagttttagaattggagagatatggagttccatttagcagaaccgaggatgggaaaatttatcaaagaccttttggtggcatgactaaaaactatggaaatgaaacagttcaaagaacttgtgcagcagcagatagaacaggtcatgcaatattacatactatgtatggtcaagcattaaaacataacacagaattttttattgaatactttgcattagacttgttaatgaaaaatggagagtgcaaaggtttaattgcctggaatcttaacgatggaactattcatagatttagatctcacataacaattattgcaacaggtggatatggaaaaacctattattcatcaacatccgctcacacttgcacaggtgatggaaatgctatggttttaagagctggcttacctttacaagatatggagtttgtacaatttcatcccacaggaatttatggacatggaactttaatatccgaaggagttagaggtgaaggaggatacttgctaaattctaaaggagaaagattt

SEQ ID NO: 219314 - DNA, 1777 bp, Unknown
  Bacterial polypeptide expressing nucleotide sequence isolated from the Sargasso Sea
atgagtacttataatattatagatcatgaatatgatgtagttgtcttaggagctgggggatctggcttgagagctgctgttggattgagtgaagctggattgaaaacagcctgtatttcaaaagtatttccaaccagaagtcacacatctgctgcacaaggaggcatctcagctgcgcttggaaacatgggagaagatgactggagatggcacatgtatgatactgtcaaaggtgcagattggttaggagatcaagatagtattgaatatttatgtaaagaagctccaaaagcagttttagaattagaaaaatatggagttccatttagtagaactgaagaaggaaaaatctatcaaagaccttttggtggaatgacaaaaaattatggaaacggaattgtacaaagaacatgtgctgctgcagatagaactggtcatgcaattcttcatacactttatggacaggccttaaaacataacactgaattttttattgagtattttgcactagatcttttaatgaaagatggagcgtgtaagggattaattgcttggaatttaaatgatggaacaatccatagattcagagcacatactgtaattatagcaactggtggatatgggaaggtttattattcagctacttctgcacatacttgtacaggagacggaaatgcaatggttttaagagctggattacccctccaggatatggagtttgttcaatttcatccaacaggaatatatggtcatggcacattaataacagaaggtgctcgaggagagggtggttatttaacaaactctaagggtgaaagatttatggaaagatatgctccaaatgcaaaagatctagcatcaagagatgttgttagtagatcaatgtctattgaaataaatgaaggaagaggtgtaggaaaagatcaagatcatgttaatttaaacttaagtcatttagaaaaagatattattgaaagtagacttccaggaattactgatgctgcaagattgtttgcaaatgtagatgtaactaaagagcctataccagttgtaccaacagttcattataatatgggaggaattccaacaaattataaagctgaagttttaactgttaatggttcagaaaaaactgttccaggtctgatggctataggagaggcagcatgtgtttctgttcatggtgcaaatagacttggttctaattcactaattgatttagtagtatttggaagagcagcagcaaaaagagcggcagaagtagtcaaacctggaactcctcatgaagaaatacctgagtctgagacacaaaaatgtttagatagatttgataagttaagaaatgcagatggaagtaatagtactgcagagcttagactttcaatgcaaaaaacaatgcaatctaaatgcgcagtatttagaacagaaaaaaatttaaaagaaggtgttgacgatattagaaaaacttatgatggaatggactctatttctgttaaagatagatctttagtgtttaataccgatttagttgaaactttagaatttgataatttaattagacaagcagtaacgacagtagaatctgcttatcacagaaaagaaagcagaggagcacatgcaagagacgattatccaaaaagagatgatgaaaagtttatgcaacatacccttgcttggtgtgatggaaaaaatacaaaaattagttacagaccagttcacaagtcaactttgaccaatgaagttcaatatttcccaccacaagagcgggtatactaat

SEQ ID NO: 219315 - DNA, 1777 bp, Unknown
  Bacterial polypeptide expressing nucleotide sequence isolated from the Sargasso Sea
tatgaaaagctataaaattatcgatcatgaatacgacgttgttgtcttgggagctggaggctctggtttaagagcagccgtaggtttatcagaggcaggcctaaagacagcatgtatttcaaaagtatttccgactagaagtcatacttctgcggctcaaggtggaatttcagcagcgctaggtaacatgggtgaagatgactggaggtggcatatgtatgacactgtaaaaggttctgactggttaggagatcaggatgcaattgaatacctctgtaaagaggctccaaaagctgtcaaagaactagataagtatggggtgccatttagcaggactgaagacggaaaaatatatcaaagaccttttggaggaatgactaaaaattatggtaatggaacggttcaaagaacttgcgcagcggcagacagaactggtcatgctattttacatactttatacggacaagcattaaaacataacacagaattttttattgagtactttgcattggatttaattatgaaaaatggtgaatgcaagggattgatagcttggaatttgaatgatggcacaattcatagatttaaatctcacataacaataattgcgactggaggttacggaaaaatttattattcagctacatctgctcatacatgcacaggagacggaaatggaatggtcttaagagcaggattgccattacaagatatggaatttgttcagtttcaccctacaggaatatatggagttggatgccttatatcagagggagtaagaggagaaggagggtttttattaaattctaaaggcgaaagattcatggaaagatatgcaccaaatgcaaaagatcttgcttcgagagatgttgttagcagatctatagcaatcgaaataaacgagggacgtggagttgggaaagaaaaagatcacgtacatctccatttagatcatttagatcccaaagtaattgatgataggctaccaggtatagcagagtctgcaaaaacgttttcaggtgttgacgttacgaaagatccaataccagttgttcctacagttcattataatatgggaggaattcctaccaattataaagcagaagttttaactttaaatggatctgagaaagttgtgcctgggcttatggcaataggcgaggcagcttgtgtttctgttcatggagctaataggttaggttcaaattcattaatagatttagtagtttttggaaaagctgctgccaagagagctgcagaactagttaaacccaacacaccacacgaagactcacctcaaagtgaggttgataaatgccttgatagatttgataaaataagaaactcaaaaggagaaacaaacacttctcaacttagattgtcgatgcagaaaacaatgcaaagtaaatgtgcagtttttaggactgaaaaaactttaaaagagggagtagacgagattagaaaaccatttgaaggcttagaagatatatctgtcaaagataaatctcttttatttaataccgatcttgtagagtccctagaatttgataatctaattagacaagctatgacaactatggactcagcatatcatagaaaagaaagtagaggagctcatgctagagaggacttttcgaagagagatgataaaaaatttatgaaacatactttggcctggcaaaacggaaaagaagttaaagttaaatacagagatgttcacgcaagaactttgactaatgatgttcaatattttccacctaaagagagagtatattaa

SEQ ID NO: 219316 - DNA, 941 bp, Unknown
  Bacterial polypeptide expressing nucleotide sequence isolated from the Sargasso Sea
ctccaaagctaaagatcttgcctcaagggatgttgtaagcaggtcaattgcagttgaaattaatgagggaagaggagttggaaatgaaaaagatcatgttcatttacacctgaaccacttagacccaaaagttatagaagaaagacttccaggtatatcagagtcttcaagattattcgcgaacgtagatgtaacaaaagaacctataccagtggttccaactgttcattataacatgggaggtatccccacaaattataaagctgaagttttaactttaaatggatcagaaaaaactgttccaggattgatggcaattggagaagcagcctgcgtatcagttcatggagctaacagacttggatcaaactctttaattgatctagttgtttttggaagagctgcggccaagagagcggcagagttagtaaaaccaggcacacctcatgaggaaatttctcaatctgagactgataaatgtttagagagatttgatagacttagaaatgcatctggaacaaataatactgcagatttaagactggcaatgcaaaaaacaatgcaatctaagtgtgctgttttcagaactgaaaaaacattaaaagagggtgtaaatgaaattagaaaaccttttgagggtatggatgacctttcggtaaaagataaatctctaatttttaatactgatctagtagagacattagaatttgataatttgattagacaagcaataactacaatggactccgcttatcacagaaaagaaagtagaggagctcacgctagagaagattttccaaagcgaaatgacgaaaaatttatgcagcatacattatcgtggtgtgatggcaaaaagactaaaattgactatagacctgttcacagatcaacactttcaaatgacgttcaatactttccacctcaagaaagagtttattgat

SEQ ID NO: 219317 - DNA, 1613 bp, Unknown
  Bacterial polypeptide expressing nucleotide sequence isolated from the Sargasso Sea
aatatcagcagcattgggaaatatgggtgaagatgattggagatggcatatgtatgatactgttaaaggatctgactggttaggcgatcaagattgtattgaatatttatgtaaagaagctccaagagctgttttggaattagaaagatatggagtcccatttagtcgtacaaaagatggaaaaatttatcaaagatcttttggaggtatgacaaaaaattacggtaatgagactgttcaaagaacttgcgcagcagcagatagaactggccatgctatacttcacactatgtacggccaagcattgaaacataatactgaattttttattgaatattttgctttagatctaataatgaaaaatggtgaatgcaaaggtttaatagcttggaatttaaatgatggaacaattcatagattcaggtctcatataactataattgctacgggaggatatggaaaaacatattattcatctacctctgctcatacatgtactggagatggtaatgctatggttttaagagcaggattaccattgcaagatatggaatttgttcagtttcatcctacaggaatttatggacatggaactttaatatctgaaggagttagaggtgaaggtggataccttctaaattctaaaggagaaagattcatggagcgttatgctccgaaagccaaagaccttgcatctagagatgtggttagcagatcaatagctgttgagattaacgaaggaagaggtgttggaaatgaaaaagatcatgttcatcttcatttagatcatttagatcctaaagtaattgaaagtagattgccaggtatatcagagtcttcaaggttatttgcaaatgttgatgttacaaaagaaccaatacctgtagttccaacggttcattataatatgggtggaattcctactaattataaagctgaagttataactttaaatggttcagaaaaagttgttcctggacttatggcaatcggagaagcggcatgtgtttctgtacatggagctaatagattgggttcaaattcattaattgatcttgttgtttttggaagagccgcagcaaaaagagcagctgaattagttaagccaggctctcctcacgaaaatattccagacaatgaaactgaaaaatgtatagatagatttcacaagttgagaaatgcaaatggcgaaaataaaacagctgacttaagattagctatgcaaaaaacaatgcaatcaaaatgtgcagtttttagaactgaaaaaactttaaaagaaggagttgatgaaattagaaaaccgtttgatggaatggattcaatatcagttaaagacaaatcattaatttttaatactgatttagttgaaacattggagtttgataacttaataagacaggctatagttacaatggactcagcatatgaacgaaaagaaagcagaggagctcatgcaagagaagattatcccaaaagagatgacaatcaatttatgaaacatactttatcgtggtgtgaaggaagtaaaactaaaatagattataaggaagtaaatagatcaactctatcaaatgatgttcaatattttcctccgcaagaaagagtttattaat

SEQ ID NO: 219318 - DNA, 1777 bp, Unknown
  Bacterial polypeptide expressing nucleotide sequence isolated from the Sargasso Sea
atgagcaaatataaaattatagatcatgaatatgacgttgtagttcttggagccggaggatcaggtttaagagctgctgttggactttcagaggaaggtttaaaaaccgcatgtatatctaaagtgtttccaacaagaagtcatacttcagcagcgcaaggaggtatatctgctgcccttggaaatatgggagaagatgattggagatggcacatgtacgatacagtcaaaggatctgattggctaggagatcaagatgcaatcgagcacctttgtaaagaggcacccaaagctgttatcgaattagaaaaatatggtgtaccgtttagcagaacaaaggaaggaaaaatttatcaacgtgcttttggaggtatgaccaaaaattatggaaatgactccgtacaaagaacatgtgcagccgctgataggacgggacatgcaattttacatactttatacggacaagctttaaaacataatacagaattttttatagagtatttcgcgctagatcttttaatgaaaaacggagagtgcaaaggattaatagcttggaatttgaatgatggaactattcacagatttagatcacacataactattctcgcaactggtgggtacggtaaagtttattatactgcaacatctgctcatacttgtacaggtgacggaaatgctatggcattaagagcgggtctcccattacaagatatggagtttgttcaatttcatcctacagggatttacggagttggaacattaatatccgaaggtgttagaggtgaaggtggctttcttttaaattcaaaaggagaaaggttcatggagaagtatgctccaaaggcaaaagatttagcctcgagggacgtagtaagtagatcaatagcagttgagatcaacgaaggtagaggggttggaaaaaataaagactatgtgaatcttcatctagatcatttagacccaaaagttattgaagaaagattacctggaatagcagagtctgccaaaactttttgtgaggttgacgtaagaaaagatccaattccagtagttccaacagtacattataatatggggggaataccaacaaattacaaagcagaagttttgacattaaatggcaaagagtccacagtccctggcttgatggcgataggagaggcagcgtgtgtgtcagttcatggtgcaaatagattaggatcaaactctttaatcgatctagtagtttttggaaaatctgccgcaaatagagctgctgagctcgtaaagcccggaactcctcatgaggaattatcacaaagcgaaacagataagtgtttagatcgttttgataagcttcgtaattcaaatggctctacaaaaacatctgagctaagattagctatgcagaaaactatgcaatctaaatgtgctgtttttagaacagaaaaaactttgaaggagggaatggatcaaataagaaaacctttccagggcatggaagatatatcagttacagataaatcattgttatttaatacagatctagttgagactttggagtttgataacttaataaggcaagcaatgaccacaatagattcagcttatcatagaaaagagagcagaggagctcatgcaagagaagattataaaaaaagagatgacaaaaaatatatgacccatactttagcctggcaaaagggaaataatgtaaaagtagattatagaccagtgcattcaaaaactctaacaaatgatgtacaatattttccaccaagagaaagagtttattaat

SEQ ID NO: 219319 - DNA, 1585 bp, Unknown
  Bacterial polypeptide expressing nucleotide sequence isolated from the Sargasso Sea
tccggatgatgattggagatggcacatgtttgacactgtaaaagggtctgactacataggtgatcaggaagctatagaatatatgtgtagtgaaggccctaaagctgtttttgaactagagcatatgggtttacctttttctagaacagaagaaggacgaatttatcaaagacctttcggaggacaatccaaggattatggtaaaggcggtcaagcaactagaacatgtgcagcagctgatcgaacaggacacagcctgcttcatactctctttcaagctaatcttaaggctggtaccaacttcctcaatgaatggtttgcagtagatctagttcttaatgctgataaagctgttgtaggggttattgccttcaaaattgaaacaggtgaaatctattacataaaatcaaaggcaactgttctagcaactggaggagcaggtagaatttattcatctactaccaatgctttaattaattcaggtgatggcattggaatggctttaagggccggaatgcctgtccaagatatagaaatgtggcagtttcatcctacaggaatacacggagcaggaactttagttaccgagggatgcaggggagaaggtggatatctcttaaacaaagatggtgaaagattcatggaaaggtatgctccaaatgcaaaagatttagccagtagagatgttgttgcaagatctatggcattggaaattttagagggaagaggttgtggacctaacgctgatcatatttttctaagactagatcatctcggacctgaagtagttcataagagattaccgggaataacagaactttctaagacttttgcaggtgttgaccctgcagttcaaccaataccagtggtgcctacatgtcattacatgatgggaggaataccaactaatataaatggacaggttatttcggtagagcatggtgaggacaaaatagtcaatggcttgtatgcagccggtgaagtagcgtgcgtatcagttcatggaggaaatagattaggtggaaattctcttttagatctagttgtctttggaagagctgctggtttatatatagaagagactatgaagcaaggtgtcgagttgaaagacgcatcaaatgacgacattggaaaagcacttgaaagactaaacaaattaaacgcttcaaaagaaggtgatcaagtagctgttcttaaagagaaaatgcaacaaaatatgcagaataattttggtgtgtttagaagaggggatttgatggaaaaaggcatcgaggaattagccaagactagggaagaagtaaatgacatttttcttcaagataagtctgccgcttttaatacagccaggatagaagctttagagatgcaaaatctttttgaagtagcagaagctacagcgataaccgctaatgagagaaaagaaagccgcggcgctcatgcgagagatgacttcactgaacgtgatgatgaaaattggctaaaacattccatttactatgctgatacaaaggaagttagcaaaagagatgtgaactacagacctaaaacagttcaagctttccaaccaatggttaggagttattaa

SEQ ID NO: 219320 - DNA, 955 bp, Unknown
  Bacterial polypeptide expressing nucleotide sequence isolated from the Sargasso Sea
tatggaaagatacgctccaaatgctaaagatttagcatcaagagatgttgtgagcagatcaatgtctatagaaattaatgaaggaagaggtgtagggaaagatcaggaccatgttcacttacatttaagtcatttagataaaagtgtaatcgaaaatcgacttccaggtattactgaagcagcaaggttatttgcaaatgttgatgtaactaaagaaccaatcccagttgttcctactgtgcattataatatgggtggaattccaaccaattataaagcggaggttttaaccgtaaatggatcagaaaaaacagtgcctggattgatggcaattggagaagcagcatgcgtgtcagttcatggagctaatagacttgggtcaaactctttaattgatttagttgtttttggaagagcggctgcaaaaagagcagctgagctagttaaaccaggagcgcctcatgaagaaatttctgagacagaaacacagaaatgtctagacagatttgataaattaagaaatgcgcagggtgataacagtactgcagaattaagattagcaatgcaaaaaacaatgcaatcaaaatgtgcagtatttagaacagaaaaaaatttagaagagggtgttaacgaaattagaaaaacatatgatggcatggactcactttcagtaaaagatagatcattagtttttaacactgatctagttgaaacattagaattagataatttaatcagacaggcagtaactacagtagactctgcttaccatagaaaagaaagtagaggagcgcatgcaagagaagactatcctactagagatgatcagaaatttatgcagcatactcttgcttggtgcgatggaaaagatactaaaataacatacagaccagttcataattcaacattgactaatgaagttcaatatttcccccctcaagaaagagtttattaa

SEQ ID NO: 219321 - DNA, 1777 bp, Unknown
  Bacterial polypeptide expressing nucleotide sequence isolated from the Sargasso Sea
tatgagttcatataaaatagtagatcatgaatatgacgttgtagtcctaggtgctggtggttccggcttaagagcagctgttggtttaagcgaagcaggattaaaaactgcatgtatttcaaaagtattcccaacaagaagtcatacttctgctgcgcaaggtggaatttcagctgcccttggaaacatgggcgaagacgattggcgttggcatatgtatgatactgtaaaaggagcagattggttaggagaccaagatagcattgagtacctttgcaaagaagcccctaaggcagttatagaattggaaaaatatggcgtcccatttagcagaacagaggatggcaaaatttatcaaagaccttttggtggtatgaccaaaaattatggaaatggaatagttcaaagaacatgtgctgcagctgatcgaacaggacacgcaattttgcacactctatatggtcaagctttaaaacataagacagagttttttattgagtattttgctctcgatcttttaatgaaagatggggaatgtaaaggattgatagcatggaatttaaatgatggaactattcatcgatttagatctcatattgttattatagctacaggtggctacggaaaagtttactattctgcaacatctgctcatacatgtactggtgatggaaatgcaatggtgctaagagcaggtcttccattacaagacatggagtttgtacaatttcatccaactggaatttatggacacggcaccttaataacagaaggtgcgagaggtgaaggaggttatcttacaaattctaaaggtgaaagatttatggaaagatacgcgcctaaagctaaggatttagcatcacgcgacgttgtaagtagatcaatgtcaattgaaattaatgaaggaagaggagttggaaaagatcaagatcatgttcatttgaacttaagtcatctagataaagaaattatagaaagtagattgccaggtataacagatgcagcaagattatttgccaatgtagatgttactaaggaaccaattccagttgtacctacagttcattataacatgggtggtataccaaccaattataaagcagaagttttgactgtaaatggttctgaaaaaactgttccaggacttatggctataggggaagcagcttgtgtttcagttcatggagcaaatagattgggctctaactctttgattgatcttgttgtttttggaagagcagctgcaaaaagagctgctgaactaattaaacctggtacaccacatgaggagatcagtgagtcagaaactcaaaaatgtttagatcgttttgataagattagaaactctgatggagatattggtactgctgaactaagactgtccatgcaaaaaacaatgcaatcaaaatgtgcggtttttagaacagagaaaacacttaaagagggtgttgatgaaatacgacaaacatttgatggattggactctttatcggttaaagataaatcattaatatttaatactgacctagtagaaactttagaatttgataatttaattagacaagctgttgtgacagttgactccgcttataataggaaagaaagtagaggagctcatgcaagagaagattatccaaaaagagatgatgagaagtttatgcaacatacattagcatggtgtgatggaaaaaaatcaaaaataagttatagagacgttcataagtctacattaaccaatgaagtacagtattttccacctcaggagagagtatattaa

SEQ ID NO: 219322 - DNA, 1777 bp, Unknown
  Bacterial polypeptide expressing nucleotide sequence isolated from the Sargasso Sea
atgaaagcatataatattatagaccatgagtacgatgttgttgtacttggagcaggtggatcaggtttaagagcggcagtagggctcagcgaagctggcttaaaaacagcttgtatctcaaaagtatttcctactagaagtcatacatcagctgcacaaggtggtatatcagctgcactcggtaacatgggtgaagatgactggagatggcatatgtatgatactgtaaaaggtgcagattggttaggtgatcaagatagtattgaatatctatgtaaagaagcacctaaagcagttttagaattagagaaatatggagttccatttagtagaactgaagaaggaaaaatttatcaaagaccatttggtggaatgacaaaaaattatggaaatggaatagttcaaagaacttgtgcagcagctgatagaacaggacatgctattttacacacattatatggacaagcgttaaagcataatacagaattttttatagaatattttgcattagatttgttgatgaagaatggagaatgcaaaggtctaattgcttggaatttgaatgatggcacaattcatagatttagagcgcatacagtaattattgctacaggtggttatggaaaagtttattattcagcaacatcagcacatacttgcactggtgatggtaatgcaatggttttaagagctggattaccgcttcaggatatggagtttgttcaatttcacccaacaggaatttacggccatggtactttaataacagaaggtgcgcgaggagaagggggctatcttacaaattctaaaggtgaaagatttatggaaaggtatgctccaaatgcaaaagatttagcatcaagagatgttgttagcagatctatgtctatagagattaatgagggaagaggtgttggaaaagatcaagatcatgttcatttgaacctaagtcacttagataaagatattattgaaagcaggcttcctggaattactgatgcagcaagattatttgcaaatgtagatgtaactaaagaaccaattcctgttgtaccaacagttcattataatatgggtggtattccaacaaactataaagcagaagtattaactgtaaatggctcagaaaaaactgttccaggtttaatggctataggagaagcggcatgtgtctctgttcacggagcaaatagacttggttctaattctttaattgatttagtagtatttggaagagcagcagcaaaaagagcagctgaattagttaagccaggaacacctcatgaggaaattcctgagtcagaaacacaaaaatgtttagatagatttgataaacttagaaatgcacaaggaaataatagtactgcagaacttagactttcaatgcaaaaaacgatgcagtcgaaatgtgcagtttttagaacagaaaaaaatcttaaagaaggtgttgatgagattaaaaaaacctatgatggtatggactcaatttcagttaaagataggtctttagtatttaatactgatttagttgaaacattagaatttgataatttaataagacaagcagtaactactgtagaatctgcatatcatagaaaagagagcagaggtgctcacgcgagagatgactatccaaaaagagatgacgaaaagtttatgcaacatactcttgcttggtgtgatggaaaaaatacaaagattagttacagagcagtacacaaatcaactttaacaaatgaagttcaatattttccaccacaagagcgagtatattaat

SEQ ID NO: 219323 - DNA, 1552 bp, Unknown
  Bacterial polypeptide expressing nucleotide sequence isolated from the Sargasso Sea
aatgagttcatataaaataattgatcatgaatatgatgtagttgtgcttggcgctggtggatctggtttaagagctgcagttggtttaagtgaagcaggtttaaaaactgcttgtatatcaaaagtatttccaactagaagccatacttctgctgcacaaggtggaatttcagctgcactaggaaatatgggtgaagacgattggcgttggcatatgtacgatactgttaaaggatcagactggttaggagatcaagattgtattgaatatctttgcaaagaagccccaagagcagtattagaacttgaaaaatatggtgttccatttagcagaacagatgatggaaaaatttatcaaagaccttttggaggcatgacaaaaaattatggtaatgagccagttcaaagaacatgtgctgcagctgacagaactggtcatgcaattttgcatactttgtacggtcaagcattaaaacataacactgaattttttatagagtatttcgctcttgatttgcttatgaaagatggcgaatgtaaaggtttaattgcttggaatttaaacgatggaacaattcatagatttagatctcatataacaattattgctacaggaggatatggtaaagtttattattcagctacatctgctcatacttgtactggagatgggaatgcaatggtgctgagagcaggattacctttacaagatatggaatttgttcaatttcatccaactggaatttacggtcatgggactttaatctcagaaggagtaaggggcgaaggtggatatttactaaactctaaaggtgaaagattcatggaaagatacgccccgaaagctaaagacttagcatcaagagatgtagttagtagatccatagcaatcgaaataaatgaaggaagaggagtaggtaaagataaagatcatgttcatttacatctaaatcatctagaccctaatgtcatagaggaaagacttcctggaatttcagagtcgtctagattatttgcaaatgttgatgttacaaaagaaccaattccagtagttccaacagttcattataatatgggtggtattccaactaattacaaagctgaagttttaacattaaatggatctgaaaaaacagtcccgggtttgatggcaattggtgaagctgcatgtgtttcagtccatggtgcaaacagacttggctcaaattctctaattgatcttgtagtttttggaagagcagcagcaaaaagagcttctgaattaattaaaccaggcatgcctcatgaagaaatttcacaatcagaaacagataagtgtcttgaaagatttgataaattaagaaatgctaatggaagcaataatacagctgacctaagactgaacatgcaaaaaacaatgcagtcaaaatgtgcagtatttagaactgaaaaaacattaaaagaaggagttgaagaaatcagaaaaccttttgagggaatggataatatttcagtaaaagataaatctttaatttttaatactgatttagttgaaactttagaatttgataat

SEQ ID NO: 219324 - DNA, 1369 bp, Unknown
  Bacterial polypeptide expressing nucleotide sequence isolated from the Sargasso Sea
aacatgtgctgctgcagacagaacaggtcatgcaatattacacactctttatggacaagctttaaaacataatactgaattttttatagaatattttgctcttgatttattaatgaaagatggtgagtgtaaaggattaattgcatggaatttaaatgatggaacgatacacaggtttagagctcatacagtaattattgcaacgggaggatatggtaaagtttattactcagccacatctgctcatacatgtacaggtgatggtaatgcaatggttttacgagctggattacctttgcaagatatggaatttgttcaatttcatccaactgggatttatggacatggaacacttatctctgaaggagtaagaggtgaaggaggatatttagtaaacgcgaaaggtgaaagatttatggaaaggtatgcgcctaatgcgaaagatttagcttctagagatgttgtaagtagatcaatgtctatagaaattaatgaaggtagaggtgtgggaaaagaaaaagaccatgttcatttacatttaagccatttagacaaaagtgtaattgaaaatagattaccaggtataacagaggcagcacgattatttgcaaatgttgatgtaacgaaagaaccaattccagtagtcccaactgttcattataatatgggaggaattcctacaaattataaagcagaagttttgactgtaaatggttcagaaaaaactgttccaggtttaatggcgattggtgaagcagcttgtgtttctgttcacggagctaatagattgggatcaaattctttaatagatttggttgtatttggaagagctgctgcaaaaagagctgctgaattaattaaaccagcaacacctcatgaagatatcagtgaaactgaaacacaaaaatgcttagatagatttgataaattgagaaatgccaaaggagaaaatagtactgcagaactaagactatctatgcaaaaaactatgcaatctaaatgtgcagtttttagaactgaaaaaaatcttaaagaaggtgttgatgaaattagaaaaacttatgatggtatggactctatttcagttaaagatagatctttagtatttaataccgatttagtagaaaccttggaatttgataatttaataagacaggctgtaaccacagtagactctgcatatcatagaaaagagagtagaggagcacatgcaagagaagattatccaaagagagatgacgaaaaatttatgcaacatactttggcttggtatgatggaaaaaatactaaaataagttatagggctgttcataattcaactttgactaatgatgttcaatattttccacctcaagaaagagtatattaa

SEQ ID NO: 219325 - DNA, 1017 bp, Unknown
  Bacterial polypeptide expressing nucleotide sequence isolated from the Sargasso Sea
tatgaaatcttataatattatagatcatgaatacgatgtcgttgtccttggtgctggaggttctggcctaagagctgcggttggcttaagtgaagctggattaaaaactgcatgcatttctaaagtctttccaaccagaagtcatacatcagctgcccaaggtggaatttcagcagcccttggaaacatgggagaagacgattggcgttggcatatgtacgatactgtaaaaggagcagattggttaggcgatcaagatagtattgaatatttgtgtaaggaagctccaaaagcagtattagaattagaaaagtatggtgttccttttagtagaacagaagatggaaaaatttatcaaagaccatttggaggaatgacaaaaaattatggaaatggaattgtacaaagaacttgtgctgcagcagacagaactggtcatgcaattctccatacattgtatggtcaagcacttaaacataatacagaattttttattgaatattttgcattagacttaattatgaaagatggacaatgcaaaggtttaattgcttggaatttaaatgatggaacaattcatcgttttagatctcacataacaattatagccacagggggatatgggaaggtgtattactcagcaacatctgcacatacttgtactggtgatggtaatgcaatggtattaagagctggattacctcttcaagatatggagtttgtacaatttcacccaacaggaatatatggacacggaacacttatttctgaaggtgtaagaggtgaaggtggatatttggtaaactctaaaggtgaaagatttatggagagatatgctcccaacgctaaagatcttgcatcaagagatgtagttagcagatcaatgtctattgaaatcaatgagggaagaggtgttggtaaagatcaagaccatgttcatttatatttaagtcatttagataaaaaagttattgaagatagattgccaggcattacagaagcagcaagattattgca

SEQ ID NO: 219326 - DNA, 754 bp, Unknown
  Bacterial polypeptide expressing nucleotide sequence isolated from the Sargasso Sea
atgactaattcgtacaaaattattgatcaccattatgacgttgtagttgttggagctggaggatcaggactgagagctacacttggatgtgctgaagctggattaaaaacagcttgtatatcaaaagtgtttccaacaagaagtcatactgttgcagcacaaggtggaattggagcagctttagggaatatgggtgaagataattggaagtggcacatgtatgatacagttaagggttccgactggctcggagatcaagatgcaattgaatacttatgttctaaagcccctgaagcagtaattgaacttgaagaatatggcatgccttttagtagaacagaagatggcaagatctatcaaagaccttttggcggacacttaaccaataatggtgagggggctcctgctatgagagcttgtgcagcagctgatagaacagggcatgctttactgcatacactttatcagcaatcactaaaaaataatgtagaattttatattgaatattttgttttagatttaatttctgatgatctaggtaattgcattggtgtggtaacatggtgcttagaggacggatcaatccatcgatttttatctcatcaaacaattctagctactggtggatatggaagagcttacttctcatccacgagtgctcacatttgtactggtgacggtagtgcaatggctttaagacaaaacctacctctttctgatatggaatttattcagttccatccaacaggagttt

SEQ ID NO: 219327 - DNA, 1027 bp, Unknown
  Bacterial polypeptide expressing nucleotide sequence isolated from the Sargasso Sea
agttggatgccttatatcagagggagtaagaggagagggaggatttttattaaattctaaaggtgaaagatttatggaaagatatgctccaaatgcaaaagaccttgcttcgagagatgttgttagcagatctatagcaatcgaaataaatgaggggcgcggagtaggaaaagaaaaagatcacgtacatcttcacttagatcatttagatcccaaagtaattgatgatagattaccaggtatagcagagtctgcaaaaacgttctcaggcgttgacgttacgaaagaaccaataccagtagttcctacagttcattataatatgggaggaatccctacaaactataaagcagaagttcttactttgaatggatctgagaaagttgttcctgggctaatggcaataggtgaagcagcttgtgtttctgttcatggtgcaaataggttaggctcgaattcattaattgatttagtagtttttggaaaagctgctgctaaaagagccgcagaaatagttaaacctaacacaccacatgaaaactcaccccaaagcgagattgataaatgccttgatagatttgataaaataagaaactcaaaaggtgaaacgaatacttctcaactaagattgtcgatgcaaaaaacaatgcaaagtaaatgtgcagtttttagaactgaaaaaaccttaaaagagggagtgaatgaaattagaaaaccatttgagggcttagaagatatttccgtaaaagataaatcgcttttatttaataccgatcttgtggagtccctagaatttgataatctgatcagacaagcaatgacaactatggactcggcatatcacagaaaagaaagtaggggagctcacgctagagaagatttttcgaagagagatgataaaaaatttatgaaacatactttagcttggcaaaatggaaaagaggttaaagttaaatacagagatgttcatgcaagaacattgaccaatgatgttcaatacttcccgccaaaagagagagtatactaa

SEQ ID NO: 219328 - DNA, 1017 bp, Unknown
  Bacterial polypeptide expressing nucleotide sequence isolated from the Sargasso Sea
tatgaaaagttacaaaattatagatcacgaatatgatgtagtagttctaggtgcaggtggatctggtctaagagctgcagtaggattatctgaggcaggcttgaagactgcatgtatctcaaaagtttttccaactcgaagtcatacttcagccgctcaaggcggaatctctgcagcattaggaaacatgggtgaagacgattggagatggcacatgtacgacactgttaaaggatcagattggctaggagatcaagacgcgatagaatatttatgtaaagaggccccaagagcagtaatagaacttgaaaaatacggagtcccatttagcaggactaaagaaggtaaaatatatcaaagaccatttggaggtatgacaaaaaattatggcaacggaacagtccaaagaacttgtgcagcagctgatagaactggccatgctattttacatactctttacggacaagctttaaaacacaatactgaattttttatagaatactttgctttagacttaataatgaaaaatggagagtgtaaagggttaattgcatggaatttaaacgatggaacaatacatagatttagatctcacataacaataattgcaacaggtggttatggaaagatttattattcagcaacatctgcacacacttgtactggagatggaaatgctatggttttaagagcaggacttcctttacaagatatggaatttgtgcaatttcatcccacaggaatttatggagttggatgcctaatatcagagggtgttaggggcgagggaggatttctattaaattcaaaaggagaaagattcatggaaaggtatgctccaacggcaaaagatttagcttcgagagatgtggttagcagatcaatagcaatagaaataaatgaaggtagaggagtaggaaaagaaaaagatcatgtccatctgcacctagatcatttagatcaaaaagtaattgatgagagacttccaggaattgccgagtcaggcaaaactttttc

SEQ ID NO: 219329 - DNA, 889 bp, Unknown
  Bacterial polypeptide expressing nucleotide sequence isolated from the Sargasso Sea
tatgaattcatataaaattatagatcataattatgatgttgttgttttgggtgctggaggatcaggacttagagcagcagtaggacttagtgaatctggtttaaaaacagcttgtatttcaaaagtctttccaacccgaagccacacatcagctgctcaaggcggaatctcagctgccctaggaaacatgggagaagatgattggcgttggcacatgtatgatactgtcaaaggctcagactggttgggcgatcaagactcaatcgaatatttatgcaaagaggcaccaagagcagttcttgaattagaacagtatggtgtgccatttagtagaactgaagatggaaaaatataccaaagaccatttggaggaatgacaaaaaattatggtaatggaacagttcaaagaacatgtgctgcagcggataggacaggacatgcaatattacacacactttatggtcaagcattaaaacataatacagagttttttattgaatattttgcattagatcttttaatgaaggatggacaatgcaaaggtttaattgcttggaatctaaatgatggaactctccaccgttttagatctcatattacaattattgcaactggaggatatggaaaagtttattattcagcaacatctgcacacacatgtactggagatggaaatgcaatggtactaagagcaggtcttccactgcaagatatggaatttgttcaatttcatccaacaggaatttatggtcatggaactttaatctcagaaggtgttagaggagaaggcggatatttattaaattctaaaggtgaaagatttatggaaaaatatgcaccaaaaactaaagatttggcatcaagagatgtagtaagtagatcaattgct

SEQ ID NO: 219330 - DNA, 1564 bp, Unknown
  Bacterial polypeptide expressing nucleotide sequence isolated from the Sargasso Sea
tggctcggcgaccaggatgccatcgagttcatgtgccgcgaagcccccaaggtcgtgtacgacctagaacacatgggcatgccgtttgaccgaaacaccgacggcacgatctaccagcgccccttcggtggtcacaccgccaactacggcgaaaagcccgtgcaacgcgcttgcgctgcggccgaccgcaccggccacgccatgctgcacacgctgtaccagcaaaacgtcaaggcccgcaccaatttcttcgtggagtggatggccctggacctgatccgcgacgccgacggcgacgtggtgggcgtgacggcgctggaaatggaaaccggcgacctgcacattcttgaagccaagaccactctgctggccaccggtggcgcaggccgtatctttgcagcctcgaccaacgccttcatcaacaccggtgacggcttgggcatggccgcgcgcgccggcattccgctggaagacatggagttctggcagttccaccccaccggcgtggccggcgcgggggtgctgctgaccgaaggctgccgcggcgaaggcgccatcttgctcaacagcaatggcgagcgcttcatggagcgctatgcgcccaccctgaaggacctggcaccgcgcgactttgtgtcccgctcgatggaccaggaaatcaaggaaggccgtggctgcggtcccaacaaggactacgtgctgctcaagctcgaccacctgggcgcagacaccatccacaagcgcctgccttcggtgtacgaaatcggcgtcaacttcgccaacgtggacatcaccaaggaaccgattcctgtggtgcccaccatccactaccagatgggtggcatccccaccaacatcaacggccaggtcgtggtgcagcaaggcggcaacgacaacctggtggtcaacggcctgtacgcagtgggcgaatgctcctgcgtatcggtgcacggcgccaaccgtctgggcaccaactcgctgctggacctgctggtcttcggccgcgcggccggcaaccacatcgtcgagttcaacgacaagaacaagaaccacaagcccctgcccaaggacgcggccgaccgcaccctggagcgcctcaaccgcctgcaaggcgcgagcagcggcgaatacgcccaggacgtggccaacgacatccgcgccagcatgcagctgcacgccggcgtgttccgcacgcaagcgagcatggacgaaggcgtcaagaagattgccgagctgcgcaaccgcgtgaacagcgtgggcctgaaggaccactccaaggtgttcaacaccgcccgcatcgaagcgctggaagtcgagaacctgatcgaagctgcgcaagccaccatggtgtctgccgctgcccgcaaggaatgccgtggcgcccacacggtgagcgactacgagcgccccgcagacgacccagtggcaccgctgggccgcgacgatgccaactggatgaagcacaccctgtggcacagcgagagcaacagcctgacctacaagcccgtcaaactcaaacccctgaccgtggactcagttccgcccaaggttcgcacgttctaaa

SEQ ID NO: 219331 - DNA, 1171 bp, Unknown
  Bacterial polypeptide expressing nucleotide sequence isolated from the Sargasso Sea
aatatttgtgcaaagaagctccaaagctgttttagaacttgaaaaatatggagttccttttagcagaactaaagaaggtaaaatttatcaaagaccttttggaggaatgacaaaaaattatggtaatgaacccgttcaaagaacatgtgcggctgcagatagaactggtcatgcaattcttcatacgctttatggacaagcattgaaacacaatacagaattttttattgaatattttgccctagatctattaatgagcaatggagagtgcaaagggttaatcgcttggaatttaaatgatggaacaattcatagatttagagcacatataacaattattgctactggcggatatggtaaagtttattattcagctacatctgctcatacttgcactggcgatggtaatgcaatggtgcttagagcaggattgcctttacaagatatggaatttgttcaatttcatccaacaggaatttatgggcatggaacattaatctctgaaggagttagaggagaaggtggttacttacttaactcaaaaggagaaagatttatggaacgctatgctccaaaagcaaaagatttagcttcaagggatgtagtcagtagatcaatagcaatagaaataaatgaaggaagaggcttaggtcaacaaaaagatcatgttcatcttcatttaaaccatcttgatccaaaagtaattgagcaaagacttcctggaatatctgagtcttcaaaattgtttgcaaatgtagatgtcacaaaagagccaattccagttgtacccactgttcattataatatgggaggtattcctactaactttaaagctgaagtcttaactatgaatggctctgaaaaaatagttccaggtttaatggcaataggagaagctgcttgtgtttccgttcatggtgcaaatagattgggctctaattcattgatagatttagttgtttttggaagatcagctgcaaaaagagcatctgaaataattaaatcaggaacacctcatcaagaaatatcaaaatctgaaacggataaatgtattgatcgatttgataagttaagaaatggcaatggagaaaatcgtacagctgatttaagattatcaatgcaaaaaactatgcaatcaaaatgtgctgtttttagaactgagaaaacttta

SEQ ID NO: 219332 - DNA, 856 bp, Unknown
  Bacterial polypeptide expressing nucleotide sequence isolated from the Sargasso Sea
attgaccaactccgaaggcgagcggtttatggagcgctatgcgccccaatataaagaccttgcgccgcgcgattacgtatcgcggtcgatgacaatggaaatccgtgaaggccgcggcgttggcgagcatggggatcacatccacctgaacctgtcgcatctgccacccgaagctttggccgaacggcttccggggatttccgaaagcgccaagattttcgccggtgtcgatgtcaccaaagagccgattccggttttgccgacggtgcattacaacatgggcggcattcctaccaactattggggtgaggttctcaaccccactgctgaagagccgaacgccgttgtgccgggcttgatggccgtgggcgaggcgggctgtgcttctgtgcatggtgcgaaccgtttgggttcgaactctctcattgaccttgtggtctttggccgcgccgccgcgatccgcgccggtaaggtcgtcgatgccgaaggcgcgaaccccgtgctgaaccaagcttcgattgacagcgctttcgaccgtttcgacgggttgcgtaatgccaacggtggcacgccgacggcggagttgcgactcgagatgcagcgcaccatgcaatcggatgccgctgtgttccggaccgccgaaaccatgaaagagggcgtcgacaagatgaccgaaatcgctgccaaattgggcgatttgaaagtcaccgaccgcagccttgtgtggaactcggacctgatggaaacgctggagctgaccaacctgatgccgaacgctttggcgaccattgttggcgccgaagcgcgtgaagaaagccgcggcgctcatgcgcatgaggatttcgccacacgtgac

SEQ ID NO: 219333 - DNA, 1777 bp, Unknown
  Bacterial polypeptide expressing nucleotide sequence isolated from the Sargasso Sea
catgaaagcctataatatcatagatcatgagtacgatgttgttgtacttggagcaggtggctcaggattaagagcagctgtgggattaagtgaagctggtttaaaaacagcgtgtatctcaaaagtatttcccacaagaagtcatacgtctgctgcacagggtggaatatcagcagccctaggaaatatgggggaagatgattggagatggcatatgtatgacactgtaaaaggtgcagactggttaggagatcaagatagcattgaatatttatgtaaagaagcgcccaaagcagtcttggaattggaaaagtatggtgttccttttagtcgtacagaagaggggaaaatttatcaaagaccatttggtggtatgaccaaaaattatggaaatggaattgttcaaagaacttgtgcagctgcagatagaacagggcatgcaatattacatactttatatggacaagctttaaaacataacacagaattttttattgaatattttgctttagatttattaatgaaagatggagagtgcaaaggattaatagcatggaatcttaatgacggtacaattcatagatttagagcgcatactgtaattattgcaactggaggatatggaaaggtatactactctgctacatcagctcatacttgtacaggtgatggtaatgccatggtcttaagagcaggactacctttgcaagatatggaatttgtacaatttcatccaacaggtatttatggacatggaacacttatatcagaaggagtaagaggtgaaggtggctatttagtaaattcaaaaggtgagagatttatggaaagatacgcgccaaatgcaaaagatttagcgtcaagagatgttgtcagtcgatcaatgtctatagaaattaatgaaggaagaggtgtaggtaaagatcaagatcatgttcatttacatttaagtcatttagacaaaagtgtaattgaaaatcgattaccaggtatcactgaagctgcaagattgtttgcaaatgttgatgttaccaaagatcctatacctgtagttcctacagttcactataacatgggaggtattccaacaaattataaagcagaagtgctaacaatgaatggttctgaaaaaacagttcctggtttaatggctataggtgaagcagcatgtgtttctgttcatggagcaaacagacttggttctaattcattaattgatttagtagtatttggaagagcagctgcaaaaagagcagctgaactagtaaaacctggtacaccacatgaagaaataccagaaactgaaactcaaaagtgtttggatagatttgataaacttagaaatgctcaaggggataatagtactgcagagttaagactctcgatgcagaaaacaatgcaatctaagtgtgcagtatttagaacagaaaaaaatcttaaacaaggggttgatgagataggcaaaacttacgatggaatggactccatttctgttaaggataaatctttagtatttaacactgatttagtagaaaccttagaatttgataatttaatcagacaagcggtagcaactgtagactctgcatatcacagaaaagaaagcagaggagctcacgcaagagaagattatcctaaaagagatgatgaaaaatttatgcaacatactcttgcatggtgtgatggcaaaaatacaaagataagttatagaccagtccatcaatcaactttaactaatgaagtgcaatattttccacctcaagaacgggtatattaa

SEQ ID NO: 219334 - DNA, 1512 bp, Unknown
  Bacterial polypeptide expressing nucleotide sequence isolated from the Sargasso Sea
aatatttatgtaaagaggccccaagagctgttcttgaattacaaaaatatggagttccttttagtagaacagaggacggtaaaatttatcaaagaccttttggaggtatgactaaaaattatggtaatgaaccagtacaaagaacttgtgcagcagcagatagaacaggtcatgcaattcttcatacactttatggacaagctcttaaacataaaactgaattttttattgaatattttgctttagatttattaatgaaagatggagcatgcaaaggtttaatagcttggaatttaaatgatggcacaatacatagatttagatctcatataacaataattgcaacaggaggttatggaaaagtttattattcagcgacttctgcgcatacttgtactggagatggaaatgcaatggtattaagggcaggtcttccattgcaagatatggaatttgttcagtttcatccaactggaatttatggacatggaactttaatttcagaaggtgttagaggagaaggtggatatttattaaattcaaaaggagaaagatttatggagcgttatgctcctaaagctaaagatttagcttctagagatgtggttagtagatcaattgcaattgaaataaatgaaggaagaggtgttggtaaagagaaagatcatgtacatcttcacttagatcatttagatccaaaagtaatagaaaataggttgccaggaatctcagaatcatcaagattatttgcaaacgttgatgttacaaaagaaccaatacctgtagtacctaccgttcactacaatatgggtggtattcctacaaattataaagctgaagttcttacattaaatggatctgaaaaagttgttccaggtttaatggctattggagaggcagcgtgtgtttccgttcatggagccaatagacttggctcaaactctttgattgatctagtagtttttgggagagcagcagcaaaaagagcttctgaattaattaaaactggaatgaaacatgaagaaatagataagagcgaaacagataaatgtcttgaaagatttgataagcttagaaattctaatggaacaagcccaacctcagaactaagaatatcaatgcaaaaaacaatgcaatcaaaatgtgcagtattcagaaatgaaaaaactttaaaagaaggtgttgatgaaattagaaaaccatttgaagcaatggaatcactttcagttaaagataaatctttaatatttaatactgatttagttgaaactcttgaatttgataatttaataagacaggcaataactacaatggattctgcttatcatagaaaagaaagcagaggcgctcatgcaagagaagattaccctagtagagatgatgataaatttatgcaacatactttatcttggtgtgaaggaattaaaacaaaaatagattatagaccagttcatagatcaactttaacgaatgatgttcaatattttccaccccaagaaagaatttattaat

SEQ ID NO: 219335 - DNA, 1153 bp, Unknown
  Bacterial polypeptide expressing nucleotide sequence isolated from the Sargasso Sea
atgaaatcttacaaaattatcgatcacgaatatgatgtagttgttttaggcgcaggaggctcaggtttaagagctgcggttggattaagcgaagcaggattaaaaacggcatgtgtatctaaagtttttccaacaagaagccacacttctgcagcacaaggtggtatctctgcagccttaggtaatatgggtgaggatgattggagatggcatatgtacgatactgttaaaggttcagattggttaggtgatcaagattgtatcgagtatttgtgtaaagaagctccgagagcagttttagaattagaaaaatatggtgttcctttcagcaggactgaagatggaaaaatatatcagcgtccttttggaggaatgactaagaactacggtaatgagccggttcaaagaacttgtgctgctgcagatagaactggccatgccattctgcacactttatatggtcaggctttaaaacataatacagaatttttcatcgagtattttgcattggatcttctaatgaaggatggtcagtgcaaaggtttaatagcttggaacttgaatgacggaactatacatagatttagatcacacattactataatcgcaacaggtggttacggaaaagtttattactctgcaacctctgcacatacatgtactggagatggaaatgctatggtacttagagcgggcttacctttacaagacatggagtttgtccaatttcatccaacaggaatttatggtcatggaactttaatttcagaaggtgtaaggggcgaaggaggttatttagtaaattctaaaggcgaaagatttatggaaagatatgctccaaaagctaaagatctcgcttcaagagatgtggtaagcagatcaatagcagttgaaattaatgagggaagaggtgttggaaacgaaaaagatcatgtacatttacacttaaaccatttagatccaaaagttatagaagaaagattgccaggtatatcagagtcttcaagattatttgctaatgtagatgtaacaaaagaacctataccagtagttccaactgttcactataatatgggaggtattcccacaaattataaagctgaagttttaactttaaacggatcagaaaaaactgttccggggttgatggcaa

SEQ ID NO: 219336 - DNA, 1204 bp, Unknown
  Bacterial polypeptide expressing nucleotide sequence isolated from the Sargasso Sea
atgaaatcttacaaaattattgaccacgaatacgatgtagttgttttaggtgcaggaggttccggtttaagagccgcggttggattaagcgaagcaggattaaaaactgcatgcgtttctaaagttttcccaacaagaagtcacacttctgcagcacaaggcggcatctctgcagctcttggtaatatgggtgaagatgattggagatggcatatgtacgatacagttaaaggttcagattggttaggtgatcaagattgtatcgagtatttgtgtaaagaagctccaagagcagttttagaattagaaaaatatggtgttcctttcagcaggactgaagatggaaaaatatatcagcgtccttttggaggaatgacaaagaattatggtaacgagcctgttcaaagaacttgtgctgctgcagacagaactggccatgctattttgcacaccttatatggtcaggctttaaaacataacacagaatttttcattgagtattttgcgttggatcttttaatgaaagatggtcagtgcaaaggattaattgcttggaatttgaatgatggaactatccatagatttagatctcacataacgataattgcaacaggtggttacggaaaagtttattactcagcaacttcagctcatacatgcactggagacggaaatgctatggtgcttagagcaggcttacctttacaggatatggagttcgtccaatttcatccaacaggaatttatggtcatggaactttaatttcagaaggtgtgaggggcgaaggtggttatttagtaaattccaaaggcgaaagatttatggaaagatatgctccaaaagctaaagacctcgcttcaagagatgttgtaagtaggtcaattgcggttgaaattaatgaaggtagaggggttggaaatgaaaaagatcacgtgcacctacatttaaaccatttagatccaaaagttatagaagaaagacttccaggtatatcagagtcctcaagattatttgcgaatgtagacgtaacaaaagaacctatcccagtagttccaactgttcactataatatgggaggtattcctacaaattataaagctgaagttttaactttaaacggatcagaaaaaaccgttccagggttgatggcgattggtgaggcagcctgtgtgtcagttcacggagctaacagacttggatcaa

SEQ ID NO: 219337 - DNA, 994 bp, Unknown
  Bacterial polypeptide expressing nucleotide sequence isolated from the Sargasso Sea
atgagttcatacaaaattatagaacatgaatatgatgtagtagttcttggagctgggggagcgggcttaagagctgcagttggtctgagtgaggctggattaaaaaccgcatgtatatcaaaagtttttcctacaagaagccatacttcagcagcccaaggaggtatttcggcggcattaggaaatatgggagaagatgattggagatggcatatgtatgatacagttaaaggttcagattggcttggcgaccaagactgcattgaatatttatgcaaggaagcaccaagagctgttttagaattagaaagatatggtgtcccttttagtagaacagaagacggaaaaatatatcaaagaccatttgggggaatgactaaaaattatggaaatgagacagtgcaaagaacttgtgcagcagctgatagaactggtcatgcaatactacacactatgtatggtcaggcattaaaacataatacaaagttttttatcgagtattttgcattagatctattaatgaaaaatggagagtgcaaaggtttgattgcgtggaatttaaatgatggaactattcataggtttagagcccatatcaccataatagctacaggaggatatggaaaaacttattattcatcaacatccgcacatacttgtacaggtgatggaaatgcaatggttttaagagctgggcttccactacaagatatggaatttgttcaatttcatccaactggaatatatggacatgggactttaatatctgaaggcgttagaggtgaagggggttatttattaaattccaaaggagaaagatttatggagcgttacgctccaaaagctaaagatcttgcctctagagacgtggtaagtagatcgatagcagttgaaattaatgaaggaagaggagttggaaacgataaagatcatgttcaccttcacttaaatcatttggatccaaaagtaattgaggaaagacttccaggaattg

SEQ ID NO: 219338 - DNA, 1777 bp, Unknown
  Bacterial polypeptide expressing nucleotide sequence isolated from the Sargasso Sea
tatgaaatcttacaaaattattgatcacgaatatgatgtagttgtgttaggtgctggtggttcaggcttgagagctgctgttgggttaagtgaagctgggcttaagacagcttgtatatcaaaagtttttccaactagaagccatacatctgctgcccaaggtggaatttctgcagcgttaggtaatatgggtgaagatgattggcgttggcatatgtatgatacagttaaaggtgcagattggttgggtgatcaggattgtatagagtacttgtgtaaagaagctcctcgagcagttttggaattagaaaaatacggtgttccttttagcagaacagatgatggcaaaatttaccaaagaccttttggtggaatgacaaaaaactatggtaacgaaccagtacaaagaacttgtgcagcagcagatagaactggccatgcaattttacatacattgtatggacaagctttgaaacataatacagaattttttattgagtattttgcattagatcttttaatgaaaaatggtgagtgcaaaggtttggttgcttggaatttaaatgatggcacaattcataggtttaggtctcacataacaattattgcaacaggtggttatggaaaaatatactattcagctacttcagcacatacttgtactggtgatgggaatgcaatggtattaagagcaggtttacctttacaagatatggaatttgttcaatttcatccaacaggtatctatggtcatggcactttaatatctgagggtgtaagaggtgaaggtggatatcttgtaaactctaaaggtgaaagatttatggagagatatgctcctaaagctaaggacttagcatcaagagatgtggtgagcagatctattgcagttgaaataaatgagggcagaggagttggtaaagataaagatcacgttcacttacatttagatcacctagataaaaacgttatcgaagagagattaccaggcatatcagagtcttcgaagttattcgctaacgttgatgttactaaagaaccaataccagtagtaccaactgttcattataacatggggggtatacctacaaattataaagctgaagtgctaacactaaatggttctgaaaaaacagttccgggattaatggccattggtgaggctgcatgtgtatctgttcatggagcaaatagattaggatctaattcattaattgatttagttgtttttggaagagctgcagcaaaaagagcatccgaattagtaaaacctggacaaccacatgaagatattccagattctgaaactgataaatgtttatcaagatttgataagcttagaaattctagcggatcaaacagtactgcagatttaagattatctatgcaaaaaacaatgcagtcaaagtgtgccgtttttagaacagaaaaaactttaaaagaaggcattgagcaaataagaaaaccatttgaaggtatggaaaatttatcagtgaaagataaatctttaatttttaatactgatttagttgaaaccttagagtttgataacttaatacgacaagcaataacaacaatggactcagcatattatagaaaggagagcagaggtgctcatgctagagaagattatcctaagagagacgatgaaaaatacatgcaacatactttatcttggtgtgaaggtaagaaaacaaaaatagattatagaccagttcacaggtcaacactaactaatgatgtgcagtatttcccgccacaggaaagagtctactga

SEQ ID NO: 219339 - DNA, 706 bp, Unknown
  Bacterial polypeptide expressing nucleotide sequence isolated from the Sargasso Sea
atgggaggaataccaacaaactataaggccgaagttcttacagttaatgaatcggagaaaactgttcctggtttaatggcaatcggagaagctgcatgtgtatcagttcatggtgctaatagattgggctcaaactcattaattgatcttgtagtatttggaagagcagctgcaaaaagagcagcagaacttataaaaccaggaatgaaacatgacgaaatcgataaaagtgagactgatagatgtttagatagatttgacaaacttagaaactctcaaggttctaaccctacatctgaacttagactatcaatgcaaaaaacgatgcagtctaaatgtgctgtatttagaagtgaaaagacattaaaggaaggggttgatgaaataagaaaaccttttgagggcatggaatctttatctgttaaagataaatcattaatatttaatacagatctagtcgaaactttagaattcgataacttaattagacaagcgattactactatggactcagcttatcacagaaaagaaagtagaggagcacatgcaagagaagactttccgaaaagagatgatgaaaattatatgcaacatactctctcatggtgcaatggctctaaaacaaaaataaattatagaccagttcatagatcaacactaactaatgatgtacaatattttcctcctcaggaaagagtatattaat

SEQ ID NO: 219340 - DNA, 1114 bp, Unknown
  Bacterial polypeptide expressing nucleotide sequence isolated from the Sargasso Sea
agccatacttctgctgctcaaggaggaatttcagccgcattaggaaacatgggagaagacgattggcgatggcatatgtatgatacagttaaaggagcagattggcttggtgatcaagactgcattgaatatttatgtaaagaagctccaagagctgttttagaattagaaaaatatggagttccatttagtcgaacagaagatggaaaaatttatcaaagaccctttggaggaatgactaaaaattatggcaatgatactgtacaaagaacttgtgcagctgctgatagaacaggtcacgctatattacatactttgtatggacaagcgctaaaacataacacagaattttttatcgaatactttgctttagatttattaatgaaaaatggagcgtgcaaaggtttaattgcttggaatttaaacgatggaactattcatagatttagatctcatataacaataatagcgacaggcggatatggaaaaacatattattcttctacatcagctcatacttgtacaggcgatggtaatgcaatggttttaagagccggactacctttgcaagatatggaatttgttcagttccatccaacaggaatttatggacatggaaccttaatatccgaaggtgttagaggtgaagggggctacttattaaattctaaaggagaaaggtttatggagcgttatgctccaaaagccaaagatctcgcttctagagatgtggtaagtagatctatagcgatagaaataaatgaaggaagaggagtcggaaaagaaaaagatcatgttcatcttcatttagatcatttagatccagaagtaattgaaaaaagacttccgggaatttcagagtcttcaaggttgtttgcagatgttgatgtaactaaagagccaataccagttgtaccaacagtacattataatatggggggcataccaacaaattataaagctgaagtcttaacaggtaatggatcagaaaaagttgtaccgggacttatggcaataggagaagcagcatgtgtttctgttcatggagctaatagattaggatcaaattcattgattgatctagtagtttttggaagagctgcagcaaaaagag

SEQ ID NO: 219341 - DNA, 1195 bp, Unknown
  Bacterial polypeptide expressing nucleotide sequence isolated from the Sargasso Sea
gtttaaatctcatattacgataattgctacaggaggctatggtaaaatttattattcagcaacttcggcgcatacgtgtactggagatggcaatggaatggttttaagagcagggttacctttgcaagatatggagtttgttcaatttcatccgacaggaatatatggcgttggatgtttaatatctgagggcgtaagaggagaaggtggatttcttttaaattcaaaaggagagagattcatggagagatatgctcctaatgcaaaagatcttgcttcaagagatgtggtcagtagatctattgctgttgagattaatgagggaagaggagttggaaaagaaaaagatcatgttcaccttcatctagatcatttagatccaaaagtgattgatgagagacttccaggtatagctgagtcagcaaaaacattttctggagtggacgttactaaagatccaataccagttgtccctaccgttcattacaatatgggaggaataccaacaaattataaagcggaggtattaactttaaatggatctgaaaaaactgtgcctggactaatggcaattggagaagcagcttgtgtttcagttcatggggcaaacagattgggatctaattcacttatagatctagttgtttttgggaaagctgcagctaaaagagcttcagaattggttaaaccaaatagtcctcacgaaaattcaccacaaagtgaggttgatagatgtttagagagatttgataaaattagaaattcaaaaggcaaaacaaatacttctaaactaagactctcaatgcaaaaaacaatgcaaagtaaatgtgcagttttcagaactgaaaaaactttaaaagagggagtagacgcaattagaaaaccctttgatggccttgaggatattttggtaaaagataagtctcttttgtttaacacagacttagtagaatctttagaatttgacaatttaataagacaggctatgactacaatggactctgcatatcatagaaaagagagtagaggagcacatgctagggaagatttttcaaaaagagatgacaaaaattttatgaaacatactttagcttggcaagatggaaaatcagtgaaagtaaaatatagagatgttcacgcaagaacattaacaaatgacgttcaatattttcctccaaaggagcgagtctattaa

SEQ ID NO: 219342 - DNA, 866 bp, Unknown
  Bacterial polypeptide expressing nucleotide sequence isolated from the Sargasso Sea
tgtgggagaagaaaaagatcatgtacatcttcacttagaccatttggatccaaaagttatagaggaaagacttcctggaatttcagagtcatctagattatttgctaatgttgatgtcacaaaagaaccgataccagtagtgccaactgttcattataacatgggtggaattccaacaaattataaagccgaagttctcaccttgaatgggtctgaaaaaattgttcctggattaatggccataggagaagcggcttgtgtttctgttcacggagcaaacagattagggtcaaattcgttgatagatttagttgtttttggaagagcggcagcaaaaagagcttcagaattagttaagccagggaaaccgcatgaaataattagcaaaaatgagacagataaatgtctagatagatttgatagactaagaaattcaaacggtacaaatcctacatcagaacttagaaaatcaatgcaaaagactatgcaatctaaatgtgccgtatttagaacagaaaaaacattaaaagaaggtgttgaggaaataagaaaatcgtatgatggtataaagtctatctctgttaaagataaatctcttatatttaataccgatctagtagaaactttagaatttgataatctaattaggcaagcaattacaactatggattctgcttatcatagaaaagaaagtagaggagctcacgcaagagaagattttccaaaaagaaatgatgaaaagtttatgcaacatacattatcttggtgcgatggtagtaagacaaaaataaactatagaccagttcataagtcgaccttaacaaatgatgtacagtattttccaccacaggaaagaatttattaat

SEQ ID NO: 219343 - DNA, 1264 bp, Unknown
  Bacterial polypeptide expressing nucleotide sequence isolated from the Sargasso Sea
aactgcttgtatttcaaaagtctttcctacaagaagtcataccgtagctgcacaaggtggaatttctgctgctttaggaaatatgggtgaagatgattggcgctggcacatgtatgacacagttaaaggttctgactggctaggtgatcaagatgccattgaatatctgtgcaaaaatgctccaaaagctgtattagagcttgaaaattatggtgttcctttcagtagaactgaggacggaaaaatatatcaaagagcctttggaggaatgactaaaaattacggagagtcaactgctcaaagaacctgtgctgcagcagaccgaacagggcatgcaattattcatactctttatgggcaatcacttaaacatggagcagattattatattgagtattttgttctagatttacttatggtggaaggtgaatgtagaggagtattggcatggtgcttagaagatggcaaacttcatgtttttaattcaaagcagacagttctcgctacaggtggatatggaagagtttacttttctgctacttcagcacatacttgtactggagatggaaatgcaatggtattaagagcaggacttccattgcaagatatggaatttgtacaatttcatcctacaggtatttatggtgtaggatgcttgattactgaaggagcaagaggagagggaggttatttggttaacagtgaaggtgaaaggtttatggaaagatacgcaccttctgccaaagatttagcatcaagagacgttgtttcacggtctattactaaagaagtattagaaggaagaggggttggtaaagacaaagaccatgtttttcttcatttagatcatatagactcgaaaatattagaagaaagactaccaggaatttctgagtcagcaaaaatttttgctggtgttgatgttactcagagtccaatacctgttattccaactgttcactataatatgggtggtatccctaccaatttccatggtgaagttatggacttagttaagggagatgaaaagaatgtacatggacttatggcagttggagaagcagcttgtgtaagtgttcacggagccaatagacttggatccaattctttaattgatttagttgtttttggtaaagcggcagccgatagaatcaatgatacgacctcgaaagatacatctaatagtgatatccctcagaatatagtagacgaagcagttgccagatttgataaaactagaaattctaatggggaagtttcaaca

SEQ ID NO: 219344 - DNA, 1001 bp, Unknown
  Bacterial polypeptide expressing nucleotide sequence isolated from the Sargasso Sea
ccgcggtgaaggtggttaccttataaatcgtgatggagaacgttttatggagcgatacgctccgacagccaaggatctggctggaagagacgttgttgcacgatcaatgatactggaaattctcgatggcaaagggtgtgatcctgaaaatcctgctaacgatcacgttttgttgaagctcgatcacctaggtgaagaggttctgaatagcaaacttccaggcattttagagttatcaagaaccttcgcgcatgttgatccagtcaaggagccgataccggtgattccaacgtgccattatatgatgggtggtatagcgacccaggttagcggtcaggcactaacacaggttaatgggacagatcaggaggtgcagggtctctacgctgcaggtgaagcggcctgcgtttctgttcatggggcgaaccgattaggaggaaactcattactagatttagtggtttttggtcgtgctgcaggcattcacattgaagaggttatgcggcaaggggtgtcttatcgcgacgcatccgatagcgacatagagtcctctctagcgagactctctcgttgggatgattcttctagtggtgagtcaatttccgatttgaagaaagaattgcaaacgacaatgcagaacagttttggcgttttcagaacagaaaaaaacatgcaagaagggatcgtgaaattgcaggatctcaggcaaagaattgatagtgctcatttgccggataagtcggattcatttaatacggctagacttgaagcgctagagttagataacttgcttgaggttgctgaggctaccgccatagcagctgaagagcgcaaagaaagcagaggcgcacatgctcgtgacgattatggtgaacgagatgatgacaattggttgtgccattcaatgtatttcccagaagaaaagcgtgtcggtaagagggatgtgaattttactcctaagactgttgagacgttcgagccaaaggaaagggtgtattaga

SEQ ID NO: 219345 - DNA, 1498 bp, Unknown
  Bacterial polypeptide expressing nucleotide sequence isolated from the Sargasso Sea
gcagtcgattcaataattgaattagaacactacggcgtgcctttttcacgaactgaagaagggaaaatataccaaaggcctttcggcggaatgactacagaatatggaaaaggaattgcacagagaacatgtgctgcagcagatagaactggacatgcaatattacatactctatacacacaatctttgaaaaataatgtagatttttttattgaatattttgttatagatcttgtttttaaaaatggaaattgtatcggtgttttagcatggtgcttagatgatggatcgatacatttttttcaatctcacatagttatacttgctactggcggttacggtagagcttacttatcatcaacatctgcgcacacttgtactggtgatggtaatggaatgatactaagatctggattacctctccaagatatggaatttattcaatttcatccgactggaatatacggtgctggttgtcttattaccgaaggagcaagaggggaaggtggttatctcactaattcagaaggagagagatttatgcctaaatatgctcctaacgcaaaagatttagcctcaagagatgttgtgagtcgtgctattcaaattgaggtcaatgagggaagaggagtcggagaagagaaagaccatgcattattgcacttggagcatttagactctgaaataattaataataaattacctggaatatctgaaactgccaaaatttttgcaggagttgatgttacgaaggaacctatccctgtaatacctaccgttcattataacatgggcggaacaccaactaattataatactgaagtactgcaatcgggtgactcagctgttgttccagggttaatggctgttggagaaggtgcatgtgtttccgttcatggcgcaaatagattaggttcgaattcactactagatttaattgtctttggaagatcggctgctgatagagctatttccatacttaatgataaacctaaaaatcatcaagctgttagttcctctgatttagatgaaattcttggtcgatttgatcaaacaagacattcatctggagatatagctacttcagaattaagaaataaaatgcaaaaaaccatgcaacgatatgctccagtatatagggatgagaaaactctaaaagagggtattgcaataatgcagggaatttttaaagactacgaacaagttaaaacctcagacaaatctttgatttggaatactgatcttgcggaaacatttgaattaaataatttgctgtatcaatcattagcaactttatactctgctaacgagagaactgaaagtcgaggtagtcatgcaagagatgattaccctgatagaaatgatgaagactggttaaaacatacaatggtatgggttaataaagatggaactagcaagtttgattttaaacctgtagaattaaacacattgactgatgaagtagaaactgtacagcttaaagcaaggacatattaat

SEQ ID NO: 219346 - DNA, 1215 bp, Unknown
  Bacterial polypeptide expressing nucleotide sequence isolated from the Sargasso Sea
atgatggaacaattcatcgttttagatctcacataacaattatagccacagggggatacgggaaggtgtattactcagcaacatctgcacacacttgtactggtgatggtaatgcaatggtattaagagctggattacctcttcaagatatggagtttgtacaatttcacccaacaggaatatatggacacggaacacttatttctgaaggtgtaagaggtgaaggtggatatttggtaaactctaaaggtgaaagatttatggagagatatgctcccaacgctaaagatcttgcatcaagagatgtagttagcagatcaatgtctattgaaatcaatgagggaagaggtgttggtaaagatcaagaccatgttcatttatatttaagtcatttagataaaaaagttattgaagatagattgccaggcattactgaggcagcaagattatttgcaaatgtagatgtaaccaaagaaccgataccagttgttccaacagttcattataatatgggtggtataccaacaaattataaagctgaagttttaacagtaaatggatctcaaaaaacagtcccaggtttgatggcgattggtgaggccgcgtgcgtatctgtgcatggagcaaatagattaggttcaaattcacttattgacttggttgtttttggaagagcagcagcaaagagagcagcggaattggtaaaacctggaacgcctcacgaagaagttagtgaaagcgaaactgaaaaatgtctaaatagatttgataaactaaggtatgcagagggagataatggaactgctgaacttagactggcgatgcaaaaaacaatgcagtctaaatgtgctgtatttagaactgaaaagaatcttaaagagggtgtagatgagatcagaaaaacatatgacggcatggaatcgatttctgttaaagataaatcgttggtattcaatactgatttagttgagactttagaatttgataatttaattagacaagcgataacaactgtagattctgcatatcacagaaaagaaagcagaggagctcatgctcgtgaagattatccgaaaagaaatgatgaaaaatttatgaaacatacattatcttggtgtgatggaaaaaatactaaaattgaatacagagatgtacatacttcaacattaacaaatgaagtccaatattttcctccacaagaaagagtgtattaat

SEQ ID NO: 219347 - DNA, 607 bp, Unknown
  Bacterial polypeptide expressing nucleotide sequence isolated from the Sargasso Sea
tgtttcagtacatggagctaatagattaggatcaaactctctaattgatctggtagtgtttggtagggctgctgcgaaacgtgctgccgaattaattaaaccaaatacacctcatgaaaatataggagagtctgaaactgagaaatgcctcgagaggtttgataaacttagaaatgcaaatggagaaaacagtactgcagagcttagagttaatatgcaaaaaactatgcaatcaaagtgtgcagtatttagaacagaaaagacattagatgaaggtgttaatgaaataagaaaaacttatgatggaatgggatctttatcagttaaagataaatcattgatttttaatactgatttagttgaaactttagaatttgataatttaattagacaagccattactacaatagactctgctttcaatagaaaagaaagtagaggagcacatgctagagaagattttcctaaaagagatgataaaaaatatatgaaacatactctttcatggtttgatggaaaagaaacaaaaatagattacagagaagttcacaggaacactttaactaatgaggtacaatactttcctcctcaagaaagagtttattaa

SEQ ID NO: 219348 - DNA, 703 bp, Unknown
  Bacterial polypeptide expressing nucleotide sequence isolated from the Sargasso Sea
tatgggtagtgtatacagctctttgaatttcgagctagggtcggaagtcgatatgttgcgcgatagtgtttatctgttttgtcaaaaggagttgtctccgcaggcagaacacattgatcgctcaaatgaatttccgatggaggtatggaaaaagttaggagatctgggattgcttggaattaccattagtgaggagtatggcggttccgggatgggttaccttgcgcactgcgtcgcgatggaggaaatttctcgagcttcagccgctgtcggtctatcttatggcgcgcattccaacctatgcgttaatcaactatttagaaatggaacggctaaacagaaagaaacttatttgccgcccttgtgttcgggtgaccacataggtgctcttgcgatgtctgagccgaatgctgggtcagacgtggtcagtatgtcgttgagggcggagagaaaaggcgatcattattctttaaccggaaataaaatgtggattactaatgggccggatgcggatacatatattatctacgcaaagactaatccagaagcaggctcgaaaggcataacagcattcatcgttgagcgtgactatccgggtttttcacggcaccagaaattagataagttaggtatgcgtggatctaatacgtgtgagttggtttttgagaattgtttggttcccatcgagaatgtactaggctct

SEQ ID NO: 219349 - DNA, 784 bp, Unknown
  Bacterial polypeptide expressing nucleotide sequence isolated from the Sargasso Sea
cgatgtcggagccagtgcaggatctgatgttgtttcaatgaagctaaaggcagaaaaacgaaatgattattatttattaaatggatcaaaaatgtggattacaaatgggcctgacgctgatacccttgttgtgtacgcgaaaactgatgtctcggcaggccccagaggaataacagcgtttctcatagagaaagatatggagggtttttctaccggaaagaaacttgataaactaggcatgcgtggatcgaacacgtccgagttaatttttgaaaattgcgaagttccctatgaaaacgtcctcggtgaagaggggaagggagtaaatgttctgatgtctggacttgattatgaaagagtagttttagcagccggtccagttggaataatggctggagcgatggatgttgtagtgccctatattcacgaaagagagcaattcggcaaacctataggaacgttccaattaatgcagggaaagattgcagacatgtacaccaccatgaatgcgtgcagatcatatgtatacgctgttgccaaagcatgtgatgaaggtcaaactacgagaaaggactcagctgggtgcatactttatgcggctgagaaagcaaccctaatagcgcttgatgcaatccaatgtcttggtggcaatgggtatattaatgattatcctacgggtagacttctacgtgatgcaaaactctatgagattggtgcgggtacttcagaaattaggcgcatgcttattggaagagagttattcgaagaaacaaagctaagctaa

SEQ ID NO: 219350 - DNA, 746 bp, Unknown
  Bacterial polypeptide expressing nucleotide sequence isolated from the Sargasso Sea
  misc_feature (698)..(698): n is a, c, g, or t
catgataagcacatacaaaacattaaattacgatctgggcgaaaccgtcgatatgatccgtgaacaggtcaacagctttgctcgtgatgaaatagcaccacgcgctgcacaaatcgaccatgacaatgaattcccgaatgacttatggcgtaaatttggcgacctgggtttattaggcatcacggtcgacgagcagtacggtggttcaggcttaggttatctggaacatgtggtggcgatggaagaaatcagccgtgcttctgcttcagtggctttatcttacggtgcgcattccaacttatgtgttaatcagattgcccgtaacggcaacgaggcgcaaaaacaaaagtacctgcccaagttatgttctggtgaacatattggcgctctggcgatgtctgagcctaacgcaggttcagatgtagtctcaatgaaattacgcgctgataaacaaggtgaccgttatattttaaacggcaacaagatgtggatcaccaacggccctgacgcccatacctatgtgatttacgccaaaactgacattaatgccggttctaaaggcatgacagcttttattgttgaacgtggttttaaaggcttcagtcaggcacaaaaactcgacaagctgggtatgcgcggctcaaacacatgtgagctggtatttgaagactgtgaagtgccggaagaaaacgtattangcagcataggcacaggcgctcgcgtgttgatgtcaggtctggactatg

SEQ ID NO: 219351 - DNA, 666 bp, Unknown
  Bacterial polypeptide expressing nucleotide sequence isolated from the Sargasso Sea
acgcccacacctacgtaatttatgcgaagactgataccagcgcgggcccccgtggcattacggctttcatcgtcgagcgtgacttccccggtttctcccgggcccagaagctggacaagctgggtatgcgtggctccaacacctgcgagctggtgtttgaaaactgcgaagtccccgccgagaacatccttggcaaggaaaatgagggcgtaaaggtactgatgagcggcttggactatgagcgcaccattctgtccggtggtccggtgggcgtgatgcaggcctgcatggatgaggtggtgccctacatccatgaacgcaaacaattcggccaggccatcggcgaattccagctgatgcagggcaagatcgccgacatgtacgtgatgctcaacaccagccgcagctatctctatcacgtggcccaggcctgcgaccgcggtggaaccaaccgcaaggatgccgccggcgtgattctctactgcgccgagaacgcgacaaaaatggccctggaagcgatccagaccctgggcggcaacggctacatcaatgattacaacaccggccgactgctgcgtgacgccaagctatatgaaatcggcgccggcaccagtgaaattcgtcgcatgctgatcggtcgcgagctgtttaacgagaccgcctgac

SEQ ID NO: 219352 - DNA, 836 bp, Unknown
  Bacterial polypeptide expressing nucleotide sequence isolated from the Sargasso Sea
tgcatcaaccagatccaccgccacggcacgggcggagcaaaaagcgcgctacctgcccccgctggtgagcggcgagcatgtgggagcgctggccatgagcgaaccgggcgccggctccgacgtggtgagcatgcgcctcagcgcggtgcgcgagggggatcacttcgtgctcaatggcaacaagatgtggatcaccaacgggcccgatgccgacaccttcgtcatctatgccaagaccgatcccgctgccggccccaaagggatttctgcctttatcgtcgaggcggggactcccggtttctccaccgcccagaagctcgacaagctcggcatgcgcggctccagtacctgcgagctggtgttcgacaactgccgggtaccgcaggagaacctgctgggccccctgcacggcggggtcaaggtactgatgagcggcttggattacgagcgggtggtgctggcggccggcccccttggcatcatgcaggcctgcatggacgtggtgctgccctatgtgcgcgagcgcaagcagttcggccaagccatcggcgagttccagctggtgcaaggcaagctcgccgacatgtatacccgcctcgccagcagccgggcgctggtctactcggtggcgagcgcctgcgatcagggccgcaccagccgcaaggattgcgccgccgccatcctgtttgccgccgaaaatgccacccagatggcgctcgatgccatccagctgctcggcggtaacggctacatcaacgaataccccaccggccgcctgctgcgggacgccaagctctacgagatcggcgccggcacctcggagatccgccgctggc

SEQ ID NO: 219353 - DNA, 850 bp, Unknown
  Bacterial polypeptide expressing nucleotide sequence isolated from the Sargasso Sea
aatgaactcactctacaccagtcttaattttggcctaggcgaagatgtcgatatgctgcgcgatgcagtgcaagattttgccgcgaatgaaatcgcaccgattgccgcgaaagtggatcacgacaatgcctttcccaatgaactttggcctgtgcttggaggtatgggactgctcggcgtaacagtacccgaagagttcggcggcgcgaacatgggctaccttgcccacgtcgtcgcaatggaagaaatttcccgtgcctcggcctctatcggcttaagttacggcgcccactccaatctgtgcgtaaaccaaattaaccgtaacggtaatgccgcacaaaaagccaaatacttaccaaagctcgtcagcggtgagcatattggcgcactggcaatgagtgaacccaatgcgggttctgatgtggtttcgatgaaactgcacgcccgcaaagaaggcgaccgttatatccttaatggcaacaagatgtggatcaccaacggtcccgatgccaatacctatgttatttatgccaaaaccgacttaactaagggcgcccacggcatcaccgcctttatcgtcgagcgcggttttaaaggtttcagccaagcgcaaaaactcgacaaactcggcatgcgcggctctaacacctgcgaactggtgtttgaagaggtggaagtgccagaggaaaacattttaggcggcctcaataacggcgtaaaagtgctgatgagtggcttagattacgaacgcgtagtgctctcaggcggaccgctggggatcatgaatgcctgtatggatatcgtcgtaccctatatccacgagcgtgagcaatttggtaaatccatcggt

SEQ ID NO: 219354 - DNA, 1097 bp, Unknown
  Bacterial polypeptide expressing nucleotide sequence isolated from the Sargasso Sea
gttcgccgcccgcgagatctccccgttggcgggaaagattgaccgagagaacgcttttccagctgaactctggtctcgcctgggggaaatggggcttcttggcgttactatcgatccgaaattcggcggagcgggcatgggctaccttgagcacacgatagccatggaagagataagccgcgcctcgggttcggtgggcctctcctacggagcgcactcaaatctttgcgtaaaccagatcttccgcaacggcaccgacgcccaaaaatcccagtttcttcctgatctcatcagcggggccaaagtcggcgcgctggcaatgagcgaacatacctctggctcggatgtcgtgagtatgcaacttcgggctgagaagtcaggtgatcacttcgtgctgaatggcagcaagatgtggataaccaacggaccggacgcggatacgctggtcgtttatgcgaagacagatcccgctgccaaagcgcatggcatcacggcgtttattattgaaaaaggccttgagggtttctccaccggtcccaagttggacaaattgggaatgcgtggctccaacacctgtgagcttatttttgagaactgtgccgtaccaaaggaacgggttctgggagcagaaaacaagggtgtcggtgtgctgatgagtggtctcgatttcgaacgcgtcgtgctatcggggggacccctgggactgatgcaggcctgtctcgacatcgtgctgccctatgttcacgaccgtaagcaattcggcgaaccgatcggctcattccaactggtccaggcgaaacttgcggatatgtacacaaccctgaatgcctgtcgagcctatgtttatgccgtggcccaggcctgtgaccgtggtcagacgacccgaaaggatgccgcgggtgccattctgtacagcgctgagcgcgctacccaaatggcactcgacgccattcaacttctcgggggttcgggatacgtcaatgagtatgcgaccggccgactcctgagagacgcgaaactctatgaaatcggtgcaggcaccagtgaaataagaagaatgctgatcggccgtgaactgttcaaggaaggatcctgaa

SEQ ID NO: 219355 - DNA, 820 bp, Unknown
  Bacterial polypeptide expressing nucleotide sequence isolated from the Sargasso Sea
tgccccgggctgatcagcggtgagcatatcggggcgctggcgatgagtgagccgaacgccggttccgatgtagtcagcatgaagctgcgggccgagcgccggggcgatcacttcgtgctcaatggcagcaagatgtggatcactaacggcccggacgcgcacgtttacgtcatttacgccaaaaccgaaccggagcttggcccccacggcatcaccgcctttatcgtcgagcgcgactgggccggtttctcccgcagccccaaactggacaagctgggcatgcgcggctcgaacacctgtgagctggtgttcaacaacgtcgaggtgccggtcgagaacatcctcggtcaggtcaacggcggcgtgaaggtgctgatgagcggcctggattacgagcgcgtggtgctctccggtggcccgaccgggatcatgcagagctgcatggacgtggtggtgccctatatccacgaccgtcagcagttcggtcagagcatcggcgagtttcagctgatccagggcaaggtcgctgacatgtacacccagctgaatgccagccgcgcttacctctacgccgtggcccaggcctgcgaccgtggcgagaccacccgcaaggacgccgccggggtaattctctacaccgccgagcgcgcgacacagatggcgctggacgcgatccagattctcggcggcaacggttacatcaacgattatcccaccggccgcctgctgcgcgacgccaagctgtacgagattggtgctggcaccagcgagattcggcggatgttgattggacgggagctttttaatgagacgcgttgaa

SEQ ID NO: 219356 - DNA, 1171 bp, Unknown
  Bacterial polypeptide expressing nucleotide sequence isolated from the Sargasso Sea
aatgaactcactctacaccagtcttaattttggcctaggcgaagatgtcgatatgctgcgcgatgcggtgcaggattttgccgcgaatgaaatcgcaccgattgctgcgaaagtggatcacgataacgcctttcccaatgaactttggcccgtgctgggtgggatggggcttttaggtgtcactgtgcctgaggaatacggcggcgcaaatatgggctatcttgcccacgtggtcgccatggaagagatttcccgcgcctcggcctctatcggcttaagttacggcgcccactctaacctgtgcgtcaaccaaattaaccgtaacggtaatgctgcacaaaaagccaaatatttacccaaactagtgagcggtgagcatatcggcgcactggcaatgagtgagcccaatgccggctccgatgtggtttcaatgaagctgcacgcccgtaaagaaggcgaccgctatatcctcaatggcaacaaaatgtggatcaccaacggtcccgatgccaatacctatgtgatttatgcaaaaaccgacttaaccaaaggcgcccacggtatcaccgcctttatcgttgagcgtggctttaaaggtttcagccaagcgcaaaaactcgacaaattaggcatgcgcggttcaaacacctgcgaactggtgtttgaagatgtcgaagtgccagaggaaaacattctcggcggcctcaacaatggcgtcaaagtgctgatgagcggcttagattacgaacgcgtcgtgctctcaggcggaccgcttgggatcatgaacgcctgtatggacatcgttgtgccttatatccacgagcgtgagcaatttggcaaatccatcggtgaattccaattagtacagggcaaattagccgatatgtacactggcatgaacgccgctaaggcctatgtgtatagcgtggcgaaatcctgcgatcgcggtgaaaccacccgcaaagacgccgcgggcgccattctttacagcgcggagctggcgaccaaaatggcactggatgccattcaattgctcggcggtaacggttacgtcaacgagtatgccactggccgcttactgcgcgatgccaaactctatgagattggcgccggcacctcagaaattcgccgtatgctgattggccgcgagctctttaacgaatcgaaataa

SEQ ID NO: 219357 - DNA, 856 bp, Unknown
  Bacterial polypeptide expressing nucleotide sequence isolated from the Sargasso Sea
gatggggaaacgagcaacaaaaaataaatatttaccaaaattaataagtggtgaacatataggatcgctcgcgatgtcggagccaagtgctggctctgatgttgtttcaatgaagctaaaggcagaaaaacgaaatgattattacttgctaaatggttcaaaaatgtggattaccaatgggcctgacgctgatacccttgttgtttatgcgaaaactgatttatcagcaggtcctaaaggcataacagcttttcttatagagaaagatatgcaaggtttttctactggaaagaaacttgataaacttggtatgcgtggatcgaatacgtcagagttaatttttgaaaattgtgaagttccgtatgaaaatgttcttggggaggaaggtaagggagtaaatgtacttatgtccggacttgattatgaaagagtagttttagcagcgggtccggttggaataatggccggagcaatggatgtagtagtgccctatattcatgaaagagagcaattcggtaaacctataggaactttccaattaatgcagggaaagattgcagatatgtacaccaccatgaatgcatgcagatcatatgtatacgctgttgccaaagcatgtgatgagggtcaaactacgagaaaggactcagcagggtgcattctttatgctgctgaaaaagcgacccaaatagcgcttgatgcaatccaatgtcttggtggcaatgggtatattaatgactatcctacgggtagacttctacgtgatgcaaaactctatgagattggtgcgggtacttcagaaatcagacgcatgcttattggaagagagctattcgaagaaacaaagctaagctaa

SEQ ID NO: 219358 - DNA, 1171 bp, Unknown
  Bacterial polypeptide expressing nucleotide sequence isolated from the Sargasso Sea
aatgaactcactctacaccagtctcaattttggcctaggcgaagaagtcgatatgctgcgcgatgcggtgcaagatttcgctaaacacgaaatcgctcccattgcagctaaagtcgaccacgacaacgccttccctaacgaaatttggcccgtgctcggtggaatgggactcttaggtgtcactgtgccagaggaatacggcggtgcaaacatgggctatcttgcccacgtggtcgccatggaagagatctcccgcgcctcggcctctatcgggttaagttacggtgcccactccaatctgtgcgtcaatcaaattaaccgtaacggtaatgcagagcaaaaagccaagtatctaccaaagcttgtcagcggtgaacatattggtgctctggcgatgagtgaacccaatgcaggctcagatgtggtttcgatgaagctgcacgcccgtaaagaaggcgaccgttatatccttaatggcaacaaaatgtggatcaccaatggtcccgatgccaatacctatgtgatttatgccaaaaccgacttaaccaagggcgcacacggcatcacggcctttatcgttgagcgtggttttaaaggtttcagccaagcgcaaaaactcgacaaactggggatgcgcggttcaaacacctgtgagctggtgtttgaagatgtcgaagtgccagaggaaaacattctcggcggcctcaacaatggcgtaaaagtgctgatgagcggcttagattacgagcgcgtcgtgctctcaggcggcccgcttgggatcatgaacgcctgtatggatatcgtcgtaccttatatccacgagcgtgagcaatttggtaaatccatcggtgaattccaattagtacaaggcaaattagccgacatgtacactggtatgaacgccgccaaagcctatgtctacagcgtggcgaaatcctgcgatcgcggtgaaaccacccgtaaagacgccgcaggcgccattctttacagcgcggagctggcgaccaaaatggcactggatgccattcaattgctcggcggtaacggttacgtcaacgagtatgcgactggccgtttactgcgcgatgccaaactctatgagattggtgccggcacctcagaaattcgccgtatgctgattggccgcgagctctttaacgaatcgaaataa

SEQ ID NO: 219359 - DNA, 511 bp, Unknown
  Bacterial polypeptide expressing nucleotide sequence isolated from the Sargasso Sea
catggccctcgccgaggaccacgaccagataagggacgtggcgcgcggcttcgcggaggagcggctcatgcccatcgcgggcgaaaccgataggctccacaagttcccgcgcgacgccgtttctgaattagcggagctaggattcatgggcatgatggtcagtgaagaggacaatggcggcggcatggacgccgtgtcgtacgccgtggcgctcgaggagatctcgcgggggtgcgcctcggctggcgtgattatgtcggccaacaactcgttatactgcgctcccgtctctgctaatgcgacatcccagcagcagaaagatgaattcctgaagccctacgcttctggcgagaagattggttgttttgcattatccgagccgggcaacggctccgacgccggcgccgcgtccacaacagccaaagatgcgggagaccacttcgtattgaacggcacgaaggcctggatcacgaacgccctggaggcggacgctgccgtggtcttcgcgacg

SEQ ID NO: 219360 - DNA, 863 bp, Unknown
  Bacterial polypeptide expressing nucleotide sequence isolated from the Sargasso Sea
tttggtgtgcaggactttgacgagcaagtacaaatcagcattaacagagtgcaaagcgaagatttggtgcgcgctttggtggttgaagccagacgtttaggctttagctctattaatctggatttggtgtatggtttgccttaccagcaaccagcgagttttttacagacgttgcaaagcgtattgctgctggatccggacagagtgtctttattcagttatgcccatttgccgacccgttttgccgctcagcgcaaaattccaacccaaagcctgcctcaggctgaagataaactggcgttgttgcagcttgctatcaggcattttagtgaagccggttaccaatgtattggcatggaccactttgccaaaaccacagacgctttagccatagcgcagcaacaaggcaaactgcagcgtaattttcaggggtacaccacagcggggcaggatgcgttgattgggctaggggtatcttctatcagtcaggtaaatggtgtgatttggcaaaaccaaaaagagctgcaggactatcagcagatgcttactggtgggcagttgccgctggagcggggttttagtttaagcccggatgataaaatccgtgctgcgttaatcagccagctgatgtgtcattttgaactggatataccggccttttgccagcgctttgctatagaggacttctggagttattttgccgatgccttacctaagttggatccgctgatcgccgatggcttagtgttgtgttccgatcatcatattcaggtgacaccactgggtcggttactggtgcgactagtctgcgccagttttgatcgttacctgcaaagtagtagtaatcaaagctattccaaagt

SEQ ID NO: 219361 - DNA, 930 bp, Unknown
  Bacterial polypeptide expressing nucleotide sequence isolated from the Sargasso Sea
gcagtgtagccctggaaaagctggctcatttacgccagctgggttttagcccggttagttttggtgtgcaggactttgacgagcaagtgcaaatcaccattaacagggtgcaaagcgaagatctggtgcaagctttggtgctggaagctaaacgtttaggctttagctctattaatctggatttggtgtacggcttgccttaccaaaaaccggagcgatttatacagacgctgcaaagcgtcctgcagcttgatcctgaccgggtgtcgttattcagttatgcccatatgcccacccgttttgccgcccagcgcaaaattccgacccaaagcctgccgcaggctgaagataaactggctttgttgcaattggccatcaaagagttcagtgaagctggttatcagtgtattggtatggatcatttcgccaaaaccacagactctttagccaaagcgcagcaacaaggcaaattgcagcgaaattttcagggctacaccacagctggccaggatgctctgattggcttgggtgtgtcttctattagtcaggtgaatggtgtgatctggcaaaaccaaaaagagttatcgcattatcagcagcaattgaatgacggacagttgccgctggaacggggttttagcttaagccaggacgataaaatccgcgctgcgttaatcagccagctgatttgccattttaaactggatatccctgacttttgtcagcgctttgctatagaggatttctggagctattttgctgatgccttacctaagctcgacccgttaattgccgacggcttagtgcaatgctctgatagtgttattcaggtgacgccactgggccggttactggtgcgtttagtctgtgccagttttgaccggtacctgcatcaggccaatagcttgagttattccaaagtggtttgat

SEQ ID NO: 219362 - DNA, 953 bp, Unknown
  Bacterial polypeptide expressing nucleotide sequence isolated from the Sargasso Sea
ctcctttgatgcaagtgctgaactttcaatagagctcgaccctagaaatgttgataaacgctatctgcagcatttgagatcgctaggatacacacgcattagttttggtttgcaagataccgattacaatgtacaaaaaactataaaccgcgtacaaagcacatctcacatagccgaacttgtgtttgaagcccgctcactgggttttgagtctgtgaacttagatttaatttacgggttgccaaatcaatcgctggagacctttaaatctaccatagcagcgacaaaagcaatgatgccggatcgcatttctctttttagctatgcacacctgccggaacgctttgctgcacagcggaaatttgctccagaaacacttcctaacagcgaagaaaaagcagcactttacaagcttgccgtgaacaatttcacgagcgtgggttatgagatgattggccttgaccatttcgccttaagcaccgactctcttgcaatagccaaaaaccaaggcgagcttcaccgcaatttccaaggctatacgttgcgtggtgatacagacttagtaggcattggcgtatcggctattagtacggttggaaatgcctttgcacagaacgcgaaagatttaaaagactattacactcgcatagatcagcagcagccttcagccgtggtggggttaacactcagtagcgatgaccttatccgccgcgatgtgatatctagcctcatgtgcaatttagaagttaataagccgtatattgagaagaagcaccacatcatttttgatgagtatttttcgggggcattgaacaatttatcgggattagaagacgatggtcttgttcgtcttagccctcacagtattagcatacctgaaaaggcccgcatttatgttcgcgcaatctgtgctcgctttgacgcctaccttaatgtaagcgaaacgctcagca

SEQ ID NO: 219363 - DNA, 949 bp, Unknown
  Bacterial polypeptide expressing nucleotide sequence isolated from the Sargasso Sea
atgagagttaacgagaacttaataaaaaaatatagtaaaacaggtccaagatatacatcttatccacctgcaactttctttgatgatagtttttcaaatcttgattttgaaaaaaaaattattctatcaaacgatgaaaatccacaaaatatatctgtttacattcatattcccttttgccctcaaatatgtcatttttgtggttgtacgacagagtcagggtttactaaaccttttttagaaaggtatgtggatgctgttatcaaggaaatcagttacgtttcgaagttaattaacaaaaacagaaaattaacgcagattcactggggaggaggaacaccaaatgcaatatcatataaatatattgaaagaataaccaaaaaattatttgaggtttttgatttttccaaaaactatgaaatggcaattgaatgtaatcccgctcatttggaattcagacacattgagctattaaagaaatttggttttaacagaatatctgttggtattcaagacttcagagacgatgttttagaagcaattaatagaaaaccctcaaaacacccaattgatgatattattaaaaaaattaaagatgaaggttttacagggacgaatatagatttggtttatggactgcctttgcaaacagtagatagtttcaagaaaacagttgaaaaagcaattcaattagatagtgatagaatagtaactttttcatatgcacatgttccatctgttctgccaaggcaaaaagttttagaaaaaattggatttccaagttcaaaagataaggcattgatgtatgaaaattcgtatgaaatgtttacaaaatctggttacatatcaatcggtatggatcatttttctaaaccaggtgatgaatttgaaattgcactaaaaaacaaacaacttcatcgaaacttccaaggatattgtacaagagaaa

SEQ ID NO: 219364 - DNA, 1045 bp, Unknown
  Bacterial polypeptide expressing nucleotide sequence isolated from the Sargasso Sea
atgagtaaagtagatgagaaattattaaagaaatatagctcaactggccctagatacacttcatatccgccagctacattttttgatactaattttagtaatgaagactatgttgaaaagttgattttatcaaacagtgaatctcctgagagtgtatcagtctatattcatattcctttttgtcctcaaatctgccatttttgtggctgtacaacagaaacaggttttacaaaaccatttcttgagagatacattgatgctttgatcaaagaaattgaatttgtctcaaaaaagatagactctaaaaggaaattaactcaagttcattggggaggtggaacaccaaatgctatatcatataaatatattgaaagagttaccaataagctttatgaaacttttgatttctctgctaattacgagatggcaattgaatgtaatccagctcacttagagtttaatcatattgagctattaaaaaagtttggttttaatagaatctcacttggaattcaagatttcagaacggatgtccttgatggtataaatagaaagccatccaagtacccaattgaggaaattgtgaaaaaaattgaagatgaaggatttactggaacaaatattgaccttgtatatggactgccatatcagacaccggaaaatttttcagagactgtagacagagcaataaaattaaatactgatagggttgttactttttcatatgcacatgtaccaagcgtactaccaagacaaaaaatattagaaaaaattggatttcctagctcaaatgataaggcacttatgtacgaaatcgcatatgagaaacttttaaaagctggatatgtatctataggtatggatcattattcaaaacccgaagatgaatttgcaattgctttaaataacaaacagctccatagaaattttcagggatattgtacacgggaaacaactggtcaggtatatgcctttggagcatcttcaatttctcaattagactcagcgtatatacaaaatattaaaaatgctagtcaatatatta

SEQ ID NO: 219365 - DNA, 739 bp, Unknown
  Bacterial polypeptide expressing nucleotide sequence isolated from the Sargasso Sea
ctacggcctgcccaagcaaaccccggaaggctttgcccgcaccgtcgaagaggtgatccgcttgcagcccgaccggctgtcggtgttcaactacgcccacctgcccgagcgcttcatgccgcagcggcgtatcgacaacaacgacctgcccagcgcggcggccaagctggagatgctgcacgccaccatcgaccaactgaccgccgccggttaccgctacatcggcatggaccacttcgccctgcccgacgacgagctggcgattgcccaggaagaaggcaccctgcagcgcaacttccagggctacaccacccacgggcattgcgacctgattggcctgggcgtgtcggccatcagccagatcggcgacctgtactgccagaacagcagcgacctcaacacctaccaggacagcctgtccaacgcccagctggccacccagcgcggcctgctgtgcaaccacgacgaccgcgtgcggcgtgcggtgatccagcaactgatctgccatttcgagctggacttcgagccgatcgagcaggccttcacccttgattttcgcggttacttcaacgacctctggcccgagctgctgaccttgcagcgcgacggcctgatcagcctggacgacaaaggcatccgcatcttgccggcgggccgcttgctggcacgctcggtgtgcatggtgttcgacgcctacctggccatgcaaaaccgccagcgcttctcgcgggtgatctga

SEQ ID NO: 219366 - DNA, 503 bp, Unknown
  Bacterial polypeptide expressing nucleotide sequence isolated from the Sargasso Sea
catgtctgtgcagttaatcgactgggatctggccctgatccagaaatataactattcggggccacgttatacctcataccccaccgcactggagttttcgcctgagttcggtgcggcagaatttgacgcggcggtagctcgctacccgcagcgtccgctatcgctgtatgtgcatattccgttttgtcacaagctctgctatttctgtggctgcaacaaaattgtgactcgccagcagcataaagccgaccagtacctggatgtgctggagcaggagattattcatcgcgcgccgctctttgccgggcgtcaggtgcaccagctgcactggggcggcggtactcccacttacctgaataaagcgcaaatcagccgcttaatgcgtttgttgcgcagccatttcaattttaacgccgatgcagagatctcgattgaagtcgatccgcgtgaaattgactggatgttctggatcatctccgatcggaaggctttaccggttgagc

SEQ ID NO: 219367 - DNA, 922 bp, Unknown
  Bacterial polypeptide expressing nucleotide sequence isolated from the Sargasso Sea
catttcggcggcggcacgccaaccttcctcagccacgacgaactgcgccgactaatgcagcatctgcgccaacacttcagcctgctcgatgacgattccggcgactacagcatcgagatcgacccgcgcgaggcggactggtcgaccatgggcctgctgcgtgagctgggcttcaaccgtgtcagcctcggcgtgcaggatctcgaccctgaggtgcagcgcgcggtcaaccgcctgcagactctggaagagacccgcgccattgtcgaggcggcacgcaccctgcagttccgctcggtgaacatcgacctgatctatggtctacccaagcagacaccggagcgtttcgcccgcaccgttgccgaagtcatcgccctgcagccggatcgcctgtcgctgttcaactacgcccacctgcccgaacgtttcatgccgcagcggcgcatcagcgccgatgacctgcccagcccggcggacaagttgatcatgctgcagaacagcatcgaccaactgacccgcgccggctaccgctacatcggcatggaccacttcgccctgcccgatgacgagctggccatcgcccaagaagaaggcacgctgcaacgcaacttccagggctataccacccatggccactgcgacctgatcggcctgggcgtatccgccatcagccagatcggcgatctgtacagccagaacgacagcgatatcgccagttatcagcagtccctgggcaacggccaattggcgacgcgccgcggcttgcactgcaatgccgacgaccgcctgcgtcgcgccgtgattcagcagctgatctgccatttccaactgcgcttcgccgacatcgaacgcgcgcatagcgtggtgttccgcgattactttcgccgccctctgggcagagctggaacagctcgcgggtgac

SEQ ID NO: 219368 - DNA, 1003 bp, Unknown
  Bacterial polypeptide expressing nucleotide sequence isolated from the Sargasso Sea
cctgaatacagagcgcgggcaagcggctgaccttcatcaaattgtcgctgtatcgcttgcgggttcacttgatgcaggtcaaggacatgtcccagagcctacggcacagtcaaggtgtacgcaaggaaatttccccatgactgctgtttcgccagaccttctgcgccgctttgacgtgccagggccccgctatacatcctatccaacggccgaccgtttcgtggaggcgtttggtcaggaagactatgtgctggcgctgcaacagcgccgctcgggcacgctggccaaggccatgccgctgtccctgtacgtgcacatcccgttttgcgaatccctgtgttactactgcgcctgcaacaagatcatcaccaagcaccatgaccgcgccgaggtctacttgcgctacctgagccgcgagatcgacctgcacaccgcgcactgtggcgtaggacaggtggtgagtcaactgcacctggggggaggcacacccaccttcctctccgattcgggcctgagagagctgatggccatgctcaagcgcagcttcacgctcgcgcctgggggggaatactcgatcgaggtggacccccgcaccgttaatgcagagcgtcttgcactgttggctgagctgggttttaaccggctgagttttggcgtgcaggactttgatgccgaagtgcagaaggctgtgcaccgcatccagcctgccgagcaggtgtttgcgctggtcgaatctgcacgttcgctgggctttgactcggtgaatgtggatttgatctacggcctgccgcgccagacgcccgagtcttttgaccgcacgctggcccaggtggcgcaactgcggcctgaccgcatcgcgctgtatgcctacgcgcacctgccagagcgtttcaagccacagcgccgcatcatctctgcggagttgcccacgggcgcgagcaagctttccatgttgtcgcgctcgctcgatgccttcatggatgctggatacgtgtacgtgggc

SEQ ID NO: 219369 - DNA, 1375 bp, Unknown
  Bacterial polypeptide expressing nucleotide sequence isolated from the Sargasso Sea
atgacaataattgccgtacaacaacgtcctgtatcaatcattaccaaatatgcgttgaatgctcctcgctatacctcttaccctactgcacttaaatttgaaccgctacaagatgacatacttccacaagcacttgcagtgtcaaaagcgccggcagtaagtctctacgtgcacattccattttgcaaaacgctgtgctactactgtggctgcaataaaatggtgacacgtcacaatgaaaaagcggacgaatatttagattacatagaaaaagaaattctgtctaagcgttatttaactgacggcaggcgtgcagtttctctgcacttgggtggcggttcacccagttttttgagcgagactcagcatacttatttaatgtacctgcttaagaaacactttacctttgaagcaggtgctgaactgtcaattgagttagatcccagaaatatcgataaacactatcttcaaaacttaaaatgtctcggctacacacgcattagctttggtttacaagatactgattacaatgttcagaaaaccataaatcgcatacaaagcacgtctcacattgccgaattagtattcgaggctcggtcgctgggtttcgactcagttaacttagatctaatttatggtttaccaaatcagtcaattgaaacgttctcatcaaccatcgccgcgacaaaagccatgatgccagatcgtatttcgctttttagctatgcacaccttcccgagaggttcgcagcgcagcgtaaatttgctgaagaaacactgccaagtagtgaagaaaaagcggcgctttacaagcttgccgttaacagctttacaaacataggttatgaaatgattggtcttgatcattttgccttaagcaaagactcactggctattgcgaaaaataaaggcgagcttcaccgtaactttcaagggtataccttacgtggcgacgctgaccttatagggttcggcgtatcagccattagcaccgtaggtaatgcctttgcgcaaaatgctaaggagctaaaagaatattaccatcgcttagacaaccacctgcccaatgcaaaggttgggctgtcattaagtgtcgacgaccttattcgcagagacgtgatttctagcttaatgtgcaatttagcggtagacaagcaagcaattgccgacaagcaccacatcatttttgatgaatactttgcttcagccttaaacaaccttgaagaacttaaagaagacgggcttatcgaaacaacatctcggtatattcgagtgccagagtctgctcgcatttacattcgggctatttgtgcgcgtttcgacgcttatttgaacgcaagtgaaatactcagtagctattccaaagccatttaaa

SEQ ID NO: 219370 - DNA, 628 bp, Unknown
  Bacterial polypeptide expressing nucleotide sequence isolated from the Sargasso Sea
tgccgctcagcgcaagattaaagacgctgatctgcccagcgcgcagcagaagctggatatcctgcaggaaaccatttcttcactgaccgaaaccggttatcagttcattggtatggatcactttgctcggccggatgatgagctggcgattgctcaacgcaagggtgtgctgcatcgtaatttccagggttataccacccagggtgataccgatctgctgggaatgggcgtgtcagccattagtatgattggtgacaactacgcgcagaaccagaaagagctgaagcgctattatcagcaggttgacgagcaggggaacgcactgtggcgcggaattgccctgacccgcgatgactgcattcgtcgtgatgttattaagctcctgatctgtaacttccgcctcgactatgccgctgtggaacagcaatgggctctgaacttcgctgactattttgccgaagacctgaaactgctggcaccgctggcgaaagatgggctggtggatgtggatgagaaggggattcaggttacgccgaagggacgcctgctaattcgtaatatttgcatgtgctttgatgcctatctgcggcagaaagcacgcatgcagcagttctcccgcgtcatttaa

SEQ ID NO: 219371 - DNA, 832 bp, Unknown
  Bacterial polypeptide expressing nucleotide sequence isolated from the Sargasso Sea
ggttaccgtgagcaggacgagcaatttattttcgatttaatggccaaagccaaggccatgggatttgtctcaactaatatcgacttaatttacggtctgccacatcagacacccgaaacattcgccgccaccatgcagcgcgtgttagacctgtcgcccgatcgtctatctgtgttcaactatgcccacttacccgcacgttttgccgcgcagcgtaagatcaaagatgaacatttaccttcgccaaaacaaaaactcgagatgttgcatcaaacgatcgaaactttaactggcgcgggttatcagtacatcggcatggaccacttcgctaagcctgacgatgagctggctaagttacaacgcgaaggcaaactgcaccgcaacttccaaggttataccacccaagaagaatgcgacctgctcggtcttggtgtgtcttctatcagccaaatcggcgattgttatgcgcaaaaccagaaggacattcgtccttactacgaagccatcgacaaagacggtcatgcactgtggaaaggttgtagtctgaaccgtgacgacgaaatccgccgtgtggtgatcaaacaactgatctgccacttcgatttagatatggcaaaaatggacgagaaactagggattaagttcgaggaatacttcgccgaagacttaaaactgctgcaaacctttatcgacgataagttagtcgacgtcaccgacagaaagatcaccatcagccccacaggccgtctgttgatccgcaatatctgtatgtgcttcgacctttactaccgtcaaaaagcgcgtcaacaacagttctcccgtgtgatctaac

SEQ ID NO: 219372 - DNA, 793 bp, Unknown
  Bacterial polypeptide expressing nucleotide sequence isolated from the Sargasso Sea
aatggccaaagccaaggccatgggatttgtctcaactaatatcgacttaatttacggtctgccacatcagacacccgaaacattcgccgccaccatgcagcgcgtgttagacctgtcgcccgatcgtctatctgtgttcaactatgcccacttacccgcacgttttgccgcgcagcgtaagatcaaagatgaacatttaccttcgccaaaacaaaaactcgagatgttgcatcaaacgatcgaaactttaactggcgcgggttatcagtacatcggcatggaccacttcgctaagcctgacgatgagctggctaagttacaacgcgaaggcaaactgcaccgcaacttccaaggttataccacccaagaagaatgcgacctgctcggtcttggtgtgtcttctatcagccaaatcggcgattgttatgcgcaaaaccagaaggacattcgtccttactacgaagccatcgacaaagacggtcatgcactgtggaaaggttgtagtctgaaccgtgacgacgaaatccgccgtgtggtgatcaaacaactgatctgccacttcgatttagatatggcaaaaatggacgagaaactagggattaagttcgaggaatacttcgccgaagacttaaaactgctgcaaacctttatcgacgataagttagtcgacgtcaccgacagaaagatcaccatcagccccacaggccgtctgttgatccgcaatatctgtatgtgcttcgacctttactaccgtcaaaaagcgcgtcaacaacagttctcccgtgtgatctaa

SEQ ID NO: 219373 - DNA, 1483 bp, Unknown
  Bacterial polypeptide expressing nucleotide sequence isolated from the Sargasso Sea
ttgtgccatcgccggctgcgacgttattacacaatgcagccgaatcgcgcgtttatatactcgaaagcatctaaaaagcgcgagatcatcatgcgttccggttctgccgacacattgttccgtcccgatttgctcgcgaaatacggcgcgaacgggccgcgctatacgtcgtatcccaccgcgctgcagttccgcgacgatttcgacccgaccgactatgtccgtgcggcaagcgaccccggcgcatcgtcgagcgagctgtcgctgtacttccacattccgttctgcaacaccgcgtgcttctactgcggctgcaacaagatcgcgaccaacaaccaccgccgcgcgcgcccgtatctcgaccagctcaagctcgagatggcgctgcaggccgcgctgttcgatcccgcgcgcccggtcacgcagctgcactggggcggcggcacgcccaccttcctgtccgacgatgaaacggccgagctgatggcggccacgcgcgagcacttcatgctcgcgccggatgccgacgccgagttctcgatcgagatcgacccgcgcacggtcacgcccgcgacgctcgtccacctgcgcaatatcggcttcaaccggctgagcctcggcgtgcaggatttcgatccggtcgtgcagcaggcgatcaaccgcatccagccgctggcgatgacggccgacctgctctccgccgcgcgcacaacgggcttccactcggtgagcgtcgacctgatctacgggctgccgcaccagaccgtctccgtgttcgcgcgcacgctggaaacgatcatcgaactcgcccccgaccggctgtcggtgttcggctacgcgcacatgccgcacctgttcaagatgcagcggcagatcgacggcgcgacgctgccgccgccggaaacgcgcatcgcactgctcggcctcgcgatcgacatgctgacgtcggccagctacgtgtacatcgggatggaccacttcgcgcggccgtccgacgaactcgtgcgggcgcagcgcaacggcacgctgcagcgcaatttccagggctacagcacgcgcgcggataccgatctcgtcgggttcggcgtgtcgtcgatcggcaaggtcggcgacgtctacgcacagaacgcgaaggacctgcccgcctacggcgccgcgctcgacgcgggccggctgccgatcgcgcgcggcgtgcggctcacgcccgacgaccggctgcgccgcgacgtgatcacgcaactgatgtgcaacctcgacctgccgttctcgcacgtcgaggccgcgcacggcatccgcttcgccgatcatttcgcgcgcgaactcgacgcgctgcgcccgttcgagcgcgacgggctgctgacgatcgcggccgaccgcctgacgatccatccggccggccggatggtcgtgcgcaacatcgcgatggcattcgacgcgtatctcggccagacgccgcagcagcgctactcgcgcacggtctgag

SEQ ID NO: 219374 - DNA, 1378 bp, Unknown
  Bacterial polypeptide expressing nucleotide sequence isolated from the Sargasso Sea
ttgaagcagcccactcaaataagctgggatcagtcgatgatcgaaaaatataactacagcggtccccgttacacttcatacccaacggcgctggagttcgatgattcattcactgaacaaaacctgttaacggcgattgaaaacagtaagagtgacaaactgtcgctgtatattcatatccccttctgcgccaaactttgctactactgtggctgtaataaagttatcactcgccacgcccacaaggccgatcaatatatcgagtatttgagccacgaaattatcaagcgtgctccgctgtttaagcactacactgtcacccaaatgcattggggcggcggcacgccaaccttcttaaatcctgagcaaattctgaagttaaccgacttaatcaaggctaactttaactttgccgcagaaggtgagttctctatcgaagttgacccgcgtgagattgagctttcaatgctcgataccttaaaagaagcgggctttaaccgcatttctatcggggtgcaggacttcaataaagaagtgcaagtcgcggttaaccgtgagcaggacgagcaatttattttcgatttaatggccaaagccaaggccatgggatttgtctcaactaatatcgacttaatttacggtctgccacatcagacacccgaaacattcgccgccaccatgcagcgcgtgttagacctgtcgcccgatcgtctatctgtgttcaactatgcccacttacccgcacgttttgccgcgcagcgtaagatcaaagatgaacatttaccttcgccaaaacaaaaactcgagatgttgcatcaaacgatcgaaactttaactggcgcgggttatcagtacatcggcatggaccacttcgctaagcctgacgatgagctggctaagttacaacgcgaaggcaaactgcaccgcaacttccaaggttataccacccaagaagaatgcgacctgctcggtcttggtgtgtcttctatcagccaaatcggcgattgttatgcgcaaaaccagaaggacattcgtccttactacgaagccatcgacaaagacggtcatgcactgtggaaaggttgtagtctgaaccgtgacgacgaaatccgccgtgtggtgatcaaacaactgatctgccacttcgatttagatatggcaaaaatggacgagaaactagggattaagttcgaggaatacttcgccgaagacttaaaactgctgcaaacctttatcgacgataagttagtcgacgtcaccgacagaaagatcaccatcagccccacaggccgtctgttgatccgcaatatctgtatgtgcttcgacctttactaccgtcaaaaagcgcgtcaacaacagttctcccgtgtgatctaac

SEQ ID NO: 219375 - DNA, 1378 bp, Unknown
  Bacterial polypeptide expressing nucleotide sequence isolated from the Sargasso Sea
cttgaagcagcccactcagataagctgggatcagtcgatgatcgaaaaatataactacagcggtccccgttatacttcttatccaacggcgctagagttcgatgattcattcactgaacaaaacctgttaacggcgattgaaaacagtaagagtgacaaactgtcgctgtatattcacatccccttctgcgccaaactttgctactactgtggctgtaataaagtcatcactcgccacgcccacaaggctgatcaatacattgagtatttgagccacgaaattatcaagcgcgctccgctgtttaagcactacacagtcacccaaatgcactggggcggcggcacgccaaccttcttaaatcctgagcaaattctgaagttaaccgacttaatcaaggctaactttaactttgccgcagaaggtgagttctctatcgaagttgacccgcgtgaaattgagctttcaatgctcgataccttaaaagaagcgggctttaaccgcatttctatcggggtgcaggacttcaataaagaagtacaagtcgcagttaaccgcgagcaggacgagcaatttattttcgatttaatggccaaagccaaggccatgggattcgtctcaaccaatatcgacttaatttacggtctgccacaccagactcccgaaacattcgccgctaccatgcagcgcgtgttagacctgtcacccgatcgtctatccgtgttcaactatgcccatttacccgcgcgttttgccgcgcagcgtaaaatcaaagatgaacatttaccatcgccgaaacagaaactcgagatgttgcatcaaacaatcgagaccttaactggcgcaggttatcagtacattggcatggaccacttcgctaagcccgacgatgagttggctaagttacaacgcgaaggcaaactgcatcgcaacttccagggttataccacccaagaagaatgcgacctgcttggccttggcgtgtcttcaatcagccaaatcggcgattgttatgcgcaaaaccagaaggacattcgtccttactacgaagccatcgacaaagacggacatgcgctgtggaaaggttgtagcctgaaccgtgatgacgaaatccgccgcgtagtgatcaaacaattgatctgccacttcgatttagatatggcgaaaatggacgaaaaactgggtattaagtttgaggaatacttcgccgaagacttaaaactactgcaaacctttatcgacgataaattagttgaaatcgccgacagaaagatcaccatcagccccacaggccgcctgttgatccgcaatatctgtatgtgcttcgacctttactaccgtcaaaaagcgcgtcaacaacagttctcccgtgtgatctaa

SEQ ID NO: 219376 - DNA, 424 bp, Unknown
  Bacterial polypeptide expressing nucleotide sequence isolated from the Sargasso Sea
taattttgacgatgaaatattagaaattgaatgtgatattttaattcctgctgctgttggaggtgttatcaaatcaaataacgcaaacaatatcaaagcaaaaattattgttgagggagcaaattcaccaacaacccttagtgcagataaaatattaaggggcaatggagttgtactaatacctgatattcttgcaaatgcaggtggtgttactgccagttactttgaatgggtccaaaatacacagaactatttatggaaagaaaaagaattacacgatcgattgatcgatgttctgacatcagcctttgaagaggtatggattatttccgaaaaaaataaagttgacttaagaacagctgctttaattaaaggaataaaaaaagtggctgctgcaaaattaactagaggattatttccgtaa

SEQ ID NO: 219377 - DNA, 514 bp, Unknown
  Bacterial polypeptide expressing nucleotide sequence isolated from the Sargasso Sea
atggaacaaaaaaaagaaacaacatttaaagaaagtgttgatttaatgtatgatagagctgttgaaacattaaatcttccaattggtttggcggaacaaattcgaacatgtaatgcagtttatcaagtaagatttggagtaaaactcaagggtgtttataaaatatttgtgggatggagagcagttcatagtgaacatattttaccagttaaaggaggaattcgtttcgcagagatagccaatcaagaagaagtagaagctcttgctgctttaatgacatacaagtgtgctattgttaatgttccttttgggggatcaaaaggagcattaaaaattaatcctaatgactatgatgaagaagacttagagaaaatcacgcgaagatttgcacatgaactgattaaaaaggatttagtaaatccaaacctgaacgtgccagccccagatatgggaaccggtgagagagaaatggcttggatatctgacacattccaaaatctatatccaaatcaaa

SEQ ID NO: 219378 - DNA, 712 bp, Unknown
  Bacterial polypeptide expressing nucleotide sequence isolated from the Sargasso Sea
agaattcagcataataatattttaggaccttataaaggtggattaagatttcataaaaatgttgatttaaatgaagttaaagctcttgcaagtttaatgtctataaaatgtgcattacaagatataccttttggtggagcaaaaggtggtattcaaattaatcccaatgattattctaatatagatttagagataattacaagaggatatacaagagctattaataaatatattggtccccattatgatatccctgcaccagatgtaggaactaattctcaaataatggactggattatggacgaatataatcaaattaataatgtagaatcaaaagctataataactggtaaatcggtcgaatgtggaggtagtttaggtagaaaagaggctactgggagaggtattggtgtaataatgaatgaaattattgataagaatgaaaatttaataaaacttgaaggttttggaaatgttggatatcatttagttgaatatttaaatgatttaaacgaaaatactgataaaatattttcaattaatacaatatctgatcatacgggacattacaagattgattattttgctttcgataaatcaaagataataaatttcactaagtttttattgcaatatcaagaaaaaaataaatcattaaaagatatcgaaaaatatagttttaatttaattaacattgataaagatgaatatt

SEQ ID NO: 219379 - DNA, 793 bp, Unknown
  Bacterial polypeptide expressing nucleotide sequence isolated from the Sargasso Sea
gcgctgggcggtgttgatggcagaacagaagccactgggagaggtgtcttttattctatccttgagttcttaaataatgataaagatcgcaaaaaatcaaaactcagaagagagattgagggccaaaggatcatcatccaagggtttggtaatgtgggctttcatgcggctgaacttttatatgaatctggagccaagatcattgcggttattgaaagagatggttcagttctgaatgagaaaggaattgatgtccaaaaactaaaaaaacattttacaagaaagagaacatttgaaggctttgatggtttttcaacagcgagaggacattttcttagtaaagaatgcgacattttaattcctgctgctaccgaaggtgttattcacaaagacaatgctgcaaaaatcaaggctaaactcattgttgagggaggcaatggccctgtgacagcagatgcagatgagattttgaataagaatggcatcactgttattccagatttctatgcgaactccgggggagtgattgtttcatacttcgaatgggtcaaaaatttatccaagatgcgttatggtttgatgcaagaaagagatcaagaaaaaagacagagtaatcttgttgctgcattggagcagatgaccagtaattcttttcctactgaaatgaaagatgaattcattaaaggcgctagtgaaattgatctggttcgatcaggcctggaggagaaaatgaaagaaggctattacgctattcatgaaacatttcattcagataggaaaattaaaagtttta

SEQ ID NO: 219380 - DNA, 682 bp, Unknown
  Bacterial polypeptide expressing nucleotide sequence isolated from the Sargasso Sea
tatgaaaaataatacggaaccaacatttaggcagtcggttgacaccatgtataaccgagcttcaagactaatagatctggcgcctggtcttgaggaaaaaataagggtttgcaatgcaacatacacagtaagatttggtgtaaggcttaaaggaaaaatccagacattcacaggctaccgttcagtccactctgagcatatcgagccagttaaaggtggaatacgctttgctaagtctgttaatcaagacgaagttgaagcactcgctgccttaatgacctacaaatgtgccctggtagaaataccctttggaggctcaaaaggtgggttatgtattgatccaagagaatacgaagatgaagagttagagattataactcgtcgttttgcttatgaattagcaaagagagatcttattcatccctcacaaaacgtacctgcaccagatatggggactggcgaaagagaaatggcttggatagctgatcaatacagcagaatgaataccaccgaaattaacagcagagcatgtgtaactggaaagcctctcaatgcaggaggaatctcaggtagagtagaagctacaggaagaggaatacaatatgctcttagagagtttttcaatcataaagatgatatgaagaaggcgaaattaaaaggaacgctagcaggaaaaaaataa

SEQ ID NO: 219381 - DNA, 226 bp, Unknown
  Bacterial polypeptide expressing nucleotide sequence isolated from the Sargasso Sea
ggcaaaacgccttaggggtgaaaagggtgacattgctttgccttgtgctacacaaaatgaattaaatgaaacagatgccaacactttggtgaacagcggttgcatttgtgtttctgagggtgcaaacatgccatcaacaccagaagcaattgcagttttccaaaaagcaaaaatcttgttttctccaggtaaggcctccaatgcaggtggtgttgccacctccgga

SEQ ID NO: 219382 - DNA, 352 bp, Unknown
  Bacterial polypeptide expressing nucleotide sequence isolated from the Sargasso Sea
atggacaaaatcattaaacaatttttatcacaagtaagtcaaaaaaaccaaaatgagcctgaatttatgcaggctgtcactgaggttgcagagactgtcatcccttatatagtcacccaagatatttattatggtcaaaacattttacttagaatggttgaacctgaaagagtcgtgtctttcagagttgcatggatagatgataatgaagaaattcaagttaatagaggatatagaattgagatgaactctgctattggaccatacaaaggaggtttaaggtttcacccatcggttaacttgagtatactaaagtttttagcttttgaacaagtatcaaaaacgctcttac

SEQ ID NO: 219383 - DNA, 991 bp, Unknown
  Bacterial polypeptide expressing nucleotide sequence isolated from the Sargasso Sea
ctgatgacttacaaatgctctctgatggatttaccatttggcggctcaaaaggagccttaatcgtagatccttaccgatggaaaaatgaagaacttgagaggattactcggcgctttactttcgagctggctaaaagagatttaatacatccttctcaaaatgttcctggaccagatatgggaacagatgaaaatgtcatggcttggatggccgatgagtacagaaggctcaatcccaccgaaattgatgcgatggcagcagtgactggaaaaccgatagccgttggaggaattgacggtcgaactgaagccacagggagaggcgtttattattcaatattggagttcttgaagaataaaaaagatcgccagaaatcaaaattgagacaaggacttgaggatcaaaaggtcatcattcaaggttttgggaatgttggttatcatgtggcaagtcttttgcatcaatctggggcaaagatcatagcgatcattgaaagggatggctctgtggttaatcaagacggcattgacgttgagtcattgaaaaaatattttataaaaaagagatcctttgagggatacgacggatactcgaaagtaagagggcgttttttaaccaaagactgcgatattcttgtaccggccgctacagagggagttatcaacaagaataatgcaagcaatatcaaagcaaaattaattgtggaaggtggcaatggcccagtaacttcagacgcggataaaattctgagaaaaaaaggaatcacggtcataccagatttttatgccaattcaggcggtgtcatagtgtcttattttgaatgggtgaaaaacctatcaaaaatgcgttacggattgatgcaggagagagaagtagagaagaggagtgagaatctagtgaatactttggaagcaatgacaagttctacatttccttcagatttcaaagatgattatattaaaggctcaagcgaaattgacctagttcgat

SEQ ID NO: 219384 - DNA, 338 bp, Unknown
  Bacterial polypeptide expressing nucleotide sequence isolated from the Sargasso Sea
tatgtcaagtaaatatcaagcatctatcgacaacttcatgcaaagtgttatagataaaaacccaaatgaaaaggaatttttacaagctgtagaggaagttgctgaagcggttattccactaattgaagaaactccaaaatataaaaattcaaatattcttgatagaatagttgaaccagaaagagttattatgtttagagttccatggttagatgacaatggggttactcaagtaaatagaggttttagagttgaattcaactctgctattggtccatacaaaggaggtttgagatttcatccttctgttaatctatcaatattaaagtttttaggtt

SEQ ID NO: 219385 - DNA, 484 bp, Unknown
  Bacterial polypeptide expressing nucleotide sequence isolated from the Sargasso Sea
ctttgctaagtctgtcaatcaagatgaagtcgaagcgctcgcagccttaatgacatataaatgtgcgctagttgagataccctttggaggctcaaaaggcgggttatgtattgatccaagagaatacaaagatgaagagttagagattatcactcgtcgtttcgcttatgaattagcaaaaagagatctgattcatccttcacaaaacgtacctgcaccagatatggggactggtgagagagaaatggcttggatagctgatcaatacagcagaatgaataccactgaaattaacagcagagcatgtgtaactggaaagccgctcaatgcaggaggaatatcgggcagagttgaagctacaggaagaggaatacaatacgctcttagagaatttttcaatcacagagatgatatgaagaaggcaaaattaaaaggaacgttagcagggaaaaaaataattgtgcaaggtttgggtaacgttggt

SEQ ID NO: 219386 - DNA, 664 bp, Unknown
  Bacterial polypeptide expressing nucleotide sequence isolated from the Sargasso Sea
atgacgtgtacagatgaaagaataaaaaatgaaaccgaattatttaatcagggagttattgatcgaaaccctgcagagtatgagtttcatcaagctgttcgagaatttacagagtcagttatgcctttcgtcatgagcaatgaaaaatatgctgatggtcacatactcgaacgaatgactgagcctgatcgaatagtgatattccgggtatgttgggaaaacgacgagggacatgtatgttgcaatcgtgcctggcgagttcaatttaataacgcaattggtccttataaaggtggccttaggtttcatccagatgtcacacaaagtattttaaagtttttgggatttgagcaggtttacaagaatgcgctaacagggcttccaatgggtggtgccaagggtgggagtaattttgatcccaaaggtaaaagtgatagagaagtaatgaggttttgccaatcattaatgactgagttatctcgccatattggggaggacaccgatattcctgccggtgatatcggtgtgggagcaagagagattagttacttgtttgggcaatataaaaggctaaataatcgttttgtcggaaccttaacaggaaaaggattatcttttggtggaagtttaattagatccgaggcaacaggttatggcgttgtat

SEQ ID NO: 219387 - DNA, 484 bp, Unknown
  Bacterial polypeptide expressing nucleotide sequence isolated from the Sargasso Sea
atgaattataaatcaaaacaagattttttagacaatgttcattcaaagtttccgaatgaaaaagaatttttacaagccgttgaagaagtaattggttctatatgggatactgttcaacaaaatcagaattatttagatggtaatattttagatagaattgttacgccagaaagagtaattatttttagagttccttgggtagatgataatggaagtgttcatgttaacttaggttatagaatacaatttaattctgctataggaccatataagggtggtttaagatttcacccaacagtcaatctaggtgttttaaagttcctcgcttttgaacaaatttttaaaaacagccttactggactaaatatgggtggcggtaaaggtggatcagattttaatcctaaaggaaagtcagataatgaaatcatgaagttctgtcaatcttttatgactgagctatcaagacatataggtcataataccg

SEQ ID NO: 219388 - DNA, 310 bp, Unknown
  Bacterial polypeptide expressing nucleotide sequence isolated from the Sargasso Sea
aatgtattcgtcgataaacgattttatgaataaagtaaaacataaagaccctaatgagatagagtttcatcaggctgtacacgaggtaattgattcattatgggactttttgatgtcaaacagagaatatatccatgcaggcgtcttagatagaatcatagaaccagaaagagtaataacttttcgtgtcccctggagagatgatagaggggaagtcaatgtaaatagaggatatcgggttgagtttaattctgcaattggtccttataaaggtggtcttcgatttcacccttccgtaaacctaagtatt

SEQ ID NO: 219389 - DNA, 269 bp, Unknown
  Bacterial polypeptide expressing nucleotide sequence isolated from the Sargasso Sea
tgttgctgttccagatattttggctaatgctggaggagttattgtttcttattttgaatgggttcaaaatagattaggatttaagtggtctgaaagtagagtaaataggagatgcgattctataataaaattaggatttaataatgtttataaaatttctaaagaatataaagtttctttaaggatagctgcttatatatccgctattgataaagttgcaaaaacttataagtttagagatggatcttttacttttcaaaaaacttaat

SEQ ID NO: 219390 - DNA, 454 bp, Unknown
  Bacterial polypeptide expressing nucleotide sequence isolated from the Sargasso Sea
atttcagcaaaattaattgttgaggcagctaatggccctattacatataaagctaaccaaattttaaaaagaaaaaaaatttttataattccagatattttagccaatgctggtggtgtagcagttagctattttgagtgggtaaaaaatataaggcacattagatttggtagattagaaaaaagaaggaatcagcttcaacttcaaaatttaattgaggctattgaagctatgactggcaaatcaatgcctgaaaaatacaaagctaactttgtaaatggtatagaagaaatagacttaattaggtctggacttgacgatatgatgattgatggatttcaaagtgtaaaaaaagaatttactgagaacgataaaatatctgattttcgaactgcagcctataaagtagcaattgaaaaaattgctctttcatatgattttataggcttataaa

SEQ ID NO: 219391 - DNA, 423 bp, Unknown
  Bacterial polypeptide expressing nucleotide sequence isolated from the Sargasso Sea
aatgacaaaaatttttgaaaaaatatctgataaaaatcatgagcaagttgtctattgcaatgatccatcttccggattaaaagcaataattgcaatacataatactgttttagggcctgcattaggaggatgtagaatgtatccatacaaaagtgaagaagatgcgcttgtagatgttttaagattatccagaggtatgacatataaagcttctatctctaatttaaatttaggcggtggaaaagctgttataattggagacccaaattcagataaatcagaagtacttttgagatcatttggaaaatttgtccaaagtcttgggggtaaatatatcactgctgaagatgttggcatgactgtccgtgatatggaatttattagaatggaaactgaccatgttactggaatcaaaagagcaat

SEQ ID NO: 219392 - DNA, 931 bp, Unknown
  Bacterial polypeptide expressing nucleotide sequence isolated from the Sargasso Sea
gaagttccttttagacgcgatgatggtgagttagatagtgtaattggatttagagtacagcacaataatacaaggggtccgtttaaaggtggtatcagataccacgagcatgtagatattgatgaggtaaggtcactcgcaactcttatgacctggaagacttctctcttagacattccttatggagggggtaaaggaggcattggagttgatccaacaaaatttagcaaaacagaattagaaagaatgtccagacgattttttagagctattgatcctattattggtgttaatgttgatattcctgctccagacgttaatacgaatgctcaggtaatgagttggtttatggatgagtacagtcagatacatgggtactcgccagcaattgttacgggcaagccattagaattaggaggatcagagggtcgcgaggctgctactggaaaagggactgctattataactcgagaatcagcagggaaatgggatatagatttacaaaattcaaaaatagtgattcaaggatttggtaatgttggttcctatgcagcaaaatttttgcatgagtatggttgtaagataattgctgtgagtgatgtaacaggcgggctatttgatcctgacgggcttgacattccatcactttttgaacacaactataaaaacagaacgatagatggttttaaacagggtaagaaaattaccaacgaggagctccttgctcttgagtgtgatttcctcattcctgctgcattgggtagtgcgattaacgaatcaaatgtagataaattaaactgtaaggtggttgtagaagcagctaatggtccagttactggtgatgcagcaagaagtttacataaacgaagtattccagtgattccagatattctaacaaatgctgggaggtgttactgtatcctactttgaa

SEQ ID NO: 219393 - DNA, 507 bp, Unknown
  Bacterial polypeptide expressing nucleotide sequence isolated from the Sargasso Sea
aatgcaatatatcgaagaagtactgcaatcagttaaagagtctaatccaaatgagcctgagttttatcaagctgttgaagaagtgctttcatcaattaatcaggtagtagaaggtaacagtgaatttcaacagcaggcaattctagagcggttagttgagcctgaaaggcaagcaatatttagggttccttggcttgatgatgacggcaaagtgcaagttaaccgtggttttagaatcgaatttagctcaactctaggcccatataagggaggcttgagattccatccaagtgttaatcaaagtgtggtgaagtttttaggctttgagcaagttttgaagaatgcactcacagggttgcaattaggaggcgctaaaggcggtgctgattttaaccctaaagggaaaagtgacaatgaaattatgcgtttttgtcagtcatatatgactgaactctatcgtcacataggtgctaacacagatgttcctgctggtgatattggcgtggg

SEQ ID NO: 219394 - DNA, 454 bp, Unknown
  Bacterial polypeptide expressing nucleotide sequence isolated from the Sargasso Sea
ttgtcaggtaaagagtttttagagtcggttgacaaagtttttgataatgctgcaacggtccttaagcttccagattatattgcaactcagattaaatctccaaattctacttataagttaaactttggggtaaaaatacgaaacagattatttacttttacaggatttaggtgtgttcactctgagcatttagaaccagtaaaaggaggtattaggtacgcaatacatgcagaccagtctgaagtagaagctttggcggcattaatgacctataaatgtgctctagtagatattccttttggtggttcaaaaggagctttaataatagatcctaagatgtataagtctaatgaattagagaaaattacaagaagatttgcacaggaattaattaaaagagacttaattaatccttcacaaaatgtccctgctcctgatatgggaacaggagaga

SEQ ID NO: 219395 - DNA, 649 bp, Unknown
  Bacterial polypeptide expressing nucleotide sequence isolated from the Sargasso Sea
atgacaaaaatatttgagaaaatatccgataaaaatcacgaacaggttgtttattgtaatgattcgtcatcaggattaaaagcaattattgcagtacataatacagttttaggtcctgcacttggaggttgtagaatgtacccttataagagtgaggaagaagcactagttgatgttttaagattatcaagaggtatgacatacaaagcttcgatttcaaatttaaatttaggtggtggtaaagctgttataataggagatccaaataaagataaatcagaagttctcttaagatcattcggaaagtttgttcaaagccttggaggaaaatacataactgctgaagatgttggaatgactgttcatgatatggagtttatacgaatggaaacggatcatgttacaggaattcaaagagcaatgggtggaagcggcgatccatctattcttaccgctttaggagtttttgtaggaattaaagctgcattaaccaaaaaattaaatatccaatcagttaatggattaaaaataggaatccaaggttttggtaaagtgggatattatctttgttctcatttaaaaaatgaaggggcccaaatctatggttatgatgataatgaagaatctcttgaaagggttaagaatgatt

SEQ ID NO: 219396 - DNA, 232 bp, Unknown
  Bacterial polypeptide expressing nucleotide sequence isolated from the Sargasso Sea
atattttaaccatgctggtggcgttacagtctcttattttgaatgggttcaaaaccttcagcaatttcaatggacagaagaagaggtaaataataaactcgaacataaaatggttgcagcatttaatgaggtggcagatatgatgaattcaaaaaaaacctccatgagaatggctgcttttgctgttgctattgacagggtagcgagaagctttgaaatgagaggtgtataa

SEQ ID NO: 219397 - DNA, 565 bp, Unknown
  Bacterial polypeptide expressing nucleotide sequence isolated from the Sargasso Sea
aatgtctgtgtttgaacatccggaatttgataaccatgagcacgttgctttctacgccgatgcggcgacgggccttaaagcgattatcgctattcacaacacgcaccttggtcctgccctgggcggatgccggatgtggccgtatcttaacagcagcgaagcgctaaccgatgtactgcgtctgtctaagggcatgacatacaaagcggcgatggcgaacctgcagcagggcggtggtaaagccgtcatcattggcgatccgcgcaaacataaaagccccgagtttatgcaggctatggggcgctttgttgaaagtttgagcggtcagtatattaccgcggaagactccggtattaccgttgacgatctcaaagccgttgccactcagaccgagcatgtggccggaacgtttgcgcagtacaacgcattgggtgaatcgccaaccggcaatcctgccccctcaaccgcctacggtgtatttgtggggttaaagcaaacggttaaacacgtactgaacagtgatttaaatggcgtaaaggtcgctattcaggggatgggacacgtt

SEQ ID NO: 219398 - DNA, 490 bp, Unknown
  Bacterial polypeptide expressing nucleotide sequence isolated from the Sargasso Sea
atggaacaaaaaaaagaaacaacattcaaagaaagtgttgatttaatgtatgacagagctgttaaaacattaaatcttccaattggtttggcggaacaaattcgaacatgcaatgcagtttatcaagtaagatttggagtaaaactcaagggtgaatataaaatatttgtgggatggagagcagttcatagtgaacatattttaccagttaaaggaggaattcgtttcgcagagatagccaatcaagaagaagtagaagctcttgctgctttaatgacatacaagtgtgctattgttaatgttccttttggaggatcaaaaggagcattaaaaattaatcctaatgactatgatgaagaagacttagagaaaatcacgcgaagatttgcacatgaactgattaaaaaggatttaattaatccaaatctgaacgtgccagccccagatatgggaaccgggagagggaaatggcttggatatctgacacatc

SEQ ID NO: 219399 - DNA, 811 bp, Unknown
  Bacterial polypeptide expressing nucleotide sequence isolated from the Sargasso Sea
ccatacaagagtgaggaagatgcgcttatagatgttttaagattatcaagaggtatgacatataaagcttctatttcaaatttaaatttaggcggcggtaaagctgtcattattggagatccaaattcagataaatcagaagtgcttttgagatcatttggaaaatttgtacaaagtcttggggggaaatacatcactgctgaagatgtcggcatgtctgtacatgatatggaatttataagaatggaaactgatcatgttactggaatcaaaagagcaatgggaggaagcggcgatccatctattcttacagctttaggagtttttgtaggaatgaaagctgcattgaaaaaaagattaaatattaaatcattaaatggacttaaggtaggtgttcaaggttttggcaaggtcggatattatttatgttctcatttaaacaatgaaggtgtagaaatatatggccatgatattaatgaagagtctcttgaaagagttataaatgaatttggtgttaagccagtaagtgctgatgagctaatatccatggacttagatgttttttctccatgcgcaatgggggctgttatcaatccttctacgattgaaagtttaaagtgtagtgttattgctggcgctgctaataatcagttagaaaaagaagatagagattcaaaattattgcaggaaaaagaaattatgtatgttcctgattatgtaattaatgctggcggcttaatgaacgttgcaaatgaacttcagggttacaacaaagaaaaagcaaaatatcaagttgaaggtatttactaca

SEQ ID NO: 219400 - DNA, 511 bp, Unknown
  Bacterial polypeptide expressing nucleotide sequence isolated from the Sargasso Sea
gatgtgtgccgcaccggccaacgagccgacgttccgcgagagtgtcgatctgatgttcaaccgggctgcggccctcatggatctgccgccggggcttgaggaaaagatccgggtctgcaacggcacctacaccgtgcgcttcggtgtccggctgcggggccagatccacaccttcaccggctatcgtgccgtgcattccgagcacatggagccggtcaagggcggcatccgcttcgcctcggccgtggatcaggacgaggtcgaggcgctggcggcgctgatgacctacaagtgcgcgctggtcgaggcgccgttcggcggttccaagggcgggctccggatcgacccgcgcgactacgacgaacacgagctggagcagatcacccggcgtttcgcctacgagctgatcaagcgtgacctgatcaatcccagccagaacgttccggcccccgacatgggcacgagcgagcgcgagatggcctggatggcggaccagtatgcccggatgaac

SEQ ID NO: 219401 - DNA, 757 bp, Unknown
  Bacterial polypeptide expressing nucleotide sequence isolated from the Sargasso Sea
tataccctatggtggcggaaaaggaggaatttgcgtagatccttcaactttatcgtcattagaacttgaaagattatctcgtcgatttttccgagcaattaatccaatcattggaataaatagagacataccagcgccagatgtaaatactaatccacagattatggcttggtttatggatgagtatggaatgactaatggccacacacctggaatagttacaggaaaacctttagagttgggtggatctttaggaaggaatgctgctaccggcagaggtactgctatcattgctcgtgagacagcaaatcttttaaatatggatttagatggagcatctgtagttattcaaggttttggtaatgtagggtcatttgcaggaaagtttttaagtgaaatgggttcaaagatcatagctgttagcgatgtgaatggtggcctatatgacccagatggtcttgatattccagcaatgattgaccataacctgaaaaacaaaactataaaaggtttctctcaagggaaaaaaatatcaaatgaaaagatattgaatcttgaatgtgattttcttattccagctgcactaggcggtgtaatacacaaaatgaatctagataaattaaaatgcaaagtcattatcgaagcagcaaatggaccagtgactcctcctgctgatgatgttttatttaaaaaagggattcatgttattccagacatccttactaatgctggcggtgttacagttttcctattttga

SEQ ID NO: 219402 - DNA, 1243 bp, Unknown
  Bacterial polypeptide expressing nucleotide sequence isolated from the Sargasso Sea
acaattagatttggtgtaaagctttcgggtggaattaaggtatttactggttggcgagcagtccattcagagcacttagagcctgttaaaggtggtattagatattcccccgctgtttcatcaacagaagtcgaagcgatggcaatgttaatgacatttaaaaatgctgttatagatgttccttttggtggatctaagggtggcttaaaaatcaatccaaataaatactctgaagaagatttagaaaaaattaccaggcgattcacagaagagctagttaaaaggggtttaatttcaccaagtttgaatgtgcctgctccagatatggggacaggaaaaaaagaaatggcatggattgcagatgaatataaaagattaaatcctcatgatataaatgcttacgcttgtgttactggaaaaccagagaatatgggcggggtagatggaaggacggaagctactggaagaggcctattttatgcactcaattccttttttaattcccaggatattaaaaaaactaaaataaaaggaaagctttcatcacaaaaaataatattggagggattaggcaaggttggttactttgctgcaagagctttaagagatcatggctgtaaaatcattggtgttattgaaaaagaccagagcttctttaattccgaaggcttagatattgatgcaataagaaattggttaattgaatcaggggatcctaaaaattattcaaaccaagtagaacttaaatcaagagaagaagttttttcagaaaactgtgatatttatattccagctgcaacagaaggcacaatcacagatgcaaactataatcttttaaacgcaaaaattatttgtgagggtgcaaatggtccaattacctcaaaggctgatcagcttttaaccaagaaaggtattttgataatacctgacctatatgcaaatgcaggaggtgttgctgtgagttattttgaatgggttagaaatctccaacatatgaggtttggtagaatggaaaaaagacggaaggagtatgagaatgcctcacttattagcgtcatagagagtaccacaggagcaaaggtttcatctcaaacaaaagatttactaaatcaagggccttcagagatagatttagttagatcagggcttgaagatatgatgactgaggcttatgaaaatatgagcgaaattggaatcaaaataattacgattcattacgtacgactgcttttatttactctat

SEQ ID NO: 219403 - DNA, 1405 bp, Unknown
  Bacterial polypeptide expressing nucleotide sequence isolated from the Sargasso Sea
atgggatcggacaataatgtattcttaaaaagcatttccaaaatgtttgacgatgctgtcaaaattcttggagtgaaaagaggtctagcaaatcaaataaaatcatgtaatagcacacatactattagatttggcgtgaagttagattcgggtataaaaacattcactggatggagagctgtgcactcagaacatcttgaaccagtaaaaggaggaataagatatagtcctcatataaaaacatctgaaatagaagcaatggcagcacttatgacgttcaagaatgctgtaattgatgttccttttggcggatcaaaaggaggtttaaaaattgacccgaaaaaatactctgaagaagagttagaaaagatcacaagaagatttactgaagaactagtaaaaagaggattaatttctcctagtcttaatgttcctgctcctgacatgggcactggaaaaagagagatggcatggattgcagatgaatataaaagattaaaccctcatgatataaatgcttttgcttgtgtaacaggaaagccagcaaatatgggtggtgttgatggaagaactgaagctactggtcgtggtattttttatgctttaaattctttttttaattctgttgatatcaaaaaaacaaaaataaaaggcccattaaaatctcaaaaaatcatagttgaaggtcttggtaaggttgggtattatgctgcaactgctcttagagatcacgggtgtaaaattattggagtaatcgaacatcattattctttttataattctaaaggtttagatgtagatttaatcaaaaaatggctaaccgaatcaggggatcctaaagactaccctaatcaaaaagaacttaagtctagagaagaagtcttttcaaaagaaactgatatctttattccagctgcaagagaaggaactgttactgaagaaaatcaaagcaacctgaatgcaaagattgtttgcgaaggagctaatggtccattaacttcaagagctgatgaagaattgactaaaagaggagtccttattattcctgatctttatgcaaatgcaggaggtgtagctgtaagttattttgagtgggtaagaaatctatcgcatatgcgttttggaagaatggaaaaaagaaggaaggagtacgaaaatgcttctttaataagcattattgagaattcaacaggatcacgagtgtcttcaaagactaaagacattttaaaacaaggtccgactgaaatagatctagtaagatcaggtctagaagacatgatgacagaagcatatgaaaatatgagtgaaatttggaatgaaaatgattatccgtctttaagaaccaccgcttatatctattcaataaaaaaattagttgaatcgtataaatcaattggcatctaag

SEQ ID NO: 219404 - DNA, 1276 bp, Unknown
  Bacterial polypeptide expressing nucleotide sequence isolated from the Sargasso Sea
cttggtaaaacatgacccttttgctaatgcaacaaaacaagtaaacgacgcttgtgatgttttaaaaattaaagataaaggtattcgagaatatcttgcaatgccaaacaaagttctccgtgttaaaattcctgtaaagatggataatggaaaaatacgtgtcttcaccggatttagatcacaacacaacaacgatcgtggtccatacaaaggtggaattagatactttgatccagaaggtggagttcaatacatggaacgcgaagttatggcattatcgtcttggatgacatggaagtgtgcagtagttgatgttccacttggcggtggtaaaggtgcaatttttgtaaatccaaaaaaagacaaactaagtgaaggagaattagaaagattaactcgaggatttgcatataaaattggcgaaataattggacctcaaaaagatattcctgcacctgatgtttacacaactggaaaagaaatgacacagattatggatacttggagtaaaatgaacggtaacaaatactcaccaggagtaattactggaaaaccaattcctatgggtggttcacttgcaagaaatgttgcaactggattaggcacagcatactgtgttagagaatctgcaaaaatcttaaaaattaaacttaaaggcgctaaagttgtattacaaggatttggaaatgcatccacttttgctggtgaatatcttgaaaaaatgggcgctaaatgtatcggtgcaagtgattctaaaggatcaattattgttccaaatggattcaaagttagtaaattaattgaacacaaacaaaagaaaggtagcgttgttggattccctggtagtaagaaagtttcaactgaacaattactcacaacaaaatgtgagatcttaattcctggtgcacttgaaaatcaaattgatgctaaacttgcaaagaaattacaatgtagaattattggagaagcagcaaatggtccaacattacctgaagcagatccaatcatttacaacaaaaaaattatggttatacctgacatacttgcaaactctggtggtgtttgtatctcatatcttgaatgggtacaaaataacatgggatattactggagctttgatgaagttgcaggaaaaatggaagcaaatatcacaagaggtctaaaagacactcacgatatttccaaaaaatacaaaattgatatgagacgtgcagcaatggttcttgcagttcaaagagtcatggaagcatttgaacataaaggcatttggccataa

SEQ ID NO: 219405 - DNA, 1144 bp, Unknown
  Bacterial polypeptide expressing nucleotide sequence isolated from the Sargasso Sea
aatgtcatataaatgcgcaattattaacgttccttacgggggttcaaaaggtggtcttaaaattgatccctctaaatgggaaaaaagagaattagaaaaaattactagaaggtttgcacaagaattaattaaaagagacttaataagtccttctatgaatgttccagcacctgatattggaacatcctcaaaagaaatggcatggattgctgatgaatatagaaaaatacatcccgcagacattaatggtgcagcatgtgttacaggaaaaccagagaataagaacggtcttataggaagagaagaagctacgggtagaggcgtgcaatttataataagagagtttttcagaaatactgaccttcttaaaaaagtaaaactcgataacgacctttcaacaaaaacctttattttgcaaggctttggaaatgttggataccatgcttcaaaattcctaacagaagatgatggtgtaaagttaattgccatcgctgaacataacggcggtatatacaacaaagatggtataaatgttgaagatgcaaaaaaatattttgttaagcataagtcttttaaaaattatccaaaagctgactttgttaaaggctcatctctattaattaaaagaaaatgtgacattttgatacccgctgctagagaaaatgtcataactgaaaaaaatgcagcggatatatctgcaaatttaatagttgaagctgcaaatggtccaattagttatgaaggaaataaaatattgaacaaaaataaaaagtttattattcctgacattcttgcaaatggtggtggtgttgctgttagttattttgaatgggtaaaaaatataaggcatataagatttggaagattggaaaaaagaaggaatcaacttcaattaaataacctaatagaggcgattgaaactatgacaggtaaaacgatgccaaaaaaatataaagataactttgctaatggtattgaagagatagatttagttagatctggactggacgacatgatgattgatggctttcaaagtgtaaaaaaagtattcttagagaataagaaaattcctgattttagaactgcggcatttaaaaccgctatagaaaaaatagctctttcttatgattttattgggctctaa

SEQ ID NO: 219406 - DNA, 503 bp, Unknown
  Bacterial polypeptide expressing nucleotide sequence isolated from the Sargasso Sea
acgaaaagggctgaatattcctgaattatttaaacatatagcaaaagaaaaaactgtgaaaggtttttctggaggtgatccttttgtaggagaaatattagaacttgagtgcgatgtattgataccggccgctgttggtggggtcataacatcaaccaatgcatcaaacatcaaagcaaatgttgttgttgaaggagctaattctccaactactttaaatgctgataaaattttaagagataataatgttttaataattccagatatccttgctaacgcgggaggtgtaactggtagttattttgagtgggtacaaaatactcaaaattatctttggaaagaaaaagacctttatgaaaagcttattgatgttttagaatctgcttttgaagaaatatttattatttcagaaaaaaataattgtgatttaagaacagctgcattaatcaaaggcattaaacgtgttgctgctgcaaagttaactagaggattgtttccttaaa

SEQ ID NO: 219407 - DNA, 726 bp, Unknown
  Bacterial polypeptide expressing nucleotide sequence isolated from the Sargasso Sea
cttggtaaaacatgacccttttgctaatgcaacaaaacaagtaaacgatgcttgtgatgttttaaaaattaaagataaaggattaagagaatatcttgcaatgccaaacaaagttctacgtgttaaaattcctgtaaaaatggataatggaaaaatacgtgtctttaccggatttagatcacaacacaacaatgatcgtggtccatacaaaggtggaattagatactttgatccagaaggtggtgttcaatacatggaacgcgaagttatggcattgtcatcttggatgacatggaagtgtgctgttgttgatgttccacttggcggtggtaaaggtgcaatttttgtaaatccaaagaaagacaaacttagtgaaggtgaattagaacgattaactcgaggatttgcatataaaattggtgaaataatcggacctcaaaaagatattcctgcccctgatgtttacacaactggaaaagaaatgacacagattatggatacttggagcaagatgaatggtaacaaatactctcccggagtaattactggaaaaccaatccctatgggaggctcacttgcaagaaatgttgcaactggattaggaactgcatattgtgttagagaggcttctaaaatattaaaaattaaacttaaaggtgcaaaagttgtattacaaggatttggaaatgcatccacttttgctggtgaatatcttgaaaaaatggg

SEQ ID NO: 219408 - DNA, 1215 bp, Unknown
  Bacterial polypeptide expressing nucleotide sequence isolated from the Sargasso Sea
aatgggatcggacaataatgtattcttaaaaagcatttctaaaatgtttgacgatgctgtcaaaattcttggagtgaaaagaggtctagcaaaccaaataaaatcatgtaatagcacacacactattagatttggtgtgaagttagattcgggtataaaaacattcactggatggagagctgtgcactcagaacatcttgagccagtaaaaggaggaataagatacagtcctcatataaaaacatctgaaatagaagcaatggcagcacttatgacattcaagaatgctgtaattgatgttccttttggcggatcaaaaggaggcttaaagattgatccgaaaaaatactctgaagaagagttagaaaagatcacaagaagatttactgaagaactagtaaaaagaggattaatttctcctagtcttaatgttcctgctcctgacatgggtactggaaaaagagagatggcatggattgcagatgaatataaaagattaaaccctcatgatataaatgcttttgcttgtgtaacaggaaagccagcaaacatgggtggtgttgacggaagaactgaagctactggtcgtggtattttttatgctttaaattctttttttaattctgttgacatcaaaaaaacaaaaataaaaggtccattaaaatctcaaaaaatcatagttgaaggtcttggtaaggttggatattatgctgcaactgctcttagagatcacgggtgtaaaattattggaataatcgaacatcattattctttttataattctaaaggtttagatgtagatttaatcaaaaaatggctaaccgagtcaggagatcctaaagattaccctaatcaaaaagaacttaagtccagagaagaagttttttcaaaagaaactgatatctttattccagctgcaagagaaggaactgttactgaagaaaatcaaagtaacctgaatgcaaagattgtttgcgaaggagctaatggtccattaacttcaagagctgatgaagaattgactaaaagaggtgtccttattattcctgatctttatgcaaatgcaggaggtgtagctgtaagttattttgagtgggtaagaaatctatcgcatatgcgttttggaagaatggaaaaaagaaggaaagaatacgaaaatgcttctttaataagcattattgagaattcaaccaggatcacgagtgttcttcaaag

SEQ ID NO: 219409 - DNA, 1246 bp, Unknown
  Bacterial polypeptide expressing nucleotide sequence isolated from the Sargasso Sea
atggcgacaaatgctttaaaattagttgataattcaatcaaaagagtttttaatatattcggtgatttaaatgttaatgtattgcatcatttaaataaatcaaataatgaaataaaagttaattttgcaagtaaattaaataataaccagttaaggacttttactggatatagagttcaacataataatatattaggtccatataaaggaggattgcgttttcatgaatgtgttgatataaatgaagtaaatgctttagctaaatggatgacatataaaaatgcattgcaaaatattccctttggtggagctaaaggtggaatctcgattaatccaaatgattattcaaaagatgaattgcaaataatatcaagggactttttgaaaagtatatataattatatcggacctgaaatagatataccagcccccgatgtaggtacaaattcaatggtaatggattggatgacagacgagtatttaaatataaataatatatcatctaaaggtgtatttacagggaaatcggttgaatgtggtgggatcaatggtagagaaggcgcgactggattaggtgtagcattatgtgtaaaagaatgggcaaaaataaataatataaatttagaaggtaaaacattcattttgcaagggttaggtaatgtaggttaccatgctgcaagaatattgtctagttatgggatggtattaatcggtataggtaatgctaatggttattggaaaaataccgatggatttaatatttatcaaataaagaaatacatagaagaacacggtgaagatttaaataattattgttctgatagtattgacaagagtgattttttttcgatagaatgtgatgtaatcatacctgctgctttagaactacaaataactgaagaagaagccaaagtaataaatacaaatttaatagtagaagctgctaatggtccaacagatgaaatagccgaagaaatattattagataaaaatgtagaaattatacctgatatattagctaactcgggtggagtcatttgtagttattatgaatggttacaaaatataaatcatacttataattattataatataaatgatattttatcaaaccatatggaaaataaatgtaaagaaataaataatttaatgaaaattcatgatcaaaaatctatgcgcataatttgctactatttagctttaaaatcaatacaaggtgtatatgaaaataaaggtttattataat

SEQ ID NO: 219410 - DNA, 1300 bp, Unknown
  Bacterial polypeptide expressing nucleotide sequence isolated from the Sargasso Sea
atgaataattttcttttagatactacaaagtatgtaaataaagcactcaaatacacagatttatctgatggattatctaataaaataattacttgtaactctacttatactgttagatttggagtaagacttagaggaaaaatatttacatttgaaggatggagatctgttcattctgagcatatggaaccaacaaagggtgggataaggtttgatatgcaaactaatgcagaagaagtggaagctttggctgcattaatgtcatacaaatgtgcaatcataaatgttccctatggtggttctaaaggagcacttaagatagatccctctcaatggaacaaatatgaattagaaaaaattacaagaagatttgcacaagagctaattaaaagagatctaataagtccctcaatgaacgttcctgctcctgatattggaacttcttctagagaaatggcatggatcgcagatgagtatagaaagatacatcctgcggatattaatggtgcagcatgtgttactggtaaacctgctaacaaaaatggacttattggaagagaagaagcaacaggaaggggtgttcagtacattgtaagagaattctttaggaatccagatcttctaaaactagttaaattgaataatgatttatcaacaaaaacatttatccttcaggggattggtaatgttggttataacttatcaaaatttttaacagaagatgatggtgttaaattaataggtatttcagaattaaatggtggaatatttaatgaagatgggattaatgttgaacatgcaaaaaaatattttactaaacataagtcttttgaaaattatccaaaagcttcatttataaaggactcatctttattgttaaaaagagagtgtgatattttaattccggctgctcgtgaaaatgtaataactgaaaaaaatgctggtgatataactgcaaagttaattgtcgaggctgcaaacggacctattagttataaaggaaatcagattttaaatagaaaaaaaatttttgttattccggatattcttgcaaatggtggcggtgttgccgtgagttattttgagtgggtaaaaaacataaggcatattagatttggaagattagaaaaaagaaggaatcaattacaaataaataatttgattgaagctattgaggctatgacaggcaaatctatgccaaagaaatataaagccagtttcatgaatggcattgaagaaatagatcttataaggtctggtcttgatgatatgatgattgatggatttcagagtggaaaaa

SEQ ID NO: 219411 - DNA, 1405 bp, Unknown
  Bacterial polypeptide expressing nucleotide sequence isolated from the Sargasso Sea
atgggatcggacaataatgtattcttaaaaagcatttccaaaatgtttgacgatgctgtcaaaattcttggagtgaaacgaggtctagcaaatcaaataaaatcgtgtaatagcacgcatactattaggtttggtgtaaagctagaatccggtataaaaacatttactggatggagagctgtacactcagaacatcttgagccagtaaaaggagggataagatatagccctcatataaaaacatctgaaatagaagcaatggcagcgttgatgacttttaaaaatgctgtaattgatgttcctttcggaggttccaaagggggtttaaaaattgatccaaaaaaatactccgaggaagagttagaaaaaattactagaaggtttacagaagaactatcaaaaagaggtttgatatcaccaagtttaaatgttcctgcacctgatatgggaacaggtaaaaaggagatggcttggatagctgatgagtataaaaggttacatccacatgatcttaatgcttttgcttgtgtaacagggaagccagaaaatatgggtggcattgatggaagaacagaagctacaggtcgcggtattttctttgctttaaaatctttttttgattctgttgatatcaagaaaacaaaaatcaaaggctcgcttaaatctcaaaaaattatcgtagaaggtcttgggaaagttggatattacgctgcagcggcattaagagaacatggttgtaaaattattggtgtaattgaacaccatcattctttttttaatgaaaaaggtttagacatagatctgataaagaaatggctttctgaatcaggagatgcaaaagactacccaaatcaaaatgaattgaaaacaagagatgaagtttttgaaaaaaaatctgatattttcattcctgcagcaagagaaggcacggtaacagaagaaaatcaagctaaattaaatacaaaaattatttgtgaaggtgcaaatggaccgcttacttctagagctgatgaagaattaagtaaaaggggagttctcattattcctgacttatatgcaaatgctggaggtgttgcggtaagttattttgaatgggtaagaaatctttcacatatgcgttttggaagaatggaaaaaagaagaaaagagtatgagaatgcatctttaattagtattatcgaaaattctactggttctagagtcgcttcaaaaacaaaagatatattaaaacaaggtccaagtgagattgatctagtgagatcaggacttgaggatatgatggcggaagcatatgaaaatatgagtgaaatttggaatgataataattatccttctttgagaactacagcttatatttactcaataaagaaattagttgaatcatataaatctattggtatctaag

SEQ ID NO: 219412 - DNA, 1219 bp, Unknown
  Bacterial polypeptide expressing nucleotide sequence isolated from the Sargasso Sea
ctcagaacatcttgagccagtaaagggagggataatatatagccctcatataaaaacatctgagatagaagcaatggcagcacttatgacattcaagaatgctgtaattgacgttccttttggcggatcaaaaggaggcttaaagattgacccaaaaaaatactctgaagaagagttagaaaagatcacaagaagatttactgaagaactagtaaaaagagggttaatttctcctagtcttaatgttcctgctcctgacatgggtactggaaaaagagagatggcatggattgcagacgaatataaaagattaaatcctcacgacataaatgcttttgcttgtgtaacaggaaagccagcaaatatgggtggtgttgatggaagaactgaagctactggtcgtggtatattttatgctttaaattctttttttaattctgttgatatcaaaaaaacaaaaataaaaggtccattaaaatcacaaaaaatcatagttgagggtcttggtaaagttggttattatgctgcaactgctcttagagatcacggatgtaagattattggagtaattgaacatcattattctttttataattccaaaggtttagatgtggatcttattaaaaaatggttaactgaatcaggagatcctaaagactatcctaatcaaaaggaacttaagtctagagaagaagtcttttcaaaagaaactgatatctttattccagctgcaagagaaggaactgttactgaagaaaaccagagtaacttgaatgcaaagattgtttgcgaaggagctaatggtccattaacttcaagagctgatgaagaattaactaaaagaggtgttctcattattcctgatttgtatgcaaatgcgggaggtgtagctgtaagttattttgagtgggtaaggaatttatcgcatatgcgttttggaagaatggaaaaaagaaggaaggaatacgaaaatgcgtctttaataagtattattgaaaattcaacaggatcacgagtatcttcaaaaactaaagacattttaaaacaaggtccaactgagatagatctagtaaggtcaggtctagaagatatgatgacagaagcatatgaaaatatgagcgaaatttggaatgaaaatgattatccatctttaagaactactgcttatatctattcaataaagaaattaattgaatcgtacaaatcaattggcatctaa

SEQ ID NO: 219413 - DNA, 366 bp, Unknown
  Bacterial polypeptide expressing nucleotide sequence isolated from the Sargasso Sea
tatgcacagttctattgaagaatttatgagtcatattgaggcgaaaaaccaaggcgaaaaagaatttcatcaagcagttcatgaagttgttgattctctatgggatttcctgaatgatcaccaagattatgttcatgctaaaatcctggaaagaattaccgagcctgagcgtgtaataatgtttcgagtgccttggcgagatgatagaggtgacacgcaagttaatcgtggtttccgtgtagaatttaactctgcaattgggccatataaaggtggtttacgatttcatccttctgtgaatttaggtattcttaaatttttaggatttgagcaagtctttaaaaatagcttaactacactcccaat

SEQ ID NO: 219414 - DNA, 1069 bp, Unknown
  Bacterial polypeptide expressing nucleotide sequence isolated from the Sargasso Sea
tatgaccaaaatttttgagaaaatatctgataaaaatcacgagcagattgtttattgcaatgatccatcttcaggcttaaaagcaattattgctgttcataatactgtattgggtccagcactaggtggatgtagaatgtatccttataaaagcgaagaagatgcgctagtagatgtattgaggttatcgagaggtatgacatataaggcttcaatctcaaatcttaatcttggtggtggtaaagctgtaataattggtgaccctaataaagataaatctgaagttcttttaaggtcatttggaaaatttgttcaaagtctaggaggaaagtatataactgctgaagatgttggaatgtctgtacatgatatggaattcattcgaatggaaactgatcacgttacaggtattaaaagagcaatggggggtagcggagacccttctattttaacagctcttggtgtatttgttggaatgaaagctgcattgaaaaaaaggttaaatattcaatcaattagcggtttaaagattggtgttcaaggtttcggcaaggttggctattatttatgttctcacctaaagaatgaaggtgcacatatttatggtaatgatattaacaaagaaaatctcgatagagttgaagaggaatttggtgtcattcctgttgatagcgatgagcttatgtcaatggatttagatgttttttctccttgtgctatgggagctgtaataaatccatcaacaatagaaaatttgaagtgcagtgtaatagcaggtgcagcaaataaccaacttgaaaaagaagatagagattcaaagcttttaaaagaaaaagaaattatgtacgtaccagattatgttattaatgctggaggattaatgaatgttgcaaacgaattacagggatataataaagaaaaagcaaaatatcaggtagaaggtatctattatattcttatgagaatattcgattatgctgcaaataataatatatctactcttgaggctgcaaatcttttagctgaaagaagaattcaagactatatcaaatggaatcatcagcaatag

SEQ ID NO: 219415 - DNA, 821 bp, Unknown
  Bacterial polypeptide expressing nucleotide sequence isolated from the Sargasso Sea
gagaggtgtcttttattctatccttgagttcttaaataatgataaagatcgcaaaaaatcaaaactcagaagagagattgagggccaaaggatcatcatccaagggtttggtaatgtgggctttcatgcggctgaacttttatatgaatctggagccaatatcattgcagttattgaaagagatggttcagttctgaatgaggaaggaattgatgtccaaaaactaaaaaaacattttacaagaaagagaacatttgaaggctttgacggtttttcaacagcgagaggacattttcttagcaaagaatgcgacattttaattcctgctgctaccgaaggtgttattcacaaagacaatgctgcaaaaattaaggctaaactcattgttgagggaggcaatggtcctgtgacagcagatgcagatgagattttgaataaaaatggcatcactgttattccagatttttacgcgaactccgggggagtgattgtttcatacttcgaatgggtcaaaaatttgtccaagatgcgttatggtttgatgcaagaaagagatcaagaaaaaagacagagtaaccttgttgctgcactggagcagatgaccagtaattcttttcctactgaaatgaaagacgaattcattaaaggcgctagtgaaattgatctggttcgatcaggcctggaggagaaaatgaaagaaggctattacgccattcatgaaacatttcattcagataggaaaattaaaagttttagaatggccgcaatggtcattgcagtaaagaaagttgctgaggcttataaatacctcggtatttgat

SEQ ID NO: 219416 - DNA, 1067 bp, Unknown
  Bacterial polypeptide expressing nucleotide sequence isolated from the Sargasso Sea
tggtattcgttattctttgtcttcgagcgaaggagaggtcgaggcacttgcagccttgatgacttataagtgttctttgatggatttaccatttggaggttctaaaggtgcactgattgttgatccgcatcattggaaacatgatgagttagagagaattacaaggcgtttcaccaatgagctggcaaaaagagacctcattcacccttcacaaaatgtccctggaccagatatgggaacagatgagaatgtgatggcatggatggcggatgagtatcgaagattatatcccaccgagatagatgcaatggcttctgtaacaggaaaaccgattgcgctgggcggtgtggatggcagaacagaagccactgggagaggtgtcttttattctatccttgagttcttaaataatgataaagatcgcaaaaaatcaaaactcagaagagaaattgagggccaaaggatcatcatccaaggttttggtaatgtgggctttcatgcggctgaacttttatatgaatctggagccaagatcattgcagttattgaaagagatggttcagttgtgaatgaggaaggaattgatgtccaaaaactaaaaaaacattttacaagaaagagaacatttgaaggctttgatggtttttcaacagcgagaggacattttcttagcaaagaatgcgacattttaattcctgctgctaccgaaggtgttattcataaagacaatgctgcaaaaattaaggctaaactcattgttgagggaggcaatggccctgtgacagcagatgcagatgagattttgaataaaaatggcatcactgttattccagatttttacgcgaactccgggggagtgattgtttcatacttcgaatgggtcaaaaatttgtccaagatgcgttatggtttgatgcaagaaagagatcaagaaaaaagacagagtaatcttgttgctgcactggagcagatgaccagtaattcttttcctactgaaatgaaagatgaattcattaaaggcgctagtgaaattgatctggttcgatcaggcctggaggagaaatgaa

SEQ ID NO: 219417 - DNA, 882 bp, Unknown
  Bacterial polypeptide expressing nucleotide sequence isolated from the Sargasso Sea
gtgtaaccggaaagccagtatctaaaggtggaatagcgggcagaaccgaggcaactggaaggggcgtgcaatatgctcttcaggctttttttgaccaaaagcgagatgttgcaaaaaccggccttaaacctggtttggccaataagaggatcattgttcaaggcttaggaaacgttggttaccacgcagctttatttttatctactgaggataatgcaattataacccatgttcttgagcgtgatgggtcagtaataaatgaggccggaatcaacattcaaaagttgagagaatatattttggataccggtagtgtgaaaggttatcaaggttttgttgcaaagggaattgaattactagaatcggatgctgatattcttattcccgctgcaatggaattagttataacagaagagaacgcagcttctatcaaagcgccattaataatagaagcagcgaatgggccagtttcagctgaagccgacgatatattaaataagatgggtaaggttattatacctgatatgtatgcaaatgctggcggtgtaacagtaagttattttgaatggataaaaaatttgagccgtatccgctttgggcgcatgcaaagaagagctgaggaaaatcgttttggagctttgattgagggaattaataccctgacagggtctaattttcctgaagatttagcaaagcaaattattcagggtggtaaggaaatagatctagtaagatctggtttggaggacactatgcgtaatgcctatgaagttatttctgaaacatggaatgcgcatgatgaggtaaaagatctaagaacagctgccatgatggtggcaatcaaaagaatagctcagagttattcttcaatgggtatttagt

SEQ ID NO: 219418 - DNA, 389 bp, Unknown
  Bacterial polypeptide expressing nucleotide sequence isolated from the Sargasso Sea
ttttggtcagtacaaaagactcaaaaatgaattttcgggtgttttaacaggtaaaggaatgtcatggggaggatctttaattaggcctgaagcaaccggatatggggttgtatattttatagatgaaatgttgaagcctcaaggagatactttaaaagataagaaagttaccatatctggatctggaaatgttgctcaatatgctactgaaaagtgcatcgacatgggggctaaggttttaactctttctgattcctctggattcatctatgacaaagatggtatagactccgaaaaactccaatatattatggagcttaaaaatgttaaaagatttagaatttcagaatatttaaagaaatattctaaagcagaatactacccaaaaa

SEQ ID NO: 219419 - DNA, 857 bp, Unknown
  Bacterial polypeptide expressing nucleotide sequence isolated from the Sargasso Sea
aggggggatttctggcaggaccgaggcgactggtcgaggtgtagaatatgctctgcgagccttttttgaccacgaagaagatgttgcaaagacaggactaacagcaggcttaaaaggtaaaagagtaattgttcaaggcctaggaaatgttggatatcatgcagctctttttctgtcaaaagaagacggtgccttaattacccacgttcttgaaaaagatggtgcggtaatagattccaacggaatcgatattgaaaaattaagaaatcatttgctaaaaacagggaccattaagggttttgatggtttcactgatatgggatcagaagcattggagtctgatgctgacattctaatccccgccgcaatggaattggtaataaccaaagaaaatgcacatcgtattaagactccactaataatagaggctgctaatggtcctatctcttcggaagcagatgaaatactttgtcagaatggaaagattatcattccagatttgtatgccaatgcaggaggtgtgacagtaagctattttgagtggataaaaaatctgagtagaattagattaggacgtttacaacgacgagctcaagaaaatcaagtaatggcaattattgaaggtgttgaagaattaacgggtagagaattcccagaagataagaaatcacgttcaattcagggctctgcagaagttgatttggtacgctcaggtctggaagacacaatgcgaaatacttatgaagttataagtgacctttggaatcaagataagaatgtaccagatttaaggaccgctgctatgatgattgctgttaagagaatagcacaaagttacgcttcgctgggaatataag

SEQ ID NO: 219420 - DNA, 596 bp, Unknown
  Bacterial polypeptide expressing nucleotide sequence isolated from the Sargasso Sea
aagggttggtaacgttggttcatttgcagcaaagttccttcacgaatctgagtgtaaagttattgctattagtgacgtaactggtggtttacatgaacccggaggactagatattcctagtcttattgatcatgtaaaagaacatggggttattgaaaagtctggccaaggagaatcaatctctaatgaagatatattgtcactagattgtgactttctaattccggctgcattaggtggggtaattcataaaatgaacgctgaaaatctaaattgccggtttgttatagaagctgcaaatggaccgactacacctccaggtgacgaaatattattctcaaaatctattccagttatcccagacatactcacaaatgctggaggagttacagtttcgtactttgaatgggttcaaaacctacagcaattcaggtgggaagaagacgaggtcaattcaaaacttgaggctaaaatgacttccgcctataaagaagtgacaactcttcgcaaagaaaagaatgtgtcttttagaacagcagcttttatggtaggaattgatcgtgttgcaaggtctgtagaactcagaggcttttaga

SEQ ID NO: 219421 - DNA, 470 bp, Unknown
  Bacterial polypeptide expressing nucleotide sequence isolated from the Sargasso Sea
tagtaatgcagccagaattaaagctccactcatagcggaggcagcaaatggaccagtcactttcgaggcagattccatactaagaaaaaaaggtacagtgattttacctgatgccttcttaaatgccgggggtgtaacagtatcgtattttgaatggattaaaaatcttgctagaattagattcggaagactagaacgtcgacatgaggaaatgaaaggaaaacttattgttgaaacattagagaccatgctaaaggcgaaagtccctaatgatttgaagaataaactgattgaaggtgcagatgaattagatttagtgagatctggattggatgattctatgagagatgcttacaaaaatattagagaaacattttattcaatgaacaatgttgatgattttcggaccgcttcttatgtggtcgcaataaaaacaattgctaaaggttatgaaagtatgaacttatagt

SEQ ID NO: 219422 - DNA, 964 bp, Unknown
  Bacterial polypeptide expressing nucleotide sequence isolated from the Sargasso Sea
gggagctaacttcaatccaaaaggtaaatcagagaatgaagtcatgcgtttctgtcaatcctttatgaccgaactctatcgtcacatcggggccgacgtcgacgttcctgcgggtgatattggtgttggcgcaagagaaattggctatatgttcggtcagtacaagcgaataacaaaccattttaccggtgttcttactggaaaagggatagaatatggcggaagtgaaatgcgccctgaagctacaggttacggagccgcttatttcctagaggagatgcttaagacgaagggcgacagcatagagggtaaaaacgtactaatatccggttctgggaatgttgcgacttttgcggcagaaaaaatcattcaccgaggtggcaaagtacttacgctatccgactcagctggatttgttcatgataaagatggaattgatgaagaaaaattaaagtgggtaatggagctcaagaacgtcagaaggggacgaatttcagagtatgccgacaaatttagtggtgctgaatatcacgcaggcaagcgtccttggggagtggcagcggatctagcgatgccatgtgccacccaaaatgaaattttagaagacgacgcaaaaactatgttatctaatggaataatggccgtctccgagggcgctaatatgcccacagaaatcgaaggcatacatcacttcctagcagcaaaaattttgttcgctccagcaaaagcagcaaacgctggcggtgttggcatgtcaggtttagaaatgagtcagaattctgaacgtaggtcgtggagtaatgaggagttaagtaaaatgttacgcgatttaatgatcggcatacataagaattgcaatgacgccggaatgcaaaaagatggctggtgtaattatatggccggatcgaatatagccggtttcaagaaaagtgcagatgccatgatggcattcggtgttgtttga

SEQ ID NO: 219423 - DNA, 954 bp, Unknown
  Bacterial polypeptide expressing nucleotide sequence isolated from the Sargasso Sea
actgcgcttgcggcgtggatgacatggaaatgcgctgtggttgatattccatatggcggagcaaaaggaggagtgaaatgtaatccaaaagaaatgagtacctctgaactggaaaggttaacacgagcttatacacaatctatgcatgatgtttttggtccagataaagacattcctgctccagatatgggcactgggccggatcaaatggcgtggttaatggatgagtattctagagctagaggaacaacggtaaatgctgttgttacaggaaaaccgattattctaggaggttccgtaggtaggattgaagctacaggcaggggggttatggtctctactttagctgcactaactaaaatgaaaataaatccatttaaagcaacagtagcaattcagggctttgggaatgttggctcttgggcagctcagttattaaaagaaagaggctgtaaaattattgctatctctgatgtctctggaggatattataatgaagaaggtattgatgttggaaaagcaattactcataaaaatgagaataatggagttcttgaaaattttgatggagggaaaaaaataactaatgaagagttattaatattagatgttgatgttctaattccagctgctcttgaaaatacaataactgaaaaaaatgcaaataagataaaagcaaagttaattgtggagggagctaatggaccaacatctcatgaggctgatccgattttagaaaaaaaaggtgtaatagctgttcctgatattttagcaaatgctggaggtgtaatagtttcttattttgagtgggtgcaaaacaggttaggatttaaatggaccaaaaacagagtatacagaaggagtgattctataatcaaacaagcatttaataatgtttttgcaatttctaagaaatataatatttctttaagaactgctgcttatattgcagct

SEQ ID NO: 219424 - DNA, 562 bp, Unknown
  Bacterial polypeptide expressing nucleotide sequence isolated from the Sargasso Sea
gtttttacatgaatatggttgcaagattatcgcagtgagtgatgtcacaggaggcctttatgaccctgatggccttgacataccatcactttttgatttcaactatgcaaataaaacaatagacggttttgaccaaggggaaaaaatatcaaacgatgaattattagcattagaatgtgatttcttaattcctgcagcgttgggtagtgcaattaatgaaaaaaatgtagattcattaaattgtaaagttattatagaagctgctaatggcccagttactggttcagcggcaaataaactttgggatcgaaaagttggtatcattcctgatattttgacaaacgcaggcggtgtcacagtatcttactttgaatgggtacaaaacctacaacaatttaaatggacagaagaagacgtaaacaaaaagttagaagataaaatggtggtagcttttgatgaagtatttgaattgaaagaaaaaaagaaggtcccaatgagaattgcctcattcatggtcgcaatagatcgagtacacaaagcgtataatcttagagagggctaa

SEQ ID NO: 219425 - DNA, 883 bp, Unknown
  Bacterial polypeptide expressing nucleotide sequence isolated from the Sargasso Sea
gatgacctataaatgcgctttagttgaagttccctttggtggctctaaaggtggccttataattaatataaaaaaatggtccgaagaagagctggaaagaataacaagacggttcacccaagaattagctaaaagagatttaatacacccatcccaaaacgtacctgctcctgatgttggtactggagaacgtgaaatggcgtggatggcagatgagtttcgtagactaaatccaacagatcttaatgcatgggcttgcgttactggaaagcctgtaaataaaggaggtatttctggaaggactgaagccacaggaaggggggtgaagtttgctctgaaagcattttttcaaaacgataatgatgtcaaaaaaacaggtttgactcccggattaaaagggaaaagaataatcgtacaaggcttagggaacgttgggtattatgcagcaaaatttttgtccgatgaggatggtgcaaaagttacacacgtaattgaacgcgacggatcaattgttaatcataaaggaatagatatttcatctttgaaaaaacatcttattgttaaaggtacaatcaagggttttaacggttttattgaggctggagctgaaatactagaggaagaagcagatattttaataccggcagctatggaattagttattaatgaagaaaatgctaatcgtatcaaagtaccccttattgtagaagctgcgaatggccccgtatcatcaagtgcagatgagatactaaatcaacgaggtgtaataatcataccagatttatacgctaatgcaggcggtgttacagtaagctattttgaatggattaaaaatttgagcagaataaggttggggagattgcaaagaagggctcaaaaaaat

SEQ ID NO: 219426 - DNA, 621 bp, Unknown
  Bacterial polypeptide expressing nucleotide sequence isolated from the Sargasso Sea
taaaaggagccaaagtagtgatccagggttttggtaatgttggttcatatactgcaaaatttttagatgaatatggatgtaaaattattggagtaagtgatatttctggaggtttatacgacccaaatggttttaacgtaccagaattatttgattataattataaaaatagaacgatagacggatttgagcagggcaagaaaatatcgaatgaggaattactggctttagaatgtgatttcttgatacctgctgcactgggtagcgctattaacgaatcaaatgtagactcactaaactgtaaggtaattatagaggcggcaaatggtcctgtaactggagaagcagcaaataaactatggaagcggaagatagcgattataccagatattttgacgaatgcaggaggggtgactgtctcatattttgaatgggtgcaaaaccttcagcaatttaaatggacagaagaggaagtaaataaaaaattagaggataaaatggtccaggccttcaaagaagtgcatgatgtaaaggtgaaacaaaaaattccaatgcgaatagcatcttttatggtcgcaatcgatagagttgaacggtcatacactcttagaggtggataaa

SEQ ID NO: 219427 - DNA, 385 bp, Unknown
  Bacterial polypeptide expressing nucleotide sequence isolated from the Sargasso Sea
aatggaaaaaattatcaagcaatttttgtcagaagtaaataaaagaaaccaaaatgaacctgaatttatgcaggcagtaactgaggttgctgagacagttatcccttatatagtcactaaaaaaatttattacggtcaaaacattctacttagaatggtagagcctgaaagagtagtttcatttagagtagcttggattgatgacaatgaagagattcaagtaaatagagggtatagaattgaaatgaactccgctattggaccatataaaggtggcttaagattccacccttctgttaatatgagcatcttaaaatttctagcttttgaacaagtttttaaaaatgctttaaccactcttcctatggggggtggcaaaggtggg

SEQ ID NO: 219428 - DNA, 664 bp, Unknown
  Bacterial polypeptide expressing nucleotide sequence isolated from the Sargasso Sea
tttcgtccttcaagaatttttgaatgacataaagatctttccccaaaaagcaagaactgtaatccaaggatttgggaatgttggttcatggttttccgctctggcctccgctaatcgaatacccgtaattgcagtagcagaccatctaggaggagttgtttcatatgacggtctcgacattaacgccctttgggattatgcaaaaactaatggtacagtagcaggtttcaccggaggtgaaaaatgcttaccagaggatattttttctattgaagccgacatattagtgccagcagctattgaaaatgtcattaccgaaaacgtcgcaaaatcaatttcacataaagtcattcttgaagccgcaaatcatccaactacgccagaggccgacgaattattagccgaaagaggaataactgttctacctgacattttagtaaatggtggaggggtaactgtatcttattttgagtggacgcagaatttacagcaattcagctggcaagaagaacaggtcaacaatgaacttaaattacgaatgaaagctgcctataactcagttgctgaaaaggtaagaaatagtgggctgacattcagagaagctgcatttgaaatagctgttgaaaaagttactgaaactgcgaaacttcgcggtttcgtttaa

SEQ ID NO: 219429 - DNA, 533 bp, Unknown
  Bacterial polypeptide expressing nucleotide sequence isolated from the Sargasso Sea
aatggcagtatcagatcatgtagatttgcaaggatttatggatggggtaaaaagaagaaacccaggtgagaatgagtttcaccaagcagtatatgaagttgctcaatatatttttgattatataaaagataaagaaatttatcaccagcatcagattcttagacgaatagcagagccagacagagttgttagcttcagagtttgctgggaggatgataaaggtaatgtcagagttcaaagaggatataggattcaaaacaataatgctataggcccttataaaggtgggctacggtttcacccaagtgttaatcaaagtattcttaaatttcttgctttcgaacaaacatttaaaaatagcttaacaggtttacctatgggtggcggtaaaggaggttctgactttaacccaaaaggaaaatcagataatgaagtaatgagattttgccaatcatttatgacagaactatataggcatgttggagtagatgttgatgtgccagctggtgatataggtgttggggctcgagaga

SEQ ID NO: 219430 - DNA, 712 bp, Unknown
  Bacterial polypeptide expressing nucleotide sequence isolated from the Sargasso Sea
aatggtgggcttccacgcagctttattcctgtctactgaggacaattcaaaaattacgcatgtaatggaacgtgatggagcagtaattaatactgatggaattgatattttatcgttacggaagcatcttgctcgtgagaaaacaataaagggttacaaaggttttgtagaatcgggcatagagattttagaggaggaagccgatattattattcctgcggcaatggagctagttattacaaaagataacgccgcaaggataaaagctcctttgattattgaagctgcaaacggtcctgtatcagccgaagccgatgaaattttaactcgacgaagcgttgttattatcccagatctttatgcgaatgctggtggcgttacagtaagttatttcgaatggataaaaaatctaagtaagataagattaggaagattacaaagacgtgctcaggaaaaccaaattagaattctagtggatggtattgaaaaaatgacaggtaagtcttttcctaagagtaacctctatgaagcattgcagggcggatcagaattagacctggtgagatccggtttagaagataccatgcgcaatacgtatagaacaataagtgaagtttggaacgatgaaaaaaccaccggtagtttaagaacttcagccatgatggtagcacttagaagagtcgctcaaagttattcgtcattgggtatttaa

SEQ ID NO: 219431 - DNA, 535 bp, Unknown
  Bacterial polypeptide expressing nucleotide sequence isolated from the Sargasso Sea
tttggagttagtgatatttcttggaggtttatacgacccgaatggttttaatctaccagaattatttgattataattataaaaatagaactatagatgggtatgaacaaggcaagaaaatatcgaatgaggaattgctggctttagaatgtgatttcttgatacctgctgcattgggtagtgctattaacgaatcaaatgtagactcacttaactgtaaggtaattatagaggcagcaaatggtcctgtgactggagaggcagcaaacaaactatggaagcgtgaaatagcaatcataccagatatcttgaccaatgcaggaggagttactgtttcatattttgaatgggtgcaaaaccttcaacaatttaaatggacagaagatgaggtgaataaaaaattagagtataaaatggtccaggctttcaaagaagtgcatgatttaaaggtaaaacaaaaagttcctatgcgaatagcatctttcatggttgcaattgatagggtcagtactgcatatactttgagggaaggatag

SEQ ID NO: 219432 - DNA, 397 bp, Unknown
  Bacterial polypeptide expressing nucleotide sequence isolated from the Sargasso Sea
tttatactaagaaaaaaaggtacagtgattttacctgatgccttcttaaatgccggtggtgtaacagtatcgtattttgaatggattaaaaatcttgcaagaattagattcggaagactagaacgtcgatatgaggaaatgaaaggaaaacttattgttgaaacattagagaccatgctaaaggcgaaagtccctaatgatttaaagaataaattgattgaaggtgcagatgaattagatttagtgagatctggattggatgattctatgagagatgcttacaaaaatattagagaaacattttattcaatgaataatgttgatgattttcggaccgcttcttatgtggtcgcaataagaacaattgctagggggtatgaaagtatgaatttgtaat

SEQ ID NO: 219433 - DNA, 862 bp, Unknown
  Bacterial polypeptide expressing nucleotide sequence isolated from the Sargasso Sea
gtaaatcttggagaggtaacggcattatcaatattaatgtcttggaaatcagcaattgttggtttaccatatggaggcgctaagggtggtgttgcaattgatccaagaccactttcaagagcagaaaagcaaagaatcactagaaggtatactgctgaacttttacccataattggtgttgataaggatattcctgcaccagatatgggcacggatgaacaaactatggcctggataatggatacctatagtaactttgtaggttcgccacaaccgggaattgtaactgggaaacctgcttcattaggtggttctatcactagaagagaagctacaggaagaggagctgtcgcaatagcttcagcagcaatggaaaagttaaataaaaaatattctgaatcttcggtcgtagtgcaaggttttggaaatgtaggtagatatgcagctctagcttcatatgaaagaggtgccaaagtaattgcagttaatgatttaagtggagcaatttacaatgaaaaagggcttaatattccagaattatttaaacatatagcaaaagagaaaacagttaaaggttttagtggttcagatgcctttgttggagaaatattagaattagagtgtgatgtcttaatcccagcagctatagggggagttatcacgtctagtaatgcaggaaatattaaagcaaatgttattgttgaaggtgcaaactctccaacaactttaaatgcaaataaaatattaagagaaaataatgttttgataattccagatatacttgccaacgctggaggtgttacaggtagttattttgaatgggtccagaattactcaaaattatcttggaaagaaaaagatc

SEQ ID NO: 219434 - DNA, 392 bp, Unknown
  Bacterial polypeptide expressing nucleotide sequence isolated from the Sargasso Sea
gccctcggccacccagaacgagctatcgggcaaagatgcgaaaacgcttgtcaagaacggtgtcaaggccgtgggtgaaggtgcgaacatgccttgcacccctgaggccatccgcatcctgcgcgaggctggcatcctgttcggaccgggcaaggcggcgaatgccggtggcgtcgcgacctcggcgctggaaatgcagcagaacgccagccgggaccgctggagctttgcccagaccgaagaacgtcttgcccagatcatgcaaagcatccatgaccgttgtgccgaaaccgccgatgaatatggcgccccgggcgattacgttctgggtgccaatatcgcaggcttcgtgcgggtcgccgaagcgatgcgaatgctgggggtgatctgag

SEQ ID NO: 219435 - DNA, 808 bp, Unknown
  Bacterial polypeptide expressing nucleotide sequence isolated from the Sargasso Sea
gcattaaaagcgttttttgatcacccaaaagatgtcgaaaaaactggtttaagtcagggtttagctggtaagaaaataattgttcaaggtttgggtaacgttggttatcatgcggcactatttttatctgaagaggacaaatgtttgattacccatgtaattgagagagatggctcaattattaattcaaatgggatagatattaaagaattaaaaaattatattattactaatggaagtgttaaggggtataaaggttttgtagacaaaggttctgaaattcttgaagaagaggcagatattcttataccagctgccatggaattggtcattaatgaaacaaatgcaaatcgaattaaaacaccactaataattgaggcagcaaatggacctgtgtcttcaaatgctgatgaaattttaaataaaaagggaataatcataattcctgatctttatgcgaatgctggtggggtaacagtaagttattttgagtggataaaaaatttaagtcgtatcaggcttggtagactccaaagaagagctcaggaaaatcaaatcaatgtattaatccaagctatggaaaatatgactggaaaaaattttcctgaagaatataaagaacaagctatacagggtgcttctgaggttgatttagttaggtcaggcttagaagatacaatgagaaattcttatgcagtcataagtgatgtatggaataaaaataaaaatgtatcagatttaagaactgctgcaatgatggtagcagtaaaaagagttgctcaaagttattcttctttaggaatttaaa

SEQ ID NO: 219436 - DNA, 685 bp, Unknown
  Bacterial polypeptide expressing nucleotide sequence isolated from the Sargasso Sea
gatgtgaatacaaacccccagataatggcttggtttatggatgaatacggcatgattaatgggcatactccaggaattgttactggaaaacccgtagaactcggagggtcattgggcagaaatgctgcaactggtagaggtactgcaataattgctcgtgaaacagcaaatcttttaaacatggatttaaatggagccaaagttgttattcagggttttggtaacgtagggtcttttgcaggaaaatttttgaatgagatgggttcaaagatcattgctgttagcgatgtgaatggtggtttatttgaccttgaaggtcttgatataccatctttgattaaacataatgaaaaaaataaaaccattaaaggtttttctcagggcaaggcaatttctaatgatgagattctaaatatagattgtgattttttaattcccgctgctcttggaggggttattcataagatgaacgtcgataagctaaattgtaaagtcattattgaagctgcaaatggacctgttaccccaccagcggatgatatattatttaaaaaaggtattcacgtggttcctgatattttaacaaacgcaggaggggttacggtatcttattttgaatgggtacaaaatcttcaacaatttcaatggacagaagatgaagtaaatgctaagcttgaagacaaaa

SEQ ID NO: 219437 - DNA, 223 bp, Unknown
  Bacterial polypeptide expressing nucleotide sequence isolated from the Sargasso Sea
aatgctggaggtgttactgtatcttactttgaatgggttcaaaatctgcagcaatttaaatggactgaggatgaggtaaataagaaacttgaagacaagatggtgcgtgcattccatgaggtttattctatgaaaaaagaacggggtgttgctatgagaattgcatcattcatggtttctattgacagagttcacagtgcttacaacttaagagaaggataaa

SEQ ID NO: 219438 - DNA, 939 bp, Unknown
  Bacterial polypeptide expressing nucleotide sequence isolated from the Sargasso Sea
ggtgggatcagatatgatttagatgtaaaccaggaagaagttgaggcactggctgctttaatgacatataaatgctccctagtagaagttcctttcggtggatctaaaggaggcttaattattaatccaaaggaatggaacgaacaggaattagaaaaaataactcggcgttttacccaagagttagctaagagagatttaattcatccttctcaaaatgttcctgctcctgatgtaggcacaggagaaagagaaatggcttggatggctgatgagtacagaagattgaatccaacagacctaaatgcttgggcatgcgttacgggaaaacctgtaaataaaggtggtatttcaggaagaacagaagcgacaggtagaggtgtaaaatatgcactaaatgctttttttgatacagctgaagatgttaaaaaaactagccttacaccaactttaaaaggtaaaagggttattatacaagggctcgggaacgttggctatcatgcggcactgtttctctctaaagaagacaatgcaattattactcacgtcttagagagagatggtggaatagttgatgaagatggcattgatgttatagcgcttcgtcagcatattgtatctactggatctataaaggacttcaaaggatacataaaggcaggttcagagcttctagaagctgaagctgatattttaattccagctgcaatggaattggttataacaaaagataatgcatccaaaattaaggcacctatagtagttgaagctgcaaatggccctttatcagcagatgctgatgaaatacttaataagaaaggtaaagtaatcattcccgacctttacgctaatgcgggtggtgttacggtaagctattttgagtggataaaaaacctgagtagaataaggtttggtcggctacagagacgggctcaagaa

SEQ ID NO: 219439 - DNA, 881 bp, Unknown
  Bacterial polypeptide expressing nucleotide sequence isolated from the Sargasso Sea
cgccggcggcatcgcggcccgggtcgaggccacggggcgcggggtgcaatacgcgctgcgcgagttcttccgccaccccgaggacgtgcgcgcggcgggcctgtccggcaggctcgacggcaagcgggtggtcgtgcaggggctcggcaacgtcggctaccatgccgccaagttcctgtccgaggaagacggcgccctgatcaccgggatcatcgagcacgacggtgcgctctacgaccccaaggggctcaacgtcgaccgggtgcgcgactggctggtgcgccacggcgggctgcagggctacccggaggccaacagcgtggccgacggcgaggtcgtgctgacctcggagtgcgacatcctcgtgccggcggcgctggagggggtcatcaacctttcgaacgcgcaccacatcaaggcgaatctcatcatcgaggcggcgaacgggccgatcacggccggtgccgacgacatcctgcgcgggcgcggcacggtcatcattcccgatctctacgccaacgccggcggcgtgacggtcagctacttcgaatgggtcaagaacctcgggcacatccgcttcggccggttgcagcggcggcaggaagaggcgcgccaccagctcgtgctcgacgagctcgagcgcctcgacaccgccatgggggatgcgtggaacctctcgcccgagttccgcgagaagtatcttcgcggcgccgacgagctcgagctggtgcgctctgggctcgatgacaccatgcggatcgcctaccagtcgatgcgcgaggtctggcatgggcgcgacgatgtcaccgatctgcgcaccgccgggttcatcgtcgcgatccagcgggttgcgcagagctaccgcgccaaggggctctgac

SEQ ID NO: 219440 - DNA, 604 bp, Unknown
  Bacterial polypeptide expressing nucleotide sequence isolated from the Sargasso Sea
catggctttaaaaactcatttagacgagactgggaccataaaagattttaatggttttgttgatcaaggatcagagtctttggaagcagaggcagatattttgataccagcagcaatggaattggtgataaccaaaaaaaatgttgatagaataaaagtcccattaataatagaggccgctaacggacctattgcttcggatgcagatgaaatcttaagtaagcgcggggtggttataattccagatctatatgctaatgcaggaggggttacagtaagttattttgaatggataaagaatttaagccgaatccgattaggtcgtcttcaacgacgctctcaagaaaatcaaatatcaatacttttggatggaatagaagccatgactggtaagtctttttcggaagaaactagaatcggttcaataaaaggtgcgtctgaattggatttagttagatcgggtctagaagatactatgattagtacatacgaaactattagcgaggtctggaacaatgaggagtttgcttcagatttgaggactgcagccatgatggttgcagtgaatagagtagtacaaagctactcttctttaggtatttag

SEQ ID NO: 219441 - DNA, 706 bp, Unknown
  Bacterial polypeptide expressing nucleotide sequence isolated from the Sargasso Sea
ggcttccatgcatctttatttctctctgaagaagacaaatgtatagtgaccacagtaattgagagggatggtgtggtttataatgaaaaaggaataaatattcgtgaacttaaacatcatatgcaacaaacaggagggacaaaaggttttgatggatatcaagatggaggaaaagaatatcttctcaatgattgtgagatcctgatccccgccgcaatggaaggagttataacaaaagaaaacgccaacaaaattaaagcaaatttaattatcgaggctgcaaatggcccaattacatatcatgcagataaaattctagagaaaatgggtgtagtaattattccagatatgtatgctaatgctggtggtgttactgtatcctattttgaatgggttaagaacctcactcatataagatttggtcgaatgcaaagaagagaagttgaaaagcagaacttgtcaataattgaagcagtagagaaaatgacaggcaaaaacttcccatcagaattgagaaataatgtgatgcaaggtccaacagaattatctttggttagatcaggattagatgatactatgagaattggatacaaagctatgagtgataaatttcactccagtgaaaaaattaaaagtttgagaatggcttcaatgataatagcgatagaaaaagtgtcagaagcttacgtgtctcttgggatataat

SEQ ID NO: 219442 - DNA, 1405 bp, Unknown
  Bacterial polypeptide expressing nucleotide sequence isolated from the Sargasso Sea
tatgacgaataaatttctatcagacacaactaaatacgtggataaagctcttaaattcacaaatttatctgatggtttggcgaataaaataatcacgtgtaattcaacttatactgttcgattcggggttaggcttagaggagaaatatttacatttgaaggctggcgctctgttcactctgaacatatggagcctacaaaaggcggaattaggtttgatatggctactcacgcagaagaagttgaagctttagcagctttaatgtcatataaatgcgcaattattaatgttccttacggcggttcaaaaggtggtcttaaaattgatccttcaaagtgggaaaagagagaattagaaaaaattactagaaggtttgcacaagaattgattaaaagagacttaataagtccgtctatgaatgttccagcacctgatattggaacatcctcaaaagaaatggcatggattgccgatgagtatagaaaaatacatcccgcagatattaatggtgcagcatgtgttacaggaaagccagagaataagaacggtcttgtaggaagagaagaagctacgggtagaggtgtacaatttataataagagagttttttagaaatcctgatcttcttaaaaaagtaaaactcgataacgacctttcaacaaaatccgttattttgcaagggtttggaaatgttggataccatgcttcaaaattcctaacagaagatgatggtgtaaagttaattgccattgctgaacataacggcggtatatacaacaaagatggcataaatgttgaacatgcaaaaaaatattttgttaagcataagtcttttaaaaattatccaaaagctgactttgttaaagactcatccctattaattaaaagaaaatgtgacattttgattcccgctgcaagagaaaatgtcataactgaaaaaaatgcagcagatatatctgcaaatttaatagttgaagctgcaaatggcccaattagttataaagggaatcaaatattaaacaaaaataaaaaatttattatccctgacattcttgcaaatggtggtggtgttgctgttagttattttgaatgggtaaaaaatataaggcatataagatttggtagattggaaaaaagaaggaatcaacttcaattaaataatctaatagaagcgattgaaactatgacgggtaagacgatgccaaaaaaatataaagataagtttgctaatggtatcgaagagatagatttagttagatccggattggatgacatgatgattgatggatttcaaagtgtaaaaaaagtattcttagagaataagaaaattcctgattttagaactgcggcatttaaaactgctatagaaaaaatagctctttcttatgattttattgggctctaa

SEQ ID NO: 219443 - DNA, 1402 bp, Unknown
  Bacterial polypeptide expressing nucleotide sequence isolated from the Sargasso Sea
atgaataattttttattagatactaataagtatgtaaataaagctcttaagtactctgggctgtctgatgatttagcaaataaaattattacctgtaattctacctatactgtgagattcggtgtcaggcttagaggaaaaatctttacgtttgagggttggcgctccgttcattctgagcatatggaacctacaaaaggtggtattaggtttgatatggatactcacgcagaagaagttgaagctctcgctgcgttaatgtcatacaaatgcgctattatcaatgtaccatacggtggatctaaaggtggactcaaaatagacccgtctcaatgggaaagcagagagttagaaaaaattacaagaaggtttgctcaagaattaataaaaagagatcttataagtccgtccatgaatgttcctgcgccagatattggaacctcttcaaaagaaatggcatggattgctgatgaatatagaaaaatacacccagcagatattaatggatcagcatgcgtgactggaaagcctccaagcaaaaatggtcttgtgggaagagaagaagctactggaagaggagttcaatacattgtaagagaattttttcgcaatccggatttgttaaaactagtaaagcttgataacgatttatcaactaaatcatttatattgcaaggttttggtaatgttggttatcacttgtcaaaattccttacagaagatgatggtgtcaagcttattgggatttcagaattcaacggcggcatttataacgaagatggaataaatgttgaacatgccaaaaaatattttactaaacataattcatttgaaaattatcctaaagctacttttataaaggattcatctttactgctaaaaagaaaatgcgatattttaattccagctgctcgtgaaaatgttatcactgaaaaaaatgctgaagatatttctgctaatttgattgtagaagctgctaatggccctattagttacaaaggcaatcaaattttaaatagaaaaaaaatattcgttattccagacatacttgctaatggtggaggtgtggctgttagttactttgagtgggtaaaaaatcttaggcatattagatttggtaggcttgaaaaaagaagaaatcaaatccagctaaataatttgattgaagcgattgaatcaatgacaggcaagactatgcctgcaaaatacaaaacaaactttcataatggtatagaagaaattgatttaattagatcaggtttagatgatatgatgattgatggtttccaaactgttaagaaagagtttattgaaaccgataagataaccgatttcagaactgcagcattcaaagcagcaatagaaaaaattgcactgtcatacgactttataggtttataaa

SEQ ID NO: 219444 - DNA, 1281 bp, Unknown
  Bacterial polypeptide expressing nucleotide sequence isolated from the Sargasso Sea
catgtctactaaagaatttttaaaatcagttgatacaatctttgatgatgctgccaagttattaaaattaccttacgggcttgctaacaagataaaacttgcaaattcaacatatactgttcgatttggtgtaaagttaaaaggaaaaatctatacatttacaggttacagatctgttcattcagagcatatggaacccgtaaaagggggtattagatatgcatcttatgctgatcaagatgaagttgaggctcttgcagcgttaatgtcgtataaatgtgctttgatggaaataccatttggcggatcgaaaggtgctttagtaataaatccctacgaatggggtgaaagtgaattagagaaaataacaaggagattcactcaagaattagccaaaagagatttaattcacccttcacaaaatgtgcctgcgccagatatgggcagtggtgaaaaagaaatggcatggatcgcagatgagtacagacgcttaaacccatctgaaatcacagcaagggcttgtgttactggaaaacctgtaaataaaggtggcatttcaggaagagttgaagcaacgggaagaggtgtgcaatttggactacgagaattttttcgtaataaaaatgatgttaaattagctaaacttgatggttctcttgagggcaaaagagtaatcatacaaggatttggaaatgttggttaccatgcagcattatttctgtctgaagaagataatgccaaaataactactgttattgaaagagatggagttatttacaatgagaacggaataaatataagagatttaaaaaatcacatgattgaaacagggggaacagtaggctttgaaggatataacaaatctaatactaaatttttgtttaatgattgtgaaattttaattcctgcagcaatggaaggtgtgattaccaaagaaaatgccaatttagttaaagctaatttaattatagaggcagctaatggacctattacatatgaagcggacaaaattttagaacaaaatggtgttgttattattcctgatatgtacgccaacgctggtggtgttacagtctcatattttgagtgggtgaaaaaccttacacatataagatttggccgtatgcaaagaagagaagttgaaaatcaaaatttgtcaattataaaagctgttgaaaaaatgactgggaaagaatttccagatgatttgaaggctagtgtaatgcaaggcccaacagaattatctttagtgagatctggtttggacgacacaatgagagc

SEQ ID NO: 219445 - DNA, 1402 bp, Unknown
  Bacterial polypeptide expressing nucleotide sequence isolated from the Sargasso Sea
aatgaataatttcttatcagatacaactaagtacgttaacaaagcacttaaatattctgatatgtcagcaggtcttgcaaataaaataataacttgtaactcaacctacacagtaagatttggcgtcagacttcgaggacaaatttatacctttgagggatggaggtctgtgcattcagagcatatggagcctaccaaaggtggtattaggtttgaccttgctacaaatgcagatgaagttgaagctctagcagctttgatgtcatataagtgtgcaatcataaatgttccatatggtggatcaaaaggagccctaaaaataaatccaaattcatgggatgtgaaagagcttgagaaaattacacgaagatttgcacaagagctcataaaaagagatttaataagtccgtctatgaatgtacctgctccagatattggaacctcatcaagggaaatggcatggattgcagacgaatatagaaaaattcatccatcagatattaatggatctgcatgtgttactggaaaaccaacgagcaaaaatggtcttgttgggagagaggaagctaccggaagaggcgtacagtttattgtaagagagttttttagaaatcctgaattactaaaaaaagtaaagcttgatgaagatttatcaacaaagtcattcattcttcaaggttttggaaatgttggttatcatttatcaaaatttttaacagaagatgatggtttaaatctaattggaattgctgaatacaatggcggtatatttaatgaaaatggaataaatgttgaacacgcaaaaaaatattttgataaacataattcttttgaaaattattcaaaagctacctttgtaaaagattcaacattacttctaaaaagaagatgtgacattttaatccctgcagcaagggaaaatgtcattacggaaaaaaatgcttctgatattcttgcaaaactaattgttgaggctgccaatggaccaataagctataaaggtaatcaaattttgaataagaaaaaagtttttgtaatacctgatattctcgcaaatggtggaggtgttgccgtgagttattttgagtgggtaaaaaatcttaggcatattaggtttgggagacttgaaaaaagaagaaatcaaattcaattaaacacacttattgaagctattgagacaatgacaggaaaatctatgcccgaaaagtataaagaaaaatttgttgatggtattgaagaaatagatttaattagatcaggtcttgatgacatgatgatcgacggttttcaaaacgtgaaagaagaatttcttaaaaatgaaaaaatatcagattttaggactgcagcatataaaaccgcaattgaaaaaattgcgctatcttatgaatttatcggtttgtaa

SEQ ID NO: 219446 - DNA, 1423 bp, Unknown
  Bacterial polypeptide expressing nucleotide sequence isolated from the Sargasso Sea
atggcaggagacgagtttttaaattcaattgaaacaaattttaaaaaagctataaattgtctgcaaaaatcggaaggtggtaaattcattactgaggatttagcaaatcaaattatgatggctaatgctacttacgtagttcgttttggggtaagattaagaaattcaatatacacatttacaggttacagatctgttcattctgaccattttgaacctgttaaaggtggtattagatatgatatggctgttaatcaagaagaagttgaagctttagcagcgctaatgacctataaatgttctcttgttgaagtcccttttggtggttctaaaggtggattaataattaacattcgtgattggaacgaagaagagatggaaagaattacaagaagatttacgcaagagctagcgaaacgtgatttaatccatccatctcaaaatgtacctgcaccagatgttggtactggggaacgtgaaatggcttggatggcagatgaatatagaagattaaatccaactgatctcaatgcttgggcatgtgttactggtaagcctgttaataaaggaggcatatcaggtaggactgaggcaactggtagaggagtagaatatgctttgaaagctttttttgacaatcatgaagatgttaaaaaaacagggttaacctctggattagtgggtaaaagagtaatagtacaaggtttaggtaatgtcggttatcatgccgcattatttttatcgaaggaagatgaatgtttgattacacatgttattgaaagagatggttccatagtaaacaaggatggaattgatatcgaagatctgaaaaaccatattgttaaaaatggaagtgtaaagggctatcaaggttatacatcaaaaggttcagaaattttagaagaagatgcagatattttaatcccagctgctatggaactagtaattaataaagaaaatgctaacagaattaaaactccacttattattgaggcggctaacgggcccgtttcctctgaggcagatgaaatacttaataaaaaaggagtggtaattatacccgacctctatgcaaatgctggtggtgttacagtaagttactttgaatggattaaaaacttgagtagaataaggttaggtagacttcaaaggcgcgctcaagaaaaccaagttaacattcttgttgaggcaatggaaaaaatgacaggaacagactttccagaaggatataaagaaatggcaattaaaggatcatcagaacttgatttagttaggtcaggtttagaagatactatgagaaactcttatcaagtaatcagtgatgtttggaacaacgacgaaaatgctaaagatttaagaacagctgcaatgatggttgcaattaaaagagtagctcaaagttatacttcgcttggaatgtaaa

SEQ ID NO: 219447 - DNA, 1261 bp, Unknown
  Bacterial polypeptide expressing nucleotide sequence isolated from the Sargasso Sea
atggcaagtgatgcatttttaaattcaattgaagtaaatttcagaaaagctgtaaaatgtttgcaagacactgatggattagaatttttaagttctgatttagctaaccaaataatgttagccaactcaacttatacagtaagatttggagttaggcttaggggtacaatgcatacttttgttggttatcgttcagtacactcagatcattttgaaccggtaaaaggtgggattagatatgatttagcggttaatcaaggggaagtagaagctcttgctgcactcatgacatataaatgtgcactagttgaagtaccttttgggggatctaaaggaggattaataattaatcctagggattggaaaccagaagagttggaaagaataactaggcgatttgcccaagagttagctaaaagagatttaatgcatccttctcaaaacgttccagctcctgatgttggcactggtgaaagagagatggcatggatggctgatgaatatagacgcctaaacccaacagatttaaatgcctgggcttgtgtgactggaaaaccagtaagtaaaggtggaattgcggggagaacagaggctacgggaaggggtgttcaatatgcccttagagctttttttgataatgaaaatgatttaaaaaaaacaggtttaagttctgggttaaagggcaagagaataattgtccaaggtcttggtaatgtaggttttcatgcagcattgtttttatctttagaagataaggctctaattacgcatgtattagaaagagatggttctattgtagatgaaaatggaattaatattgagctgttaaagcaacatatagttgcaaaaggttccataaaaggattccctggctaccaagaatctggaaatgaaatgttagaagctgatggtgatattttgatacctgcagccatggaactggtcattactgagaaaaatgctgaacgtataaaaacacctttaataatagaagcagctaatggacctgtttcagctgaggcagatccaatacttgatgccaaaggaataattattataccagatttgtacgcaaatgctggaggagtaacagtaagctattttgagtggattaaaaatttaagtagaattaggctaggacgcttgcaaaaaagggctcaggaaaaccaaatttcacaattagttgatggaattgaaaatcttacaggaaaatcattcaatgacgattttaggacagaatttagttcaaggagcctctgaa

SEQ ID NO: 219448 - DNA, 1267 bp, Unknown
  Bacterial polypeptide expressing nucleotide sequence isolated from the Sargasso Sea
tggacaaatttatacctttgagggatggaggtctgtgcattcagagcatatggagcctaccaaaggtggcattaggtttgaccttgctacaaacgcagatgaagttgaagctctagcagctttgatgtcatataagtgtgcaatcataaatgttccatatggtggatcaaaaggagccctcaaaattaatccaaattcatgggatgagaaagagcttgagaaaattacacgaagatttgcacaagagcttataaaaagagatttaataagtccgtctatgaatgtacctgctccagatattggaacctcatcaagggaaatggcatggattgcagacgaatatagaaaaattcatccatcagatattaatggatctgcatgtgttactggtaaaccaacgagtaaaaatggtcttgttgggagagaggaagctactggaagaggcgtacagtttattgtaagagaattttttagaaatcctgaattactaaaaaaagttaagcttgatgaaaatttatcaacaaagtcattcattcttcaaggttttggaaatgttggttatcatttatcaaaatttttaacagaagatgatggtttaaatctaattggaattgctgaatataatggcggtatatttaatgaaaatggaataaatgttgaacacgcaaaaaaatattttgaaaaacataattcttttgaaaattattcaaaagctacctttgtaaaagattcaacattacttctaaaaagaagatgtgacatcttaattcctgcagcaagggaaaacgtcattacagaaaaaaatgcttctgacattcttgcaaaattaattgttgaggcagccaatggaccaataagttataaaggcaaccaaattttgaataaaaaaaaggtttttgtaatacctgatattcttgcaaatggtggaggtgtggccgtgagttattttgagtgggtaaaaaatcttaggcatattaggtttgggagacttgaaaaaagaagaaatcaaattcaattaaacacacttattgaagctattgagacaatgacaggaaaatctatgcctgaaaagtataaagaaaaatttgttgatggtattgaagaaatagatttaattagatcaggtcttgatgacatgatgatcgacggttttcaaaacgtgaaagaagaatttttaaaaaatgaaaaaataccagattttaggactgcagcatataaaactgcaattgaaaaaattgcgctatcttatgaatttatcggtttgtaa

SEQ ID NO: 219449 - DNA, 844 bp, Unknown
  Bacterial polypeptide expressing nucleotide sequence isolated from the Sargasso Sea
gtcacgctgtcggaagtgatggcgttgtctgcctggatgtcggtgaagaatgcggccgtgaatgtgccgtacggtggtgccaagggcggtatccgcgtcgacccgcgcaagctgtcttccggtgaacttgaacgcctgacgcgccgctacacgagcgagatcggcatcatcatcggtccgaacaaggacattccggctccggacgtgaacaccaacgcgcagatcatggcgtggatgatggacacgtactcaatgaacgaaggctccaccgccaccggcgtggtgaccggcaagccgatcgcactgggcggcagcctgggccgtcgcgaggccaccggccgaggcgtgttcgtggtcggcagcgaagccgcacgcaatctcggcatcgacgtcaagggtgcgcgcattgtggtgcagggcttcggcaacgtcggcagcgtggccgccaagctgttccacgacgccggcgccaaggtcattgcggtgcaagaccacaagggcatcgtgttcaacggcaacggcctggatgtcgacgcgctgatccagcacgttgaccacaacggcagcgtggccggctttgcggcagagaccgtctcgcaagacgaattctgggcgctggagtgcgaattcctgatcccggccgcgctggaaggccagctcaccgctaagaacgcgccccatatcaaggcaaaaattgtcgtggaaggtgcaaacggcccgacgacgcccgaggcggacgacatcctgcgcgaccgaggcatcctggtctgcccggacgtgatcgccaacgccggcggcgtgacggtcagctacttcgagtgggtgcaggatttctcgagcttct

SEQ ID NO: 219450 - DNA, 553 bp, Unknown
  Bacterial polypeptide expressing nucleotide sequence isolated from the Sargasso Sea
aatgaataaaataattaaccaatttttagctgaaattgataaaagaaattctcacgagccagaatttatgcaagccgttaaagaggtttctgaagatttgatcccatatatagttagccaagatatttatcatggtaaaaacattttaatgaggatggttgagccggaacgagttgtaatgtttagagtaaattggattgatgataacggtgaaattagagttaacagaggatatagagttgaaatgaactcagcaatcggtccgtacaaaggaggattaagatttcatcccagtgttaacctaagtattttaaaatttttagcatttgaacaagtttttaagaatagtttaacaacacttcctatgggtggtggtaaaggaggagcagattttgatcctaaaaataaatcagatggggaagtaatgagattttgtcaaagctttatgacagaacttttcaggcatattggtcctaatactgatataccagctggagatataggggttggaggaagagaaattggaatattatttggaccatataaaaggtga

SEQ ID NO: 219451 - DNA, 556 bp, Unknown
  Bacterial polypeptide expressing nucleotide sequence isolated from the Sargasso Sea
atgaaaaaaattatagaaaaatttattaatcaagttgaatcgagaaataaaaacgaaccagaatttttacaagcagtaactgaagtagctgaaactgttatcccatacattgttaaaaacgatatatattacggccaaaatattttgctaagaatggtagagcctgaaagagtaatttcatttagagttgcatggattgatgattttgaacaaattcaagtaaatagagggtatagagttgaaatgaattctgctattggtccatacaaagggggcttaagatttcatcccagtgtaaatttaagtatcttaaaatttttagcttttgaacaaattttcaaaaatagtcttacaactcttccaatgggaggaggtaaaggaggttctgattttaacccaagaggaagaactgatactgaagttatgagattttgtcaaagcttcatgacagaattgttcaggcacataggcccaaatagagatatccctgctggagatattggtgttggtagcagagagataggttttttatttggacaatataaaagattaaaaa

SEQ ID NO: 219452 - DNA, 688 bp, Unknown
  Bacterial polypeptide expressing nucleotide sequence isolated from the Sargasso Sea
cgttataccagcgaaatcggcattatcattgggccgcagaaagacattcctgcgccggatgtaggtactaacggaaaagtcatggcctggatgatggatacctactccatgaaccacggcaccaccgtgaccagcgtggtcaccggtaaacctattcaccttggcggttcattaggtcgtgataaagccaccggtcgcggcgttttcgtcagcggtctggaagtcgcgcgccgtgccaacatcgaagttgaaggtgctcgcgttgcagtgcaaggttttggtaatgtcggcagcgaagcagcccgactgttcgcggcagctggtgcacgcgtagtcgcgattcaggatcacaccgctacgctgtttaactccacaggtatcgacatgaccgcgttgtctgcctggcagttagagcacaaacagattgccggtttcccgggcgctgaaaccatcgccagcgaggccttctggagcctggatatggatattcttattccggccgcgctcgagggtcagatcacccgtcaccgtgcggaaaccttgacctgtaaactggtacttgaaggcgctaacggcccaacctatccggatgccgatgatgtgctggcaagccgtggtatcgtggttgtgcctgacgtggtctgtaacgccggcggcgtaaccgtcagctacttcgaatgggttcagg

SEQ ID NO: 219453 - DNA, 512 bp, Unknown
  Bacterial polypeptide expressing nucleotide sequence isolated from the Sargasso Sea
aatgtacaactcgattgaagattttatgaataaagtcaagcataaagaccctaacgaaactgaatttcatcaagctgttcatgaggttgttgaatcactttggagctttttggcctctaatagagaatatatgcactctggagttttggatagaatagttgagccagaaagagtaattactttcagagttccttggagagatgatagaggtcaggttaatgtgaaccgtggctacagagtagaatttaattcagctattggtccttataaaggtggattacgttttcacccatcagttaatctaagtattttaaaatttttgggatttgaacaagtatttaagaatagtttgactaccctgccaatgggagggggaaaaggtgggtctgattttgatccaaaaggcaaaactgataacgaagtaatgagtttttgtcagagcttcatgttagaattatctaagcatataggcccggataccgatgtgccagcaggagacattggtgtaggaa

SEQ ID NO: 219454 - DNA, 784 bp, Unknown
  Bacterial polypeptide expressing nucleotide sequence isolated from the Sargasso Sea
gtcgacccgacggcgctatccgacagagagctggagcggttgacccgccgctacacttgtgaaatcagccgggtgatcggtccccggcaggatattccggcgccggacgtcggcaccaacgcccaggtcatggcctggatgatggatacctggtcgcgtcatgccggaatcgccgcgaccggcgtggtgacggggaaaccggtccacctcggcggctcgctggggcgggtgcaggccaccgggcgcggcgtgtttatcaccggctgccacatcgcggaaaagctggggctgtgcgtggcgcaaagccgggtcgccgtgcaggggtttggcaacgttgggagcgtcagcgccgggctgtttcatgccgccggcgcgcgggtggtggccgtacaggatcatcgcgcgacgctgtatcagcacgacggcctcgatattccggcgctgcaggcgtggcagcaggctcacggcacaatagccggtttcccgggcgccgatagcgtggcggacgaggctttctggagtctcggctacgagatactgattccggcagcgctggaggggcagattagcgcggagcgcgccgccggtctgcgctgtcgcctcattctggagggggccaacggcccgacgctgccggaggccgacgatgtgctggctgagcgggggatcgtgctggttcccgacgtgattgccaacgccggcggggtgacggtcagctatttcgaatgggtgcaggatttctccagcttcttctggagcgaagaggagatcgatgcgcggctgg

SEQ ID NO: 219455 - DNA, 661 bp, Unknown
  Bacterial polypeptide expressing nucleotide sequence isolated from the Sargasso Sea
ttcaatagagggcaaagatgttttagtgtcagggtctgggaatgttgcccaatatgcttctgagaaagttctccaccttggagggaaagtagttactttatccgattcttcaggtttcatttatgacccagaagggatttcaaaagataaacttgattgggtgattgatttaaaaaataataaaagaggaagaattaaagaatatgctgaagaatttggctgtgagtattttgagggcttacgtccttggggcattagctgcgatatagccttgccatgtgctacccaaaatgagataaatgagtcaaatgcgaaagacatggttaaaaatggaataattgctatttgtgaaggtgcaaatatgccatctgaccccgatgcaattaatatttttcaaggttcaaaggtattgtttggacctgggaaagctgccaatgccggcggtgtagcggtatcaggacttgagatgagtcagaacagtatgcgaatcagatgggaaagagaagaggttgatcaaaaacttttgacactcatgaaaagcattcactctgcatgtgtagttcatggtgataataagaagcatattgattatgttaagggcgcaaatgtttctggatttattaaggtggctgatgcaatgatggatcagggagtcgtataa

SEQ ID NO: 219456 - DNA, 709 bp, Unknown
  Bacterial polypeptide expressing nucleotide sequence isolated from the Sargasso Sea
gacatggaagttatgcgcttttgtcaatcatttatgaatgaacttttcagacatattggagctaatgttgatgttccagcaggagatatcggcgtaggtggaagagagataggttatatgtttggacaatacaagaaattaacacgtaagtgggaaggtgttctaacaggaaaaggatatggttggggaggttcattgattaggccagaagcaacaggctatggtcaagtttatttcttgagagagatgctagcttctaaaggaaatagtattgaaggtaaaaaatgtgcaatatcgggtagtggtaatgttgctcaatattgtgctaaaaaggtcttaagttatggtggtaaagttatcacaatgtctgattcaggtggctatatttttgataaagatggaattgatgaagacaaattagcgtggattatggatttgaaaaataataggcgtggaagaatcaaagaatatgtttcagaatatactggagcagtatatcgtgaaggtaagagaccatggggagaaaattgtgacatcgctttaccaagtgcaactcaaaacgagattgaagaaaaaggtgctaagaatttggtcaaaaatggttgccttgctataagtgaaggtgcaaatatgccaacttcaccagcagcctatggaattttaagtaaagcaggtatcttgtttggtccagctaaagcagctaatgcag

SEQ ID NO: 219457 - DNA, 908 bp, Unknown
  Bacterial polypeptide expressing nucleotide sequence isolated from the Sargasso Sea
taatattcgggttaatcgtggctacaggatacaaaataataacgcaatcggaccatataagggcggcattcgatttcatccatcagtcaatcaatctatcctaaaatttcttgctttcgagcaaactttcaaaaactcactcacaggcctgccgatgggtggaggtaagggtggggcaaactttaaccccaaaggaaaatcagaaaacgaagtcatgcgtttttgtcaatcattcatgacagagctgtatcgccacattggtgccgatgtcgatgtgccagcgggtgatattggcgttggcgcaagagaaattggctatatgtttggacagtataagagaataacaaaccaatttacgggtgtcctaacaggcaagggtatagaatacggcggaagtgaaatgcggccggaagctacgggttatggggcggcttatttccttgaggaaatgcttaaaacaaaaggtgacagtatagaaggcaagaatgttttaatatctggatcaggtaacgttgctacttttgcggcagaaaaaattaaccacagaggtggtaaggttctgacattatctgactctgccggatttatttttgacaaagatggtattaatgaggaaaaactgcagtgggtaatggagctaaagaacgtccggagaggcaggatttccgagtacgcagaaaaattcagcagtgctgaataccatgccgggaaacgtccctggggcatagcagccgatttagcgatgccatgtgctacgcaaaatgaaattttagaggacgatgcaaaaacaatgttatcaaacggcgtaatagctgtctcagagggcgctaatatgcccactgtgatcgaaggaatacatcattttctaaaggcaaaaatactttttgctccagctaaggcagcaaatg

SEQ ID NO: 219458 - DNA, 1315 bp, Unknown
  Bacterial polypeptide expressing nucleotide sequence isolated from the Sargasso Sea
atgtcatcccagcaacaagccgcacaatccgcatcaacgttgcagtccgttccttcctacctgaataaagacgacctcggcccgtggggcaactacctgcgtcaggtcgaccgcgtcgcgccgtacctcggctccctgtcccgctggctcgaaaccctgaagcgcccgaagcgcattctggtcgtcgacgtgccgatcgaactcgataacggtacggtggcgcatttcgagggctatcgcgtgcagcacaacgtgtcgcgcggtccgggtaagggcggtgtgcgctatcaccaggacgtgacgctgtcggaagtgatggcgctgtcggcgtggatgtcggtcaagaacgcggccgtgaacgtgccgtacggcggcgcgaagggcggtattcgcgtcgacccgcgcaccttgtcgcgtggcgagctggagcgcgtgacgcgccgctacacgagcgaaatcggcatcatcatcggaccgaacaccgacatccccgcgccggacgtgaacacgaacgagcagatcatggcgtggatgatggacacgtactccatgaaccagggccaaacggcgacgggcgtcgtgaccggcaagccgatcgcgctgggcggttcgctgggccgtcgtgaagcgaccggccgtggcgtgttcgtggtggcttccgaagcggcgcgccgcatcggcgtcgacatcgaaggcgcgcgtattgccgtgcagggcttcggcaatgtgggcggcattgccgcgcgtctgttccaggaagcgggttcgaagctggtggcggtgcaggatcacaccggctcgctgtacaagtcgaccggtatcgacgctgtcgcgctggcggattacgtggcgaagaacggcggcgtgggtggtttcccggaagccgatgccgtcacgaatgaagaattctggacggtcgaatcggacatcctgattccggccgcactggaaaaccagatcaccgaaaagaacgccggcaagatcaagacgaagatcgtcgtggaaggcgccaacggcccgaccaccacggcagcggacgacattctgcacgaccgcggcatcctcgtgattccggacgtggtggccaatgccggcggcgtgacggtgtcgtacttcgagtgggtgcaagacttctcgagcttcttctggactgaagacgagatcaaccagcgtctcgagcgcgtgatgcgcgaagcatttgccgccgtgtggcaagtgtcgagcgaacagaaggtgtccgtgcggaccgcggcgtttattgttgcgtgtaagcggattctcgaagcgcgcgaactgcgcggcctgtacccctgat

SEQ ID NO: 219459 - DNA, 1018 bp, Unknown
  Bacterial polypeptide expressing nucleotide sequence isolated from the Sargasso Sea
tggtccctataagggcggaattagatttcatccttcggtaaacgagtcgatattaaaatttttagggtttgaacagacttttaaaaatagtctgactggacttccgatgggaggtggtaagggtggttcgaattttaaccctaagggtaagaccgacaatgaagtcatgcgtttttgccagtcctttataacagaactttatcgtcatatcggagaagatacggacgttccggctggagacataggggtcgggggaagagaaattggctatatgtttggacaatacaaacgaatcacaaatcgttttgttggagtgttaaccggcaagggaattgagtttggaggttcgaagatgaggaccgaggctactggctatggggcaatattttttctgcgcaatatgctggaacaacataaagaatcgatggaaggtcagcgagtattaatatctggctccggaaatgtggctacccatgcagcggaaaaatgtttgcagcttggggcaaagcctttgacattatctgattctggaggatttgttcactgtgccgatggttttacccaagaacagatcgattgggttaaagagcttaaaaatgttcgtaggggtcgtatatctgaggctgctgatgagtttaaaaatattgattttagtgagggaaggccttggggtgttgagggagattgtgctgttccatcggcaacccagaatgaagttgatggaaaagacgccaaaatattgatgaagaacggggtgaaagccgttgctgaggccgcaaatatgccatgtgagcaagatgctgttgacgcctttgtagatggcggagttatgttcgggcccgctaaagcagtaaatgctgggggagtaggtgtttctggtctggaaatgagccagaatagtgctcgcatagcttggagtgaagacgaattaagaaaattattagaaaatatgatgaaagacattcatgattcgtgtgtacagtatggggagtctaagtctggaccagtaaattattag

SEQ ID NO: 219460 - DNA, 1288 bp, Unknown
  Bacterial polypeptide expressing nucleotide sequence isolated from the Sargasso Sea
catgtcttcgcaattgcagtccatcccgtcctacctgcacgccgacgatctcggcccgtggggcaactaccttcagcaagtcgaccgcgtcgcgccgtatctcggctcgctgtcgcgctggctcgaaacgctgaagcgcccgaagcgcatcctgatcgtcgactgccccatcgagctcgacaacggcaccgtcgcgcacttcgaaggctatcgcgtgcagcacaacgtgtcgcgcggcccgggcaagggcggtgtgcgttaccaccaggacgtgacgctgtcggaagtgatggcactgtccgcatggatgtcggtcaagaacgcggccgtgaacgtgccgtacggcggcgcgaagggcggtatccgcgtcgacccgcgcaagctgtcgcgtggtgagctcgagcgcgtgacgcgccgctacaccagcgaaatcggcatcatcatcggcccgaacaccgacattccggcgccggacgtcaacaccaacgaacaggtgatggcgtggatgatggacacgtactcgatgaaccagggccagacgtcgaccggcgtcgtgaccggcaagccgatcgcactcggcggttcgctcggccgcaaggaagcaacgggccgcggcgtgttcgttgtcggcagcgaagcggcgaagaagaagggcctcgagatcgaaggcgcacgcatcgcggtgcagggcttcggcaacgtcggcggcatcgctgcgaagctgttccaggaagcgggtgcgaaggtgatcgcggtgcaggatcacacgggcacgatctaccagccgggcggcctcgattcgaacaagctgctcgaccacgtcgcacgcacgggcggcgtcgcgggcttcgaaggcgcggagccgatgccgaatgacgagttctggaccgtcgaaaccgacatcctgatcccggcggcactggaaaaccagatcaccgagaagaacgcagggaagatccgcacgaagatcatcgtagaaggcgcgaacggcccgacgacgacggcggcggacgacatcctgaccgcgaacggcgtgctggtgatcccggacgtgatcgcgaacgcgggtggcgtgaccgtgtcgtatttcgaatgggtgcaggatttctcgagcttcttctggacggaagacgagatcaaccaccgtctcgaacgcgtgatgcgcgaagcgttctccggcgtgtgggcggtcgcggaagagcacaaggtgtcggtgcgtaccgcagcgttcatcgttgcgtgcaagcgcatcctgatggcgcgcgaaatgcgcggcctgtacccctga

SEQ ID NO: 219461 - DNA, 1210 bp, Unknown
  Bacterial polypeptide expressing nucleotide sequence isolated from the Sargasso Sea
tatgtcatcaagttcaaacccaacctcatacgcatatgaaaatgcggtcaaagaattaggattaaaaccaaatattgcaagagccttagaaatacctgatagggaactaacagtcgaagttcctttcaggcgcgataatggtgagttagatagtgtagtcggatttagagtacagcataataatacaaggggtccatttaaagggggtatcaggtatcacgagcatgtagatattgatgaggtacggtcacttgcaactcttatgacctggaagacttctctcttagacatcccttatggagggggtaaaggaggtattggagttgatccaacaaaatttagtaaaactgaactagaaagaatgtccagacgattctttagagctattgatcctattatcggtgtcaatgttgacattcctgctccagatgtaaatacaaatgctcaggtaatgagttggtttatggatgagtacagccagatacatggatattcaccagcaattgtaaccggcaagccattagagttaggaggatcagagggtcgtgaggctgctactggaaaaggaactgccattattactcgagaatcagcaggcaaatggggtatagatttacaaaattcaaaaatagttattcaaggatttggtaatgttggttcctatgcagcaaaattcctgcatgaatatggttgtaagataattgctgttagcgacgtaacaggcgggctatttgatcctgacgggcttgacattccatcactttttgaacacaactataaaaacagaacgatagatggttttgaacagggtaagaaaattaccaacgaggagctccttgctattgagtgtgatttccttattcctgctgcattaggtagtgcgattaacgaatcaaatgtagacacattaaactgcaaagtagttgtagaagcggctaatggtcctgttactggtgatgcagcaagaagtttacataaacgaagtattccggtgatcccagatattctaacaaatgctggaggtgttactgtatcctactttgaatgggttcaaaatctgcagcaattcaaatggactgaagatgaggtaaataaaaagcttgaagacaagatggtgcgtgcattccatgaagtatattctatgaaaaaggaacgaggtgtttcaatgagaaatgcatcatttatggcatcgattgatagagttcatagc

SEQ ID NO: 219462 - DNA, 1234 bp, Unknown
  Bacterial polypeptide expressing nucleotide sequence isolated from the Sargasso Sea
tatgtcatcaagtactgacccaacctcatcagcatatagtgaagcagttaataaattaggtctcaaacctaatattgcaaaagctcttgagctaccggatcgtgagttaacagtggaggtcccttttagaagagataatggtgaactagaaagtgttgttggtttccgagttcaacataataatacgagaggtcctttcaagggaggtatcaggtatcaccaacatgtggacatcgatgaagtacgatctctcgcgaccctgatgacctggaaaacatctttattagatattccttatggcggaggaaagggcggtataggagttgatccaagccaatatagtaaaactgaattagaaagaatgtcccgaagattttttcgtgcaatcgatcctgtcatcggtgttaatgtcgatattccagcaccagatgtgaatactaatgcacaagttatgagttggttcatggatgaatacagtcagatccatggttattcccctgcaattgttacaggtaaacccttagaattaggcgggtctgctgggagagaggccgctaccggtaaaggtacagcagtcattacccgtgaaacagcagataagtggggtatagatctaaaaaattgtaaagttgttattcaaggctttggaaatgttggatcatatgcagcaaaatttttagatgaatacggttgtaagattattgctgtaagtgatgttacaggtgggttatatgattcagatggactcgatattccatcgctatttgaacataattataggaatagaaccattgatggctttgaccagggaaagaaaatcacgaatgaggaattacttgcattggagtgcgactttctaattccagcagctttgggcagcgcgatcaatgattccaatgttgattcactaaattgtaaagtgatcgttgaggctgcgaatggtcctgtcactggcgatgctgcgaataagctttgggataagaaaattgctattattccagatatattaacaaatgctggtggcgtgacagtttcttattttgaatgggttcaaaatttgcaacaatttaagtggaccgaagatgaggtcaacaaaaaactagaagaaaaaatggttcatgcatttaatgaggtctactcgattaaaaaagagaaaagcgttccgatgcgcatagcatcttttatggtcgcaattgacagggttcacagtgcatataaccttcgagaaggataa

SEQ ID NO: 219463 - DNA, 1234 bp, Unknown
  Bacterial polypeptide expressing nucleotide sequence isolated from the Sargasso Sea
tatgtacgatgaagtaattcgtcaatacgatgaagttgctgaaatgattaatcttgacccaaatataaaagagcgattgaagttacctcaaagagcgttaactgtaacatttcctttcagacgagatgaatataccgaggttgaaacagtaattggttatagagttcaacatgttttatcaatggggcctacaaagggtggtattagatatgctcaagatgtaaaccttggtgaagttacagcactttcgattttgatgtcctggaaatccgctattgttggattgccttatggaggggcaaagggaggggtagcaattgaccctagacctctttcaagagcagaaaaacaaagaattacaagaagatatactgcagagctcttacctgtcattggcgttgataaagatatacccgcacctgacatgggaactgatgaacaaactatggcatggataatggatacttatagtaacttcgttggctcacctcaaccgggaattgttactggaaaaccggcttctttaggtggctctattacaagaagagaagctacgggtagaggagctgttgctattgctgctgcagcgatggataagttaaataaaaaatactcagattcaactgttgtaattcaaggttttggaaatgttgggaggtatgcagctttagcctcgtacgaaagaggagctaaggtaatagctgttaatgatttgacagggggagtctacaacgaaaaaggtttgaatattcctgaattatttaaacacatagcaaaagaaaacacggtaaaaggtttttctggtggagatccttttgtaggagaaatattagaacttgagtgtgatgtattaataccagctgctgttggcggagttataacatcaaccaatgcgtcaaacataaaagcacatgttattgttgaaggagccaactcaccaactactttaaatgctgataaaattttaagagaaaataatgttttaataattccagacattcttgcaaacgcaggaggtgtaactggtagttattttgaatgggtacaaaatactcaaaattatctttggaaagaaaaagaactttatgaaaagcttatagatgttttagagtctgcttttgaagaggtttacattatttcagaaaaaaataattgtgatttaagaacagccgcattaatcaaaggcattaagcgtgtagcagctgcaaaattaactagagggttgtttccttaa

SEQ ID NO: 219464 - DNA, 1417 bp, Unknown
  Bacterial polypeptide expressing nucleotide sequence isolated from the Sargasso Sea
aatggaacaaaaaaaagaaacaacattcaaagaaagtgttgatttaatgtatgacagagctgttaaaacattaaatcttccaattggtttggcggaacaaattcgaacatgcaatgcagtttatcaagtaagatttggagtaaaactcaagggtgaatataaaatatttgtgggatggagagcagttcatagtgaacatattttaccagttaaaggaggaattcgtttcgcagagatagccaatcaagaagaagtagaagctcttgctgctttaatgacatacaagtgtgctattgttaatgttccttttgggggatcaaaaggagcattaaaaattaatcctaatgaatatgatgaagaagacttagagaaaatcacgcgaagatttgcacatgaactgattaaaaaggatttagttaatccaaacctgaacgtgccagccccagatatgggaaccggtgagagagaaatggcttggatatctgacacattccaaaatctatatccaaatcaaataaatggtatgggatgtgttactggaaaacccgtccacaatggtggaattagaggccggactgaagctactggtagaggtgtacaatttggaattagagaattctttcgtcatcctgaagatttaaaactagcacaaatagatggaggattagatagtaaaaaaatcattgtccaaggattaggcaatgtaggctggcacgcagcaaagtttttaagcgaagaagacggtgctaaaataattggcatcattgaaagagatggagctatctactcagaaaaaggattggatgtaaatgatgtacttaattatataaaagaaaatggtggggttaaaaatttccccaattcatcatttactgaaaatggtcaagaattgctagaaaaagagtgtgatatactaattccagcagctattgaaggagtaataaattctagtaatgcagccaggattaaagctccactcatagcggaggcagcaaatggaccagtcaccttcgaggcagattccatactaagaaaaaaaggtacagtgattttacctgatgccttcttaaatgccggtggtgtaacagtatcatattttgaatggattaaaaatcttgcaagaattagattcggaagactagaacgtcgacatgaggaaatgaaaggaaaacttattgttgaaacattagagaccatgctaaaggcgaaagtccctaatgatttgaagaataaactgattgaaggtgcagacgaattagatttagtgagatctggattggatgattctatgagagatgcttacaaaaatattagagaaacatattattcaatgaacaatgttgatgattttcggaccgcttcttatgtggtcgcaataaaaacaattgctaagggttatgaaagtatgaatttatag

SEQ ID NO: 219465 - DNA, 1243 bp, Unknown
  Bacterial polypeptide expressing nucleotide sequence isolated from the Sargasso Sea
tatggccacaaagattaataataaaaaagctagcgatgatcagtttaatagagcagcggatttaattggccttgatgaaaaaatcaggctatcattaaatgtaccagatcgtgagttggtggttgaagtaccgctgagaagagatgatggttctttagaaagctaccgcggctacagagttcagcataacaattcaagaggaccttttaagggcggtattcgatatcaccatgaggttgatatagatgaggttagggctcttgcagcattaatgacatggaaaactgctttagttgatataccctatggcggtggaaaaggaggaatttctgtagacccttcaactttgtcgaccttagaacttgaaagattatcccgtcgatttttccgagcaattaatccaatcattggaataaatagagacataccagcgccagacgtaaacactaatccacagattatggcttggtttatggatgagtatggaatgactaatggccacacgcctggaatagttacaggaaaacctatagagctgggtggatctttaggaagaaacgctgctactggcagaggtacagctatcattgctcgtgagaccgcaaatcttctaaatatggatttagatggagcatcggtagtgatccaaggctttggtaatgtcgggtcctttgcaggaaagtttttaagcgagatgggctcaaagatcatagctgttagcgatgtgaatggtggtctatatgacccagatggtcttgatattccagcaatgattgaccataatttgaaaaacaaaactataaaaggtttctctcaagggaaaaaaatatcaaatgaaaagatattgaatcttgaatgtgattttcttattccagctgcattaggtggtgtaatacacaaaatgaatctagataaattaaaatgcaaagtcattatcgaagcagcaaatggaccagtgactcctcctgctgatgatgttttatttaaaaaaggaattcatgtaattccagacatccttactaatgctggcggtgttacagtttcctattttgaatgggtgcaaaatcttcagcaatttcaatggacagaagatgaggttaatgctaagcttgaggataaaatggtatcagcatttcaagaagttggaaaaatgatgaaatccaagaaaacttctatgagaatggctgcttttgccgtcgcaattgatagggttgctaaaagctttgagctaagaggagtttaa

SEQ ID NO: 219466 - DNA, 1226 bp, Unknown
  Bacterial polypeptide expressing nucleotide sequence isolated from the Sargasso Sea
catgtcatcaagtacaaatccaacctcagcagcatataaacaagccgtagaaaaattagggatgaaaccaaatatcgctaaagcattagaaattcctgatagagaattaacagtagaagttccatttcgaagagacaacggtgaagttgaaagtgtaataggatttcgagttcagcataacaataccagaggtccttttaaaggtgggattcgatatcaccagcacgtggatattcaagaagttcggtcacttgcgacacttatgacatggaaaacttctttattagacattccttatggtggcggaaaaggtggaattggtattgatccatcgaaatatagcaagacagaacttgaacgtatgtctagaaggttttttcgagcaatagaccccattatcggcgtgaatgttgatattccagcccccgatgtaaatacaaatgctcaagtgatgagttggtttatggatgaatacagccaactacacggctattctcctgcgattgtcactggaaaaccgcttgaattaggaggatcagagggcagagaagcagcaacgggtagaggtactgctattatcacaagagagacagcggagaaatgggaaatagatttgcaaggcgctcaaatcgtagttcaaggttttggtaatgtcggttcctatgccgctaagtttttgcatgaatatggctgtaaggttattgcggtaagcgatgtttccggtggtttgtatgacccagatggattgcatattccttcactttttgaatataattacaagcacaggactatcgatgggttcgagcagggaaaaaagataacaaacgaagaattattggcactagagtgcgactttcttattcctgctgcattaggtagcgcaattaatgaacagaatgtagataaattgaattgcagagtaattattgaagcagcaaatggtcctgttactggtgatgcagcgagtaaactatgggataaaaagattggaattattccagatatattaacaaacgcaggaggagtaactgtttcttattttgaatgggttcagaacctgcaacagttcaagtgggatgaagaggatgtaaatgctaaacttgaaaataaaatggtcaaagcattcaatgaagtctatgcacttaaaaaagaaaaaaatgttccaatgcgaatcgcatcttttatggtagctatagatagagtacagacagcgtataatctaagag

SEQ ID NO: 219467 - DNA, 418 bp, Unknown
  Bacterial polypeptide expressing nucleotide sequence isolated from the Sargasso Sea
atgcaaaaaaaattaaatggttttttacgtgagattgaaaaaagaaattctcatgaaccagagttcatgcaagccgtaaaggaagttgctgaagacctcatcccatacattattaaacaagacatatatcatggtaaaaatatcctaatgcgaatgtgtgagcctgaaagggttttaatgtttcgggtaaattgggtagatgataatggtgaaataagagtaaacagaggctacagaattgaaatgaattctgcaataggtccttacaaagggggtttaagatttcatccctctgtgaatttgagtattttaaaatttcttgcatttgaacaagttttcaagaatagtttaactactctaccaatgggaggcggaaaaggaggttcagattttgatcccaaaaacaaatctgattccg

SEQ ID NO: 219468 - DNA, 1234 bp, Unknown
  Bacterial polypeptide expressing nucleotide sequence isolated from the Sargasso Sea
atgtcatcaagtactgatccaacatcagcagcctacaaagcagctgttgaaaacctaggtttaaaaccaaatatagctaaagccttagaaattcctgaccgtgaactgcaagttgaaattccatttagaaaagacaatggtgagattgatagcgttataggtttcagagtacaacataataatactaggggtccatttaagggcggaattagatatcaccatcatgttgatatagatgaggttcggtcattagcgacattaatgacttggaaaacttctcttgtggacattccgtacggtggaggtaaaggtggtatcggaatgaatcctggagattatagtgaaacagaattagaaagaatttcaagacggttttttcgtgctatcgatccaattattggtgtgaatattgatatacctgctcctgatgtaaatacgaatgcccaagtaatgagctggtttatggatgagtatagtcagttgcatggttatagtcctgcaattgttacgggtaagccattagagctaggaggctcagagggcagagaggcggcaactggaagaggtaccgcaataattaccagagaaacagcagaaaaatggggcataaaactaaaaggagccaaagtagtaatccagggttttggtaatgttggttcatatactgcaaaatttttagatgaatatggatgtaaaattattggggtaagtgatatttctggaggtttatacgactcaaatggttttaacgtaccagaattatttgattataattataaaaatagaactatagatggatttgaacagggcaagaaaatatcaaatgaggaattactggctttagaatgtgatttcttgatacctgctgcactgggtagcgctattaacgaatcaaatgtagactcactaaactgcaaggtaattatagaggcggcaaatggtcctgtaactggagaagcagcaaataaactatggaagcggaagatagcgattataccagatattttgacgaatgcaggaggggtaactgtctcatattttgaatgggtgcaaaaccttcagcaatttaaatggacagaagcggaagtaaataaaaagttagaggataaaatggtccaggccttcaaagaagtacatgatgtaaaggtgaaacaaaaaatccccatgcgaatagcatcttttatggttgcaatcgatagagttgaacggtcatacactcttagaggtggataag

SEQ ID NO: 219469 - DNA, 1090 bp, Unknown
  Bacterial polypeptide expressing nucleotide sequence isolated from the Sargasso Sea
atgtcatcaagttcaaatcctacctcagctgcttataaacatgctataaaagaattaggcttaaaaccaaatattgctaatacactagaaatgcctgatagagaattgaccgttgaagtgccgtttagaaaagataatggtgaaatggaaagtgttcttggctttagggttcaacataataatactagaggacctttcaaaggtggaatacgatatcatgaacatgttgatattgaagaagttcgatcattagcaacgttaatgacgtggaagacgtctttgttggatattccatatggaggtggaaagggtggaataggagttgatccttctaaatacagtagaactgaattagaaaggatgtcacgcaactttttccgagctatagatccaatcataggtgtaaacattgatatacctgcgccagatgtaaatacaaatgcacaagtcatgagttggttcatggatgaatatagccaaacgcatggctatacacctgcgattgttacaggaaaacctttagagcttggtggttctgaaggaagggaagcagcgactggcagaggaacggcagttattacaagagagactgccgataagtggggaatagaattaaagaatgctaaagtagttattcagggttttggaaatgttggatcatatgcagcaaaatttttacatgaatatggttgtaaaattattggagtaagtgatgtgacaggtgggttgtatgacgcagatgggctagatatcccctcactatttgaacataattctaaaaatagaacaattgatggattcaaacagggtaagaaaatttcaaatgatgaattactagctttggaatgcgattttatgataccagctgcactaggtagcgcaattaataagtcaaatgttgattcattaaattgtaaagtaatagttgaagctgccaatggacctgttacgggagatgctgcgaataaactttgggatcgtaaaattggaattattcctgatatattaactaatgctggaggcgttactgtttcttattttgaatgggttcaaaatcttcagcagtttaaatggacggaagatgatgtta

SEQ ID NO: 219470 - DNA, 859 bp, Unknown
  Bacterial polypeptide expressing nucleotide sequence isolated from the Sargasso Sea
aatgtctgaagagtttcaatatttatcgaaccagcacacccttttcacttattttcacttagcaggcaacaaagaacaggctaaagagctagtaaaaactggaattacagccatagcctatgaaacagtgaccgctgatgatgggtcattacctctgctggcgcctatgagtgctatagcaggacaaatagggtttgtggttggatcttactttttgctaaaaccaaataaaggcataggagtgttattaggttctattggcgatattgagccaagagttgtaactgtcataggcgcaggtgtagcaggaacagaagcaataaaaaaggctgttgctagcggcgcttatgtaaagattattgatttgtcagaagacaaacttcagcaattaaaacaaacatttggcgaagataagattgaatatattgtctctatcccagaaacaatagcagaagccttagtatcatcggatctagtaataggctcggtttatgtaataggcaaagaagcaccaaaagtaattactaaagagatgattagcaaaatgaaaccgggaagtgtactagttgatatagcaattgatcagggcggatgcattgaaaccagtaaaccaacaacgcatgatgatccagtgtttatacataatgatgttattcattactgcgtcactaacatgccaggtgctgtgcctcttacagctacattagctcttaataaagcgaccatgccttacattgaggcactaaccaaagacggagtaacaaaagctttagactctaatcaacacttagcaaatggcttaaatatgaaaaatggagagattattcatccagcgattaaggaagcattgggtttatga

SEQ ID NO: 219471 - DNA, 835 bp, Unknown
  Bacterial polypeptide expressing nucleotide sequence isolated from the Sargasso Sea
catgttgattggtgtaccaaaggaaattaaatcagatgaatacagaattgggctaactccggagagtgttgagatgctaactcaatctggacatgaagtcatgattgagcaaaatgctggattaggtattggtaaggacaataaagattacgaagatgcaggtgctgagattgttacgacaagagaagaaatttttcaaagagcagaaatgatcgtaaaggtaaaagagcctcagcttgatgagtgtgctttattgagatccgatcaaattctatttacatatcttcatttggctccagaccctgagcaagtcaaagcacttctggcctctggctgcagagcaatagcttatgagtcagtcaaagccgatgacggatcatatccattgctgaccccaatgagtgaagttgctggaagaatggctgttcaagctggagcgacatgtcttgagaaagcaaaaggaggattggggcgattgatcggtggtgtgaccaatgtcgatcccgctgaagtggtggtgattggaggaggagttgttggatacaactcgatcgagattgcgattggcatgcaagccaatgtcactgttttagataagtcagcagagcgtttggatcaattggagtcaatttttggggacaagcttaatgccgtgcttgccacagatgaaaacaaccatgaatgcataaaagccgcagatattgtcatcggagctgtttatatacctggggcatctgcacccaaattaatcagtcgagagttggtaaaatcaatgaaagatggctcagtctttgttgatgttgcaatcgatcagggaggctgctcggagacttca

SEQ ID NO: 219472 - DNA, 1022 bp, Unknown
  Bacterial polypeptide expressing nucleotide sequence isolated from the Sargasso Sea
agcaaatgctggattaggtattggtaaggacaataaagctttcgaagatgcaggtgctgagattgttccgacaagagaagaaatttttcaaagagcagaaatgatcgtaaaggtaaaagagcctcagcttgatgagtgtgctttattgagatccgatcaaattctatttacatatcttcatttggctccagatcctgagcaagtcaaagcacttctggcctctggctgcagggcaatcgcttatgagtcagtcaaagccgatgatggatcatatccattgctgaccccaatgagtgaagttgctggaagaatggctgttcaagctggagcgacatgtcttgagaaagcaaaaggaggattggggcgattgatcggtggtgtgaccaatgtcgatcccgctgaagtggtggtgattggaggaggagttgttggatacaactcgatcgagattgcaattggcatgcaagccaatgtcactgttttagataagtcagcagagcgtttggatcaattggaatcaatttttggggacaagcttaatgcggtgcttgccacagatgaaaacaaccatgaatgcataaaagccgcagatattgtcatcggagctgtttatataccgggggcatctgcacccaaattaatcagtcgagagttggtaaaatcgatgaaagatgggtcagtctttgttgatgttgcaatcgatcagggaggctgttcggagacttcaaaaccaaccactcattcagagcccacttatatagaagaaggagtgctgcattattgtgtagcaaacatgcctggcgccgttcctatgacttcaacttatgcattgaataatgcgacaatttcatatgtattgagccttgccaacaatggattcaatgcggcgcttactcttgatgatggattttgtgaaggactgaatattcataccggtaaagtcactattgctgcagtcgctgaagagcatggttatgagtaccataaccccatcgacctgatcagaggcctcagtcagtaaa

SEQ ID NO: 219473 - DNA, 724 bp, Unknown
  Bacterial polypeptide expressing nucleotide sequence isolated from the Sargasso Sea
gggtggcctgccgcttctggcaccaatgagtgaggttgctgggcgtcttgcggtgattgagggtgcggcaaatcttaaggttaacgctggtggtcgtggtctgcttatttctggcgttcctggtacatcgcctgcgaatgtggttgtcgtcggtggcggtgtcgttggtgtaaatgcggcaaaaatggcggttggtctgggcgcgcgtgccacggttctcgaccactcggtgccgcgccttcgctatttgtcggacattttcggcaacagcatcaccacccgctattcaagccggaccattctcgaagaggtctgccgcaatgccgatatggtcatcggcgcggtgctgatccccggggcgagcgcgccaaagctaatttcaaaggcctttctgtctgagatgaagccaggggctgtaatggtggatgtggcgattgaccagggcggctgttttgagacctcaagggcgacgacgcatgacgatccaacctatatcgtgaacaatgtagtgcattattgcgtagccaatatgccgggttcggtgccgctgacctcatccgaggcgttgaacaatgctactttgccacatgttctgtcgttggccgacaggggtttgtctgcactggatcaggatctgcatctgatgaacgggttgaatgtgcgggatggcaaaatcacctatcacgcggtcattgacgcgctcggtgaacggccagctgcctga

SEQ ID NO: 219474 - DNA, 767 bp, Unknown
  Bacterial polypeptide expressing nucleotide sequence isolated from the Sargasso Sea
gtccggttgcacggcgatcgcttacgagaccatcaccgacgatgctggcggcctgccgctgctggcgccgatgagcgaggttgccgggcgtctgtccgtgatcgagggcgctgccaacctcaaggcaaatgccggcggccgcggcctgctgatttcgggcgttccgggcacattgcctgccgaggttgtcgtcattggtggcggtgttgttggaacaaacgccgcgaaaatggcggtcggccttggcgcgcgggtaaccgtgctcgaccgttcggtgccgcgtcttcgccagctcgacgacatcttcggcaatgccatcaccacccgctattccagccgtgccatcatcgaagaggtctgccgtgacgccgatctcgtcatcggtgccgtgctgatcccgggtgccagcgcgccgaagctgatcgcgcgtgacttcctgtcatcgatgaagccgggttcggtcatcgtcgacgtagccatcgaccagggcggatgtttcgagacctcgcgtgcgaccacgcatgacgacccaacctacatcgtcgacggtgtcgtgcattactgcgtcgccaacatgccgggctcggtgccgctgacttcgtcagaagcgctgaacaacgcgaccctgccgcatgtcttggcccttgccgagcatggcatggccgcgctggaccgggacccgcatctggccaacggcctgaatgtgcgtgccggtgaagtcactttcgacgcggttctcgaggccatgcaggtagaggccgcctgac

SEQ ID NO: 219475 - DNA, 674 bp, Unknown
  Bacterial polypeptide expressing nucleotide sequence isolated from the Sargasso Sea
catgattataggaattcctaaagaaattaaagaaagtgaacacagagttggtatgactccatccggtgttcaaactctgattcaaaatggacatgatgtttatgttcaaaattctgcaggtcaaggaagtggtcattcagatgaagattattcaaatgtaggtgctagccttctaaaaacaattgaagaagtatatgatatttctgaaatgattattaaggtaaaagagcccttaaaaaaagagtattccttaataaaagaaggtcaaatcatatatacttattttcattttgcttcatcattagagctaacaaaagcaatgattgatagtaaatcagtttgtattgcttacgaaacagttgaaaactctgataggtctctaccacttttaactccaatgtctgaggttgctggaagaatggcagctcaacaaggagctaaatttcttgaaaaacatcaaaaaggttgtggtatcttactaggaggagtacccggagtaagccctgctaaagctgttgttcttggcggtggtgttgtaggaactcaatcagctaaaatgttagccggtttaggagctgatgtcactattttagatataagccttgatagacttagagagcttgacgatataatgcctaaaaacgttaaaactaagttttcaaatcaatataata

SEQ ID NO: 219476 - DNA, 733 bp, Unknown
  Bacterial polypeptide expressing nucleotide sequence isolated from the Sargasso Sea
catgttgattggtgtaccaaaggaaattaaatcagatgaatacagaattggactaactccggagagtgttgagacgctaactcaatctggacatgaagtcatgattgagcaaaatgctggattaggtattggcaaggacaataaagcttacgaagatgcaggtgctgagattgttccgacaagagaagaaatttttcaaagagcagaaatgatcgtaaaggtaaaagagcctcagcttgatgagtgtgctttattgagatccgatcaaattctatttacatatcttcatttggctccagatcctgagcaagtcaaagcacttctggcctctggctgcagggcaatcgcttatgagtcagtcaaagccgatgacggatcatatccattgctgaccccaatgagtgaagttgctggaagaatggctgttcaagctggagcgacatgtcttgagaaagcaaaaggaggattggggcgattgatcggtggtgtgaccaatgtcgatcccgctgaagtggtggtgattggaggaggagttgttggatacaactcgatcgagattgcgattggcatgcaagccaatgtcactgttttagataagtcagcagagcgtttggatcaattggagtcaatttttggggacaagcttaatgcggtgcttgccacagatgaaaacaaccatgaatgcataaaagccgcagatattgtcatcggagctgtttatataccgggggca

SEQ ID NO: 219477 - DNA, 439 bp, Unknown
  Bacterial polypeptide expressing nucleotide sequence isolated from the Sargasso Sea
atgttgatcggtgttcccaaagaaattaagccgcaagaaaatagagtaggcctaactcctgaaagtgtaaaggaacttattgatgatggtaatgaagtaatcattgaaagaacagccggtcaggggtcaggttttgatgatcaaaagtataacgatgttggggcgacagtttttgaaaatgcgcaagatattttcgatcgcgctgagttgatcattaaagttaaagaacctcaagaagatgaaataaaaaagttgaaagatggtcagctgctattcacatatttacaccttgctgcaagtaaagcattgacagaaggattaatgaattctggagcaacatgtatagcttacgaaactataaccgataaaaatggaaggcttccattacttgctccgatgagtgaagtagccggtagaatttcaatacaagcaggagcca

SEQ ID NO: 219478 - DNA, 595 bp, Unknown
  Bacterial polypeptide expressing nucleotide sequence isolated from the Sargasso Sea
tatgttgatcggtatccccaaagaaattaagccgcaagaaaatagagtaggcctaactcctgaaagtgtaaaggaacttattgatgatggtaatgaagtaatcattgaaagaacagccggtcaaggatcaggttttgacgatcaaaattataacgatgttggggcaacagtttttgaaaatgcgcaagatattttcgatcgcgctgagttgatcatcaaagttaaagaacctcaagatgatgaaataaaaaagttaaaagatggccagctgctattcacatatttacaccttgctgcaagtaaagcattgacagaaggattaatgaattctggcgcaacatgtttagcttacgaaactataaccgataacaatggaaggcttccgctactcgctccaatgagtgaagtagccggtagaatttcaattcaagcaggagccagagctcttgaaatgacaaataaaggaagaggtgttttattatctggcgcaacaggagcaccgccagctaaagttgtaattattggatgtggagttgtagggtttaatgccgcccttattgctcatggaatgaaatcaaatgtaatgcttattgat

SEQ ID NO: 219479 - DNA, 868 bp, Unknown
  Bacterial polypeptide expressing nucleotide sequence isolated from the Sargasso Sea
gaagcaaggacaaatactttacacttatctacatctggcaccggacctgccacaaacaacagaccttatcgactctggtgcaacatgtattgcctatgaaactgtcacatcgcctagaggcggccttccgctgttgaaacccatgagccaagttgctgggcgaatgtcgattcaggcaggagcccatgccttggaaaaggcacaaggtggcctaggtgttttgcttggcggggtacctggagtacggcccgcaagtgtgattgtcgtgggaggcggcatcgtcggattcaacgctgcccaaatggctgttggattgggcgcggatgtaaccattcttgatcgcgatcctgacgttctagacggtctggcgcgccatttcggcgcgagtgcacgaactgagtattcgacacgcacggctctgcagaatctcctcccgacggccgatctcgtcgtcggcgccgttctaattcccggagcggccgctccgaagcttgtcaaccgagaagacttgcagtcgatgcagccgggaagcgtgttggtggacgtcgctatcgaccagggcggttgcttcgaaacttcgcatgcaaccacacacgatgacccgacatatgtcgttgatgaagttgtccactattgcgtggccaatatgcccggcggcgttgctaaaacctccacgtatgcgctaaacaacactacgctaccgcatctcaaacgcattgcaggccttggcgcaagaaaagcgctggagacagaccaacacttgcgtgccggtctcaacgtagcgatgggccagattacatgtaaacctgttgcagaggcacatggcctcgaatttgtctctccggaaaacatgctcgaaagcatttag

SEQ ID NO: 219480 - DNA, 500 bp, Unknown
  Bacterial polypeptide expressing nucleotide sequence isolated from the Sargasso Sea
aatgcatattggaataccaagagaaattaaagaaatggaaaatcgtgttggtgtaacacctgctggggtttcagaacttgttagagaagaccatcgagtattggtcgaaaaaaacgctggagttggaagtggtttcagtaatgaggaatatagggaggccggagcaagtatagttgataatgcctctgaaatatggtcatctgagatggtttacaaagtcaaagaaccacttgctgatgagtacaattattttcgtgatgatcttttattgtttacatatcttcatttagctgctgaaggtccgttaactaatgcgctgatggaatccaaaacaacttccattgcttacgaaacagttcaactgaacgatactcttccacttctaacacccatgagtgaagtcgcaggaagaatggcggtacaggttggagcccgtttcctagaaaaacctcaaggcggacagggagtgctacttggtggtgtaccaggagttgagcctg

SEQ ID NO: 219481 - DNA, 263 bp, Unknown
  Bacterial polypeptide expressing nucleotide sequence isolated from the Sargasso Sea
tcaacaagagctaggattcttaagagaggaccttgcattatttacctatcttcatttagcaggcagttcaactcaggcaaaaaaattacttgaaactggagtaaccggtattgcatatgaaacggtaactgctaaagatggctctctgcctttgttagctccgatgagtgcaattgctgggcaattaagtatggttgttgggtcatatcatttgcttaagcccaataatggcaggggtactttaattagtaacattgatccaa

SEQ ID NO: 219482 - DNA, 709 bp, Unknown
  Bacterial polypeptide expressing nucleotide sequence isolated from the Sargasso Sea
atgttgattggtgtaccaaaggaaattaaatcagatgaatacagaattgggctaactccggagagtgttgagatgctaactcaatctggacatgaagtcatgattgagcaaaatgctggattaggtattggtaaggacaataaagattacgaagatgcaggtgctgagattgttacgacaagagaagaaatttttcaaagagcagaaatgatcgtaaaggtaaaagagcctcagcttgatgagtgtgctttattgagatccgatcaaattctatttacatatcttcatttggctccagaccctgagcaagtcaaagcacttctggcctctggctgcagagcaatagcttatgagtcagtcaaagccgatgacggatcatatccattgctgaccccaatgagtgaagttgctggaagaatggctgttcaagctggagcgacatgtcttgagaaagcaaaaggaggattggggcgattgatcggtggtgtgaccaatgtcgatcccgctgaagtggtggtgattggaggaggagttgttggatacaactcgatcgagattgcgattggcatgcaagccaatgtcactgttttagataagtcagcagagcgtttggatcaattggagtcaatttttggggacaagcttaatgcggtgcatgccacagatgaaaacaaccatgaatgcataaaagccgcaagatatgtcatcg

SEQ ID NO: 219483 - DNA, 538 bp, Unknown
  Bacterial polypeptide expressing nucleotide sequence isolated from the Sargasso Sea
catgctgatcggcgttccaagggaaatcaaatctttcgaaaaccgcgtcggcatgacgcccgcaagcgtgcgcgaggtcatcgccgcgggtaaccgggtactggttgaacgaaacgccggtcattcgatcggcctcgacgacacggattacgaagccgcgggcgccaagatcgccgcatcggccgacgacgtcttcgccgaagcggacatgatcgtgaaggtcaaggaaccgcaaccggtcgaaatcggtatgctccgcgatggccagatcctgtttacctatttgcatcttgcccctgacgaggcacagacacagggactgatggacagcggctgtaccgcgatcgcctatgaaaccgtgaccgacagccgctttggactgccgctgctggcaccgatgagcgaggttgccggacgcatggcggtccaggcaggcgcgacctgccttgaaatctccaatggcggccgcggcgtgctgctgggcggcgtaccgggcgtaacgccgggcaatgtcgtcgtcatcggcggcggagtggtc

SEQ ID NO: 219484 - DNA, 877 bp, Unknown
  Bacterial polypeptide expressing nucleotide sequence isolated from the Sargasso Sea
cgggatgaccccgaacgccgcgcaagaggccatcgctcacggtcacgaggtgatcgtgcaggcgggggccggcacgggggccggctttgaagatgcggattacctggccgcaggtgccacgatcctcgacaccgccgaggaaatctttgccaccgccgacatgatcgtgaaggtgaaggaaccccaggcggtcgaacgcaagatgctgcgtgaaggtcaggtgttgttcacctatctgcacctcgcgcccgaccccgcacaaacaagggacctgctcgactcgggctgcaccgccatcgcctatgaaaccgtcaccgacactcgcggcggtcttccccttctggcgccgatgtccgaagtcgccgggcggctggcgccgcaaagcggggcgtgggccttgcaaaaggccaatggcggcagcggtgtgctgatgggcggcgtgcccggtgtgcgcccggcgaatgtgatgatcgtcgggggcggggtcgtcggaacggcagcggcgcgtgtcgccgtgggcatgggggccaacgtgaccgtgcttgatcgctcggtgccgcgcctgtcctatctggatgacgtgttcatgggccgcctgacgacgcagttctcggatcaggcctcgctggccgaattgcttccggcggcggacatggtcatcggtgccgtgctgattccgggggcggcagcgcccaagctggtgcgccgcgaccagttggcgatgatgaagccggggtccgtgcttgtggacgtggccattgatcagggcggatgtttcgaaacgtcgaaacccaccacccatgccgagccgatatatgatgtggacgggatcgtgcattactgtgtggccaacatgcccggcgccgggcgcgcacct

SEQ ID NO: 219485 - DNA, 483 bp, Unknown
  Bacterial polypeptide expressing nucleotide sequence isolated from the Sargasso Sea
aatgcatattggaataccaagagaaattaaagaaatggaaaatcgtgttggcgtaacaccagctggggtttcagaacttgttagagaagaccatcgagtattggtcgaaaaaaatgctggagttggaagtggtttcagtaatgaggaatatagtgaggcaggagcaagtatagttgataatgcttctgaaatatggtcatctgaaatggtttacaaagtcaaagaaccgcttgctgatgagtataattattttcgtgatgaccttttattgtttacatatcttcatttggctgctgaaggtccattaactaatgcgttgatggaatccaaaacaacttccattgcttacgaaacagttcaacttaacgatactcttccacttctaacacccatgagtgaagtcgcaggaagaatggcggtacaggttggagctcgtttcctagaaaaacctcaaggcggacagggagtgctacttggaggtgt

SEQ ID NO: 219486 - DNA, 877 bp, Unknown
  Bacterial polypeptide expressing nucleotide sequence isolated from the Sargasso Sea
taaattttcctcgaagtatgataaactttcattcaataaaaggagtttatcaaaaatgttaattggttgtcctaaagagatcaaaaatcatgaatatcgtgttggcctaactccaataatggtaaaagatctcaaagatcagggtcatgaagtattaatcgagtctggagcaggaaatggttcaggtttcgaaaatacgaattacattgaagcgggtgccactattgtcgatggctcagatgccgtgtttgaaaaggccgaactaataataaaggtcaaagagccccaaaaaattgaaagagcgcgcctacaacaaggtcaaatattatttacgtaccttcatttagcaccggacagagatcaaaccgttgatctcataaagagtggtgtaacagctttcgcatatgaaacgataacagataagaatggtggactacccttacttgcaccaatgtcagaagtagcaggcaggctagcgccccagatgggggcttgggcattacaaaaagcgaatttaggtagtggaaaattactagccggtgtgcctggagttccaccagcaaacgtcttaatattgggaggaggcgtcgtaggaacccaggcggcgttaatagcattgggaatgggcgcaaatgtcaccttgatggatacttcaatcaaacgacttcagtatttagaccaattttttaatatgaaaattaagacccttttatcatccaaaggtaacatagacgcaacgctaattagtagtgatatgattattggagcggtcctggtacctggggccaccgctcctaaactaatatcacgatcgcaattatctaatatgaaaaaagggactgtactggtagatgttgccattgatcaaggaggctgt

SEQ ID NO: 219487 - DNA, 876 bp, Unknown
  Bacterial polypeptide expressing nucleotide sequence isolated from the Sargasso Sea
ggagagtgttgaaaagctaactcaatctgggcatgaagtcatgattgaactgaatgctggattaggtattggtaaggacaataaagcttacgaagatgcaggtgctgagattgttccgacaagagaagaaatttttcaaagagcagaaatgatcgtaaaggtaaaagagcctcagcttgatgagtgtgctttattgagatccgatcaaattctatttacatatcttcatttggctccagatcctgagcaagtcaaagcacttctggcctctggctgcagggcaatcgcttatgagtcagtcaaagccgatgatggatcatatccattgctgaccccaatgagtgaagttgctggaagaatggctgttcaagctggagcgacatgtcttgagaaagcaaaaggaggattggggcgattgatcggaggtgtgaccaatgtcgatcccgctgaagtggtggtgattggaggaggagttgttggatacaactcgatcgagattgcgattggtatgcaagccaatgtcactgttttagataagtcagcagagcgtttggatcaattggaatcaatttttggggacaagcttaatgcggtgcttgccacagatgaaaacaaccatgaatgcataaaagccgcagatattgtcatcggagctgtttatataccgggggcatctgcacccaagttaatcagtcgagagttggtaaaatcgatgaaagatgggtcagtctttgttgatgttgcaatcgatcagggaggctgttcggagacttcaaaaccaaccactcattcagaacctacttatgtagaagaaggagtgttgcattattgtgtagcaaatatgcctggcgccgttcctatgacttcaacttatgc

SEQ ID NO: 219488 - DNA, 645 bp, Unknown
  Bacterial polypeptide expressing nucleotide sequence isolated from the Sargasso Sea
catgattataggaattcctaaagaaattaaagaaagtgaacacagagttggtatgactccctctggtgttcaaacactaattcaaaatggacatgatgtttatgttcaaaattctgcaggtcatggaagtggacactcagatgaagattattcaaatgtaggtgctaaccttctcaaaacaattgaagaaatatatgatatttctgaaatgataattaaggtaaaagagcccttaacaaaagagtattccttaataaaagaaggtcaaatcatatatacttattttcattttgcttcatcattagagctaacaaaagcaatgattgatagtaaatcagtttgtattgcttacgaaacagttgaaaactctgacaggtctctcccacttttaactccaatgtctgaggttgctggaagaatggcagctcaacagggagctaaatttcttgaaaaacatcaaaaaggttgtggtatcttattaggaggggtacccggagtaagccctgctaaagctgttgttcttggcggtggtgttgtaggaactcaatcagctaaaatgttagctggtttaggagctgatgtcactattttagatataagccttgatagacttagagagcttgacgatataatgcctaaaaacgt

SEQ ID NO: 219489 - DNA, 459 bp, Unknown
  Bacterial polypeptide expressing nucleotide sequence isolated from the Sargasso Sea
tatgttgatcggtgttcctaaagaaattaagccgcaagaaaatagagtaggcctaactcctgaaagtgtaaaggaacttattgatgatggtaatgaagtaatcattgaaagaacagccggtcaggggtcaggttttgacgatcaaaattataaggatgttggggcaacagtttttgaaaatgcgcaagatattttcgaccgcgctgagttgatcattaaagttaaagagcctcaagataatgaaataaaaaaattaaaagatgatcagctgctattcacatatttgcaccttgctgcaagtaaagcattgacagaaggattaatgaattccggcgcaacatgtatagcttacgaaactataaccgataacaatggaaggcttccattactggctccaatgagtgaagtagccggcagaattttcatacaagcaagagccagagctcttgaaatgacaaa

SEQ ID NO: 219490 - DNA, 551 bp, Unknown
  Bacterial polypeptide expressing nucleotide sequence isolated from the Sargasso Sea
tatgctaattggtattccaaaagagattaaacctcaagaaaacagagtagggctaacagctcaaagtgtaaagagtcttgtaaaagaaggtcatgaagtaattgttgaaaaaaatgctggaaatggatcaggctttattgataaagattttatcgactctggagcaaagattttagattcagcagatgaaatttttaataatgctgaattaattattaaagttaaagagccgcaggagcaagagattggactacttagaaaggatcaaatcttatttacttatctccatttagcagcaaataaaaaacttactgatggattaataagttctggctcaacttgtattgcttatgagactgttactgatgataataatcgcctccctcttcttgctccaatgagtgaagtcgctggcagaatatctattcaagctggggcaagagcattagagatgactaacaaaggtagaggagttttactttctggtgcaacaggtgctccacctgcagatgttgtaattattggatgtggagttgtaggttttaatgctg

SEQ ID NO: 219491 - DNA, 1087 bp, Unknown
  Bacterial polypeptide expressing nucleotide sequence isolated from the Sargasso Sea
atgaaaattggtttacccaaagaggttaaaaacaatgaatttagggtcggcctaacacctgactcagtgggtgagctttctttaaatcataaagtctttgttcaaaaaaatgctggaaaagctataggttttacagatgaaatgtatcaggcaaatggtgctcaaattttagaaaatgcttcctcagtttttgacgaatctgaattaattgtaaaagtaaaagagccgctacctgaagagaaccagtttttatcttctaaacacactctttttacctatttacatttagctggaaataaagaaaatgctaaagatctaataaacactggggtaaatggtgttgcctacgaaacagtaacatctgatgacggaagtctgcctttattggcgccaatgagcaagattgcaggcagaataagtttagttgtggggcaatattttcttcttaaaccaaacaaaggtattggaactctttttggaaattttgaaaatttacaagctcgagaagtttcggtggttggtgctggtgtcgcaggcaaagaagccataagaaaaggcttagactcaggagcacatgtaaatgtgttagatatttccagccaaaagctcaaggatctggagaaagaatttggcacagataatatttcttatatcagctcaacaccagaaagcatctcaggagctattagcaaatcggatcttgtgattggttctgtctatgttgttggaaaagaagcaccaaaagttattactcgtaaaatgctgaatgtaatgaaaccaggcagtgtgctagttgatatatcaatagatcaaggaggttgtgttgaaacaagtaaacctacaactcacgatgatcctgtttttgttgaagagggggtagttcattattgcgtaaccaatatgccaggagctgtgccactaactgcatcattagcgctgaaccacgcaactcttccattcattaaaaaaattgctgatctcggtttggaaaaagcatgtgtctcagataaccatttagcaaatggtctgaatatgtctaatggcgagataaggcacccctcagttcaggcggccctaaacagttagt

SEQ ID NO: 219492 - DNA, 892 bp, Unknown
  Bacterial polypeptide expressing nucleotide sequence isolated from the Sargasso Sea
atgcatattggagtaccaagagagattaaggaaatggaaaatcgtgttggtgtaacaccagcaggtgtttcagaactagttcgtgaaggccatctagtatttgttgaaacaaacgctggagttggaagtggtttcagtaatcaggaatataaggaagccggaggaagtatagttgataatgcctctgagatatggtcatgtgagatggtttacaaagtcaaggagccgcttgctgatgagtataattattttcgggatgatcttttattgtttacatatcttcatttagctgcggaaggacccttaactaatgcgctgatggaatccaaaactacttccattgcttatgaaacagttcagctgaaagatactctcccacttctaacacccatgagtgaagtcgcgggaagaatggcggttcaggttggagctcgtttcctagaaaaacctcaaggcggacagggagtgctgcttggtggtgtgccaggagttgagcctgctggtgtagtgattataggtggaggcgttgtaggcattaattccgcaaaaatggcggtaggtttaggtgcaaaagtcactataattgatatcagtccggaaaggttacgttatcttgatgatgtttttaatggacgtgtacagcttatcatgtccaatagctttaatattgctaaggaagtagaaaaagctgacttgttgatcggaggcgttttaattccaggtaaaaaagcaccgcatcttgtatccgagggaatggtaaaaacaatgaagaaaggttcagttattgttgatgtggctatcgatcagggtggatgcattgaaaccattgatcgagtacttaccataacaatcctgtttatgaacggcatggtgttgtacactattctgtagg

SEQ ID NO: 219493 - DNA, 1123 bp, Unknown
  Bacterial polypeptide expressing nucleotide sequence isolated from the Sargasso Sea
atgattattggcgtacctaaagagattaaaaaccacgaataccgcgtcggtatgacccctgccagcgtgcgtgagctgactgctcttggccacactgtttttgttgaacacaatgcaggtagcggcattggttttggtgacgacgcctatcaggctgctggtgcaacggtattaactactgctgctgaagtcttcgctaaagcagaaatgattgtcaaagtaaaagagcctcaggctgttgagcgcgctatgctgcgtgagggccaaatcctgttcacttacctgcacttagcaccggatttgccacaaactgaagacctgattaaatcaaaagccatttgtatcgcgtacgaaacagtcacagacaaccgtggtggcttgcctttattagctcctatgtctgaagttgctggccgtatgtctatccaggctggtgcccgtgctttagagaagtcatgtgccggtcgcggtatgttattaggtggcgtacctggtgttgaacctgccaaagtcgtgattatcggtggtggtatggttggtaccaacgcagctcagatggctgtaggtatgggtgctgacgtggtcgtactggatcgcagcgtagacgtattacgtcgtatcgatgctcagttcaatggcgcagtgaaaactgtgtactccactgttgatgcgctggaaaaacatgtgttatctgctgacttagttattggtggcgtgttaatcccaggtgctgcggctcctaagctggtgactgccgatcatatcaaacgtatgaaaccaggttcagccattgttgacgtggctatcgaccagggcggttgtgtagagacttctaaagccactacgcacgctgatcctacctacattgttgatgacgtagtgcattattgtgtggccaacatgccaggcgcagtgccactgacttctacttttgctctgaacaacgctactctgccgtttatcatccgtttagccaacaaaggctacaaacaggcattgcttgacgatgcgcacctgttaaacggcttaaacgtgatcaatggtcatgtcgtgaacaaacatgtggctgacgcgttaaacctgccatttgttgaacctaaacaagtgttagctgcggtctaat

SEQ ID NO: 219494 - DNA, 964 bp, Unknown
  Bacterial polypeptide expressing nucleotide sequence isolated from the Sargasso Sea
atgctgattggtgtaccgaaggaaatcaaaccagatgaatacagggtggcgttaacaccagccggtgcagagatgttggcggaagccggtcatgatctcttgattgaaagaggggcaggcctgggtagtggtttcagcgacggtttttatgaaggtgcgggtgccaaggttctcgatacggcggatgagatatgggcgagggccgagattatcttgaaggttaaggagcccatcaagccagagtggcccgagatgcggtcaggacaggtaatcttcacctattttcacttcgctgcatctgaggagttgacgagggctgtccttgattccggggctattgctatcgcctacgagacggtcgaactcgacaccggagagttgcctctgctgacgccaatgtctgaggtggcaggtagaatggctgttcaagaaggagcgaagtacctcgaaaagccacagggaggactaggggtgctgttgggtggggttcccggggtgaagcctggcagggtcctcatcttaggcggaggagtggttggaaccaacgcagcaaagatggcagctgggttgggtgcctcagtagcaatcatggatattaacctcgaacgtcttcgttatctcgacgatgtgatgcctgcgaatgttgagacgcttttctcgacgcgttacgcgatccgagagcaaatccaggaagcagatttgatcattggtgctgttttaatccctggtgcgaaagctcctaatctgatcacgagaaaagacctctcttttatgcaagagggcgctgtgatctgtgatgtagccatcgaccaaggaggctgtgttgagacaatgcagcctactacgcacaacgatccggtttatacggttgatgggatcatccattatgcggttgcgaatatgcctggcggagtgccgcgaacaagcacgctagcgctcacgaatgcaacgttgccatacgcga

SEQ ID NO: 219495 - DNA, 1117 bp, Unknown
  Bacterial polypeptide expressing nucleotide sequence isolated from the Sargasso Sea
atgttgatcggagtccccaaagaaattaagccgcaagaaaatagagtaggcctaactcctgaaagtgtaaaggaacttattgatgatggtaatgaagtaatcattgaaagaacagccggtcaagggtcaggttttgacgatcaaaattataacgatgttggggcaacagtttttgaaaatgcgcaagatattttcgatcgtgctgagttgatcattaaagttaaagaacctcaagataatgaaataaaaaagttaaaagatggccagctgctattcacatatttacaccttgcggcaagtaaagcattgacagaaggattaatgaattctggcgcaacatgtatagcttacgaaactataactgataacaatggaaggcttccgctactcgctccaatgagtgaagtagccggtagaatttcaattcaagcaggagccagagctcttgaaatgacaaacaaaggaagaggtgttttattatctggcgcaacaggagcaccaccagctaaagttgtaattattggatgtggagttgtaggttttaatgccgcccttattgctcatggaatgaaatcaaatgtaatgcttattgatcaatctgaagcaagacttaatgaattaaaaaattattttaatgatgaagtcaatacatcgatatcaacacctgaaactatagctgaagaagttaaaaaatgtgacttgctaatagggggtgtgctgatcccaggctctagtgcgcccaaattagtatcagatgaactagtttccaaaatgaaaaaaggggcagcaatcgtggatgtcgcaatagatcaaggtgggtgcattgaaaccagcaagcctactactcacgcagacccggtttacattaaacatgacgtggtacattactgtgtaacaaatatgcctggatgcgttccccgtacatctaccatctctctaaatcaagctacattaccgtttgtaaaaaaattagcgagagatgggttaaaaaaagcattatctgatgataggaattttatgaatgggctaaatgttataaaaaataaatgcactcaagcagatgtagcaagagatctaaacatagctttttcaaaccctgaagatttagttgcttaaa

SEQ ID NO: 219496 - DNA, 1108 bp, Unknown
  Bacterial polypeptide expressing nucleotide sequence isolated from the Sargasso Sea
atgattataggaattcctaaagaaattaaagaaagtgaacacagagttggtatgactccatctggtgttcaaactctgattcaaaatggacatgatgtttatgttcaaaattctgcaggtcaaggaagtggtcattcagatgaagattattcaaatgtaggtgctagccttctaaaaacaattgaagaagtatatgatatttctgaaatgattattaaggtaaaagagcccttaaaaaaagagtattcattaataaaagaaggtcaaatcatttatacatattttcattttgcttcatcattagagctaacaaaagcaatgattgatagtaaatcagtttgtattgcttacgaaacagttgaaaactctgataggtctctcccacttttaactccaatgtctgaggttgctggaagaatggcagctcaacaaggagctaaatttcttgaaaaacatcaaaaaggttgtggtatcttattaggaggggtacccggagtaagccctgctaaagctgttgttcttggcggtggtgttgtaggaactcaatcagctaaaatgttagctggtttaggagctgatgtcactattttagatataagccttgatagacttagagagcttgacgatataatgcctaaaaacgttaaaaccaagttttcaaatcagtataatattaaacaagaaattcaaaatgctcatctagtaattggagcagttttaattgctggagctaaagcacctaatctaattactaaggatatgcttaaggatttgagaaaaggtactgttttagttgatgttgcagtcgatcaaggaggttgttttgaaactacaaaaccaactactcacagctcccctacttatattatagacgatgttttacattattctgtagcaaatatgccaggtgctgttcctatgacatctacagaggcattaaccaatgcaacagttgcttatgccattgaaatagcaaacaagggatggaaaaaagcgtgtaatgaaaatgaaccattgaagaagggtctcaatatcattaatggcgatattgtgtacaaggctgttgcagacgcattcgatcttaactacactgaactaaacatataat

SEQ ID NO: 219497 - DNA, 1117 bp, Unknown
  Bacterial polypeptide expressing nucleotide sequence isolated from the Sargasso Sea
catgctgatcggtgtgccgaaagagatcaagaaccacgaatatcgcgtaggcctcacgccggccggcgcgcgcgagctgacacggcacggccatcgcgtactggtgcagcgcggcgcgggcacggcgatcggcctgctcgacaacgactacacggccgcgggtgcatcgctctgcgacggcgccgacgaagtcttcgcgcgcgccgacatgatcgtcaaggtcaaggagccgcagccggcggaatgcgcgatgctgcgacgcggccagattctctacacgtacctgcatctcgcgcccgatcccgaccaggcggccgcactcgtgaagtccggcgccgtctgcatcgcgtacgaaaccgtgacgggcccgggcggcggcctgccgctgctcgcgccgatgagcgaggtggccgggcgcatgtcgatccaggtcgcggcgacccacctcgaaagcccgcgcggcgggcgtggcctgctgatggccggggtgcccggcgtaccggccgcgcatgtcgtcgtgctcggcgcgggcgtggtgggcaccggcgcgctgcagatggcagtcggcctcggcgcgcgcgtcaccgtgctcgataccaacgtgaaccggctgcgccagctcgacctcgtcttcgccaaccggatcacgaccgtctgctcgaatgcacacacgatcgacgaagccgtgcgcgacgccgacgtcgtgatcggcgccgtgctcgtgccgggcgcatcggcgccgcggctcgtcacgcgcgacatgatcgcgacgatgcgcacgggagcggtcgtcgtcgacgtcgcgatcgaccagggcggatgcttcgagacgtcgcacgccacgacgcacgcggcccccaccttcgtcgtggacggcgtcgtgcactattgcgtcgcgaacatgcccggcgccgtcgcgcgcacgtcgaccttcgcgctgaacaacgcgacgctcacccatgcgctcgcgctcgccgacaagggctggaagcaggcaatgaccgacgatccgcatctgcgcgcgggcctgaacgtgtgcgacggacacatcacgtacgaagccgtcgcgctggcgcttggcctgccctatgtgccggcggccggtgtactggcatga

SEQ ID NO: 219498 - DNA, 443 bp, Unknown
  Bacterial polypeptide expressing nucleotide sequence isolated from the Sargasso Sea
aatgaaaattggagttccaacagaggtaaaaaataatgagagcagagttggcttaactcctgattcagttaaaaccctggttgagaaaggtcatgaagtaaaaattcagtccaatgcaggcgctgcaattggtttttctgactcactgtatcgtaaatctggtgcaatcattcttcaaaatgctgaagaggtcttttgtgccgcagatttaattataaaagttaaagagcctgttcaagaagagcttaaatttttaagagaagaccttactttatttacatatcttcatttagcaggaaactctgctcaggctaaaaaattgcttgaaactggtgttactggtatagcatacgaaacagtaactgcctcagatggctcactgccattgttggctccaatgagtgcaattgccggacaattaagtttggttgttggttcatatc

SEQ ID NO: 219499 - DNA, 790 bp, Unknown
  Bacterial polypeptide expressing nucleotide sequence isolated from the Sargasso Sea
tatgattgatagtaaatcagtatgtattgcttacgaaacagtgaaaaactctgacaggtcactcccactcttaactccaatgtctgaagttgctggaagaatggcagctcaacaaggagctaaatttctcgaaaaacatcaaaaaggttgtggtatcttactaggaggagtacctggagttagccctgctaaagctgttgttattggcggtggtgtagtaggaactcaatcagctaaaatgttagccggtttaggagctgatgtcactattttagatataagtcttgatagacttagagaacttgatgatataatgcctaaaaacgttaaaaccaagttttcaaatcattataatattaaacaggaaattcaaaatgctcatttagtaattggggcagttctaattgctggagcaaaagcacctaatctaattactaaagacatgcttaaggatttgagaaaaggtactgttttagttgatgttgcagtcgatcaaggaggttgttttgaaactacaataccaactactcacagctcccctacctatattattgacgatgttttacattattctgtagcaaatatgccaggtgctgttcctatgacatctacagaagcattaaccaatgcaacaattgcttatgcaattgaaatagctaacaagggatggaaaaaagcgtgtaatgaaaatgaaccattaaagaaggggctcaatattattaatggtgatattgtgtacaaggctgttgcagacgcatttgatcttaactatactgaactaaacatataa

SEQ ID NO: 219500 - DNA, 1129 bp, Unknown
  Bacterial polypeptide expressing nucleotide sequence isolated from the Sargasso Sea
aatgttgattggcgtaccaaaagaaattaaatcggatgaatacagaattggactgactcccgaaagcgttaagagcttaacgcagtccggtcaccaagtaatgattgaaaacaatgctggattaggcatcggcaaagacaacgatgcttatgaagaatctggagctgaaattgttcaaaccagagaagagatttttcaaagagctgaaatgatagtgaaagttaaagagccacaacttgaggagtgtgcccttttaaagagcgatcaaattttattcacctatctccatttagcgccagaccctgatcaagtcaaagcattgattgaatctggctgcagagccatagcttatgagtcagtcagggctgatgatgggacgtacccattgttgacgccaatgagtgaggttgcagggaggatggccgtacaagccggggcaacatgtttggaaaaagtgaagggtggattgggtcgattgattggcggcgtaaccgatgtggatccagcagatgtggttgtaattggaggaggagttgttggatataactcaatagagatagccattggcatgcaagccaacgtcactgtattggataaatctccagagcgattggatcaattggagtctatctttggagaaaagctcaacgcggtgcttgcaacggaagaaaataatcaggcgtgcatcaaggaagcagacatcgtgattggtgcagtgctgattccgggcgcatctgcgccaaaattaatctctcgcgaattagtccagtcaatgcgaaagggatccgtattggtcgatgtcgccatagatcaaggcggctgttctgaaacttcaaaaccgaccacgcattccgaccccacctacgtggaagaaggggtccttcattattgtgtggcaaacatgcctggagctgtgccaatgacttccacttatgcgttgaataatgcgacactcccttatgttttaagtcttgcaaatgaaggctttaacaaggctttgagtcttgataaaggtttttgcgatgggctcaatattcacagcggtaaagtgacaatcaccgcagtggctgaagagcaaggctatgactatcatgatccaattgagctgatcagaggcctggatcaataa

SEQ ID NO: 219501 - DNA, 1081 bp, Unknown
  Bacterial polypeptide expressing nucleotide sequence isolated from the Sargasso Sea
atgaaaattggagtaccagcagaagttaaaaataatgaaaatagggtaggccttacacctaattcggtgaaatacttatcgaatcttggccattcaatttatgttcaatctaaagcaggaaattcgattggattttcagataatttataccgtgaatctggagctatcattcttgaggaagctggagaagtttttaaaaatgcaaatcttataatcaaagttaaagaacctgttgaacaagaacttgaatttttaagggaagaccttgcattatttacttatcttcatttagcaggtaattcagctcaagctaaaaaattacttgaaactggagtaacaggtattgcgtatgaaacagtaaccgctacagatggctctctccctttattagctccaatgagtgcaattgctggacaattaagcatggttgttgggtcatatcatttgcttaagcccaataatggtaggggtactttaattagtaacattgatccaagaatagtaactgttattggggctggagtcgcaggcaaagaagcaattgctaaagcggtattaaatcatgctgaagtcaaaatcattgatttagatcagtcagtcttagatgacttaaaaaaagtttatgggggtgaaaatgtggagtacattttatctactcctgattcaattcaagatgccataagtgtttctgatcttgtaattggttctgtgtatgttgttggcaaagaagctccaaaggtaattaaaaaagaaatgttaaagagtatggttgatggtagtgtgatggttgatatttctattgatcaaggcggatgttttgagacgagtaaacctactaaccacgataatccaacttttttacatgatggaattctgcactattgtgtaactaacatgccgggagctgttccattaactgcatccaatgcccttaataaagcaaccttaccttttattcaggaaattgcagaaaagggtataactaaagctttgggtgaaaataaacatttattaaatgggcttaatattcaaaatggaaaaataattcatcctggcgtaaaagaatctttaaatatttaga

SEQ ID NO: 219502 - DNA, 811 bp, Unknown
  Bacterial polypeptide expressing nucleotide sequence isolated from the Sargasso Sea
catgagggttggtgtcccaaaagaaataaaggtgctcgaatatagggtcggaatgattccctcaggtgtgaaagagcttgtagatgaaggacatgaggtttttgttgaaaccaatgctggaatgggtattgggatgacagatcaagattacattgatgcaggtgcttcgattctatcgacacctaaagaagtattcgatatctctgaacttataattaaggtcaaagaaccccaactaaatgaatgtaaaatgttaaaaaccggtcaggtactcttcacttacttacatcttgctgctgatccagaacaggcggcagcacttgtaaaatctggtgttacagccattgcctacgaaacggttactgcagacaatggatctcttcctttgctaacaccaatgagtgctgttgcgggaagattatcaattcaggctggtgcctatgcactccaaaaagcaaatggtggaagaggagttcttcttggaggagttcccggagtaaaagcaggacaggtattaatcattggtggaggtgtttcaggggcacatgcagctgagatggctgttggacttggagcgcaggtaactattcttgatctatcttcagatagacttaaagaattgagtaataagtttggcgataaagtttcaacacgtgtctcttcaaaacaattaatcaatgaattggtagttgagtcagacttagttataggggcggtgcttgttgctggtgctgcggctcctaaacttgtgacaatagaacatgtaaaacaaatgcgcccaggttcggttatggtagatatttcaatagat

SEQ ID NO: 219503 - DNA, 1117 bp, Unknown
  Bacterial polypeptide expressing nucleotide sequence isolated from the Sargasso Sea
aatgattattggtgtaccaaaggaaattaaaaaccacgagtatcgtgtcggtatggttccttcaagcgttcgcgaattgaccatcaaaggtcatgaagtgtttgtcgaaacaaatgccggcacgggaattggtttttcagatcaggattatgttgatgcaggtgccaaaatattagcaactgctgctgaagtctttgctaaagcagagatgatagtaaaggtaaaagagcctcaagcagtcgaacgcgctatgctgcgttatgaccagattttattcacttatctgcatttagcgccggatttaccgcaaactgaagatttaattaaaagtggtgccgtatgtatcgcttacgaaacagtaaccgatgaccgtggtggcttacctttgctggccccaatgtcagaagtggctggtcgcatgtcaatccaagcgggtgcgatggcgctggaaaaatcatccggtggccgcggcatgcttttaggcggtgttccaggtgtagagcctgcaaaagttgtgatcatcggcggtggtatggttggtaccaatgccgcacaaatggctgtgggcatgggtgctgatgtggttgtacttgatcgtagcatcgatgcactgcgtcgcttaaacgtacaatttggttctgcagttaaggctgtttactcaactgccgatgcgatcgagcgccatgtattagaagctgatctcgtgattggtggcgtattaattccaggtgctgcggcgcctaagcttgtgacacgtagcatgatcgcacgtatgaagcctggcagtgctatcgttgacgtagcaatcgaccaaggtggttgtgtggaaacttcacatgcaacgactcaccaagatccaacttacatcgttgatgatgtagtgcattactgtgtcgcgaacatgccaggtgctgttgcccgcacttcaaccttcgccctgaataacgcgactctgccttatatccttaagttagctaacttaggttataaagctgccctactacaagacaaacacttactgaacggtttgaacgtgatgcacggcaaactggtttgtaaagaagtggcgcaagcattaaatcttgagtacacagcgccagcaagtttattagcctaa

SEQ ID NO: 219504 - DNA, 1117 bp, Unknown
  Bacterial polypeptide expressing nucleotide sequence isolated from the Sargasso Sea
aatgattattggtgtaccaaaggaaattaaaaaccacgagtatcgtgtcggtatggttccttcaagcgttcgcgaattgacaatcaaaggtcatgaagtgtttgtagaaacgaatgccggcacgggaattggttttactgatcaggattatattgatgcaggcgcaaaaatattagcaactgctgctgaagtctttgctaaagcagagatgattgtaaaggtaaaagagcctcaggcagttgaacgcgccatgctgcgtcatgaccagattttattcacttatctgcatttagcaccggatttaccacaaactgaagatttaattaaaagtggtgccgtatgtatcgcttacgaaactgtgaccgatgaccgtggtggcttaccgctgttagccccgatgtcagaagtggctggccgcatgtctatccaagcgggtgcgatggcgctggaaaaatcttctggtggtcgtggtatgttattaggtggtgtacccggtgttgagccagctaaagttgtgatcattggcggtggcatggtcggtactaatgcagcgcaaatggctgtcggtatgggcgcagatgtagttgtgcttgatcgtagcatcgatgcactacgtcgcttaaacatgcaatttggttctgcagttaaagcggtttactcgactgccgatgcgattgagcgccatgtattagaagctgacttagtcattggtggcgtattaattcctggtgctgcggcacctaaactggtgacacgtagcatgatttctcgtatgaaaccaggcagtgctatcgtagacgttgctatcgaccaaggcggttgcgtggaaacctcccatgcaacgactcaccaagatccaacttatatcgttgatgatgttgtgcactactgtgtagcgaacatgccaggcgcagtagcccgtacatcaaccttcgctctcaataacgcaactctgccttatatccttaagttagctaacttaggttataaagccgccctgttacaagacaagcacttactaaacggtttgaacgtaatgcacggcaaactggtttgtaaagaagtggctcaagcattaaatcttgagtacacagcgccagcaagtttattagcctaa

SEQ ID NO: 219505 - DNA, 822 bp, Unknown
  Bacterial polypeptide expressing nucleotide sequence isolated from the Sargasso Sea
ctgctgatccagaacaggcggcagcgttggtgaaatctgatgttacagccattgcttatgagacggttactgcagacaatgggtctcttccgttgctaacaccaatgagtgctgttgctggaagattatcaattcaggctggtgcctatgcactccaaaaagcaaatggtggaagaggagttcttcttggaggagttcctggtgttaaagcagggcaggtattaatcattggtggaggtgtatcaggggcgcatgcggctgagatggctgttggacttggagcgcaggtaactattctggatctatcttcagataggcttaaagaattgagtaataagtttggcgataaagtttcaacacgtgtctcttcaaaacaattaatcaatgaattggtagttgagtcagacttagttataggggcggtgcttgttgctggtgctgcggctcctaaacttgtgacaatagaaaatgtaaaacaaatgcgcccaggttcggttatggtagatatttcaatagatcaaggtggttgttttgaaaccagtaaaccaacgacacatgctgagccaacgtatatcgttgatgatgttgttcactattgtgtaaccaatatgccaggcgcggttcctagaacatcaacattcgctttaaccaatgaaacattgcctttcataaaatcactagcaaacagtggctggcaaaatgctttaaaaaatgatgagcaccttaaaaatggacttaacgttcatgcagggtcaatcaactttgaagccgttgccgatgagcttggctatccatataaatcgcctgacgagataatttaag

SEQ ID NO: 219506 - DNA, 984 bp, Unknown
  Bacterial polypeptide expressing nucleotide sequence isolated from the Sargasso Sea
accaaaagagataaaaaaccacgaataccgcgttggcatgactccagccagcgtacgcgagttggttaactataagcacagcgtgctggttgagaccaatgctggcatcggcattggctttaccgatgaagactacaccgcagcaggtgcgactgtattggcaacagccgctgaagtgtttgctaaagcagagatgattgtaaaagtaaaagaaccacaggctgttgagcgtgcgatgttgcgtgaaggccagatcctgtttacttacctgcaccttgccccggacttaccacaaactgaagatttaattaaatcaaaagccatttgtattgcctacgaaacggttaccgacaatcgtggtggcctgccgctgttagcacctatgtcagaagttgctggccgtatgtctattcaggctggagcccgcgccttagagaaatcatgcgctggccgcggtatgttgttaggtggtgtacctggcgtagcaccagccaaagtggttgtaatcggtggtggtatggtaggtaccaacgctgctcagatggctgttggcctgggtgcagatgtaacagtgctggatcgcagtgttgacgtactgcgccgtatcaatgcgcagttcaacggtgccgttaaagctatttactctactactgatgcactggagcaggaagtactggcggcagatttagttatcggtggcgtattggtgccaggcgctgcagcccccaaactggttacaaaagatcatatcaagcgtatgaaacccggctcagctattgtagacgttgccatcgaccagggtggctgtgtggaaacgtctaaaccgacgacccacgctgatccaacctacattgttgacgacgtagtgcattattgtgtagcaaacatgcctggcgccgtgccacgtacatcaacgttcgcgctgaacaacgcaacactgccatttattatccgtctggcaataaaggctacaaacaagcacta

SEQ ID NO: 219507 - DNA, 742 bp, Unknown
  Bacterial polypeptide expressing nucleotide sequence isolated from the Sargasso Sea
catggcagcctccgttctctcggccccgatggccagcatcggtgtgccgaaggagatcaagctcgatgagcagcgcgtggcgctgactcccgatgcggtgcgggaactggtgagccaaggcttggaggtgcgcatcgaaaccggagccggggctggagcgggaatcggtgacgacgccttcgccgccgccggtgcccaaatggtgagccgcgacgaggcctggggcgcccatttggtggtgaaggtgaaggaaccgcaggcagaggaatttgtctatctgcggaaggacatggtgctgttcacctacctgcacctggccgcctatcccagcgttggcgaggctctgctggaggcaggcaccgctgccatcgcctacgaaaccgtgcagctggagaacggcagcctgccgttgctggcaccgatgagcgaaatcgcagggcgcttggcggcccaggttggagctcacctgctggagaaaccccacggcggccgcggcgtgctgatggggggctgcaccggcgtgcaaccggcccgggtggtggtgcttggcgccggcaccgtgggatggaatgccgcacgaacggccgccgccatggatgccgaggtgttgctgctcgaccgctcaccccagcggttgcgcagcctggaggccgaccggcgcggtcgcttgatgagtgtggtgagcagccagtgggcttctggaacggttggtgccaacggcggatctggtgatcggagccgt

SEQ ID NO: 219508 - DNA, 636 bp, Unknown
  Bacterial polypeptide expressing nucleotide sequence isolated from the Sargasso Sea
tatgaaagttggatcaccaaaagaaataaaaaatcacgagtatagagttgggctaattccgccaacggtaactgaattaaaaaaatacggtcatgaagtttttattcaatcggaagctggtctgggagttggtttttccgacaacgactataaagctgctggtgctaaaatattcaaagatgctaagtcaatctttgaagaatctgatataattgtaaaggttaaagagcctcagaaagaagaaagaagacttctaagaccagaacaaatccttttcacttatcttcatttagctccagatcgtagccaaactgaagacttaattgaaagtaaagttacagcaatagcatatgaaacagttacagataataatggcgggttaccactcctagctccaatgtctgaagttgcaggcaaactagcgccccaagccggatcttgggcacttcagaaagcgaatggagggagcggaatacttttaggaggagtgtcgggtgtattgccagctaatgttcttgtaatcggaggtggagttgtaggtactaatgcggccagagtcgcatttggaatgggagcaaatgtgactattttagacaagtcgctgaaaagattggcagagttagaaaatcaattctc

SEQ ID NO: 219509 - DNA, 1141 bp, Unknown
  Bacterial polypeptide expressing nucleotide sequence isolated from the Sargasso Sea
catggcagcctccgtcctgacggccccgatggccagcatcggcgtgcccagggaaatcaaggccgatgagcaacgggtggccctcacccccgatgccgtacgggaactgatcagccaggggctggaggtgcgggtcgaggccggggccggggcgggagccggcatcggcgatgaggccttcgccgcagccggagcccagctggtgagccgtgaggacgcctggggcgcccatctggtggtgaaggtgaaggagccgcagagcgaggagttcggcttcctgcgggacgacatggtgctgttcacctacctgcacctggccgcctatccacaggtgggcgaggccttgctggaggccggcaccgctgccatagcctacgaaaccgtgcagctggaaaacggtagcctgccgttgctggcgccgatgagcgaaatcgccgggcggctggcggcccaggtgggggcccacctgctggagaaaccccatggtggacgcggcgtgctgatggggggctgcaccggcgtgcagccggcccgggtggtggtgctgggggccggcacggtgggctggaacgccgccagaaccgcggcggccatggatgcggaagtgctgctgctggaccgttcaccccagcggctgcgcagcctggaggcggatcgtcgcggtcggctgatgagcgtggtgagcagccgtggtctgctggagcgcctggtgcccacggcggatctggtgatcggcgccgtgctgacccctggcggccgagccccgaccctggtggatgaggcgatggtgcagcagatgcgtccgggctcggtgattgtcgatgtggcgatcgaccaggggggctgcatcgccaccagccgcgaaaccacccacaccgaccccacggtgacgattcacggggtgcagcactacgccgtgggcaacatgcccggggcggtgccgttcacctccacggaagcgctggtcagcgtcaccttgccttacatccttggcatcgccggccgaggcctggaggaagccgtcaccgaacggccggaactgctctccggtctcaacacggtgcagggatccgtgtgccatccaggggtcgccaaggccttgggagtagcgccccggcacccgatggcatgcctgcgctga

SEQ ID NO: 219510 - DNA, 991 bp, Unknown
  Bacterial polypeptide expressing nucleotide sequence isolated from the Sargasso Sea
tatgaaaataggtatacctaaggaaattaaaaataatgagtttagagtagctatgactccagttggagtaaaagaacttgttaataaaggtcataaagtaattttacaaaaaaatgcaggtttagaaagtaatttttcagataaagaatatttgaaatcaggagcaaccatatacgaaacagctgatgatatttataataattcagaaatgattctgaaagtaaaagaacctattaaagaggagtataataaaataaaaaaaaatcaaattatttttacatattttcattttgcatcaaatgaaaaacttacccaagctatggtaaataataaaagtatatgcatagcttatgaaactgttgaaaaggtggataaaacactccccttattaaaaccaatgtcagaagttgcggggagaatggcagctcaagagggagcaaaatatctagaaaaacctatgggaggaagaggtatattattgggtggagtcgaaaatgtagcgcccgctaaagttttgataattggtggtggtatttctggaacggaagctgcaaagatgtgttctggtctacaagcaaatgtaacaatattagataccaatgaaaccaaaatcaaagaattaaacaaagtaatgcctaaaaatgttaaagctattttatccaacaaaaaaacattatataaatgtgcaattcaaagtgatcttattataggagcggttctagtaactggaggaaaggcaccaaaattaatcacaaaaacaatgttaaaagatttaaaaaaaggttgtgttttggttgatatagcaattgatcaaggcggatgttttgaaacttccaaacccacaacccatcaaaatcctacttacatagttgatggtattcttcattattgtgtagcaaatatgcctggagctgtaccatatacatctaccctagctctaacaaataataccctgccttatataattcagatagcagaaaaaggatgggaa

SEQ ID NO: 219511 - DNA, 1102 bp, Unknown
  Bacterial polypeptide expressing nucleotide sequence isolated from the Sargasso Sea
aatgattattggtgttcctaaagaaattaaggaaatggaaaaccgcgttggagctactcctgccggagtcaatgagttgacccgaaatgggaatcaagtgcttgttgaagcaggagccggagctggaagcggttttgccgatgaggcttaccgtgatgccggcgcaaccattaccgacaatgtgcgagaggtatggggtgctgaaatggtttataaggtgaaagaaccgcttgaagatgaatacggatacttccgaagcgacttgatgctgttcacctacctccatctggcagcagagggtcctttgaccaaagctcttgttgataacaaggttaacagtgtcgcttatgagacggtgcaattggaagacggaagccttcccctcctgactccgatgagtgaagtcgcaggccgaatggcggttcaggttggagcacgttttttggagaagcctcaaggtggacaaggggtgctactcggtggagttcccggggtacatccagcgatggtggttatcatcggtggtggagtcgttggtatcaattcagcaaagatggcagttggcatgggtgccagagtgaccatcctggatgtcagcgcagaacgtatgcgatatcttgatgatgtcttcaatggacgcgttgagttgatcatgtccaatagttacaacattgccgaagcagtggaatctgctgatttgttgattgggggggtgctgattcctggtgcaaaagcgcctcatctagttactgaagcaatggtgaaaacaatgaagcccggatcggtgatcgttgatgtggcgatcgaccaaggtgggtgtattgaaacgatcgatcacgtgacctatcacagtaatcctgtatacgaaaggcatggggttgttcattattcggttggaaacatgccaggggcagtcgctcgaacatcgacccttgcgttgaccaatgtcactatgccatatgcacttgctttggcaggcaaatgcttcgtggatgcctgtcgtaatgacaaggccctcggacttggagtgaataccatgtatggcaatgtgacttgtgaaggagttgccagttcacttgggtatccttatgttccttttgat

SEQ ID NO: 219512 - DNA, 776 bp, Unknown
  Bacterial polypeptide expressing nucleotide sequence isolated from the Sargasso Sea
aattcgttattcggaggctgttaatcaggatgaagtcgaagcactagccgctcttatgacttataaatgcgcactcgttgatgctccctatggtgggtcaaaaggcggactatgcattaacccacgtgactatgaagaacatgaacttgaaataattacacgacgctttgcatacgaattaattaagcgagaccttataaatccaagccaaaacgtgccagctccagatatgggtacaggtgaacgtgaaatggcatggattgctgatcaatatgcccgaatgaataccactgacattaacgcccgtgcatgtgtcacaggtaaacctttgattggaggaggaattgcaggtcgcgtagaagcaacaggccgtggtgtacaatatgctttacaagaattttttcgcgaggctaaagatgtgtcgaaggctcagctgtctggaactttagatggaaaacgtatcgtcgttcaaggccttggcaatgttggctatcatgctgccaaatttctacagcaagaagacggtgcgcgcattattggcatcatcgaacgggatggagctctggtcagcgaaaacggacttgatgttgaggctgtacataattggatctcaaaaaatggtggcgtttctggttttccagatgctactttcgtagctgacggcgcaatagtactagaacaggattgcgatattttgattccagcggcactagagggtgtaatcaatcttgataatgctaccaaaattaaagctccacttattattgaggctgcaa

SEQ ID NO: 219513 - DNA, 550 bp, Unknown
  Bacterial polypeptide expressing nucleotide sequence isolated from the Sargasso Sea
atgcgatcgagtgaggccaacagaatttattttgatcgagcagcagatcaactcgatctcaaagaaaacatgcgtcaactgctccttacgccgcaacgagaagtacaggttcagattccggtggaacttgattccggagccattgcctcttttattggctatcgggttcagcacaataacgcccgtggaccaatgaagggtggcctacgataccactctcaagttgacctcgatgaaatccgagctcttgcgtcactgatgacctggaaaacggctgttgtaaacattccgtacgggggcgccaaagggggtgtcgcacttgatcctacgtcactttccactcgagagctcgaacgggtcaccagacgttttgttgacaacatacatgacctcattgggcccgatgttgatattccagcgcccgacatgggaacctcgtcggaagtcatggcatggatcatgaatcaatatgataaatttcatggtttctctcccgccatgtgtcaccgggtaaacccgtgggaataccatgggctgcccggtcggaaga

SEQ ID NO: 219514 - DNA, 829 bp, Unknown
  Bacterial polypeptide expressing nucleotide sequence isolated from the Sargasso Sea
tcggcgcttcactttcgagctggctaaaagagatttgatacatccttcgcaaaatgttcctggaccagatatgggaacagatgaaaacgtgatggcttggatggccgatgagtacagaaggctcaatcccactgaaattgatgcgatggcagcagtgactggaaaaccgattgccgttggaggaattgacggtcgaactgaagccacagggagaggcgtttattattcaatattggagttcttgaagaataaaaaagatcgccagaagtcaaaattgagacaaggacttgaggatcaaaaggtcatcattcaaggttttgggaatgttggttatcatgtggcaagtcttttgcatcaatctggggcaaagatcatagcgatcattgaaagggacgggtctgtggtcaatcaagacggcattgacgttgagtcattgaaaaaatattttacaaaaaagagatcctttgagggatacgacggatactcgaaagtcagagggcgttttttaaccaaagactgcgatattcttataccggcggctacagagggagttatcaacaagaataatgcaagcaatatcaaagcaaaattaattgtggaaggtggcaatggcccggtaacttcagacgcggataaaattctgagaaaaaaaggaatcacggtcataccagatttttatgccaattcaggcggtgtcatagtgtcttattttgaatgggtgaaaaacctgtcaaaaatgcgttacggattgatgcaggagagggaagtagagaagaggagtgagaatctagtgaatactttggaagcaatgacaagttctacatttcct

SEQ ID NO: 219515 - DNA, 847 bp, Unknown
  Bacterial polypeptide expressing nucleotide sequence isolated from the Sargasso Sea
acttgagaggattactaggcgcttcactttcgagctggctaaaagagatttgatacatccttcgcaaaatgttcctggaccagatatgggaacagatgaaaacgtgatggcttggatggccgatgagtacagaaggctcaatcccactgaaattgatgcgatggcagcagtgactggaaaaccgattgccgttggaggaattgatggtcgaactgaagccacagggagaggcgtttattattcaatattggagttcttgaagaataaaaaagatcgtcagaagtcaaaattgagacaaggacttgaggatcagaaggtcatcattcaaggttttgggaatgttggttaccatgtggcaagtcttttgcatcaatctggcgcaaagatcatagcgatcattgaaagggacgggtctgtggtcaatcaagacggcattgacgttgagtcattaaaaaaatattttacaaaaaagagatcctttgagggatacgacggatactcgaaagtcagagggcgttttttaaccaaagactgcgatattcttataccggcggctacagagggagttatcaacaagaataatgcaagcaatatcaaagcaaaattaattgtggaaggtggcaatggcccagtaacttcagacgcggataaaattctgagaaaaaaaggaatcacggtcataccagatttctatgccaattcaggcggtgtcatagtgtcttattttgaatgggtgaaaaatctgtcaaaaatgcgttacggattgatgcaggagagggaagtagagaagaggagtgagaatctagtaaatactttggaagcaatgacaagttctacatttccttca

SEQ ID NO: 219516 - DNA, 1402 bp, Unknown
  Bacterial polypeptide expressing nucleotide sequence isolated from the Sargasso Sea
ttggcaaataactctacgtttttaaattctgtcaatcaggtttttgacgaagcctcttcgcttctttctcttcctgaagatctcgctcgaaaaatcaaattagcaaattctgtttatcaggtgaactttggtgttcgattgagaaagacattgtatacattcactggatatcgatgcgtccattctgagcatattgagccggtgaaagggggcattagatattctctgagcgcaactcaagatgaggtagaagcactagccgctttaatgacttacaaatgctctctgatggatttaccatttggtggctcgaaaggagcgctaattgtcgatccttaccgatggaaaaatgaagaacttgagaggattactcggcgcttcactttcgagctggctaaaagagatttgatacatccttcgcaaaatgttcctggaccagatatgggaacagatgaaaacgtgatggcttggatggccgatgagtacagaaggctcaatcccactgaaattgatgcgatggcagcagtgactggaaaaccgattgccgttggaggaattgacggtcgaactgaagccacagggagaggcgtttattattcaatattggagttcttgaagaataaaaaagatcgtcagaagtcaaaattgagacaaggacttgaggatcagaaggtcatcattcaaggttttgggaatgttggttaccatgtggcaagtcttttgcatcaatctggcgcaaagatcatagcgatcattgaaagggacgggtctgtggtcaatcaagacggcattgatgttgagtcattaaaaaaatattttataaaaaagagatcctttgagggatacgacggatactcgaaagtcagagggcgttttttaaccaaagactgcgatattcttataccggccgctacagagggagttatcaacaagaataatgcaagcaatatcaaagcaaaattaattgtggaaggtggcaatggcccagtaacttcagacgcggataaaattctgagaaaaaaaggaatcacggtcataccagatttttatgccaattcaggcggtgtcatagtgtcttattttgaatgggtgaaaaacctgtcaaaaatgcgttacggattgatgcaggagagagaagtagagaagaggagtgagaatctagtgaatactttggaagcaatgacaagttctacatttccttcagatttcaaagatgattatattaaaggctcaagcgaaatcgacctagttcgatccggcttggaagaaaagatgagacaaggttatcaatccattcatgaggtcttccattctgataagaaaatcaaagatttcagaacggcagctatggtgattgctgtaagaaaggtctccgaagcatataattacctcggaatttaat

SEQ ID NO: 219517 - DNA, 115 bp, Unknown
  Bacterial polypeptide expressing nucleotide sequence isolated from the Sargasso Sea
atgcctgcgttgaaatacggcggcgaaagcaagcagaccaactacgtacgtggcgccaacatcgcgggtttcgtgaaggtagccgacgcgatgttgggtcagggtgtgatttaat

SEQ ID NO: 219518 - DNA, 136 bp, Unknown
  Bacterial polypeptide expressing nucleotide sequence isolated from the Sargasso Sea
agattgaagaatatcatgaatagcatccactcatcctgtttagagcatagtacaaacgagaattatgtcaaaggtgcgaatattgcaggattcatcaaggtagcggactcaatgcttgatcaaggagttgtctaag

SEQ ID NO: 219519 - DNA, 505 bp, Unknown
  Bacterial polypeptide expressing nucleotide sequence isolated from the Sargasso Sea
attggagcttaaaaatgtaaaaagaggaagaatttctgaatatgccaatcaatattcaagcgctaagtttgttgagggttcaagaccttggtctactaaagctgatgttgccttaccttgcgcaactcaaaatgaattaaacggagaagaagcccaggttttagttaataatggtgttatgtgtgttgctgaaggagctaacatgccttgcacacctgaagctattgaggtttttcagagcaacaaagtattgttttcgccaggtaaagcttcaaatgctggaggtgttgcaacttcaggtcttgaaatgtctcaaaattcacttcgtttatcctggacttcagaagaggtagatgagaagttgcattcaattatggtgtctattcatgaatcttgtgtcaaatatggttcaagggaggatggtactgtcgattatgtaaagggtgctaatgtagctggatttgttaaagttgctgatgcaatgatagaccaaggattggtttaa

SEQ ID NO: 219520 - DNA, 209 bp, Unknown
  Bacterial polypeptide expressing nucleotide sequence isolated from the Sargasso Sea
ctcaggtttggaaatgagtcaaaatagtatgagacttaactgggaaagagaagaagtcgaccaaaaattaaatcaaattatgaaaaatatacatgctcaatgtattgaacatggttctgatggagattttgtaaattatgttaaaggcgctaatattgcaggatttataaaagtagcagatgccatgattgaccaagggattgtctaaa

SEQ ID NO: 219521 - DNA, 236 bp, Unknown
  Bacterial polypeptide expressing nucleotide sequence isolated from the Sargasso Sea
agcctctaatgcaggaggagttgctgtatctggtcttgaaatggctcaaaattccttaagatattcatggactagacaagaagtagatgaaaaacttaaagaaattatgataaaaatccataaaaaatgtctgaaatatggaaaagagaaagattatgtagattatggaaagggtgctaatatttcatcatttataaaagttgctgatgcaatgcttgctcaaggcgttgtttaaa

SEQ ID NO: 219522 - DNA, 868 bp, Unknown
  Bacterial polypeptide expressing nucleotide sequence isolated from the Sargasso Sea
acagcgacatattggcgccaacaccgatgtacctgcaggtgacataaacgtcggcgcgagagaaataggatacctttatggcgaatatcgcaggctaaacaataagttcgaaggcgtattaaccggtaaaggcttagaatttggtggtagctatgtacgtactgaagctacaggctttggcttaatttactttttagaagcggtatgtcgacatcaaggtactccaattgaaggcaaaaccattgcagtgtctggagccggaaacgtagcgttgcatgctgcacttaaagcggtagagaaaggcggaaaagttatttcgctgtcaaatagccgagggcttttacataatgagaatgggttaactgataccgcgcttaaatgggcaatcgacaaccacgcaaaccgcaacaatatccttgctgacatggcagatgaaaacatgggcaagtggatagctgataaaaagccttggcatttaaaatgcgacatagcactgccttgcgctacgcaaaacgaactacttgaagaagatgcaaaatcactgctagataacggctgtcaaatggtactagaaggtgcgaatatgccgtgcacaaacgaagcgcaggctttgtttttagacgcccaaattgcatacgtaccaggcaaagcatctaacgctggcggcgttgcgctatcaggcttagaaatgagccagaacgccatgttcaatcaacgtaacgcaagcgcactcgatgaacagctctattcaattatggaaagcattcatcagcgctgtgttgatgagggtaaatctgaaggcgatgctggaagcagctacgttgattatatgaaaggcgccaatgtagcagcatttcgtagactcgcg

SEQ ID NO: 219523 - DNA, 456 bp, Unknown
  Bacterial polypeptide expressing nucleotide sequence isolated from the Sargasso Sea
caaagaagtataatgttaaatataccaaaggcaagcgtccatggtcaattaaatgtgatatcgcattaccttgcgcaactgaaaatgaattaaatcttgatgatgcaaaagaacttactggtaatggttgttatgtagttgctgaaggtgcaaatatgccttctactactgatgctgtacatcatttcattaataaaaaaatattatatggtcctggtaaagctgcaaatgctggaggagtagcaatatcaggaattgagatgagtcaaaatagtacaagaattccactatcaagagagaaagttgatggtttgctaaaagaaattatgcaacgcgtacatagaacttgtgtaaaatatggtgataaaggagactttattaattatgttgatggtgctaatattggtggatttgtaagagttgctgattcaatgatagaccaaggaattgtttaat

SEQ ID NO: 219524 - DNA, 312 bp, Unknown
  Bacterial polypeptide expressing nucleotide sequence isolated from the Sargasso Sea
cagccaacatgccttgtgaacaagaggcagtagacgcctttacatcagcaaacgtcttgttcggcccagcaaaagcagtgaacgcgggaggagtaggtgtttctggcttagaaatgagtcaaaacagcggtagaatttcttgggaaccggaacgactgcgtgagcttttggaaaatatgatgcgcgatatacatgattcctgtgtcgaatacggcaaatctgataagggtccagtaaactatttggcgggcgcaaacattgccggctttgttaaagtggccgacgcaatgttgagttacggtcacgtgtaac

SEQ ID NO: 219525 - DNA, 457 bp, Unknown
  Bacterial polypeptide expressing nucleotide sequence isolated from the Sargasso Sea
cgcacgcacgggcgtgaagttcgaggccggtgtccgcccctggcacgtgaaggtggacgtggccctgccctgcgccacgcaaaacgagctggacgagaacgacgcgaaaacgctcatccagaacggcgtggtctgcgtggccgagggcgccaacatgccctcgaccatcgaagccgccaaggcgtttgaggccgctggcgtgctctacgcccccggcaaggccagcaatgcgggtggcgtagccacatcgggcctggagatgagccagaactcggcccgcctatcctggccgcgcgaagaggtggacgcccgcctgctgcagatcatgcagggcatccacgcggcctgcctgcaatatggcaagcgtgccgacggcagcgtgagctacatcgacggtgccaacatcgccggctttgtgaaggtggccgacgccatgctggcgcaaggcgtggtgtag

SEQ ID NO: 219526 - DNA, 229 bp, Unknown
  Bacterial polypeptide expressing nucleotide sequence isolated from the Sargasso Sea
aatgctggaggagtagcagtttcgggacttgaaatggctcaaaattctttgcgctatagttggtctagaaaagaagtagatgaaaagctcaaaaaaataatgtcagacattcataaatcatgccttgaatttggatcagaaaaagagcatgtaaactatgtgaagggagcaaatattgctggatttgttaaagttgcagaagcaatgttggctcaaggagttgtataaa

SEQ ID NO: 219527 - DNA, 558 bp, Unknown
  Bacterial polypeptide expressing nucleotide sequence isolated from the Sargasso Sea
gatgaattacaaatcaaaacaagattttttagacaacgtccattcaaaattttcgaatgaaaaagaatttctacaagctgttgaagaggtgattggctctatttgggatactgttcaacaaagtcaggattatttagatggtaatattttagatagaattattacgccagaaagagtgattatatttagagtgccttggttggatgataatggaagagtacatgttaatttaggttatagaatacaatttaattctgcaataggaccatataaaggtggtttaagatttcaccctacagtaaatctaggtgttttaaagttcctagcttttgaacagatttttaaaaacagccttactggactaaatttgggtggtggtaaaggtggttcagattttgatcctaaaggaaaatcagataacgaaatcatgaagttctgtcaatcttttatgactgagttgtcaagacatataggtcataataccgatgttccagccggagatatcggagtaggcggaagagaaattggttttatgtttggtcaatacaaaagaattag

SEQ ID NO: 219528 - DNA, 409 bp, Unknown
  Bacterial polypeptide expressing nucleotide sequence isolated from the Sargasso Sea
aataaaatgtgacattgctttaccttgtgctacggaaaatgaactgaatcttgatgatgcaaaacagctaactgataatggttgttatgtagttgcagaaggcgcaaatatgccttcaacaacagatgctgttcatcactttattaaccaaaaaatattatttggacctggtaaagcagcaaatgctggtggagtagctatttcaggtatagaaatgagtcaaaatagtacaagaattccattaactagatataaggttgatagtttgcttaaagaaatcatgcaacgtgtacataacacctgcgttaaatatggtaaaaaagatgactttgtaaactatgttgatggggcaaatattggtggatttgtaagagttgcagattccatgattgaccaaggaattgtttaa

SEQ ID NO: 219529 - DNA, 301 bp, Unknown
  Bacterial polypeptide expressing nucleotide sequence isolated from the Sargasso Sea
tatgccatgtacggctgatgctataagtttattcctaaaaaataaaattcaatatgctcctggtaaggcttctaatgctggaggagttgctgtctctggattagaaatggctcaaaactctttgaaatatacttggtcaagggaggttgttgatgggaaactaaaagaaattatgtctgatattcactcatcatgtcttaagtatggaactgagaaagatcatgtgaattatgttaaaggggcaaatattgccggctttgttaaagtagcagacgcaatgttagctcaaggtgtagtttag

SEQ ID NO: 219530 - DNA, 469 bp, Unknown
  Bacterial polypeptide expressing nucleotide sequence isolated from the Sargasso Sea
acgaggcaggattaataagtattctgataagttcggggctgaattcatggaaggaaaaaggccctggggtatcaaatgcgatgttgctcttccttgtgcaacccagaatgagatcaatgaggctgaagcgaaagaccttgtaaataacggatgctttgttgttgctgaaggtgctaatatgccttctgatgctgaagcagtgaatgtattcttatccaataagatactcttcggtcctggcaaggcagcaaatgcggggggagtggcagtctcagggcttgagatgagtcagaattccatgcatctttcatggaccagggaagaggttgacactagattgaaaaacatcatgaatagcattcactcgtcctgtttagagcatagcaccaacgagaattatgtcaaaggtgcgaacatcacaggattcatcaaggtagcggactcaatgcttgaccaaggagtcgtctaa

SEQ ID NO: 219531 - DNA, 670 bp, Unknown
  Bacterial polypeptide expressing nucleotide sequence isolated from the Sargasso Sea
atgtttaaaaagaaactagatttaaaaacctttatgaatggtttacgtaaaagaaatgaaaatgaattggagtttcaccaagctgtgggcgaggtggcagaaagtttaattcccttcattaatgaaaataaaaaatatttagagtctaggatattagaaaggctgactgagcctgatcgtattattgtctttagagtttgttggcaagatgatgcgggaaatgtgagaataaatcgtggataccgagttcagtttaataactcaataggtccatataagggaggattgcgtttccatccatcagttagtttgagcattttaaaatttctaggttttgagcagatttttaaaaatagtttgacaaccttaccaattggtggagctaaaggtggttcaaattttaatcctaaggggaaatcagatcgtgaagtgatgagattttgccaagcgtttatgactgagctttcaaggcacattggtccgcagtgtgatattcctgctggagatattggagtaggtgctagagaaattggatacatgtttgggcaagtaaagcgtttgactaacgagtttacaggttctttaacaggaaaaggaattgactttggcggaagtttaataaggacagaagcgactggttatggtgcagtttactttgcgagagaaatgt

SEQ ID NO: 219532 - DNA, 348 bp, Unknown
  Bacterial polypeptide expressing nucleotide sequence isolated from the Sargasso Sea
gatgagctacgtcaacgaggtgtttgacagtgttaagcttagagatccggaacaagtagaattccatcaagcagtttgggaagttttggaaactcttgaaccagtcttcgataagcatccagaatataaggaagctaagattttagaaagattgactgaaccagagagagtcatacaattccgagtgccatgggttgacgataacgatcatgttcaagttaatagaggaatgagagttgaatttaacagtgctattggaccttacaagggcggattgagatttcaccctagtgttaatttaggaattattaagtttttaggatttgagcagattcttaagaatgcatt

SEQ ID NO: 219533 - DNA, 418 bp, Unknown
  Bacterial polypeptide expressing nucleotide sequence isolated from the Sargasso Sea
gtgggtaactaagtgtgatttggcctatccatgtgctacccaaaatgagctgcctttggatgacgcaattaccttggtgaaaaacggatgcataggagtattcgaaggggctaacatgccaaccatgccggatgccatcgaatatttcaaagaacataaggtcatgtttagccccggtaaagcatccaatgccggtggtgtggccacttccggtctggaaatgacgcagaattcacaaagacttcattggaccagagaggaagtagacaacaagcttcaacaaatcatgaaaagcattcatgccaattgtgtgaagcatggaaagagaagcgacggatacgtagactatgtgaagggagccaacattgctgggttcgtaaaagttgcggatgctatgctcgatcaggggcatgtctaa

SEQ ID NO: 219534 - DNA, 490 bp, Unknown
  Bacterial polypeptide expressing nucleotide sequence isolated from the Sargasso Sea
atgcaaaatgtaaaagcgaaagatcctgctcataatgattttcatcaagctgtgcaagaagttgctcagtctgttgtaccatttttagaaaagaataacgtttacaaagacgctaaaattctagaacgaattattgagcctgatcgtatcattatttttcgtgtttgttgggaagatgataatggaaaagttcaaattaaccgtgggtttcgtgtgcaatttaataatgctataggcccatataaaggtggtttgcgttttcatccatccgtatctttggatacatttaaatttctaggatttgaacaggtatttaaaaatagcttaacaacgttgccgatgggtgcagctaaaggtggatctgattttgatccaaaaggtaaatcagataacgaagtaatgcggttttgccaagcatttatgacagaattaatccgtcatattggaaaggatacagatgttccagctggtgatattggtgtgggtgcca

SEQ ID NO: 219535 - DNA, 364 bp, Unknown
  Bacterial polypeptide expressing nucleotide sequence isolated from the Sargasso Sea
aatggcacagacgctaaaacgctactcaaaaatggttgcatatgtgttgcagaaggtgcgaacatgccgtgtgatcacaatgctataaaacaatttaaggataataaaattttatttgcccctggaaaagcctctaatgcaggaggagttgctgtatctggtcttgaaatggctcaaaattccttaagatattcatggactagacaagaagtagatgaaaaacttaaagaaattatgataaaaatccataaaaaatgtctgaaatatggaaaagagaaagattatgtagattatggaaagggtgctaatatttcatcatttataaaagttgctgatgcaatgcttgctcaaggcgttgtttaaa

SEQ ID NO: 219536 - DNA, 343 bp, Unknown
  Bacterial polypeptide expressing nucleotide sequence isolated from the Sargasso Sea
aatgtactcaagtattgatcaatttatggatgccgtgcaatcaaggaatgtaggcgaaaatgagtttcatcaggctgtacatgaggtcgttgaatccttatggggatttttaaaagaccatccgcactatttacatgcaaaagtacttgataggatcattgagccagaaagagtgatccagttcagggttccttggagaaatgatagaggggaagtagaagtgaatcgcggatttcgtgttgagttcaattctgctattggtccttataaagggggcttacgttttcatccttcagttaacctatcaatattaaaatttttaggatttgaacaggttttaaaa

SEQ ID NO: 219537 - DNA, 379 bp, Unknown
  Bacterial polypeptide expressing nucleotide sequence isolated from the Sargasso Sea
aactgaaaatgaattaaatcttgatgatgcaaaagaacttactggtaatggttgttatgtagttgctgaaggtgcaaatatgccttctactactgatgctgtacatcatttcattaataaaaaaatattatatggtcctggtaaagctgcaaatgctggaggagtagcaatatcaggaattgagatgagtcaaaatagtacaagaattccactatcaagagagaaagttgatggtttgctaaaagaaattatgcaacgcgtacatagaacttgtgtaaaatatggtgataaaggagactttattaattatgttgatggtgctaatattggtggatttgtaagagttgctgattcaatgatagaccaaggaattgtttaa

SEQ ID NO: 219538 - DNA, 675 bp, Unknown
  Bacterial polypeptide expressing nucleotide sequence isolated from the Sargasso Sea
aatggacaaaattataaaacaatttttatcacaagtaaatcaaaaaaaccaaaatgagcctgaatttatgcaggctgtcactgaggttgccgaaactgtaattccttatatagttactcaagatatttattacggtcaaaatattttgcttagaatggttgagcctgaaagagtagtatccttcagagtagcatggattgatgataatgaagaaattcaggttaataggggatatagaattgagatgaactctgcaataggcccatacaaaggggggttaagatttcacccatctgttaatttaagtatattaaagtttttagctttcgaacaagtatttaaaaacgcactaacaacacttcctatgggaggtggaaaagggggttcagattttgatccaaaaggaaaatctgatactgaagtgatgagattttgtcagagctttatgacagagcttttcagacatattggtcctaataaggatatccctgcaggagatataggagttggcggaagagagataggctacttatttggtcaatataaaagattaaaaaatgaattttcaggtgtactaacaggtaaaggaatatcatggggtggttcgttgattagacctgaagcaacaggctatggtgttgtttatttcattgatgagatgttaaaaaatatagg

SEQ ID NO: 219539 - DNA, 485 bp, Unknown
  Bacterial polypeptide expressing nucleotide sequence isolated from the Sargasso Sea
aatgaaaaaaataataaaagattttttatcacaagtaagtcaaaaaaaccaaaatgagcctgaatttatgcaggctgttactgaggttgcagagactgttattccatacatagtaagtcaagacatatactatggtcaaaatattttattaagaatggttgaacctgaaagagtagtctcttttcgagttgcttggattgatgataatgaagaaattcaggtaaacagaggctacagaattgaaatgaactctgcaattggtccttataagggcgggcttagatttcatccatctgtcaacctaagcattctaaaatttttagcatttgaacaagtttttaaaaatgctttaacgacacttccaatgggaggcggaaaaggaggttctgattttgatccaaaaggtaaatctgatacagaagttatgagattttgtcagagctttatgacggaactttttagacatataggtcctaataaagata

SEQ ID NO: 219540 - DNA, 853 bp, Unknown
  Bacterial polypeptide expressing nucleotide sequence isolated from the Sargasso Sea
aaaattaaaaatggtcttgaacctgaatttattcaagctgttgaggaagtggctgaaacagttattccattcatagaatctaatcaaaaatataagaaagctaaaattttagaaagaatagtggagcctgaaagagtaatacaatttagagttccatgggttgatgattctggtgagccgcaaataaataggggattccgagttgaatttaattcagcaataggtccatataaagggggcttgagatttcatccctctgtaaatctttcaatattgaaatttttaggatttgaacaaatctttaaaaattctttaactactttgcctatgggaggtggaaaaggaggatctgattttaatcctaaaggtaaatctgataatgaagtaatgaaattttgtcaatcatttatgacagaactattcagacatattggtcccaatacggatgttccagctggggatattggtgttggaggtagagaaattgggtacatgtttggtcaatataaaagacttaggaatgaatttacaggtgttttaacaggaaaaggaattaattggggcggctcattgataaggcctgaagctacaggttatggagtagtttattttgctgagaaaatgttaacgaacataggggaagattttaaaaataagaaagttgcaatttctggatccggaaatgttgctcagtatgcttgtgaaaaatctattcaactgggatcaaaggttctttcaatgagtgattctaagggttatatttatgaccctgatggaattgatgaagaaaaattatcatggattatgaatttgaaaaatatgaaaggggaagaatttctgagtatgctaaaaa

SEQ ID NO: 219541 - DNA, 850 bp, Unknown
  Bacterial polypeptide expressing nucleotide sequence isolated from the Sargasso Sea
atgaacgctatcaaagagatatatgaaaaagtaaagtcaagagatccaaatcaacctgagttccatcaagctgtgcttgaagttctggaatcactagagcctgttttggaagcacaccccgaatatacttctattgtcgaaagagtagtcgagccagataggctaattcattttagagtgccatgggttgatgactcaggaaatgtacaggtaaatcgtggatttagaattcaatttaacggtgctatagggccatataaaggtggactaagatttcatccaagcgttaatgcttctattctgaagttcttagcatttgagcaaattttcaaaaattccttgactggtctgccaatgggcggtggtaagggtggttctgactttaacccgaaaggcaaatctgacgatgaagtcatgagattctgtcaatctttcatgatggaattatggcgtcatatcggtcaagattgtgacgttccagccggtgatattggtgttggaggcagagagattggttacctgtttgggatgtacaagaaacttcgaaatgatttccaagctggagtacttactggtaaagggctatcttacggtggttctttaattcgtccagaagcaacaggttatggtttagtttatttcgcaagagaaatgcttgctactaaaggcaagtcgtttgaaggcgcaaaggtttcaataagcggttctggaaatgtcgcacaatttgcttgtgagaaggttttggatcttggtggagtgccagtaacaatgtctgattccagtggatggattcatgacccagcaggtattgacagagagaagttagcttggataatggatttgaaaaaca

SEQ ID NO: 219542 - DNA, 642 bp, Unknown
  Bacterial polypeptide expressing nucleotide sequence isolated from the Sargasso Sea
tcgggagattggctacctgttcggccagtacaagcgcctgtccaaccagttcacctcggtgctgaccggcaagggcctgagctacggtggcagcctgatccgcccggaagccactggctatggctgtgtgtatttcgccgaggagatgctcaagcgtatcgaccagggcttcgaagacaagcgcgtggccatttctggctccggcaacgtcgcccagtacgcggcgcagaaggtcatggaactgggcgggcgggtgatttcgatgtccgactccgaaggcacgctgtatgccgagggcggcctcaacgacgaacagtggcagtacctgatggagctgaagaacgtgcgtcgtggtcgtctgcgcgagatggctgagcattacggtttgcagtttctcgccgggcagcgtccgtggggcctggcctgcgacatcgccttgccctgcgcgacgcagaacgagctggacggtgaggatgcccgcgtgctgcttaagaacggctgcatctgcgtgaccgaaggcgccaacatgccctcgaccctggaggcagtggatctgttcgtcgaggccggcatctgctacgcgccaggcaaggcctccaacgccggtggcgtggccaccagtggcctggaaatgagccagaa

SEQ ID NO: 219543 - DNA, 677 bp, Unknown
  Bacterial polypeptide expressing nucleotide sequence isolated from the Sargasso Sea
aatgcaccctgaaatgaaggccatttacgaccgtgttgttgctagagacccgaatcaacctgaattccatcaggcgtgcctagaggtccttgagaccctaggtcctgcgattgatgctcatccagagtacatcccgattgtcgagcgaatttgtgaaccagaacgaatcatccaatttagagtcacttgggtcgatgatcaaggtcatcagaaggtcaatcgtggattccgaattcagtacaatggtgcgattgggccatacaaaggtggattacgattccacccaagtgtcaatgagagtattctcaagttccttgcttttgagcagattttcaagaacagccttaccactttaccaatgggtggtggaaagggtggttctgactttgaccccaagggcaagtctgatggagaagtgatgcgattctgtcaagctttcatgatggaattgtggcgacacattggccataatctagacgttcctgccggtgatattggtgtcggtggccgagaaatcggttacatgtttggaatgtacaagcgtcttcgaaatgacttcgaaagcggcgtactgaccggtaaagggagatcatatggtggttctctaattcgtcctgaagcgacaggttatggtttggtttacttcgcgcgcgagatgctcgcaactaaggacaagt

SEQ ID NO: 219544 - DNA, 339 bp, Unknown
  Bacterial polypeptide expressing nucleotide sequence isolated from the Sargasso Sea
ttgataacggctgtactactgttggtgaaggggcaaatatgccatgtacaccagaagcaattgaattatttttaaaaaataaagtattatttgctccaggtaaagcctcaaatgcaggtggtgttgcagtttcaggactagagatggctcaaaactctttaagatacacttggacgagagatgttgtagatgggaaacttaaagaaataatgtctgatattcactcttcttgtgttaattatggttcatataaagatgatataaattacgtaaaaggggcaaatattgctggatttgtaaaagtagctgatgctatgcttgctcaaggtgtagtttaga

SEQ ID NO: 219545 - DNA, 843 bp, Unknown
  Bacterial polypeptide expressing nucleotide sequence isolated from the Sargasso Sea
tggaccttacaaaggtggcttaagatttcatcctagtgtaaatctatctattttgaaatttttagcatttgaacaagtattcaaaaatagtcttacaacactaccaatgggtggaggaaagggaggttctgatttcgaccctaagggtaaatcagatgcagaaataatgcgtttctgccaatcattcatgttagaattgaatcgacacattggtgcaaatattgatgttcctgcgggagatattggtgtaggtggtagagaaataggatatctttatggaatgtatagaaaaattagaaacgagtttactggcgttttaactggcaaagggatgtcttacggtggttctttaattaggcccgaagcaactggttacggccaggtatattttgctagagagatgttaaaaacaagaggattgagtttagaaggaaaaatatgtctagtatcaggatcaggtaatgtagcacaattcgcaacacaaaaagtattgcaattaggtggtaaagtagttacaatgtctgattctggtggttttatttatgatgctgatggaataacatctgaaaaattagaatggataatggaattaaagaatgtgaggagaggaagaattagtgaatatgcaaatcaatttgaaggtgctacttatactcctgtagatcatagtttggattataacccattatgggcagttgatgcagatgttgcattaccagcagctacacaaaacgaaatcaatggaacagatgctaaaaatttactttcaaataatgtttatgttgtctcagaaggaagtaatatgccgtcaacaccagaagcaattgatcatttcattgaagc

SEQ ID NO: 219546 - DNA, 772 bp, Unknown
  Bacterial polypeptide expressing nucleotide sequence isolated from the Sargasso Sea
catgtcgttgtccgtcgattctttcctgacgcgcctgaaacagcgcgatcctgatcagccggagttccaccaggcggtggaagaggtggtgcgcagcctatggcccttcctcgaagccaatccgcgctatcgcgaggccggcattctcgagcgtatggtcgagccggaacgggccatcctgtttcgcgtgccgtgggtcgacgaccgtggccaggtgcaggtcaaccgcggctaccgtatccagatgagcagcgccatcggtccgtacaagggcggtctgcgtttccacccctcggtgaacctgggcgtactcaagttcctcgccttcgagcaggtgttcaagaattcgctgacctcgctgcccatgggcggcggcaagggcggtgcggacttcgaccccaagggcaagagtgaaggcgaggtgatgcgcttctgccaatcgttcatggccgagttgtaccgccatatcggcgcggacctggacgtgccggccggtgatatcggtgtcggtggccgcgagatcggttatctgttcggccagtacaagcgtctgtccaatcagttcacctcggtgctgaccggcaagggcctgagctacggtggcagcctgatccgcccggaagccactggctatggctgcgtgtacttcgcccaggagatgctcaagcgtatcgaccagggcttcgaggacaagcgtgtggccatttccggctccggcaacgtcgcccagtacgccgcgcagaaggtcatggagctgggcggacgggtgatc

SEQ ID NO: 219547 - DNA, 604 bp, Unknown
  Bacterial polypeptide expressing nucleotide sequence isolated from the Sargasso Sea
tatgtataaaagcgttcaagatttcatgagttacgttgaatcaagaagctatggtgaaaaagagtttcatcaggccgttgatgaagtggttgtatcgttatgggattttttacaggaccatcctgattatctacatgcaaaagtattagagagaatgattgaacctgaaagggtgatcatgtttcgcgttccttggagaaatgacaggggagacgttgaagtaaacagagggtaccgtgtagaattcaattcggctattggcccctacaaaggtgggcttcgatttcatccttctgtcaatttaggaatattaaagttcttgggttttgaacaagtttttaaaaacagtttaactacacttcccatgggcggcggaaaaggtggttcagattttgaccctaaaggaaaatccgataacgaagtaatgagtttttgccaatcatttatgacggagctatataggcatattggtaataatacagatgtcccagcaggggatattggcgttggcggaagagagattggctatatgtttggtcaatacaaacgcatccgcaacgaatttacgggagtcttaaccggcaaaggtttgaattggggagga

SEQ ID NO: 219548 - DNA, 733 bp, Unknown
  Bacterial polypeptide expressing nucleotide sequence isolated from the Sargasso Sea
tttaattcgacctgaggcaacgggatatggatgcgtctatttttttgaagaaatgctaaatgcaattgatgattcaattaaaggtaaaaatatagcaatttctggctctggtaatgtggctcaatatgctgcagaaaaagtaaatgaattagggggcaaggtaattacattatctgattcaggaggttctatacatgatcctgatggtatagatgatgataagcttgcatatattatggaattaaaaaatgtaaagcgtggtagaataagtgaatactcagaaaaatataatgtatcttatatggatggagaaaggccatggagtattccgtgtgatgtagcactgccatgtgcaactcaaaatgagattagtggatccgaagctaaaacattagtaaaaaatggctgtaaggcagtttcagaaggtgccaatatgccctccgatcctgaagcggttgaaatatttttaaataataaaatattatttggcccagggaaagctgctaatgctggcggtgtagcagtatctgggttagaaatgagtcaaaattcaatgcgcctatcgtggtcaagagaagaagttgatcagaagcttcatggaataatgaaaagcattcataaagcttgtgttaagtatggatcaaatggtaagagaatagattatgttaaaggtgctaatattgctggatttatcaaagttgccgacgcaatgattgatcagggtgttgtttaa

SEQ ID NO: 219549 - DNA, 741 bp, Unknown
  Bacterial polypeptide expressing nucleotide sequence isolated from the Sargasso Sea
aagtatttaaaattcttagggtttgaacaaacattcaaaaatagtcttactggcttgcctatgggtggaggcaaaggaggtgcaaactttaatccaaagggtaaatcgaataatgaagtcatgcggttttgccaatcatttgttacagaactataccgccatataggagaagatactgacgttcctgcaggcgatatcggtgttggtggtagagaaataggttatatgtttggccaatataagcgtatcactaatcgctttgttggggttcttacaggaaaaggtttagaatttggtggatctaaaatgagaaccgaagcaacaggatatggcactatattttttctcaataatatgctcaagcatcagtcacagagtttggatggaaaaagggttataatatctggctcaggtaacgttgcgactcacgcagcagagaaagttttacaacttggcgggcaacctttaaccctatcagactctggaggtttcatacattgttcagatgggtttaatcaagagcaaattaattggattaaggatctaaaaggcttacgaagaggaagaatttctgaagctgcagatgagtttaacaatattgaatttcatgaaggcaaaaagccatggggtgtagaagctgattatgctacaccctgtgctacacaaaatgaaatcagtggggctgacgcagaactaatgctcaataacggaataaaagcagttgcagaaggcgctaacatg

SEQ ID NO: 219550 - DNA, 931 bp, Unknown
  Bacterial polypeptide expressing nucleotide sequence isolated from the Sargasso Sea
taatccaaagggcaagtcagagaatgaggtcatgcgtttctgccaatcttttatgactgaactttatcgtcatattggcgctgatgtcgatgtccctgcaggcgatattggcgtaggtggcagagaaattggctacatgtttggccaatataaaagaattacaaatcattttacgggcgtgctaactggcaaaggcctggaatatggtggaagtgaaatgcgtccagaggctaccggctatggagcggcttattttctagaggaaatgctaaaaactaaaggcgacgcgattgaaggtaaagatgtcataatatcgggatcgggaaatgtggctacctttgctgctgaaaaaataactcatcgcggtggtaaggtgcttactttgtccgattctgcaggctttatttatgataaggatggtatagacgaagagaaacttcaatggattatggagcttaaaaacgtcagaagaggtcgtatctccgaatacgtcgataaatttagtggcgctgaatatcatgcgggcaagcgtccttggggtgtgaatgccgacttagctatgccttgtgcaactcaaaatgaaatcacggcggaagatgctaaaactatgttaggaaacagtattatggccgtttctgagggtgcaaatatgccaacaaatattgatgggatacatcaatttcttgatgcaaaaatattatttgcacctgcaaaagccgcgaatgcaggtggtgttggaatgtcaggcttagaaatgagtcaaaattctgagcgtaggtcttggagtaatgaggaactcagtaaaatgttaagggaccttatgactggaatccacaataactgccatgcagcaggaaagcaaaaagacggttggtgcaactacatggctggatcaacattgctgggtttaaaaaaagtgcagatgctatga

SEQ ID NO: 219551 - DNA, 862 bp, Unknown
  Bacterial polypeptide expressing nucleotide sequence isolated from the Sargasso Sea
catgaaatacgactccgttggcagcttcctttcgcacgttgctcttcgcaatcccggtcaacctgaattcctgcaagctgtcacggaagtgatggaaagcctgtggcctttcatcgagaagaatccccgctacgcagagcaaggcctgctggagcgtctggtcgaacccgagcgcgtggtgatgttccgcgtgtcctggacggacgatctcggcaccgtgcaggtcaaccgcggctaccgcatccagcacagcatggccatcggcccctacaagggcggcctgcgcttccacccctcagtgaacctgtcggtgctgaagttcctggcttttgaacaaaccttcaagaacgcgctgaccaccctgcccatgggcggcggcaagggcggatccgacttcgaccccaagggcaagagccccgcagaagtcatgcgcttttgccaggctttcgtgaccgagctgtaccgccacgtcggccccgacaccgatgtgcctgcaggcgacatcggcgtgggtggccgcgaagtgggttacatggccggcatgtacaagaagctggccaacaacgctgccagcgtgttcacaggcaagggcctgagcttcggcggctcgctgatccgccctgaagccacgggctacggcaccgtgtactttgccgacgaaatgctcaagacccgcggcaagtccttcaagggcatgcgcgtgtcggtgtccggctcgggcaatgtggcccagtacgccgtcgaaaaggccatggaactgggcgccaaggtcgtcaccgtgtccgactccagcggcaccatcattgacgaagaaggcttcacccccgagaagctggccatcctgatggatgtgaagaaccac

SEQ ID NO: 219552 - DNA, 916 bp, Unknown
  Bacterial polypeptide expressing nucleotide sequence isolated from the Sargasso Sea
atgtcaagtaaataccaatcctccattgacgcgttcatggaaagtgtaaaagcaaaaaattccaatgaaacagagtttcttcaagcggttgaggaagtcgcagaagcggttattccaattattgaagaaaccccaaagtacaagaactctaaaattcttgatcgaatcgtagaacctgaacgtgttattatgtttcgtgttccttggttggatgataatggcgacacacaagttaatcgtggatttagagtggaatttaattcggctattggtccttataaaggtggtttaagatttcacccatctgtaaatctttctattttaaaatttctgggctttgaacaaatttttaaaaattcactaaccacgcttcctatgggtggtggaaaaggaggctctgattttaatcctaaaggaaaatcagataatgaagtgatgaaattttgtcaatcattcatgactgaattatcaagacatattggtccggatactgatgttcccgcaggagatattggagtaggtggaagagagattggatacatgtttggtcaatataaacgaataagaaatgaatttaccggagttttaactggaaaaggtagaaattggggtggttcattgattagacctgaagctactggatatggaacggtttattttgccaaagaaatgctagcagttaaaaatgattcttttaatgggaaaaccgtcgcgatttcaggatccggaaatgtagcgcaatatgcatgtgaaaaagtaacgcaattaggcggtaaggtcgtcacattttcagattcaaaaggatatatttatgatgaagatggaattgatgcttccaaattagctttcgttatggatttgaaaaatgttaagaggggaagaatttcagaatacgttaaggaatatcctaatgcaa

SEQ ID NO: 219553 - DNA, 819 bp, Unknown
  Bacterial polypeptide expressing nucleotide sequence isolated from the Sargasso Sea
catgacagcaaaactcgacgaaaagctggaaccgatttaccaggacgttctgcaccgcaaccccggtgagaaagagttccaccaggcggttcatgaagtgctggaaactctggggcctgtgttggtgaagtaccccgagttcgccgacaagaagatcatccagcgcatctgcgaaccagagcgccagatcatcttccgtgtaccctggcaggacgacagcggcgagatccacatcaaccgtgccttccgtgttgaattcaacagcgccctggggccctacaagggcggcatgcgtttccacccgtccgtctacctgggcatcatcaagttcctgggcttcgagcagatcttcaagaacgccctgaccggcctgcccatcggcggcggtaaaggcggcagcgacttcgatccgaagggcaagtccgacgacgaaatcatgcgtttctgccagagcctgatgaccgaactgtaccgtcacctgggcgagtacacagacgttcctgccggtgacatcggcgtgggcggccgcgagattggctacctgttcggccagtacaagcgcatcaccaaccgttacgaatccggcgtgttcaccggcaagggcctggactggggcggcagccgtgcccgtaccgaagccaccggctacggcactgtattcttcacccacgaaatgctgaaagcccgtggtgactccctggaaggcaagactgtcgtggtttccggctccggtaacgtggccatctacgccatcgacaagtgccacgagctgggcgccaaggtcattgcctgctccgactcccagggcatgatcgtgga

SEQ ID NO: 219554 - DNA, 940 bp, Unknown
  Bacterial polypeptide expressing nucleotide sequence isolated from the Sargasso Sea
aagggtggatcgattttgatcccaaaaggcaaatcagataatgaagtaatgagtttttgtcagtcttttatgagtgaattatttagacatattggaaacaatacagatgttcctgctggcgatatcggagttgggggtagagaaataggttatatgtttggtcaatataagcgcatttgcaatgaatttaccggtgtattgaccggaaaaggtctcaattggggtggaagtctaatccgacctgaagctaccggctacgggtgtgtttactttgcagaagaaatgcttaagacaaaagatgactcatttaaaggtaaaacagtagcgatttccgggtccggaaatgttgcgcagtatgcaactgaaaaagtaaatgatcttggcgggaaagttgtgacgctttcagattctagcggtacggtctacgataaaaatggaatagattctgaaaaactagcatttatcatggagttgaagaatgttaagagaggcaggatcaaggagtatgcagataaatacagcactgaataccttgaaggggagaaaccttggagagttgcatgcgacgttgcgctaccttgcgctactcagaatgagttaaatattgatgaggctaaagagcttaccaaaaacggctgtatcgctgttgctgaaggagccaacatgcctaccgaacccgatgctgttaatttatttttacaagaaaaaatcctatttggccctggaaaagcagctaatgcgggaggcgtagcagtctccggccttgaaatgagtcaaaactcaatgcgtctttcatggtcaagggaagaggtggatgaaagacttcatactattatgaaaaatattcatagcgcatgcactaaacacggaaccgaaggtgattatactaattatgttaaaggtgctaatatagctggctttattaaggttgcagatgcaa

SEQ ID NO: 219555 - DNA, 778 bp, Unknown
  Bacterial polypeptide expressing nucleotide sequence isolated from the Sargasso Sea
ttctggtgtattaactggtaaaggtttgaattggggtggaagtagaattagaccagaagctacgggttatggggctgtttatttcgctgaagaaatgttaaaactgagaaacgaatcttttgaaggaaaaactgtagccgtatctggttccggtaatgttgctcaatatgcgacggaaaaagttactcaattaggagctaaggttgtaactatgtctgattcaaatggtacaattcatgacccagatggtattaatgaagaaaaattagcatggattatggatttaaaaaatattaagaggggtagaataaaagaatatgcttccgaatttaattgcgattatatagatggtaaaaaaccttgggtgattccttgtgatatagcattaccatgtgcaacccaaaatgaaattaattcaaatgatgcaaaaatattaattaagaatggatgtatttgtgtatctgaaggagcaaatatgccttcagatgctgaagcaattgatgtatttacaaataagaaaatcttatttggtccaggaaaagcagccaatgctggtggagtagcagtctcaggattagaaatgagtcaaaataatatgggtttagcttgggcaagagatgaagtagatcaacgtttacgccagatcatgaaagatattcatagtcaatgtactgaatttggattagatgctgataattatgtgaattatgtcaaaggagcaaatataggtgggtttataaaagttgctgatgcaatgattgatcagggtgtcgtatag

SEQ ID NO: 219556 - DNA, 777 bp, Unknown
  Bacterial polypeptide expressing nucleotide sequence isolated from the Sargasso Sea
aaatttttaggatttgaacagatatttaaaaatagcctaactactttacctatgggtgggggaaagggaggagcagattttgacccaaagggtaaatctgataatgaagttatgagcttttgtcaatcttttatgacagaattaaatcgtcatattggccctcaaactgatgtgcctgctggtgatataggggttggaggtagagaaattggatatatgtttggtcagtataagagaattaaaaatgaatttactggagttcttacaggtaaaggattaaattggggtggcagccttattcgaccagaagcaacaggatatggatgtgtttattttgcagaaaatatgcttaaaactagaggtgaatcctttaagggaaaaactgtagcaatttctggttcgggaaatgtagcgcagtactctacagaaaaggtgattgagctgggaggcaaagttgtaacattaagtgattcctcaggtactatatatgatccaagtggaatagattctaataagttagcatgggtaatggatttaaaaaatacacgtcgtggaagaattcaagaatatcaagataagtttggtggcgaatattgggattctaaaagaccatgggccgcaaaatgtgatgtagctctaccaagtgcaactcaaaatgaaattaataaattagatgctgaaaccttaattggaaatggttgtatttgtgttgctgagggtgcaaatatgccatctgatcctgatgcaattgaagtatatttaaaaaataaaatttta

SEQ ID NO: 219557 - DNA, 898 bp, Unknown
  Bacterial polypeptide expressing nucleotide sequence isolated from the Sargasso Sea
ggaaaatcagataatgaagtaatgagtttttgtcaatctttcatgacagaattatcaaggcatattggccctgacacagatgtgcctgcaggtgatataggcgtaggtggtagagagattggatatttatttggacagtacaaaagaatctcaaatgagttttctggtatattaactggaaaaggtcttaattggggtggtagtttaattcgacctgaagcaactggctatggttgtgtttattttactgaagaaatgctaaatgcaaataatgattcaattaaaggtaaaaatgttgcaatctcagggtctggtaatgtcgctcaatatgctgcagaaaaagtaaatgagcttggaggtaaggtgatatcattgtctgattcaggaggatctattcatgatcctgatggtatagatgatgaaaaacttgaatatatcatggatttaaaaaatgtaaagcggggtcgaataagtgaatattcagaagaatacagtgtttcttatatggaaggtgagaggccatggagcattccatgtgatatcgcattgccatgtgcaacgcagaatgaaataagtgggtcagaagctaaaacattagtgaaaaatggttgtaaggcagtttcagaaggcgcaaatatgccttctgacccagatgcagttgaaatatttttaaataataaattattatttggtccagggaaagcagcaaatgctggtggcgtagcagtctcaggtttagaaatgagtcaaaactcaatgcgcctatcatggtcaaggcaagaagttgatgaaaagcttcgtggtattatgaaaagtattcatgaagcctgtgttaagcatggggcaaatggtgacaatgtcgattatgtaaagggtgccaatattgctggatttatca

SEQ ID NO: 219558 - DNA, 785 bp, Unknown
  Bacterial polypeptide expressing nucleotide sequence isolated from the Sargasso Sea
ggcgtgtctagaggtccttgagaccctaggtcctgcgattgatgctcatccagagtacatcccgattgtagagcgaatttgtgaacctgaacgaatcattcaatttagagtcacttgggttgatgatcaaggtgagcagaaggtcaatcgcggattccgaattcagtacaatggtgcgatcgggccttacaaaggtggattgcgattccacccaagtgtcaatgagagtattctcaaattccttgcttttgagcagattttcaagaacagccttaccactttgccaatgggtggtggaaagggtggttctgactttgaccccaagggcaagtccgatggagaagtgatgcgattctgtcaagctttcatgatggaattgtggcgccacattggtcacaaccttgacgttcctgctggcgacattggtgtcggtggtcgagaaattggttacatgtttggaatgtataagcgtcttcgaaatgacttcgaaagcggcgtactgactgggaaaggcagatcatatggtggttctctaattcgacctgaagcgacaggttatggtttggtttacttcgcgcgcgagatgctcgcaaccaaggacaagtccttcgagggtgcgaatgtagccatcagtggttcaggaaacgttgcccagttcgcttgtgagaaggtcctggatcttggtgggaagcctgtaaccatgagtgattcgagtggttggattcatgatccagcaggtatagatcgtgaaaagttggcttggattatggatttgaaaaataacc

SEQ ID NO: 219559 - DNA, 987 bp, Unknown
  Bacterial polypeptide expressing nucleotide sequence isolated from the Sargasso Sea
agtaggtaaaaggaaccaaaatgaacctgaattcatgcaagcagtaactgaggttgctgagacagtaattccatacatatatcaaaatgaaatttactacggtcaaaatatactccttagaatggtagaacctgaaagagttgtttcatttagagtggcatggattgacgaccaagaagaaattagagttaacagaggatataggattgaaatgaactctgcaataggtccctataaaggagggttgaggtttcatccaaatgtaaatttaagtgtccttaagtttttagcatttgaacaaatcttcaaaaacagtttaacaacgttgcccatgggtggagggaaaggtgggtctgattttaatccaaagggtaaaactgataccgaagtaatgagattctgtcaaagttttatgactgaattatttcgtcacattggtcctaatcgtgatatacctgcaggtgatataggtgttggcagcagagagataggatatctttttggacaatacaagagacttaaaaatgagtttactggtgtgttaactggaaagggtgttagttggggaggttctcttattagacctgaagcaactggttatggtgttgtgtattttgtagaaaaaatgttagaacaaaaaaatcttgattttaaggataagaaagtgtccatttcgggttctgggaatgttgcccaatatgctgcagaaaaagttatatcccttggaggtaaagtaatcactatgtctgattcttctggttttatacttgataaagatggtatagacgctgaaaaactaaactatgtaatgaaaattaaaaatattgatagagaaagaatcaataaatatgtaaagaaattttcctctgccctctattttcaaaacaaaacgccatggagcgttgggtgcgatatcgcacttccttgtgctactcaaaatgatttgcagttagaggatgcgaaaagtcttataaaaaatggatgtat

SEQ ID NO: 219560 - DNA, 928 bp, Unknown
  Bacterial polypeptide expressing nucleotide sequence isolated from the Sargasso Sea
cgcatggtcgagccggagcgctcgatcatcttccgcgtaccctgggtcgacgatcagggccgtgtgcaggtcaatcgcggcttccgcatccagatgaacagcgccatcggcccatacaaaggtggcctgcgcttccatccgtcggtgaacatcggcgtcctcaagttcctcgcctttgaacaggtcttcaagaactccctgacttcgctgcccatgggcggcggcaagggtggctcggacttcaaccccaagggcaagagtgacaacgaagtgatgcgcttctgccagtcgttcatgaccgagctgtaccgccatatcggcgcggatctcgacgtgccggccggtgacatcggcgtcggcggccgcgagatcggcttcctcttcggccagtacaagcgcctgtccaaccagttcacctccgtcctgaccggcaagggcctggcctatggcggcagcctgatccgcccggaagccaccggctacggctgcgtgtacttcgccgaggaaatgctcaagagcagccacagcagcttcgacggcaagcgcgtggcgatctccggttccggcaacgtcgcgcagtacgcggcgcagaaagtcatggaactgggtggccgggtcgtctcgctgtccgactcgggcggcaccctgcacttcgcggacggcatgaccgccgagcagtggacatacctgatggacctgaagaacgtccgtcgcggtcgcctcgaggagatgggcacgcacttcggcgtcacctacctggccgatcagcgtccgtggagcctgccgtgcgatatcgccctgccctgcgccacgcagaacgaactggatggtgaagacgcccgcgcgctgctgaagaacggctgcatctgcgtggccgaaggcgcgaacatgccgtcgaccctggaagccgtcgacctgtcctcgaggc

SEQ ID NO: 219561 - DNA, 624 bp, Unknown
  Bacterial polypeptide expressing nucleotide sequence isolated from the Sargasso Sea
aatggacagaattaattcatttaattcggcaataattgcaagaaacccagctgaacatgaattccatcaagctgtgcaagagttcacaggggcagtaatgccctatgttatggccaatgccaaatatgatgatgggcatgtattagaaagaatgacagagccagaccgtattgtcatttttagagtatgttgggaggacgataacggccatattcactgcaatagagcatggcgagtccaatttaacaatgctattggaccctataaaggaggcttgcgctttcatcccaatgttacgcaaagtgttcttaaatttttagcgtttgagcaagtctataaaaatgcattgactggacttccgatgggaggtggtaaagggggaagtgatttcgatccgaaaggaaagagtgatcgcgaaatcatgcgattttgtcagtcattgatgatcgaactttctaagcatattggggaagatactgacattccagccggcgatattggggtgggtggaagagaaattagttatctgtttggtcaatacaaaagactaaaaaacagattcgtgggtacgctaacaggcaaaggactttcttatggtggaagtcttattcgaacggaggcgac

SEQ ID NO: 219562 - DNA, 547 bp, Unknown
  Bacterial polypeptide expressing nucleotide sequence isolated from the Sargasso Sea
atggaaaaaataattaatggtttcataaaagaagtaagttctagaaatcaaaatgagccagaattcatgcaagcagtttcagaggtagctgaaaatgtaatcccttatatagttcaaaataaaatttactatggtcaaaacatacttctaagaatggtagagcctgaaagagttctttcgtttagagtcgcctggattgatgataatgaagaaattcaagtaaatagaggatatagagttgaaatgaattcagcaataggaccatataaagggggtttaaggtttcatccaaatgtgaatttaagtgttctaaaatttttagcatttgagcaaattttcaaaaatagtctcacaactctccccatgggtggaggaaaaggaggtgctgattttgatccaaaagggagaagtgatactgaagtaatgcgattttgtcaaagctttatgacggagcttttcagacatattgggccaaatagagatattcctgctggagatattggtgtaggaagtagagaaataggatatttatttggcccaatataaa

SEQ ID NO: 219563 - DNA, 844 bp, Unknown
  Bacterial polypeptide expressing nucleotide sequence isolated from the Sargasso Sea
atgggtggtggaaagggtggctcagatttcgatccaaagggcaagtctgaaaacgaggtaatgagtttttgccagagcttcatgacagagctttttagacatattggtgcaaatacagacgtccctgctggtgatatcggtgtcggaggaagagaaatcggctatctatttggccagtataaaagaatttcaaatgaattcacaggagtgttaacaggaaagggcctcaattggggtggatcattgataagacccgaggcaacgggctatggttgtgtttatttcgcacaggaaatgctcgagaatgttggtgatgatcttgagggaaaagtagtttctatctctggatccggtaatgtcgctcaatatgcaactgaaaaagcaacagagcttggtgcaaaggttgttactatgtcagactcttcaggtactattcacgatcctgatggtataaatagtgaaaaactaaattgggtcatggatctgaagaataacaaaagaggccgaataagtaagtatgctgaagagtttaaggtaaagtattatgatggtgataggccttggggtataaagtgtgatattgcgcttccatgcgctacgcaaaatgagataatggatgctgatgccaagcagctagtatctaatggctgtagggtcatatctgagggtgcaaatatgccgtctgatcctgaagccataagtatttttcagggaaccgatgtgttatttggcccaggaaaggcttcaaacgctggaggagttgcaaccagtggtctggaaatgagccaaaatagtatgcgaataaattgggatagagacgaggttgataaaaaattaaagaata

SEQ ID NO: 219564 - DNA, 560 bp, Unknown
  Bacterial polypeptide expressing nucleotide sequence isolated from the Sargasso Sea
ttcatcaggttatatttatgataaagaagggattaatgaggaaaagctaaatcacatcatggatattaaaaataacaaacgtggtagaatttctgaatatttaaaaaaatatccaaaagctgaattcataaaaggtaaaaaaccttgggaggttaaatgcgatgttgcatttccctcagctactcaaaacgaagtaaacggtactgatgctaaaacactacttaaaaatggttgtatatgtgttgcagaaggtgcaaatatgccatgtgatcacaatgctataaaacaatttaaggataataaaattttatttgcacctggaaaagcctctaatgcaggtggagttgctgtatctggtcttgaaatggctcaaaattccttaagatattcatggaccagagaagaagtagatgaaaaacttaaagaaattatgataaaaatccataaaaaatgtcttaaatatggaaaagagaaagattatgtagattatggaaagggtgctaatatttcatcatttataaaagttgctgatgcaatgttagctcaaggcgttgtttaaa

SEQ ID NO: 219565 - DNA, 676 bp, Unknown
  Bacterial polypeptide expressing nucleotide sequence isolated from the Sargasso Sea
atgtactcatcagtccaagattttatggcaatgatagagaataaaaatccaaatgaagtcgagtttcatcaggctgtacgcgaggtgattgagtcactttgggattttttagataagaatcaaaattatatctactctggtgtaatgcagcgaattgttgaaccagaaagagtcataatgttcagagtcccttggagaaacgataggggtgaagtcgaggtaaataaaggatacaggatcgaatttaattctgcaattggtccttataaaggtggtcttaggtttcatccttctgttaacctaagtattttgaaatttttaggttttgaacaagtttttaaaaatagtctaactacgttaccaatgggcggaggtaaaggtggttctgattttgatccaaaagggaaatcagacactgaggttatgagtttttgtcagagctttatgacagaactatgcagacatattggtccggatactgacgtcccagctggtgacataggtgttggtggtcgtgaaattggctatatgtttggtcagtataagagaattaggaatgaatttacaggagtacttactggaaaaggtttgaactggggtggttcattaattcgtccagaagcaaccggttatggatgtgtttattttgttgatgaaatgctgaaacatgctggca

SEQ ID NO: 219566 - DNA, 943 bp, Unknown
  Bacterial polypeptide expressing nucleotide sequence isolated from the Sargasso Sea
ttcagagtaccatgggtggatgataaaggccaagttcaagtcaatagaggtatgcgtgtagattttaacagtgcaattggaccatacaaaggtgggctgaggttccatcctagtgttaatctaggaataattaaattcttaggatttgaacagattctcaagaatgctttgactactaggccaattggaggaggtaaaggcggtagcgattttgatcctaaaggcaaatcagatatggaagttatgcgcttctgtcaatcgtttatgaatgagctttttagacatattggagctaatgttgatgttccagcaggagatattggagttggtggcagagagattggttatctttttggtcaatataagaagttgacacgtaagtgggaaggtgtcttaactggcaaaagctatggttggggaggatccttaatcagacctgaagctacaggctacggtcaagtatacttcttgagagaaatgttggcttctaaaggtgacagtatagaaggtaaaaaatgtgcgatatcaggtagtggtaatgttgcacagttctgtgctcaaaaagttttgagctatggtggtaaagttattacaatgtcagattcaggtggttacatctttgacaaagatggtatagatgaagataagttggcctggattatggatttgaagaataatagacgtggtagaatcaaagaatatacctcagaatacccaggagcagtttaccatgaaggtaataggccatggggtgaagattgtgatatcgcattaccaagcgctactcaaaatgaaattgaagaaaagggagccaagaatttagtcaagaatggttgtatagcaataagtgaaggagcaaatatgcctacttcaccagcagcttacgagattataagtgaagcaggaatcctctttggtccagctaaagcagctaatgctggtg

SEQ ID NO: 219567 - DNA, 844 bp, Unknown
  Bacterial polypeptide expressing nucleotide sequence isolated from the Sargasso Sea
gatattggtgtaggtggcagagaaatcggattcttatttgggcaatataagcgaataagaaatgaatttactggcgttttgactggtaaggggcttaactggggtggatctcttattcgccctgaggctactggatatggatgtgtctattttgcgcaggagatgcttaaaaggacagaaaatagttttgatgggaagattgtaacagtatctggctctggtaatgtagcgcaatatgccacggaaaaagcaaccgaactaggtgcaaaggttgtctctctatccgattcttcaggcactatccatgacccagatggaattgattcagaaaaactaagttgggttatggatttaaaaaataataaacgcggaagaattaaagaatatgcgaaggaatttaatgttgagtatcttgaaaaccaaaatccatggattatatcctgtgatatagctcttccatgtgcaacacagaatgaaattaatggagaagatgcaaaaatattgattaagaatggttgcaaagtagtttccgaaggggcaaatatgccatcagaccctgatgcagtaaatttatttcaaaatagtgatattctttttgggccaggaaaagcagcgaatgcaggcggtgtggccactagtggattagaaatgagccaaaatagcatgagaataaattggccaaggcaggaggttgatagcaaacttaaaaatattatgaagaatattcacgagtcatgcgtaactcatggaaaagaaggtgaaggcgtaaattatgtcaaaggcgcaaatattgctggattcataaaagttgctgatgctatgatggaccaaggagttgtataaa

SEQ ID NO: 219568 - DNA, 649 bp, Unknown
  Bacterial polypeptide expressing nucleotide sequence isolated from the Sargasso Sea
tatgtataaatccgtagatgcttttatgaaaaatgtaatttctagatcaccaggtgaaaatgaatttcatcaagctgtgcatgaagtgattacttcgatatggggctatgtacaagatcatccccaatatattcatgagggaatattggatcgaattattgagcctgaacgggtaattatgtttcgagttccttggcgagatgatcgtggaaaaacacaagtaaatagaggttacagggtggagtttaattcagctattggtccatataaaggtggtctgcgttttcatgcttctgtgaatctaagtattttaaaatttcttggttttgaacaaatatttaaaaatagccttaccacgttgcctatgggtggtggtaagggtggttcagattttgacccaaaaggaaaatctgataatgaagttatgagttttactcaatcctttatgtcagaactttttcgtcatattggtccaaatacagatgtgccagctggggatataggagtaggaggtcgcgagattggttatttatttggtcaatataaacgattacgaaatgaatttagtggggtgttgacaggaaaaggtctcaattggggtggaagtaagattcggccagaagctactggctatggcgctgtttatttt

SEQ ID NO: 219569 - DNA, 735 bp, Unknown
  Bacterial polypeptide expressing nucleotide sequence isolated from the Sargasso Sea
ggacggaagcgaccggttatggagcagtatattttctcgataatatgatgaagcatgcgggtgacggattagaagggaggattgccgttgtatcgggttcggggaatgtagcgacccacgcggctgaaaagttactgcaattaggagcaaaacccgtcacgttgtctgattctggtggcttcatatatgacgcggaagggatcagtcaggaaaaactggattgggtgaagcatctcaagaccgttaaacgaggtagaatttcagagtactgtgaagaattttccggagcaacttatcacgaaggagagcgcccatggggtgttaagtgtgacgtcgctttaccctgcgcaacccaaaatgagttgcgaggagatgatgcgcgggtcttaactaaaaacggatgcattgctatctcggagggcgctaatatgcccaccgatttagaaggtgcccatgtgtttaaagatgcaaaagtcctgtatgcacccggaaaagccgctaacgctggtggggtagcggtttctgggttggagatgagtcaaaactcagcccggatttcatggaaagaagaagagcttcagcaactgttgcgggatattatggacggcatccactctcgttgcgtagaacatggggtctcacaagatgatgattatgtggattatgttaaaggagctaacatcgccggcttcgtgaaagtagcagatgcgatgctcgcatacggcgtagtttaaa

SEQ ID NO: 219570 - DNA, 803 bp, Unknown
  Bacterial polypeptide expressing nucleotide sequence isolated from the Sargasso Sea
cttggacagaattaggtcctttaactcaaaaataattgaaagaaacccagctgaaaacgaatttcatcaagctgtccaagaattcacaggctccgttatgccgtatgtgatgactaacccaaaatatgatgatggccacatattacagagaatgacagagccagaccgcatcgtcattttcagagtgtgttgggaggacgataagggcaacatccattgcaatagggcatggagagttcaatttaataatgctattgggccttataagggcggtctgcgatttcatccgaatgttacgcaaagcgtattgaagtttttagcgtttgagcaagtctataaaaatgcgctgactggacttcctatggggggaggaaaaggggggagtgatttcgatcctaaaggaaaaagtgatcgagaaatcatgcgcttttgccaatcactcatgatagagctctcaaagcatattggagaggataccgatatcccagccggcgacatcggagtaggtggaagggaaattagttatttatttggccaatacaagcgattaaagaatcgatttgtcgggacactaacgggcaaaggactttcttatgggggcagccttatcagaacggaagcgacaggttacggcgttgtttatttcacgcaacatatgctcaatgagcgtaacgagaaaattgcgggaaaaacagcgcttatttcgggcgcaggcaatgtcgctatattttgcgcagagaagttattgagcgaaggagcaaaagtcataacgctttctgactctagcggttttatttatgatc

SEQ ID NO: 219571 - DNA, 841 bp, Unknown
  Bacterial polypeptide expressing nucleotide sequence isolated from the Sargasso Sea
ggaaaagggtggttctgattttgaccccaaaggtaaatcggacaatgaagtgatgagtttttgtcaatcctttatgacagaattatcgagacatataggaaataacaccgatgtacctgcgggtgacattggcgttggaggaagagaaattggttatatgtttggccaatacaagcgtgtacgcaacgaatttacaggtgtattaactggaaaaggtctcaattggggtggaagcctcattcgccctgaggccacaggttatggttgcgtatactttgccgaagagatgcttaacaccaaaggcgagtcctttaaaggtaagtcggttgcagtgtcgggctcggggaatgttgcacaatatgcgactgagaaagtgaacgatctcggtggaaaagttgtaacgctttctgattctggaggtactgtttacgataaagatggtattgatccagagaaattagcatttgttattgagcttaagaacgtcaaaagaggtaggatcaaagagtatgctgaaaaatttaatgcagaatatatggaaggaagccgaccttggagcgttaattgcgacgttgcactgccttgcgcaacgcaaaacgagcttaatgaatctgaagctaaggaacttgtaaataatggatgtattgccgttgctgaaggcgcgaatatgcctactgagcctgccgcagtgtctcattttttggataaaaaaatacttttcggtcctggcaaagctgccaatgctggtggtgttgcggtttctggtttagaaatgagtcaaaactctatgcgcttatcatgggcgagagaagaggtagatgaacgtttgcacagcattatg

SEQ ID NO: 219572 - DNA, 478 bp, Unknown
  Bacterial polypeptide expressing nucleotide sequence isolated from the Sargasso Sea
atggacaaaataattaaacagtttttatcacaagtaagtcaaaaaaaccaaaatgagcctgaatttatgcaggcagtcactgaggttgcggagactgttataccttatatagtaacccaggatatttactacggtcaaaatattttacttagaatggttgagcctgaaagagtagtttctttcagggttgcatggatagatgacaaagaagagattcaagttaatagaggttacaggattgaaatgaattctgcaataggtccctataaaggtggattaagatttcatccttcagtaaatcttagtatactaaagtttttagcttttgaacaagtcttcaaaaatgccttgacgactcttccaatggggggtggaaaaggtggttcagattttgatccaaaaggtaagtctgacacagaagtaatgagattttgtcaaagttttatgactgaactttttagacatatcggtccaaata

SEQ ID NO: 219573 - DNA, 630 bp, Unknown
  Bacterial polypeptide expressing nucleotide sequence isolated from the Sargasso Sea
catggagggggtgactaaaaggaaccccggtcagcctgaattcgttcaggcggtctacgaagtcgcgtcaacaatctttccttatatagctgataagcctcagtatcatgagagccagatcctggagcggatggctgaacccgagcgtgtaatttctttccgcgttccttggaccgacgataaaggaaatattaggacaaaccgcggttggagggtccaatttaactcggcaatcggcccttataagggcgggttgcgtttccacccttcggtgaatgagtcgatcctaaaatttttgggcttcgagcaaacctttaaaaacagtcttacgggcttgccgatgggcggcggcaaaggcggcgccaattttaatccgaagggcaaatcagataatgaggttatgcgcttctgccaatcctttatgacagagcttgttcgccatattggaccggatacggatgtccccgccggagatattggcgttggtggacgggaaatcggctatatgttcggtcagtataaaagaatgacgaatagcttcgttggggtccttacaggtaaggggctcgaatttggtggttcgaaaatgcggacggaggcgacaggctacggcgcgatattcttcctaga

SEQ ID NO: 219574 - DNA, 457 bp, Unknown
  Bacterial polypeptide expressing nucleotide sequence isolated from the Sargasso Sea
cgctgataattttaattgcgaatattttgaaggtaagcgtccttggagtattaagtgtgatgttgctctgccatgtgctactcagaatgaaataaatgaatctgacgcaaaagagttagtcaaaaacggtgtagtcgcagtaagcgaaggagctaatatgccctcagatcctgatgctgttcatgtttttcaaaaatctaatgtactttttggccctggcaaagctgctaatgctggaggcgtagcagtatctggtctggaaatgagtcaaaatagtatgagaattaaatgggaaagtgaagaagtagatgaaaaactgtttaatattatgcaaaatatacacgcctcttgtgttgaaaatggtagccaaaataacattgttgactatgtcaaaggagcaaatattgcaggttttattaaggtagcagatgctatgatcgatcagggagtagtatag

SEQ ID NO: 219575 - DNA, 613 bp, Unknown
  Bacterial polypeptide expressing nucleotide sequence isolated from the Sargasso Sea
tatggcgagggccgaccaccccgatatcgagaagtttctagagggagtaaagacacgcaatcccggtcagccggagtttgtgcaggctgtgcaagaagtagctcaggacattttccccttcattcaggataagacggaataccacgagtaccagatcctgcgtcgtatcgcagaacctgatcgagttgtcagttttcgtgtctgctgggaagacgatgaaaacaatatccgggtacagcgtggttggcgtgtccagaacaacaactcaatcggaccatataagggagggatcaggttccatcctactgtcaccgaaggagtgcttaagtttctggcattcgagcagacattcaagaacagcctgactggtcttccgatgggcggaggaaaaggtgggtcgaacttcaatcctcgcggaaaatctgagcacgaggtcatgcggttttgccagtctttcatgacagaactttttcgtcatgttggagacgatattgatgtccccgcgggcgatattggagtgggtgcgcgggaaatcggttatatgttcgggcaatacaagcgcatcaccaatcggttcactggcgtgctgaccggcaaagggctcgaatacggc

SEQ ID NO: 219576 - DNA, 814 bp, Unknown
  Bacterial polypeptide expressing nucleotide sequence isolated from the Sargasso Sea
gatggttgagccggaacgagttgtaatgtttagagtaaattggattgatgataacggtgaaattagagttaacagaggatatagagttgaaatgaactcagcaatcggtccgtacaaaggaggattaagatttcatcccagtgttaacctaagtattctaaaatttttagcatttgaacaagtttttaagaatagtttaacaacacttccaatgggtggtggtaaaggaggagcagattttgatcctaaaaataaatcagatggggaagtgatgagattttgtcaaagctttatgacagaacttttcaggcatattggtcctaatactgatataccagctggagatataggggttggaggaagagaaattggatatttatttggacaatataaaaggttgaaaaatgagtttacaggtgttttaactggaaaaggtgtatcctggggagggtcactaattagacctgaggcaacaggatatggaactgtatattttgctgaagatatgctaaatcacataggtgatagtattaaaggtaagactgtgacaatctctggatcgggtaatgtagcacagtatgcagctgaaaaatgtcttcatctaggagctaaggttcttacaatgtctgattcatcagggtatatttatgataaagaaggaattaatgaagaaaagttaaatcacatcatggatattaaaaataataaacgtggtagaatttctgaatacataaagaaatatccaaaagctgaattcataaaaggtaaaaaaccatgggcagttaaatgcgatgttgcacttccctcagctact

SEQ ID NO: 219577 - DNA, 866 bp, Unknown
  Bacterial polypeptide expressing nucleotide sequence isolated from the Sargasso Sea
aatgacaacagccactgaaaacaaggaactaactaactttatgactgcattaaaaaaacagcaccctggtgaagaagaatttcatcaagctgttcaagaagtagcagagtctgtatttccatttattgaagcaaacccaaaataccaacaagccaacatattagagcgtcttgttgagcctgatcgaattgttatttttaaagttacttgggaaagtgatgatggcacaattaatgttaaccgtggatatcgcgtccagtttaataatgctattggcccgtataaaggagggcttagattccatccgtcagttacgctaggcacgtttaaatttttagggtttgagcaaatttttaaaaatagtttaacaacacttccaatgggtggtgcaaaaggggggtctgattttgatccaaaaggaaagtctgatagagaggtgatgcgtttttgccaagcctttatgcttgagctacaacgtcatattggctctaatgttgatattcctgctggagatattggtgttggggctcgtgaaatcagctttttatttggcatgtataaaaaaatacaaaacaactttacaggtaccattacgggtaagcagttaaatattggtggaagtttaattcgaactgaagcaactggatatggagctgtttactttgccgatgaaatgcttgcacatgcgggcgattcattaaagggaaaaatatgtgttgtgtctggttctggcaatgttgcacagttcacagtagagaaacttttagattatggtgcaaaagtagtcagtttatctgattcatctggaacaattcacgataaagatggtatcacaagagaaaaattagaatttgttaaagagttaa

SEQ ID NO: 219578 - DNA, 538 bp, Unknown
  Bacterial polypeptide expressing nucleotide sequence isolated from the Sargasso Sea
aatgactctatcaaaagaaaaatttatgaataatgtgcatttaaaaaatcctggtgaaaatgaatttcaccaagcggtggaagaagttgtggaatctttatgggggtttttagaagataataattattatttacaagctaaaattttagaaagaatgattgaaccagagagagtgatacaatttagggttccttggagaaatgatattggagaagtacaaataaatagaggttatagagttgagtttaattcagcaataggtccatttaagggaggtcttaggtttcatccatctgttaatttatctattttaaaatttttagggtttgaacaagtatttaaaaatagcttaactactctaccaatgggaggaggaaaaggtggctctgattttgacccaaagggaaaaacagataacgaagtaatgaatttctgtcaaagttttatgacggagctttaccgtcatattggtcctaatacagatatacctgcaggagacataggtgttgggggtcgtgaaattggttttatgttcgga

SEQ ID NO: 219579 - DNA, 621 bp, Unknown
  Bacterial polypeptide expressing nucleotide sequence isolated from the Sargasso Sea
tatgtatacctctattgaacagttcatggaatatgtccaatctaaaaaccccggagaaaatgaattttatcaagcagtgcatgaagtaacggagtcattgtgggagttccttcaaaataatcctcattatgcttactataaagttttagatcgaatggttgaacctgaaagagtgatacaatttcgagttccatggagagatgatagaggagagatccaaatcaatagaggatacagggtagaatttaattcagctataggtccttataaaggtgggcttcgttttcatccgtctgtcaacctatcgattttaaaatttcttggttttgagcaagtattcaagaatagtttgacaaccctaccaatgggtggtggaaaaggagggtctgattttgacccaaaggggaagtctgaaaacgaggtgatgagtttttgccagagttttatgacggaactatctcgccatatagggccggatacagatgttccagccggtgatataggcgttggcggtagagaaattggttttatgtatggtcaatataaaagaattcgtaatgaatttacaggggtattaacaggaaaaggccttaattggggaggctctcttattcgacctga

SEQ ID NO: 219580 - DNA, 787 bp, Unknown
  Bacterial polypeptide expressing nucleotide sequence isolated from the Sargasso Sea
atgaaatataaatcaaaaaaagaatttttagattcagttgtagacaattattcagatcaaaaagaatttcatcaagctgttgaagaagtaatacattcaatttgggatacagctactagcagtgaagagtattgtaagttcaatattcttgatagaatagttgttcctgatagaacaattatttttagagttccgtggatggacgataagaataatgtacatgtaaatttaggatacagaattcaatttaattcagctattggtccatacaaaggtggtctaagatttcatcctaacgtcaatctgggcgtattaaaatttttggcatttgagcaggtatttaaaaatagtttaactggactaaaccttggtgggggtaaaggcggttcaaattttgatccaaaaggaaaatctgataaggaaataatgagtttttgttatgcttttatgaatgagctttacagacatattggtagaagaacagatattcctgctggtgatataggggtaggagctagagaaattggatatatgtttggtcaatataaaaaaattagaaatgcatttaccggtgttctcacaggaaaaggtactaattggggaggaagtttaattcgtcctgaagcaactggatatggtttagtatattttgttttagaaatgttggatactagaaaagattccttaaaaggaaaaactgttacagtatctggttcaggaaatgttgctcaatttgcttgtgagaaattaattgagcttggtgctaaacccagtaactctttctgat

SEQ ID NO: 219581 - DNA, 1348 bp, Unknown
  Bacterial polypeptide expressing nucleotide sequence isolated from the Sargasso Sea
atgagtcattccctctcccaggcggattttctggcccaggtcgccagccgcaatccccatcaaccggagttcattcaggccgtgagcgaggtgatcgcctccatctggccctatgtggtgcgccacccccgctacctgcagcacggcctgctggagcggctggttgagccagagcggctgatccagtttcgggtgagctgggtggatgatcgaggccaagtgcaggtgaatcggggctaccgggtgcagcacagctctgccatcggtcccttcaaaggggggatgcgctttcacccctcggtggatacctcggtgctcaagttcctcgccttcgagcagaccttcaagaatgccctcaccaccttgcccatgggcggtggcaaggggggcagcgattttgatcccaagggcaagagcgagggagaggtgatgcgcttttgccaggcgctgatgctggagctgcatcgccacctcggcgccgacaccgacgtaccggccggcgacatcggggtgggcggccgcgaggtgagctacatggcgggcatgatgaagaagctcaccaacagcgccgagtgcgtctttaccggcaaggggctctcctttggcggcagcctgatccgcccggaagccaccggttacggcctgctctatttcgtcgaggccatgctggccaaccggggacaatccctggacggcatgacggtctctgtgtccggttcgggcaacgtggcccagtacgccatcgagaaggcgatggccctcggcgcccgggtcatcaccgcctccgactccggcggcaccgtctacgatccggcgggctttacccccgagaaactggcgcggctgatggcgctcaaaaacgagcagcgcaaacgcatcgccgattacgcccacgaggaggggctggagtttttcagcggccgcactccctggcacctgccgactgacgtcgccctgccctgcgccacccagaacgagctggatgagtcggacgccaccaccctcattgccaatggcgtgcaactggtggccgagggggccaacatgccgagcagcgccgccgccatccgccgcctgcacgacgccaaggtgctgtttgccccgggcaaggctgccaacgccggcggggtcgccacctcgggcctcgagatgagccagaatgcccagcgcctctgctggagccgggaggaggtggatgcccgcctcaaggggatcatgaccagcatccacgccacctgtgtgcactatggccaggatgagacgggtcacgtgaactatgaaagcggcgccaacatcgccggcttcgtcaaggtggccgacgccatgctggcccagggggtctgctgac

SEQ ID NO: 219582 - DNA, 823 bp, Unknown
  Bacterial polypeptide expressing nucleotide sequence isolated from the Sargasso Sea
atgtactcaagtattgatcaatttatggataccgtgcattcgaagaatgcaggtgaagttgagtttcatcaggctgtacatgaagttgttgaatctttatgggattttttaaaggataatccgcactatttgcatgcaaaagtgctggataggatcattgagccagaaagagtgatacaattcagggttccttggagaaatgataaaggagaagtagaagtgaatcgtggatttcgtgttgaattcaattctgctattgggccctataaaggaggcctccgatttcatccttcagttaatctatcaatattaaaattcttaggttttgaacaggtgtttaagaatagtttaaccacacttccaatgggaggaggtaaaggcggttctgattttgacccaaaaggaaaatcggataatgaggtcatgagtttctgtcagagtttcatgacagaactctaccgacatatcggtccagatacagatgtccctgcgggagatataggtgtgggtggaagagagatagggtatttatttggacaatataaaagaataagaaatgaatttactggcgtcttaacaggtaaaggactcaattggggtggttctttgatacgccctgaggcaactgggtatggctgtgtttattttgctgaagaaatgcttaaaaaggttggtgatagctttgatggtaaacaagtagcggtatctggttcaggtaatgttgcacaatatgcaactgagaaagctacagagttaggtgcaaaggtcattactctctctgattcatcaggtacgattcatgaccaaaatggtattgatggag

SEQ ID NO: 219583 - DNA, 1342 bp, Unknown
  Bacterial polypeptide expressing nucleotide sequence isolated from the Sargasso Sea
aatggaaaaaattatcaaacaatttttgtcagaagtaaataaaaaaaaccaaaatgagcctgaatttatgcaggcagttactgaggttgctgagactgtcatcccatatattgttacaaaagatatctactatggtcaaaacattctgttaagaatggtagaaccagaaagagttgtgacgtttagggttgcatggattgatgataatgaagaaattcaagtaaacaggggtttcagaattgaaatgaactctgcaataggaccatataaaggtggattaagattccacccttctgtaaacatgagtatcctaaaatttcttgcttttgaacaagtttttaaaaatgctctaactactcttcctatgggtggtggaaaaggtgggtcagactttgatccaaaaggaaaatctgatactgaagttatgcgtttttgtcaaagctttatgactgaattatttaggcatattggtcctaacaaagatatacctgcaggagacataggcgttggcggtagagaaattggttatctttttggacaatataaaagattaaaaaatgaattttctggagttttgacaggtaaaggagtttcatggggaggatctctaataagacctgaagctactggatatggtgtagtttattttattgatgaaatgttaaagaataatggtgatggtctaaaaaacaagtctgttgtaatctctggttctggaaatgttgcacagtatgctacagaaaagtgtgttgacatgggagctaaagttttaactctttctgactcatctggatatatttatgataaggatggaataaataaagagaagttagaatatatcatggagttaaaaaacgacaaacgtgaaaggatctctgaatatgtcaaaaaatattccaaagcagagtttcactcagataaaaaaccttggtctgtaaaatgtgatattgctatcccatgtgctacagaaaatgagcttaatcttattgatgcaaaagaattactcaaaaatggctgtaaaactgttggtgaaggagctaatatgccttgtacatcagatgctgtaaaattattcattaaaaataaaattcaatatgcaccaggcaaagcttccaatgctggtggagttgctgtttctggattagaaatggctcaaaactcacttagatatacttggtcaagagaggttgtagatggtaaacttaaagaaattatgtccgatattcactcctcatgtcttaaatatggtgctgataaagattatataaattatgttaaaggggcaaatattgctggttttgtaaaagtagctgatgcaatgctagctcaaggtgtagtctag

SEQ ID NO: 219584 - DNA, 1354 bp, Unknown
  Bacterial polypeptide expressing nucleotide sequence isolated from the Sargasso Sea
atgaattatttaagtactactatttctcagctaaaacaaagcagtccggcacaaactgaattttatcaggctgttgaggaagtcctgcgaactctggaacctgttctggaaaaaaacaactattatgcgaagcattcaattatacagcgattagttgaacccgaaagacaaattatgtttcgggtgccctggcaagatgacagcggaaatatacagattaataagggataccgcattgaatttaattcggcacttggtccgtacaaaggaggacttcgttttcatccttcggtcaatgccagtattataaaattcttaggatttgaacaaatatttaaaaatgcgttaactggcctgccaattggggggggcaaaggaggcgcaaatttcgatccaaaaggacgaagcgatgccgaaataatgcgtttttgtcagtcattcatgaacgaactctatcgtcatattggacccaatactgatgtgcctgccggtgatattggtgtaggcgccagagaaataggctacatgttcggtcaatacaaaagactgaccgggaaatatgagggcgtacttaccggaaaaggtttgctttggggggggtcgtacgcgcgaaaggaggcaacaggatatggaacagtatatttcgcagatcacatgcttaatgcacgaggcgaaaacttacaaggacaacgttgcctcgtgtccggtgctggaaatgtcgctatttatgcaatggagaagctttatcaacttggtgctactcctattgcctgtagtgactcaaccggtacgctatatcatgcgcaagggttggatctgtctcttattaaggaactcaaagaaaaagaacgtacttcgcttttacgttacttaaagtctcaccccagggcacagttcattccgatcagtgaatatccttcaggaggacatactatttggcgatacaaggcagacttagcgtttccatgtgccacacaaaatgagttaacaactcgtgatgccgaagcactggtttctaatggatgcaaattggtgagtgaaggtgcaaatatggcttcttcacaaggtgcggtagagtactttcttaaagccggtatttcttatggtccgggtaaggccgctaacgccgggggagtagcgacaagtcagttagaaatggcgcaaaacgccagtatgcaaaaatggactttcgagcaagtcgattgtcaattactacaaataacgaaggatatttatctacgagccagtgagactgcaagagaattcggtgcgcccggtaaccttgtattaggagctaatattgctgcctttcgtcgggttgcagacgcaatgattgagcaaggtgtagtttaaa

SEQ ID NO: 219585 - DNA, 745 bp, Unknown
  Bacterial polypeptide expressing nucleotide sequence isolated from the Sargasso Sea
atgaaaaaaattgttcaaaaatttctcaagcacgtaagttcaagaaatcaaaatgaacctgaattcatgcaggcagtaactgaagtcgctgaaacagtaataccttacataattactaaggatatatattatggtcaaaatgtcttacttagaatggttgaacctgaaagagtaatttcatttagagtagcatggattgatgataatgaagaaattcaggtcaacagaggctatcgtgttcaaatgaattctgctattggaccatacaaaggtggactaagatttcatccaagtgttaacctaagtgttttaaagtttttagcctttgagcaagttttcaaaaatagtttaacaactctcccaatgggtgggggaaaaggtggctctgattttaatcctaaaggtaaatctgatacagaagttatgagattttgccaaagttttatgtctgagttatataggcatataggtccaaataatgatgtccctgcaggagatattggtgttggaggaagagaaattgggtatttatttgggcaatataagagactcagtaatgaattctccggcgtcttaactgggaaaggtgtttcatggggtgggtcattaattagacccgaggctactggatacggtgtagtttatttcacagttcaaatgttgaaccatataaatgaaagtatcgaaggtaaatctgttgtaatttcaggttctggtaatgtagctcaattgcagcagaaaaatg

SEQ ID NO: 219586 - DNA, 1339 bp, Unknown
  Bacterial polypeptide expressing nucleotide sequence isolated from the Sargasso Sea
tatgtataaaagcgttcaagatttcatgagttacgttgaatcaagaagctatggtgaaaaagagtttcatcaggccgttgatgaagtggttgtatcgttatgggattttttacaggaccatcctgattatctacatgcaaaagtattagagagaatgattgaacctgaaagggtgatcatgtttcgcgttccttggagaaatgacaggggagatgttgaagtaaacagagggtaccgtgtagaattcaattcggctattggcccctacaaaggtgggcttcgatttcatccttctgtcaatttaggaatattaaaattcttaggttttgaacaggtttttaaaaacagtttaactacacttcccatgggcggtggaaaaggtggttcagattttgaccctaaaggaaaatccgataacgaagtaatgagtttttgtcaatcatttatgacggagctatataggcatattggtaacaatacagatgtcccagcaggcgatattggcgttggcggaagagagattggctatatgtttggtcaatataaacgcatccgcaacgaatttacgggagtcttaaccggcaaaggtttgaattggggaggaagtcttattcgccctgaagcgaccggttatggctgtgtttattttgctgaagaaatgcttaatactaaagacgaatcatttaaaggtaaaactgtagcgatttccggctctggaaatgttgcacaatatgctgccgaaaaagtaaatgatcttggcggcaaggttgttacgttatccgattctagcgggacagtgtatgacaaggatggtatcaatgctgaaaaactagctttcgtaatggatttaaagaatgttaaaagaggtagaattaaagattatgccgataaatttaatgcagagtttcatgaaggtgagcgcccatggaagatatcctgcgatgttgccttgccctgcgctacgcaaaatgagttaaataaaagcgaagcgaaagagttggtcaaaaatggctgcctagctgtagctgaaggcgccaatatgccaaccgagccagatgcggtgaatttatttctgaaggaaaaaatactttttggtcctggaaaagctgccaatgcaggaggcgttgcggtttcaggtctagaaatgagtcaaaactctatgcgcctctcctggactagagaagaggtggatggaagactacatgatataatgaaaaatattcacacctcttgtactgcaaatggtaaagaagggaagtttgtcaattatgttaaaggtgctaatatagcagggtttatcaaagttgcagacgctatgatggatcagggtatcgtataa

SEQ ID NO: 219587 - DNA, 650 bp, Unknown
  Bacterial polypeptide expressing nucleotide sequence isolated from the Sargasso Sea
tatgttccgtaatatgaatgattttttagattccgtaaaatcaaagaatcaacatgaaacagaatttcatcaagcagttcatgaggttatagaatcaatttgggattttgtttcagataatcctcattatcagcataatgccatacttgaaagaattactgaaccagaaagagttttgatgtttagagttccatggacagatgataaaggaaacattcatgttaataaaggattcagaattgaatttaattctgcaattggaccatataaaggtggattaagattccatccttcagtgaatttaagtattttaaaatttttaggatttgaacaagtatttaaaaatagtttaacaacacttcctatgggtggtggtaaaggtgggtcagattttgatccaaaaggaaaatcagatgcagaggttatgagattttgtcaatcatttatgactgaactatgtagacatattggacagcatactgatgtgcctgcaggtgatattggagtaggtggtagagaaattggttttatgtttggtcaatataaaagaattagaaatgaatttacaggagtcttaactggtaaagggttgaattggggtggaagtttaattagaccagaagcaacaggttatggtgcggtatactttg

SEQ ID NO: 219588 - DNA, 1342 bp, Unknown
  Bacterial polypeptide expressing nucleotide sequence isolated from the Sargasso Sea
atgtataagtctgtagataatttcatgaaaaatgttatttcgagatccccaggtgaggatgaatttcatcaagctgtgcatgaagtaatttcttctatatggggatatgttcaagatcacccacaatatattcatgaaggaatattagatcggattgttgaacctgaacgagttattatgtttcgtgtaccatggcgcgatgatcgcggaaaaacacaagttaatcgcggatatagagtagagtttaactcagctattggaccgtataagggaggtctacggtttcatgcctcagttaatctcagtattttaaaatttcttggatttgagcagatatttaaaaatagtcttactacacttccaatgggtggtggtaaaggtgggtccgactttgaccctaaagggaaatctgataatgaagttatgagtttttgccaatcttttatgacggaactttttcgtcatattggccctaaaactgatgttcctgctggtgatataggcgttggaggtcgtgaaattggatatctatttggtcaatataagcgattgcggaatgaatttactggtgtattaactggtaaaggtttgaattggggtggaagtagaattagaccagaagctacgggttatggcgctgtttattttgctgaagaaatgttaaaacgaagaaacgaatcttttgaaggaaaaactgtagccgtatcagggtccggtaatgttgctcaatatgcgacggaaaaagttactcaattaggagctaaggttgtaactatgtctgattcaaatggtacaattcatgacccagatggtattaatgaagaaaaattagcatggattatggatttgaaaaatattaagaggggtagaataaaagaatattcttccgaatttaattgcgattatatagatggtaaaaaaccttgggtaattccctgtgatatagcattaccatgtgcaacccaaaatgaaattaattcaaatgatgcaaaaatattaattaagaatggatgtatttgtgtatctgaaggagcaaatatgccttcagatgctgaagcaattgatgtatttacaaataagaaaatcttatttggtccaggaaaagcagccaatgctggtggagtagcagtctcaggattagaaatgagtcaaaataatatgggtttagcttgggcaagagatgaagtagatcaacgtttacgccagatcatgaaagatattcatagtcaatgtactgaatttggatcagatgctgataattatgtgaattatgttaaaggagcaaatataggtgggtttataaaagttgctgatgcaatgattgatcagggtgtcgtatagc

SEQ ID NO: 219589 - DNA, 1071 bp, Unknown
  Bacterial polypeptide expressing nucleotide sequence isolated from the Sargasso Sea
aaggaggtcttaggtttcatccttctgttaatctaagtatcctaaaatttttaggatttgaacaagttttcaaaaatagtctcactactttaccaatgggcggtggtaaaggtggttctgattttgatccaaaaggaaaatcggatagtgaagttatgagtttttgtcagagttttatgacagaattatgtagacatattggtccagacactgatgttccagctggtgacataggagttggtggtcgtgaaattggctatatgtttggtcaatataaacgaattaggaatgaatttacaggggtgcttactggaaaaggtttgaattggggtggatcattaatacgtccagaggcaaccggttatggatgtgtttattttgttgatgaaatgctgaaacatgctggcaaaggccttgatgaaaagcatgtggcagtctctggttcaggaaatgttgctcaatatgcaaccgaaaaggtgactcaactaggaggtaaggtagttaccttatccgattcttctggctttatacatgacccaaatggcatcgaccaagagaaattagaatgggtcatagatttaaaaaataacaaaaggggtagaattaaagaatacgctgataattttaattgcgaatattttgaaggcaagcgtccttggagtattaagtgtgatgtggctctgccatgtgctactcagaatgaaataaatgaatctgatgcaaaagagttagttaaaaatggtgtagttgcagtgagtgaaggagcaaatatgccatcagaccctgatgctattcatgtatttcaaaattctaatatactttttggccctggaaaagctgctaatgctggaggggtagcagtatctggtttagaaatgagtcaaaatagtatgagaattaaatgggaaagtgaagaagtagataaaaagttgtttaatattatgcaaaacatacattcctcctgcgttgaacatggtgaccaaaaaaacattattgactatgtcaagggagcaaatattgcaggttttattaaggtggcagatgctatgattgatcagggagtagtatagt

SEQ ID NO: 219590 - DNA, 1360 bp, Unknown
  Bacterial polypeptide expressing nucleotide sequence isolated from the Sargasso Sea
aatggacaatgcgataaagacagtttacgagacagtgataacgagagacccagaccagcctgagttccatcaagcagtggaagaagtcttggaaagccttggacccgtgatatctgagaacccagaatacatggatgtcgtacatagcatggtagaggccgagcgagtaattcagttcagagtaccatggtacgacgatgaggggtccctacaggtgaacaggggctaccgggtccagttcaacagtgcaatagggccttacaaaggcgggcttaggtttcacccaagcgtcaatctatccatattgaagttcctgggatttgagcaggtgttcaagaatagcctaacagggctgccaatgggtgggggaaaagggggttcagacttcaatcccaaagggagatcagactccgaggtcaagagattctgccagtcctacatgagtgaactttggaggcatattggtgctgatctcgatgtgcctgcgggagatatcggagttggaggcagagagatagggtacatgttcgggatgttccggaaattagcaaacgagttcaccgccggcgtgctaacaggaaaaggactctcctacggtggttcgcttatcaggccagaagcaactggctacggtttggtatactttgcaagagaaatgctgtcaacgaagggcaagtcattcgaaggtgccagagtagcaattagcggctccggaaacgtagcgcagttcgcctgtgagaaggtcttggatctcggaggcaagcccgttacaatgtcggatagtggcggctacatatacgatgaatctggaatagatagggaaaagcttgcatggatcatggatctcaagaataacaagagaggcaggatcaaggagtacgctgatcatttcgatggagttgagtacaccgaatcgaagcccgagccaaatcataacgaactgtgggcgactgaagtcgatgttgccctcccttgtgctactcagaatgaggttaacgaggcagaagctaggatgctggttgagggtggagtgattgctgtagcggagggtgcgaacatgccatgtactcccgaagcaatcgaggtattccacgaaaacgggattctattcggaccaggtaaggccagcaatgcgggaggggtggcaacctcgggtctcgagatgagtcagaacagcctaaggatgagttggaccagggaggaagtagaccagaagctagagagcataatggtcaacattcacaagaacgccttcgagacagcggagaagtatggcatgcctggaaactatgtggctggagcaaacatcgccggattcctgaagatcgcagaggctacaatggctcagggagttctctga

SEQ ID NO: 219591 - DNA, 1136 bp, Unknown
  Bacterial polypeptide expressing nucleotide sequence isolated from the Sargasso Sea
tatgtattctacaatagatgagttcatggattatgtagaaattaaaaatccaggtgaaaaagaattccatcaggcggttcatgaagtagttgaatctctgtgggactatttaaaagataacccccattatcttcattctagaattcttgaaagagttgtagagcccgagcgcgtaattcaatttagagttccatggagaaatgatagaggcaatactgaagtaaatcgcgggtttagggttgaatttaattctgccattggtccctataagggaggtctacgatttcatccttctgttaatctttcgattttaaaatttcttggattcgaacaagtatttaaaaatagtcttacaaccttacctatgggtggtggtaaggggggatctgattttgatccgaaaggtaaatcagataatgaggtaatgagtttttgccagagctttatgactgaactctataggcatattggccccaatactgatgttccagctggtgatattggtgtgggtggaagagagataggattcctgtttgggcaatataaacgtatagtgaatgagtttacgggtgtattgacaggaaaaggattgaactggggcggatcattaattaggccagaagcaacaggttatggatgtgtttattttgctgaagagatgttgaaaaaaaagggcaatggttttgaaggtaaagtaatagcagtttctggttctggtaatgtggcacaatacgcaacagagaaggcaaccgatctaggtgctaaagttgttactttatcagattcatctggctccattcacgataagaatggaattacgcccgagaaacttgcatgggtaatggatctgaaaaataataggcgtggtcgaataaaggattatgcaatagagtttaaagttgattacttagaagcacaaacaccttggagcataccttgtgatattgctctgccttgcgctacccaaaatgaaataaatggtgatgatgcaaaagtgcttttatcaaacggatgtaaagttgtttctgagggggcaaatatgccatcagatacacaagcagtcactgtttttcaggaaagtgatatgctttttgggccaggaaaggcagctaatgcgggaggtgtgcaaccagcgg

SEQ ID NO: 219592 - DNA, 1299 bp, Unknown
  Bacterial polypeptide expressing nucleotide sequence isolated from the Sargasso Sea
aatggacaaaatagtaaaacaatttttatcacaagtaagtcaaaaaaaccaaaatgagcctgaatttatgcaggctgttaatgaggttgcagagactgttatcccatatatagttactaaagaaatttattatggtcaaaacattttacttagaatggttgaacctgaaagagtagtgtctttcagagtcgcatggatagatgataatgaagaaattcaagttaatagagggtatagaattgagatgaactctgctatagggccatacaaaggaggtttaaggtttcatccatctgttaacttgagcattctaaagtttttagcttttgaacaggtattcaaaaacgctcttacaacacttccaatgggaggtggtaaaggaggttcagattttgatccaaaaggcaaatctgacactgaagtaatgaggttctgtcagagttttatgactgaattattcagacacataggccctaataaggatattcctgctggagatattggggttggaggaagagagattggatatctttttggtcaatacaaaagattaaaaaatgaattttcaggtgttctaacaggtaaaggaatatcatggggcggttccttgattagacctgaagcaactgggtatggtgttgtttatttcattgatgagatgctaaaaaataaaggagatagcatgaaaggaaaaaaagttactatatctggatctggtaatgtagcacaatatgcaacagaaaaatgtattgatatgggggcaaaggttttaactctttctgattcttctggatttatatatgataaagatggtatagattctgaaaaactcaaatatattatggagcttaaaaatgaaaaaagagttagaatctctgagtatattaagaaatattctaaagcagaattttactcaaaaaaatctccatggaatattaaatgtgatattgcaataccatgtgctactcaaaatgaattaggtaaagaagatgcaatgtctcttataaaaaacggatgtaattcagttggtgagggagcaaatatgccatgtactccagatgccgttgagcaattcattaataataaagtactttatgcacctggtaaagcttcaaatgctggaggagttgcagtatctggattagaaatggctcaaaattccttaaggtacacctggactcgaaatgttgttgacggtaaactcaaagaaataatgtctgatattcatgcttcgtgcgttaaatatggttctacaaaagatgagataaattatttaaagggggctaatattgcagggtt

SEQ ID NO: 219593 - DNA, 872 bp, Unknown
  Bacterial polypeptide expressing nucleotide sequence isolated from the Sargasso Sea
accaaacaaagatattcctgcaggggatattggtgttggaggaagagaaataggatatatgtttggacaatataaaagattaaaaaatgagttttccggagtatttacaggaaaaggtatctcatggggtggatctttaattagaccagaggcaactggttatggggtagcatattttatcgaagaaatgcttaagcataagaagaaaaatgtaaaaggaaagaaagttattatttctggttcaggaaatgttgctcaatttgctacagaaaaatttattgaaatggggggaaaagtcctaacaatgtctgattcttcaggctttattcatgatccagctggaataaataaagataaactaaaatatgtgatgcagcttaaaaatgaacaaagaggcagaatatctgaatacgaaaaaaaatatcctaaagctaaattcttttctaaagataaaccatggaaggtgggttgtgatattgcaatcccttgtgctactgaaaacgaattaaatcaatctgatgcaaaaactttaatcaaaaatggagtgatggcagttgccgaaggagctaatatgccatgtactccagaggctataaaggcttttcaaaatagtaaagttttatatgctccaggaaaagcttctaacgctggaggagtagctgtttctggtctcgaaatggctcaaaattctttaaaaaacacttggtctagaaaaattgtagacggaaaattacaagaaatcatgacagatatccatagttcgtgcctagaatatggaaaagaaaaaaatagtatagattatctcaaaggagcaaatattgctggttttgtcaaagttgctgatgctatgcttgctcagggtgttgtttaac

SEQ ID NO: 219594 - DNA, 673 bp, Unknown
  Bacterial polypeptide expressing nucleotide sequence isolated from the Sargasso Sea
aagggagataatttaaaaggtaagaaagttactatatctggatccggaaatgttgctcaatatgctactgaaaagtgcatcgacatgggggctaaggttttaactctttctgattcctctggattcatatatgacaaagatggtatagactccgaaaaactccaatatattatggagattaaaaatggtaaaagagccagaatttcagagtatttaaaaaaatattctaaagcagaatactacccaaaaaaatcaccttggattattaaatgtgatattgccatcccatgtgctactcaaaatgagctagatttaaaagatgcaaattctttgataaagaatgggtgttctactgttggtgaaggggctaatatgccatgtacacctgatgcagtcgaattatttataagcaacaaaattttatatgcacctggcaaagcttcaaatgcaggtggggtagctgtttctggattagaaatggcacaaaattccctaaggtatacttggactcgagatgctgtagatggtaaattaaaggagataatatctgatattcatacatcatgtgtcaagtatggttcatcaaaaagcgaaataaattatgtaaagggagcaaatattgctggttttgttaaagtagctgatgcaatgcttgcacaaggagtagtttaga

SEQ ID NO: 219595 - DNA, 1072 bp, Unknown
  Bacterial polypeptide expressing nucleotide sequence isolated from the Sargasso Sea
aatggaaaaaattatcaaacaatttttgtcagaagtaaatcaaagaaaccaaaatgagcctgaatttatgcaggccgttactgaggttgctgagactgttatcccctatatagtaactaaagatatttattatggccaaaatattctattgagaatggtagagccagaaagagtagtttcatttagagtagcttggattgatgataacgaagaaattcaagtaaacaggggatacagaattgagatgaactctgctataggaccttacaaaggcggccttagatttcacccttctgttaacatgagtatattaaagtttcttgcttttgaacaagtttttaaaaatgctcttacaactcttccaatgggaggtggaaaaggtggttcagattttgatcccaagggaaagtccgatactgaagttatgcgattttgtcaaagctttatgacggaattgtttagacatattggaccaaacaaagatattcctgcaggagacataggagttggtggcagagaaattggctacctttttggacaatataaaagattgaaaaatgaattttctggggtcctaacaggtaagggtgtctcatggggaggatctctaattagacctgaagctactggttatggtgtagtgtattttattgatgaaattctgaaagcaaataatgatggtctaaaagacaagtctgttacaatttctggttctggaaatgttgctcagtatgctacagaaaagtgcatagatatgggagcaaaagttttgactctttctgactcatctggatacatttatgataaggatggaatcaacaaagagaagcttctgtatattatggagttaaaaaatgtgaaacgcaaaaggatttcagaatatgttaaaaaatattccaaagctgagttttaccctaataaaaaaccatggtctgtaaaatgtgatattgctatcccttgtgctactcaaaatgaacttaaccttaatgatgcaaaagcattacttaagaatggctgtaaaactgttggtgaaggagctaatatgccatgtacggctgatgctataagttta

SEQ ID NO: 219596 - DNA, 1342 bp, Unknown
  Bacterial polypeptide expressing nucleotide sequence isolated from the Sargasso Sea
atgaagtataaatcaaaaaaagaatttttagattcagttgtagataattattcagatcaaaaagaattccatcaagctgttgaagaagtaatacattcaatttgggatactgctactagtaatgaagagtattgtaagtttaatattcttgatagaatagttgttccagatagaacaattatttttagagttccatggatggatgacaagaataatgttcatgtaaatttaggatacagaatccaatttaattctgctattggtccctataaaggtggtttaagatttcatcctagcgttaatctgggagtattaaaatttttggcctttgaacaagtttttaaaaatagtttaaccggcttaaaccttggtggaggtaaaggtggttcaaattttgatccaaaaggaaaatccgataaagaaataatgagtttttgttatgcatttatgaatgagctttacagacatattggtagaagaactgatattcctgcaggagatattggagtaggaggtagagaaattgggtatatgtttggtcaatacaaaaaaattagaaatgcatttactggagttttaactggaaaaggtactaattggggcggaagtttaattcgtcctgaagcaactggatatggtttagtttattttgttctagaaatgttgaatgttagaaaagattctttaaaaggaaagactgttacagtatccggttcaggcaatgttgctcaatttgcttgtgaaaaattaattgagcttggtgctaagccagttacgctttctgattcaagcgggtttattcatgatcctgatggaataacacaagaaaaaattgaatatgttaaaaagttaaaaagcgtcagatcagctagaatttcggaatatgctaaaaaattcaacgtagagtatgttgagggtaagcgtccatggtcaataaaatgtgatattgctttaccttgtgctacggaaaatgaactaaatcttgatgatgcaaaacagctaactgataatggttgttacgtagttgcggaaggtgcaaatatgccttcaacaacaaatgctgttcaccattttatcaaccaaaaaatattatatggacctggtaaagcagcgaatgctggtggagtagctatttcaggcatagaaatgagtcaaaatagtacaagaattccattatctagagataaggttgatggtttgcttaaagaaattatgcaacgtatccataccacctgtgtaaaatatggtaaaaaagatgactttataaactatgttgacggagcaaacattggtggatttgttagagttgctgattccatgattgaccaaggaattgtttaaa

SEQ ID NO: 219597 - DNA, 711 bp, Unknown
  Bacterial polypeptide expressing nucleotide sequence isolated from the Sargasso Sea
catggggcacgaacgcattctgatttgtcaggatgatgcaactggtctcaaggcaattgttgctgtgcatagtacagtttgtggtccagcattaggcggcactagaatgtggaattatgcttcctctgcagatgcattaattgacgtcatgagattatctcgtggtatgacttataaaaatgccatatcagggttaaacttaggcggaggtaaagctgtaattataggcgactctaaaacccaaaaatcaccagaactttttcgaaaattcggagaatttattgatagcctaaatggctcatacattactgcagaagatgttggaattagtccagaagacatgatgcacgttgcagaatctactaaacatgttacaggtttacctggcaaaaaaggtgatccttcccctgtaacagcttatggtgtttatatgggaatgaaagcagctgcaaaataccaatttggcaatgataatctcaatggtaaaaaaatcgctgtccaaggaattggtcatgttggtgaatatcttctaaattatttacacaaagaaggtgctttattaaccataacagatatcaatcaagatgcacttaaatcagctgctgaaaagtataattgtagtgtggtgaatccagatgatatttatgacgttgatatggatatatatgcaccatgtgctcttggtgcaacagttaacgatgaaaccataaa

SEQ ID NO: 219598 - DNA, 655 bp, Unknown
  Bacterial polypeptide expressing nucleotide sequence isolated from the Sargasso Sea
tatggcaagaaaatcttccccagacggcgcggctaacccgcagcgcaggcaatggctcaaatatgccggcgcctcggctgccgtgggcacgctcgccatgggcacccaacaggcgtatgccgccgtcaccaagcccgtgccaggcgcggacggcattctcgatgtcgccatcataggagcggggctggctggactgaccgccgcgcgagatctgcgccagtctggctgcgagtcctttctggtgctggaagctcgggatcgcgtgggagggcgaacgttcaactacgacatccccggcgggtacgtttcggaagtcggcgggcaatggatcgggcccggccagaccgccatcgcggatctcgcccgagaactgggggtcggcacgtttccgacctactacgacggaagtacggtcatgctgggcggtgacggccgcgtggcaatcgatctgaagggcaccttcggcaccgacgacgcgatcgcggcaaagctcagcaggctctcacgcgacgtgccttgtggcgcaccgtggacgtccccgaaggccggcgaactggacaaactttcagttggcgactggctggaaaagcagggtatcaagcctgaagaccaggttgcatggcatgacagcatcagcctttcgggcggagccgcg

SEQ ID NO: 219599 - DNA, 703 bp, Unknown
  Bacterial polypeptide expressing nucleotide sequence isolated from the Sargasso Sea
catatgggcagtaattttaatactcgttttcctcaagtttcatcctattgtgaaaatgcagacttagatcctgaaaaagaccttctgccaataattcctgtcgctcattatcatataggtggcgtaaaaactgatctgaaaggacagacttctgttgaaggactctggtgctgcggagaggtagctgcaactggtattcatggagcaaaccgccttgcatcaaattcactattagagtctcttgtatttgctaagattgttgcaaatgaaataaatgaaaagaatataaaaaaagatattcatattagctctagatttataaaaatttttaaagagaaaactaaaaataaaataagagcaaaaaaatatatatggcaattaaggtcttcaatgatgagaaatttaggaattgttagaaataaaaattctattatcagaggtctaaatgatgtgctaaaaattgaaagagagtcaaaaggcctttcagctaaacttaatgatatgattttggttagtaaatttattatcataggcgcttatttaagaagagaaagtcgaggttgtcatttgagatctgattaccaagatactgataaagattttattaagcattttgatattaaatattcagaaatagatggttatatcaaaactatcttgaattctactatatcagaagttgatgaaaaacttgttagctaaa

SEQ ID NO: 219600 - DNA, 406 bp, Unknown
  Bacterial polypeptide expressing nucleotide sequence isolated from the Sargasso Sea
tatggaaagtatttataaatcagatgttgttattgttgggtctggaatatctggacttactgtcgcaatatccttgtatccaaggaaagtaactcttgttactaagcgcaagcttggagagatgtcctcaagtgcttgggctcaaggtggaatagccgcggcagtaagtgaggaggattcgccacaaaaacattttgaagatacaattaaagtaagtgcaggattgagtgatgaaaattctgttaaagaaataactgagaaagcagtaagtgtagttaattttttagaaaaaataggagttatatttgatagggaaaaaggagaattatctttatcaaaagaagcagcccactctcagagaagagttttaaagttaacggcgatcaatcaggtaaatttattgtag

SEQ ID NO: 219601 - DNA, 181 bp, Unknown
  Bacterial polypeptide expressing nucleotide sequence isolated from the Sargasso Sea
atgtctcaacgttttgccactgacattttaattatagggggcggcgctgctggcttagcagctgcacttcatctcgctgacgtgcaccgcgtgacgcttttatcaaaaggctcgatggaatcaggctcgtcagcttgggcgcaaggaggtatagcagcagtcaccgactctactgattctt

SEQ ID NO: 219602 - DNA, 692 bp, Unknown
  Bacterial polypeptide expressing nucleotide sequence isolated from the Sargasso Sea
cttgactcaggacaaaatacccgttcggcctggagctcactacatgattggtggcgttcaggttgacgagcatgctcgaacatctgtcccgaggctttttgcagctggtgaagtgacctcaagtgggttgcatggggcaaacaggcttgcgagtaacagtcttttggaaggacttgtttatggggctcgggctggagaggtagccagtgaagagataatctcaaatgggtatgaacaggagcacaacaattttcgtgtgcctatgcttgcaaaccgtcgtcaagacaaatctgccgaatcccagtctgtttctgaatctcttgacctcggtgatattcgaaattcacttcgcgcacttatgtggagacatgttggggttgaaagaagtggttcacagttgacagaagctttgtcgacagttgatagttggtgccgttacgttttaccaagacaattcgctgactcatctgggtggcaacttcaaaacatgttggagtcagcacaacttatgattcgcgcggcaatcgtgcgagaggaaagtcggggtgttcattaccgttgtgatcatcctgcccctaaaaatgatgattggaaagttcacattagttggcagcgtggttgtacaagtcctcaaattgcaccagttcctgattcgacggagtcaagagagtcaagtttttcggtggaatgag

SEQ ID NO: 219603 - DNA, 718 bp, Unknown
  Bacterial polypeptide expressing nucleotide sequence isolated from the Sargasso Sea
aatggaagtaggccccacagcacattatgtgatgggaggtgtgaaggtagatcctttcagtcaagagagttccgttccgggcttgtttgcggcaggcgaggttgccactggcctacatggcgcgaaccgactaggcgggaattcattatccgatctaattgtgttcggaaaaatcgcaggagagtctgctgctaaatattcaaaggaacaagaggattactcggaaatcgatcagttagaaatcgataaggttgtcaatgagactttagagccattgagcaggcaaggaggggaaaatcctgccagtgttgtgaatgacctgagggtaatgatgcagaacaaagcaggaataattaggacaggagatcttcttcaggaggctatgtctgacttggatttgcttactgagcgttcaaaatctacttctcccggagggggaagggtctacaacccaggatggcaccaagccttggagattggcgctatgattgatgttagtaggatgtgcgcaattgcagctctaaagagggaagagagtagaggagcacatacaagggatgacttccctgagactgatcatgaacattgggggaacagaaatagcgtaatttggatggatgaaaacgcagagatgaagattgatttcgtctcatatccaaaaattcccaaagaattgagatctctactggattcagaagatttgcacgaggaggagtag

SEQ ID NO: 219604 - DNA, 847 bp, Unknown
  Bacterial polypeptide expressing nucleotide sequence isolated from the Sargasso Sea
atgtctgaaaggtttaatactgaagttttaatagttggaacaggtatttccgggttaattgctgcgattaaattatctgagagatattcagttacgattctaagcaaatcttctctcagcgattgctcaacagcttgggcacaaggaggcatagcagcagtaattgataatgaagataatattaataaccacataaaagatacaataaataatggtcatgaaatctgtaacaccaattctgttcaacagattatcaaacaagggaaagatagcattgaactattactaaactacggcgttaattttaataaaaaagggaaagggttagatcaaacattagagggaggtcactctcacagaaggattgtttatcataatgataatacaggcgaagaggtacatagttcactcttaagagaagccaaaaagaaaaaaaatatcatcattaaagaaaacataatggtgattgatatgattggtaaaaaagagaactattgtgaaggtgtgtatgcgtatgataaaagaaataactatgtggtttcaattaaggcaaatattataatcctggcaactggaggagctagtaaaatttatcaatatactactaatccaaatacatcaacaggtgatggcatagctatggcatggagattcggctgtgagataagtaatatggaattcattcaattccatccaacatgtttatttcatccaaaagaaaaaagttttcttatatcagagtccctaagaggagaaggagctaaattaaaagatctaaatggaaattgcttcatgaaaaaatatgatgaacgattggaattagctccccagagatatagggcaagag

SEQ ID NO: 219605 - DNA, 933 bp, Unknown
  Bacterial polypeptide expressing nucleotide sequence isolated from the Sargasso Sea
tactcaggtgactacacaggaaggtctattctttttgcattaatcaacaaagctaagtcacttgatataccaatctatgattctcaatatgtatcagaccttttagttgacgataacgtatgttttggagcaatggcttttgatattcaaagcggtgaaagaaccatttatcttgctgactctgtaattattgcagcaggaggtcatacacgattatggagaaaaagttcatcaagaagaaatgaaaatactggagatggattctttttgggcctaaaagcaggatgtaaattaagcgatatggaaatggtccagtttcatccaacaggtatggttattcctgaagaaatggcaggaactttagttacagaagctgttcgaggcgaaggcggaaaacttatcaatagcgatggtgaaaggtttatgaaaaattacgatagcgatcgaatggaactttcaacaagagatagagtggcaatggcaaactatacagagattgttgaaggaagagggtctccaaatggaggtgtttacctagacataagccataaaggtaaagattttattattgaaaaactaccaagaatgtatagacagtttcttgatacattaatgattgatatatcaaaaagccctatggaggtatctccaaccgctcattattcaatgggaggtatagttgtaacacccgaagaacactggactggtatcgagggcttatatgcagcaggagaagtaactgcaggattacatggggcaaacagattaggaggtaattctcttgctgaaatacttatttttggtaaaagagctggggatgccgcatcaaaacattcaaaggaaattaatgttcatatacgatcaaaagaagttatacagcaagctcatgataatctaaactcttcaattaaaaatggaactgaagttgctaga

SEQ ID NO: 219606 - DNA, 662 bp, Unknown
  Bacterial polypeptide expressing nucleotide sequence isolated from the Sargasso Sea
gatggaggtcgggcccaccgctcactatgtcatgggaggggtcaaggttgacccattcagccaagaaacctctgtgggaggactatttgctgctggagaggtggctaccggattgcatggtgcaaaccgtcttggaggaaactccctatcagacttgattgtgttcggaaagatcgctggggagcatgctgcaagatattcgaaggatcaaacagacttcctagaaatagactcggatgaaatagaggaagtcgtagaagagacccttgagcctctgagcagggaaggcggggagaatcctgccaaggttgttagcgaactaagagaaatgatgcaaaacaaagcaggaataatcagaacaggggatcttctagaagaggctctagtcgaacttgaggagtttagaaccagggctgcctcgacttctcccggaggtggaaggatgtacaacccgggatggcaccaggctctagagatagaagcaatggtagatgtgagcaagatgtgcgcaatttccgcccttcgtagagaggagagccgaggagcccatactagagatgacttccccgataccgatcacgggcattggggcaaggtgaacagcgtcatagtgatgggagatgatggttcaatgaacatcgacttcgtttcatatccggaga

SEQ ID NO: 219607 - DNA, 601 bp, Unknown
  Bacterial polypeptide expressing nucleotide sequence isolated from the Sargasso Sea
ctgagtaaatctatattgcaggattgttctacagcatgggcacaaggtggggtagctgcagttattgatgaaaaagataatattaccaatcatacaagagatacacttagcaatggtcatagtatttgcaatgtcaaatctgtggaacagattatcgctcaaggtaagaaaagtatcgatttattattaaaacatggtgtagattttaataaatcaggagaaaatttagatttaactttggagggtggccattctcaccgaagaattgtatttcacaatgataatactggtgaagaaatacatcgctcacttatagaagaagctaaaagtattaaaaatatagaaattaaagagaattttatggcaatagatctcattggtaaaaaagataatttttgtgaaggactatatgcatttgatggagtaaagaaagctgtggtgacaataaagtctgatgttgtaatactagcaaccggcggagcgagcaaggtgtatcaatatactacaaatccacacacatctactggagatggtattgcaattgcttggagatttggatgcactatcacaaacatggaattcatacagtttcaccctactt

SEQ ID NO: 219608 - DNA, 688 bp, Unknown
  Bacterial polypeptide expressing nucleotide sequence isolated from the Sargasso Sea
ggggcccattacatgatttgtggagtagctgtagacacaacggcccagacatcgattccacatctttttgcggcaggtgaggttgcttcgagtggcttacatggtgcgaatcgactggctagcaatagtcttttagagggtcttgtttttggcagccgtgtgggtgaacaagtaacgcaggaactggagaaagcagataaaggaaataaggatgagaacgatcttgaagttccgtttcttactcatgcagatgctgtcgatccagccgatgttcccggaggggagccgctggatctttctgatattcgaaattctctacgaagtctgatgtggcgacatgtaggtgttgagcgatcaggagaatcgctgcgggaggctctccaaacagttgatagctggtgtcgatatgttttacacagacaattttctgggcctcagggatggcagttacagaatcttcttgaggtaggaaggcttatgatctacgcatctttagctcgaactgaaactcgaggtgttcatgtaagatcggactatcctgcgacgtcagatgattggcgggcgcatctctgctggcaacgagaaatgtctgatccgtggcagacggctgtcgaatccggttccccagcggtttcgggagcgggggattgtttgccagtgagaatcgataaaaatgaaacgaagtaga

SEQ ID NO: 219609 - DNA, 511 bp, Unknown
  Bacterial polypeptide expressing nucleotide sequence isolated from the Sargasso Sea
ggcggtatcaaatctgataaatgtggacgaacaaatatatcgggtctgtatgcttgtggtgaaaatgcgtgtactggtattcatggagcaaataggcttgcatcaaactcattgcttgaggcaattgcgtttgctgagataatttcaggtgacataaaagaccaaattaacaaatatgttagaggagcgtcatatcatccaaaaattgtaaaagtaaaaccacttgatcaaaatgatttgctggtactgagagaaacaatgactaaatatgttggcgttgaacgcgaccgagttggtttagagcaagcatttgatacagttcgcgatatttatcttaaataccagacgcatggctatgataataatagcttgataacttcgttgcttattataaaatcagcaatgaatagaactgagcaacgaggaagccattatcgtacagatcatccatatcaggataataaattaaattctcggagttctataaccaaagaagatctaaatttatgat

SEQ ID NO: 219610 - DNA, 599 bp, Unknown
  Bacterial polypeptide expressing nucleotide sequence isolated from the Sargasso Sea
tatgcatgaccaattagaatttgatgttttaataataggcagcggggctgctggtcttagtttagctcttaaacttgccgatcggtcaaatgtggccgttttatctaaaaatgctctagttgagggcgccaccttttatgctcaaggcggagtttccgctgcattagataagcatgattctgtcgaatctcatgttgaagataccatagctactggggcaggcttgtgtaatccagaaattgtacgctttgttgtagaacgtgcgcaggaaagtgtcgattggttagtcaatatcggagttgattttacacgtctaaacaattcatcaaatacagaattagactttcatcttcataaagaaggcggtcatagtcacagacgagttattcatgccgcagatgcgaccggtaaagctatagaaactactcttgagtcaagagtacgacaacataaaaatattgaattatatgaaaatcacgttgctgttgatttgataactatcaataaactcctaaagaataaaactcgctgtattggagcatacgttctcgataatgaaagtaaaaatgtcaaagtttttagggctcgtaatggtgtac

SEQ ID NO: 219611 - DNA, 864 bp, Unknown
  Bacterial polypeptide expressing nucleotide sequence isolated from the Sargasso Sea
aagcagtcagaggccatggtggtgtgctcttaactgcaaaggattcggaaagattgttaattgagaattctggactatccgaggtaaaaaatccgaaggaattctcttttatgctcaagtacgacaatagaggttcactggcaactcgtgatattgttgcacgagccatcgagcaagagatgcaaaatgatggagaagaatctgtcggcctgcacacatttcatctggatacaaatgaaattcaagagaaattcccaacgattcaagcacgtttgaatcaattaggtgcaactcagaataaagagccgttgcaactgggcgaggatccgttgccagttgcaccagccgcacattattttgtgggcggcgttcgagtcacttctgaaggggtcgtttacccacagtcatctgagtatcttccatcccggtttctcgggctatatgcaattggtgaggtggcatcaactggattacatggggccaacagactggcttcaaacagtctattggaggctgttgtatattctcagcgctgtgttgaaacagtaaaagaaatcgcgtctcaagatctagctatggctcctttatcattcaattacaagggactgtatttgcacacggaggaatgggataatttgattcaacatgagtctttggataagttggtaaaatcattgcaacagttgatgacagaggatgttggaatcgtgaaacataaccgacgattagagggcgcattgctcaaactcaaggaaatgcaagaacaggttcaacgaatttggaaagtcagtcgaccgacacaggagctgattgaattacgaaacatgattcaagtaggcatcttggtgacagaggctgcgtgaa

SEQ ID NO: 219612 - DNA, 840 bp, Unknown
  Bacterial polypeptide expressing nucleotide sequence isolated from the Sargasso Sea
gttgtctaaagaatttgatataaccttaatttctaagaacactcttgtggatagttctacctggtatgcacaaggagggattgctgctgtcatcgatgaaaatgatagtaccgaggatcacttaagagataccttaatagcaggtgacggactttgtaatgttgaagctgtaagagaatgtgtatctaaaggtaaagaagctatagattggttaagcgatattggcactagctttacaagagataaatcttcaaataattatcatcttacacaggaaggaggtcattctaaaagacgggttgtacattccgaagatgctacaggtaaagaagtctccagttctcttgctgaaattgtacgatcaatatcaaatataaaggttttagaaaatcatatatgtgtcgacttagttactgccaaaggtcgttgtgttggagcttatgtcctagacataaataccaatgaagtaaaaaccttcagttcaggctctacaatcattgctactggaggagcaagtaaaatctacctttataccagcaatccagacggctcctcgggtgatggtatcggtcttgcttggagggctggctgtaaagtagaaaatctagagtttaaccaatttcatcctacatgtttgtatcatcccgaagctaaatcttttcttttaagtgaagcgctgagaggtgaaggagctttcctaataaataatgaaaacgaaagatttatggaaaaatatgactcaaggcttgaacttgcccctagggatatagttgctagatcaattgataaggaaatgaagatatctggagccgataatgtattccttgatattagtcatag

SEQ ID NO: 219613 - DNA, 919 bp, Unknown
  Bacterial polypeptide expressing nucleotide sequence isolated from the Sargasso Sea
gacactcatcgagtaacgcttatcaccaaaaatactctcaggcatggatcatcggcttatgctcaaggaggcattgctgctgtattagataataaaaaccccctgtcaattgagaagcacatacaagacacactaaaagcaggagcaggactctgcaaccaagaggccgtacgcttcattgtgaataacggttcctatgccattcattggttagtaaaacaaggagtggaattcacgacccaacaagacggaaaaacctatcatctcactcgagaaggcggccactctgaacgtcgaatcgtacatgtcaaagacagaacaggcgatgctattatcaagaccttgtcagaacaagtttggcaaaaccccaatataaacatcatagagaacacgatagcaatagacttgttgtctaacgacagtcaatgctatgggtgcgcctgttttgataaaaaaacacgtcactacatactctttcatgctaaaaaagtagtactggctactggaggatccagcgatatctttcttcataccacgtcgaattccaactcatcgggtgatggcatcgctatggccgcacgtataggagctgacactcatcatatggaatttcatcaatttcaccccaccagtttttatcatgcttcaagccccccatttttaattacagaagcgatgcgaggcgagggcggcaagctgactatgcctgatggcaaggagttccttcatctctatgacgaacgcaaagaactcgcgccgcgagatacggtgtccagagccatgttagtacaaatgctcaaatatcagcacaattatatgcatctcgatatttcccataaacccagcagcacgatcaaacatctattccccagcatctattctcattgctctcaatacggagttgatataacacgcacag

SEQ ID NO: 219614 - DNA, 1003 bp, Unknown
  Bacterial polypeptide expressing nucleotide sequence isolated from the Sargasso Sea
cgtataatttatgtaatgacgagaacaaaagatgtcatcattgttggtgctgggatggctggcttagtgtgtgcgtatgagtgtgttcaagcaggatttaccgttgcgttgattcatcaagggttaattgatcatacgtcatcatcgtatgcacaaggtggaattgcggcggtttggaatgaagatgattcttttgaatgtcatattgaggatactcttattgctggtgatggcttatgtaaacaatcagttactcggcattttattgagcaagggcctgaattattgcaattattaattgatttgggggtttcttttgatcaggatgttaatggggcttttaaattaactaaagaaggcggccattcaaaagagcgtattttttatgtgaaggatcatactgggcaatctattattcaagtcttattatctcatttatctgatcatccaaatattgaatggattaatggttcattggagtcgttgtattcaaatggtgagcgtatttgtggggtgggggttaatcaattatcgatgtatgcatcaaatgttgtgttggcaacgggtggtttttctggtttgtttactaattctaccaatccgaaaggaaatattgggcaggggattgcattggcacatatggcgggtgcgttgcttggtgatcttgaatttgttcagtttcaccctaccgtatattgtcatccaaattttccaccattattgttgtcagaagtgttgcgtggagagggtgcgtttttagtgaataaaaatcatgatcggtttatggaaaattatcatccaatggctgatttggcgccacgagatattgttgcacgtgccattgtaaatgagtcagaccctgcattaaatattgcgccattaatatctaatttttcagttcgatttccaacaatatatcatcatttatgtgaacgtggttttgatattgaaaccattaatattccagttcagccggtggcgcattataccgttggtggtatta

SEQ ID NO: 219615 - DNA, 656 bp, Unknown
  Bacterial polypeptide expressing nucleotide sequence isolated from the Sargasso Sea
tcataccgcatgcttatccctcaacatagacatgactcaaatgcccattcccgtcgtccctgccgcccactatctatgcgggggagtaaagaccgatgtacgcggaaaaacgaatgttttagggctgtgggtcgccggtgaaaccgggtgcacaggacttcacggagccaaccgattggcctccaactcactcctagaagcagcagtggtctccgaacgcgctgccgaagacatgctgatctacgctcaaacggtccaccatcaatccaacgttcgagaatgggatcctggagacgcggccgatcccgacgaaatggtcgtcgtttctcacaattgggatgaactccgacgcactatgtggaattatgtcggtattgtgagaagtgacaaaagactcgaacgagcggcaacgcgtatcgccaatttacaagacgaaatccacgactactactggaactttcgcctaaccagcgacctcatcgaacttcgcaatctctgcgttgtggcccagttaattgtcgcatcggctcaaaatcggcgtgaaagccgtggccttcactttacaatcgattgcccgaaaacccatgcgtcctggaaacgacagtccataggtaagcgaggtgggcgcagaaccgtcaactggttacccacatgac

SEQ ID NO: 219616 - DNA, 938 bp, Unknown
  Bacterial polypeptide expressing nucleotide sequence isolated from the Sargasso Sea
acatatagatgatacactaaaagctggagcaggagaatgtaataaaaaagttgtagattttgtaataaaagaaggaagtgagagaatcagagaattaattttatggggaacaaaatttgatactcacaatgacaaattagatttagccagagaaggaggccattctgaaaatagaatattacatcataaagaccagactggagaggagattcaaaaaaaacttattgaaaaagttaaatcatttaagaatattgaaatttttgaaaatcatacattagtagatttaattacggatcatcatactaaaactaactataataaatgttatggtgcttatgtgatttcaaaagaaaaagaagagataattaaaatagctgctaaggttacggttttatcaactggaggtgcaggaaatatatattcacattctacaaatcctagtattgcaactggcgacggtttaggagcagcatatagagctaaaatttttatggaaaatcttccatttgttcaatttcatcctacagctttataccataaaataaacgacaaaacctttttgatttctgaggcggtaagaggtgcaggtgcttttttaagaaattcaaaaggagaactttttatggagaaatatgattccagaggagaattagcaccaagagatattgttgcaagagctatccaaatggaaatgcataatttaaacagcaaatatgtttatcttgatggtagttcaattgaaagaaaaaagtggaaaaagtattttcctaaaatatatagcaactgtttatcagttggaataaaattaccatcagatatgatcccaattgttcctgcagctcattatttttgtggaggtataaaagtaaatgaaaatggtgagtcaagtttgaagagtttatatgccattggagagtgttcatctactggtcttcacg

SEQ ID NO: 219617 - DNA, 721 bp, Unknown
  Bacterial polypeptide expressing nucleotide sequence isolated from the Sargasso Sea
acagcacttgatataggtgtagatccaaatccgcttcttacagaggcaattagaggggagggtgcaactttggtagatgaaaataataataggtttatgaaaaaaattcacgccttatctgatctagctccaagagacattgtttcaagagcaatacatgatcttaaaatgcaaggtcattccacatttttagattgtagaaaatttaattcaaatatatttaaaaaattatttccaacagctgataaatatttaaaaaatgcaaatattaatgttgaaaaagaattaatacccataattcctgctgctcattatcatatggggggaaccaaagtaaatatggacggaatgacatctattaatggattgtgggcgtgtggtgaaacaagttcaactggagcacacggggcgaatcgattagctagcaattctcttttggaagctttcgtttatgccattcgaatagcaaaaaagattaattcattacctattaaaaactatgctatcagatcaataaacattaaaaattacttaccaaaagaaaaaactataagtaaagtaagagctaaaaaatatatttggcaattaagatccgcaatgaataaatttgtaggtgttgaaagatcagatcagactttaaataatgcttttgttgaatttgataaaattgaaagagaagctaaaaacttatctgcaaagttaaaagatatgctattagttc

SEQ ID NO: 219618 - DNA, 577 bp, Unknown
  Bacterial polypeptide expressing nucleotide sequence isolated from the Sargasso Sea
gctgctcactatcatatcgggcgggatcaaagtagatataaatggcaggaccagtgttgatggtttgtgggcatgtggtgaatgcagctcaactggtgcacatggagccaatcgtttagcaagtaactcacttttagaagcatttgttttttcaaaaagaattgcagatacaataaattcggaacctccaaagaaaggctataaattattaaatattgagaattatattcctaaagaaaaaacaataagtaaaataagagcaaaaaaatatatttggcaattgcgttcggctatgaataaatttgttggagtagatagaaataaatcaacactagatcaagcatttatagaattttttagaatagaaagagagacgaaaagtttatcagcaaaactaaaagatatgcttttagtctcaaaattaataacctttgctgccctgcatagaaaagaaagtcgtggaacacattttagatcagattacccaactaagaacaacaaattacttaaaagaaacgtatttatacaaaatgatttatttgaatatctgaataacaaatttgaaaaggtaatataa

SEQ ID NO: 219619 - DNA, 868 bp, Unknown
  Bacterial polypeptide expressing nucleotide sequence isolated from the Sargasso Sea
tatgactacaaggctaaatactgaagttttaatagttggaacaggaatctctggactcttgtccgcaattgaactatctaaaacatactctgtaaccatgctaacaaaatctcgagcaaataaatgttcaacctcatgggctcagggtggaattgctgcagctgtagataatagtgatatcgatgcgcatattgatgataccattctgaatggtcatgaattatgcgattcagaatctgtcaaaaagataatcgagcaaggtaagaagagtattgatcttctaattgaacatggtgttaattttaatactaatggaactaaactacaacaaacattagagggcggtcattccaaaagaaggattgcatatcacgatgataatacgggtgaagaaatacattcatcactactagagaaagctaagaaaaacaaaaatattactgtcaaagaaggtgttatggctattgatttaattggtagaaaggaaacaatctgcgatggcttatatgcatatgatgaatcaaatgattctgtaattacaattaaagcaaaaataatcatactagcaacaggtggtgcgaataaactttatcaatatacaacgaatccaaatacatcaacaggcgacggaatagctttagcttggagatttggttgtacaatttcaaatatggagtttatgcaatttcacccaacatgtttgtatcataccaatgataaaagctttttaatctcagaatctttaagaggtgaaggcgctaaattgattaaccctaacaatgaatattttatgtataaatatgacaaaagagctgagcttgcaccacgtgatgtcgtagcgagggccatagatattgaaatgaagata

SEQ ID NO: 219620 - DNA, 548 bp, Unknown
  Bacterial polypeptide expressing nucleotide sequence isolated from the Sargasso Sea
ttacacctgtgggggaattgctaccgacctagatggacagacagacgtagtgaatttatttgctatcggcgagacctcttctacaggacttcatggagctaatagaatggctagtaattcactcttggaatgcgtagtttttgctaaagcagctgcaaaaaaaataaaggaaacattcagtcctaatcttatcgatttaccagcatgggatagttcaaaagtaatcagagctggagaaaacatattaattaatcacaactgggatgcgactcgaagattaatgtggaattatgttggtatcgtcagaagtaaggatcgtttaaaaaaggcaaaggaaaaaatggagttaattaaaaaagaagttcaagaattttataaaaattatgaggttacttcagattttcttgaacttagaaatttagtcttagtttcggaactaattattgatagcgcaataaagagaaaagaaagtagaggattacattacaatattgattatcctaagaagctaaaaaaagcttcttcaacaatacttcagccaaagtagt

SEQ ID NO: 219621 - DNA, 751 bp, Unknown
  Bacterial polypeptide expressing nucleotide sequence isolated from the Sargasso Sea
ctgtgcaaccgccaagtggttgaagccattgtagaagccggaccaagcgccgtggaaagactcatctcacggggtgttcggttcgatgccgaaaacggcaatttcgacctcacccgagagggcggacattcgagtcgccgaattctgcacgcacaagatatcaccggacgtgaaatcgaccgcgctatgcgcaaagccatcagcggcaaccccaatatcaagctcatgcaaaatcatgtggcggtggacttgattacgccaagtgaactcccagaaccaaaatgcctgggcgcctatattctaaacgctgccacgggctcgatgatcaccgtggaagccaaagctacccttctggccacgggcggagccggcaaagcctatctctacacatccaatcccgatgtaagcacgggtgatggcgtagccatggcttttcgcgctggcgcgaccattgccaacatggaattttttcaattccacccaacctgcctctaccatcctgaagcaaaatcatttttgatcagcgaagcactgcgcggtgaaggtgggattttacgccgcgacgacggacacggcttcatgaccgatgttcaccccatggcagacttagctcctcgagacatcgtggcccgagccatcgaccgtgaaatgaaacgcaccggcgatgaccatgttggactggatatgacgggacacaacccagcctttgtggccagccgcttccctaacattcacaccgcctgccttgcgc

SEQ ID NO: 219622 - DNA, 805 bp, Unknown
  Bacterial polypeptide expressing nucleotide sequence isolated from the Sargasso Sea
cattgcaggggtgtgagggtcatagaattgcttgttgaagatggagaatgtagaggagtgcaggtactggatggatctaatctatattggattacatgcaaagctgttgttgtagcaacaggtggtggtgggcacttatttaccaataccactaatcccgcgcaatcatctggagaaggaattgctctttcttggaaagcaggcgctgccatagaggacttggaatttatacaatttcatccaactgctttaaagttttatggttctccttgttttttaatctcagaagctcttagaggagaaggagcagttcttgtggataagtatggtaatagtcccgtaaaacatttgcaaaacggagatttagctacaagagatcaagttagtagagcaattatgaataatatgaaaaaaaataatgttgatcatgttggcctcgatttaagatttattgatcccaaaaaaattgtagatagatttccaactattttaagtagatgccaagaatatggagtcaatcctctaaatgaagttatacctgtcgcgccagctgctcactattggatgggaggtgttcatactgacttaaatgcctcttcaacggtaaaaggtttatacgcggttggggaagtagcgtccacaggagtgcatggcgcaaatagactagcaagtaattcgcttatggaatgccttgtatttgctagaaaaatgacttctattgagttgaacactcccataaacttaagaagtgcagatagatataataaggaaattgatatggataatcctaaggaggactatattt

SEQ ID NO: 219623 - DNA, 792 bp, Unknown
  Bacterial polypeptide expressing nucleotide sequence isolated from the Sargasso Sea
ctgataatgagttggcaccacgagatcttattgctcaaaatatattcaaacaaattgaaaaaggaaattcagtatttttagattgtagacatatgggtagtaattttaacactcgttttcctcaagtttcatcctattgtgaagatgcagacttagatcctgagagagacctactgccaataatacctgtcgctcattatcatataggtggagtaaaaactgatctgaaaggacagacttctgttgaagggctatggtgctgcggagaggttgctgcaactggtattcatggagcaaaccgccttgcatcaaattcattattagagtctcttgtatttgctaagatcgttgcaaatgaaataaataaaaagaatataaaaagggatattcatattagctctaaatttattaaaatttttaaagagaaaactaaaaataaaataagagcaaaaaaatacatatggcaattacggtcttcaatgatgagaaatttaggaattgttagaaataatgattctattattagaggtctaaatgatgtgttaaaaattgagagagagtcaaaaggcctttcagctaaacttaatgatatgattttggttagcaaatttattatcataggtgcttatttaagaagagaaagtcgaggttgccatttaagatctgattaccaacatactgataaagattttattaagcattttgatattaaatattcagaaatagatggttatatcaaaactatcttggattctactatatcagaatttgatgaaaaacttgttagctaaa

SEQ ID NO: 219624 - DNA, 961 bp, Unknown
  Bacterial polypeptide expressing nucleotide sequence isolated from the Sargasso Sea
gttggcatcacatacaggtgcaacacttacggatatggagtttgttcaatttcacccgacaggtcttgactttggcctagaccctactcctttggctactgaggcaattagaggtgagggggcttaccttgtaaatcaagatgaagagagatttatgtttggtattcatcctgatcacgagttggcaccaagagatcttattgctcaaaatatatttaaacaaatcgaaaaaggaaattcagtatttttagattgtagacatatgggcagtaattttaatactcgatttcctcaagtttcatcctactgtgaaaatgcagatttagatcctgaaaaagacctactgccaataattcctgtcgcccattatcatataggtggcgtaaaaactgatctgaaaggacagacttctgttgaaggactgtggtgctgtggagaggttgctgcaactggtattcatggagcaaaccgccttgcgtcaaattcactattagagtctcttgtatttgctaaaattgttgcaagcgaaataaataaaaagagtataaaaaaggacattcatattagctctaaatttataaagatttttaaagagaaaactaaaaataaaataagagcaaaaaaatatatatggcaattaaggtcttcaatgatgagaaatttaggaatagttagaaataaagactctattatcagaggtctaaatgatgtaattaaaattgagagagagtcaaaaggcctctcggctaaacttaatgacatgattttggttagcaaatttattatcataggcgcttatttaagaagagaaagtcgaggttgtcatttaagatctgattaccaagatactgataaagattttattaagcattttgatattaaatattcagaaatagatgattacatcaaaactatcttggattctactatatcagaagttgatgaaaaacttgttagctaa

SEQ ID NO: 219625 - DNA, 1117 bp, Unknown
  Bacterial polypeptide expressing nucleotide sequence isolated from the Sargasso Sea
tgaaaatactggtgatggcttttttctaggtcttaaagctggttgtaaattaagtgacatggaaatggttcaatttcacccaactggaatggttatcccggaggaaatggcaggaacattagttactgaagctgttcgtggtgaaggtggaaagcttattaacagtgatggtgaaaggtttatgaaaaattatgacagcgaaagaatggaattatcaacaagagatcgtgttgcaatggcaaattatacagaaattgtggagggaagaggatctcctaatggtggagtttatcttgatataagtcacaaagataaagactttataattgaaaagcttccaagaatgtatagacagtttctcgatactttaatgattgatatttcaaaaagccccatggaagtttcgcctactgcacactattcaatgggaggtatcgttgtgactcctaaagatcattggacgggtgttcaaggtctatatgctgctggggaagtaacttcgggacttcacggggcaaatagacttggtggaaattcacttgcagagattcttatttttggaaagagagctggtgcagcagcatctcaaagatcaaaagaaatagacgttcatatacgatcaaaaaaagttatcaatgaagcgcatgaaaatcttaattcatggataaaaaatggttcagaggtagcaagaccccttcaacgatctttgagaaacataatgtgggaatatggaggagttgttaaaaataaagagaaattagaaaagggtttatcagaaattgagggacttaaagaatcatcaaaaaatcttgatgtgaggccagattctgaaggatatcaagacttaatgcttgcatttgatcttgaggcatcaatcgcttcatcagaagcaaccctaaaaagtgcactaaatagagaagagagtagaggggctcatcaacgtgacgattttaaagatttgagtgaaaatgaaaatgtaaatattagagtcgaacttgatgacaacaaggaaataaaactatcaaaagaaaaaattccacaactagagaaaaaacttaaaaatttaatcaacaagactgtagaaattgataactttgaaggaatgcttctcgaatag

SEQ ID NO: 219626 - DNA, 781 bp, Unknown
  Bacterial polypeptide expressing nucleotide sequence isolated from the Sargasso Sea
gatgttgttgcaagagcaatagataatgagatgaaacaaaatggatattcaaatgtatatttagatattagttataaaccttctgattttataaagaaaaggttcccaaaaatatttaataagtgtttaagcgtcaatattgatataacaaaagaatggataccagtagttccagcttcacattacacctgtggtggagtggagacagatatatctggaagaactaatatgcaaaacttatatgtgataggtgaatcatcacatactggttttcatggtgcgaatagattagcaagtaattctttactagagtgtttagtaatggctaagaattgtgcaaaaagaatcatagatacaaaaatagaatcaagtcataataatattgatctacctcaatgggatgatagtctatccactgaatcaaaagaaaggtttgcaattagtcataattgggatgagctaagaaaaatcatgtggaattatgttggtattgtaagatcaaataaaagattaaaaattgcaaaagaaaaaatagaattgatagaaaaagaaatgaatgattattattataaatataatataacatctgatatgttagaacttagaaacataatacatgtttcaaaacttattattaaatcagcactaaataggaaagaaagtagaggcttacattattctatagattacccaaatatcaataagaagtttaatcagaatacatatattgatgggagaaaaaatgaatactatttgaaacttgttaaatttaaagtttgaa

SEQ ID NO: 219627 - DNA, 1161 bp, Unknown
  Bacterial polypeptide expressing nucleotide sequence isolated from the Sargasso Sea
tatggctgactctatctatagaccagatgtggttatcgtgggtggcggtgtagctgggctaaccgcagcgcttaacctagcaccacgaaaagtatgcattattactaaaagtactttaggagtgaatacctcaagtatgtgggcccaaggcggcattgcggcagcagttggaattaacgatagtgttaaaagtcatattgaagatactgtagcaactgcaaaaggtcttgctgacgagaatgtcattgtcaaagtagtgagtgaggcagaaaatattattagtgatcttgaaagcttcggtgtgatctttgataaaaatggtgatggctcttttgatttagggttagaagcagctcacagcagtaaccgaatagtaagatcgaaaggcgatagttctggcattgaaattatgaggggtttaatagaaaaagttcgtgaaagtcacaatattactgttttggagaacgtctcaatagatagcattatgtcagagaataacactatacacggtgtcattggaagattggtacaagataatgttccagataatcatgtcgttattgaaagttcaaatgttgtacttgcaactggaggcctaggcgggatatttgcaaatacaactaacccaagaagctcttatggtgagggaatagcccttgctgctcaagcaggtgcagttttaactgatatggagtttattcaattccatccaacaggacttgatttcggtttagaccccactccacttgctactgaagccattagaggtgacggtgcttatctagtaaaccaaaatgaggaaaggtttatgctcggcattcatcctgaaaatgagttagcacccagagatctcgttgctcaaaatttatttaaacaaattgagcaaggaaactctgtctttcttgattgccgcaaggtgagtaatgaatttgaaataaaataccctcaagttgcatcgtactgtcaagcagcaggccttaatccaaaaacagatttgttaccaatacttccagtcgctcattatcacattggaggagttaaaacagacttggaaggaaaaacttcaatagaaggactttggtgttgtggtgaagttgcagcaacaggcatacatggtgcaaatcgtttaacgtctaattcattacttgaatctatggtatt

SEQ ID NO: 219628 - DNA, 766 bp, Unknown
  Bacterial polypeptide expressing nucleotide sequence isolated from the Sargasso Sea
aatgtctcaacgttttgctaccgacattctaattatagggggcggcgccgctggtttagcagcggcactgcatctcgctgacatgtatcgcgtaacgctattatcaaaaggctcgatggagtcggggtcctcaaattgggcacaaggaggaatagcggcagtcaccgatcctattgactctttagagtgtcacgaaagcgacactattaacgctggttcaggtctatgccatcttgatacagtgaaaacagtcgtcggatctgctccgctggtgatcgaacaactcagtaagtggggggtcgatttcgatttgagtggtaatgaataccacttaacaaaggaaggtggacactctaacagaaggattctccacgtggccgacgctactggcaaggccatcatcgaagtattgacgcaaaaaactcttgatcacccaaatattgacttgtttgaagataaagtcgccattgatttagcaaaacgtagaaacacagcggggcaatttagctgcactggggcttatgtcctcaataaagtcagcagcaaagtcgaggtatttcaggcgtcgcacaccatccttgccacgggaggagcaagcaaggtttatctctacacgactaatcctgatggatctaccggagacggtattgctatggcatggagagcgggttgtcgagtttccaatatggaatttaatcaatttcatcccacgtgcctgtaccatccgcatgcaggtagtttcctaatttcagaagctgtgcgtggg

SEQ ID NO: 219629 - DNA, 765 bp, Unknown
  Bacterial polypeptide expressing nucleotide sequence isolated from the Sargasso Sea
tgaaggtcaaaatgcagtggaactccatcaagaaaataatgctgtacatggtgcgacgatccaaaattcggtaaaacagacttatatagagtcaggatgtattattcttgcaactggtggaattggtcagttatataaggttacaacaaactcaaaagaggccttaggcgatggcgttggcatggcagcaagatgtggcgcggttttatcagacatggaatttgttcagtttcatccaaccgcatttgatattggaatagacccagctccattagcgactgaagcccttcgtggagaaggtgccaaaataataaattcaaaatatcaaaattttatgaaagatgcccacccagagggagagcttgcgcctcgagatattgtggctcgagcaatcttcacagagcaaaaaaagggcgagcaggtttacttagattgcagaggagatttgggctcaaggatgattgatgactttccgacagtttatgaattatgcaaaaaaaataaaataaatccaaaaaatgatccaatcccaatatcgcctgcggctcactatcacatgggcggtatcaaatctgataaatgtggccgaacaaatatatcgggtctatatgcttgtggtgaaaatgcgtgtactggtattcatggagcaaacaggcttgcatcaaactcattgcttgaggcaattgcatttgctgacataatttcaagtgatataaaagaccaaattaataaatacgtgagagaagcgacatatcatccaaaaat

SEQ ID NO: 219630 - DNA, 877 bp, Unknown
  Bacterial polypeptide expressing nucleotide sequence isolated from the Sargasso Sea
tcaaccaacctgggataacgcaagacttagttcactccatctaacgcaggaaggaggccacagtcatcgaagaattatccacgcaactgatgcaactggtaaggcaatttttgagacactccgcaaacgggccgccgagcacccaaacattgaattagtggaggagtgcatggctgtggacttaatcactcaatgtgatagtaatgataaaagaaagtgtgtgggcctttacgtatttaatcctaaatctcgcaaggtcgatgtaattcaagcaaagtttgtggcccttgctactgggggtgccagcaagacttatctctatacctcaaacccagatggcgcaagtggagatggcatagcgatggcctggcgagccggttgcagagtcgcaaatatggagttcaaccaatttcatccaacctgcctttatcatcctcacgcaaaatcgtttttaatttcagaggcccttcgaggtgagggcgccatgttagaactacctgatggtactcgattcatgtcaaagttcgacgataggggtgagcttgcgccgagagatatcgttgccagagctatagatcatgagatgaagcgctcaggttgcgattgcgtttacttgaacattactcatagacaacccagctttatcatgagccatttccccaatatttatgagcgctgtctaaaatttggaatcgatattactaaagaccgaatcccagtcgtcccagcagcacattacacctgtggtggagtagtgattaacgaaagaggagagacagatattgataatttgtatgccatcggagaaaccagctgcagcggattacatggtgcaaatcgcatggctagcaattcgttgcttgaatgttttgtggtc

SEQ ID NO: 219631 - DNA, 858 bp, Unknown
  Bacterial polypeptide expressing nucleotide sequence isolated from the Sargasso Sea
cttgctgcgattaaattatctgagagatattcagttacaattctaagcaaatcttcactcaacgattgctcaacagcttgggctcaaggaggcatagcagcagtaatagatactaaagataatattaataaccacataaaagatacaataaataatggtcatgaaatctgtaacacaaaatctgttcaagaaattattaaacaagggaaagatagtatcgaactattgctaaactacggagttaattttaataaaaaaggacaagagttagatcaaaccttagagggaggtcactctcacagaagaattgtttatcataatgataatacaggcgaagaggtacatagttcactcttaagagaagctaaaaagagaggaaatatcatcattaaagaaaacataatggtgattgatatgattggcaaaaaagagacctattgtgagggtgtgtacgcatatgataaaagaaataataatgtagtttcaattaaggcaaatattataatcctggcaactggaggagctagtaagatttatcaatacaccactaatccaaatacatccacaggtgatggcatagctatggcatggcgattcggctgcgagataagtaatatggaattcattcaattccacccaacctgtttatttcatccaaaagaaaaaagttttcttatatcagagtccttaagaggagaaggggctaaattaaaagatctaaatggaaattgcttcatgaaaaaatatgatgaacgattagaattagctcccagagatatagtggcaagagctattgactcagagatgaaaaataataacttcgatcatgtaaatttagatatatcttcaaagataagg

SEQ ID NO: 219632 - DNA, 739 bp, Unknown
  Bacterial polypeptide expressing nucleotide sequence isolated from the Sargasso Sea
catccgcatgcgggtagttttctgatctcagaagcagtccgcggagaaggaggggttcttcgtttacctaatggcgagcgtttcatgcatcgttttgacgacaggagagagctagctccaagagacgtggtagccagggctatagattttgaaatgaaacgccttggagctgattttgtgaccatcgatatatcccatcgatctcagcaatttattttggaccacttcccaactattgcagaaaagtgcttttctttaggaatggacatgaccaaagaagctattccagttgttcctgcggcacactacacatgtgggggagtcacagtagacctcaatggtcttaccgatttaccaaacctttatgcgattggtgaagtctcaagcactggtcttcatggtgcaaaccgtttagccagcaattcgttgcttgaatgtttggtgtttgcaaagagatgttcggagcacatcaaaggagaagggatatcccaagtagaccctggcttcattcctcattgggacgaatccaaggttatagactctcaagagagcgttgtaatcgctcacaactgggaagagctaaggcgttttatgtgggattacgtaggcatagtaagaacagataaacggttaaaccaagccatgcacagaattaaacttctcaaagaggaaattcgagatttttatggtcactacaaaatcagcaacgatttgattgaactcagaaatcttgtcgatg

SEQ ID NO: 219633 - DNA, 883 bp, Unknown
  Bacterial polypeptide expressing nucleotide sequence isolated from the Sargasso Sea
gcgcgtgcgccgccatcccaacatcacgttgctcgaagaccactacgcgatcgacctgatcacgtccgaccgtctcgggttgcctggacgtcgctgccacggtttgtacgcactcgatctgcaaagcggccgcaccgtgaccatcgaagcgccgcataccgtgctcgccaccggcggcgccggcaaggtctatctgtacaccaccaaccccgacaccgcgaccggcgacggtatcgcaatggcctggcgcgccggctgccgcgtgtcgaacatggagttcatccagttccatccgacctgcctgttccatccctatgcaaagtccttcctgatctcggaagcagtgcgcggcgaaggcggcatcctgaagctgcccgacggcacgcgcttcatgcctaaccacgacgaacgcgccgaactcgcgccgcgcgacatcgtcgcgcgtgcgatcgacttcgagataaagaaacgcggcattgattgcgtgtatctcgacatcagccatcaatcgcccgaattcctgcgtgaacacttcccgacgattctggcccgttgcctcgaattcggcatcgatatcaccaaggagccgattccggtagtgcccgccgcgcactacacgtgcggcggtgtcgtgaccgatctggctggccgcactgatctcgcaggtctctacgcagtgggtgaaacgtcctgcaccggcctgcacggcgcgaaccgacttgccagcaattccctgctcgaatgcctcgtgatcggacgttccgccgcgcaggctatcgaggaagaaggcttcagcgccgctgtccacgcgccgctgccggactgggatgaaagccgcgtgtccgatccggacgaagaagtggtggtcgcgcacaactgggat

SEQ ID NO: 219634 - DNA, 995 bp, Unknown
  Bacterial polypeptide expressing nucleotide sequence isolated from the Sargasso Sea
tatgacagatactattatggctggagatgggttatgtgatacgcgtgttgttcaagatttttgtgaccatgcacctgagtttgttcagcgtttgattcatttgggtgttccatttgatactaatgacgatggttcatttcaattgacaaaagaaggtgctcattcattccctcgtatttttcatgttaaagatcatacaggcacgtctattattcaaacactggtggcgcatttgcgtgatcaccctttagttagttggtacaactattcaattcaaggcattctatttagtgctcaatctaaacgtgttcttggaattcgatttaatgaccaagatctattagctcaatacacagttttggcgacaggtggattttcgaatattttttcacgttctacaaatccaaaacgtaatattggagaggggatcgctcttgcttatatgttgggcgctcaattgggtgatttagagtttattcagtttcacccaacagtgctttgcacccatgatcacccaccactattgatttctgaagcactgagaggtgagggggcatttttagttaataaagataatgaccgatttatgaagaaatatcatgatttggaggatctcgcacctcgtgatgttgtttctcgagcggttattcaagagtctgatcctaaattaaatattgcccctttaatgacgaccattgaacagcgtttcccaactatttatgaagcactttcacagcgtggatttaccaatgaatcatatgagattccaatacaaccactggttcactatacgttgggtggtattgttgcgacaccaagtgggcgaaccaattgtgagggactttatgctattggagaatgttcggttaccggttttcatggagcaaatcgtttggcttcaaattcattgcttgaggccggtattatgggtcaacgttggtgcaagggattggcatctcaatcattttctaatattgatgtttcttctgcttcac

SEQ ID NO: 219635 - DNA, 873 bp, Unknown
  Bacterial polypeptide expressing nucleotide sequence isolated from the Sargasso Sea
tttcatccaacgtgcctctaccatccttcggcaaaatcttttttaatatcagaagctttgagaggtgaaggagcgaaattaattttaaaagacggaaatagttttatgcagcgttatgatgaacgagaagaactagctccaagagatattgttgcaagagcaattgatcatgaaatgaagagattaggacatgattgcgtttatttagatatttcacacaaaacaaataaatttattcaaaaacatttcccaaatataagtaattattgccttgatttaaatattgatatttcaaagataccaatacctgtagtgcctgctgcgcattatacttgtggtggagtaatagttaataaaaatggtgaaactgatataactaatttatatgctattggtgaagtaagctattcaggattgcatggcgctaacagaatggctagtaattcattattagaatgttttgtttttgctaattcagcatacaatcatattaaaaaatcttctgaaaaaagctataaattagataatattagagattgggatgaaagtcgggttactaattctgatgaggaagttgttgtaagtcataactgggacgagattagaagatttatgtgggactatgttggaatagtaaggactactaaaagacttcaaagagctcaccatagaataaaattactaaaatcagaaattaacgaatattatggtaattttagaataacaaaagatttaattgaattaagaaatctagcagttgtagctgaaatcattattgaatcagcattacttagaaaagaaagccgaggactacattatacaacagactttccaatttcagatgatatgaatgttccaaaaaatacgataatt

SEQ ID NO: 219636 - DNA, 928 bp, Unknown
  Bacterial polypeptide expressing nucleotide sequence isolated from the Sargasso Sea
tggagagcggggtgtaaagttgaaaacctagaattcaatcaatttcatccaacatgcctttttcatccagaagccaaatccttcttgattagcgaagctttgaggggtgaaggggcttttttggtcaatcataacaaagagaaattcatggaaaagtatgatgcaaggctagaacttgcaccgagagatgttgttgctagatctattgataaagaaatgaagatttctggtgctgataatgtctttttagatattagccataagaattcagatgaaataaaagaacattttcctaacatatactctgaatgccttagatttggatatgatctaactgcagaaccaattcctgtagtgccagcagcacattacacctgtggaggtgtcaaagttgacctaaatagtaaaactaatattgacaatttatatgccataggagaggtttctagcactggattgcatggtgcaaataggatggcaagtaactctttattagagtgcgtggtatttgcaaagaaagcttcagatcatatctgcaaaaattttaagaatcataatcaagaaatccaagaatgggatatatcaaaggtcacagagacacaagaaggtgtcatcatccgtcataattgggacgatataagaagactaatgtgggattatgttggaattgtaagatctaacaatctattaaaaagagccgagatagcaatgaaggttattgatgaagaagtgaattacttttatggaaaatatctgattagctcagatttgattgaattacgaaatctggctcttgtagctaatttaatcattaagagtgcacaaaaaagaaaagaaagcagaggattgcattactctctagattatccgaaccttttgaatacagccacaccaactatactagatccttcaaaaataaaaatttgat

SEQ ID NO: 219637 - DNA, 811 bp, Unknown
  Bacterial polypeptide expressing nucleotide sequence isolated from the Sargasso Sea
ctacctctataccagcaaccccgacggtgcctgtggcgacggcatcgccatggcctggcgtgccggctgtcgcgtcggcaacctggagttcaaccagttccaccctacctgcctgtatcacccgcaggccaagagcttcctgatcaccgaagccgtgcgtggcgaaggcggcctgctcaagctgcccaatggcgaacgcttcatgcagcgtttcgatgagcgcgccgaactggcaccgcgcgatatcgttgcccgcgccatcgaccatgaaatgaagcgcctgggcgtcgactgcgtgtacctggacatcagtcacaagccggccgaattcatcaagagtcatttccccaccgtctacgaacgctgcctgggctttggcatcgacatcaccaagcagcccatcccggtggtgccggcggcgcattacacctgcggtggcgtggtggtcgaccagcatggccgcaccgacgtgcccggcctctacgccattggcgaaaccagcttcaccggcctgcatggcgccaaccgcatggccagcaattcgctgctcgaatgcttcgtctatgcgcgctcggcctgtgccgacatcgtcgcccaactcgttgcggtggacatgccgatcgacctgccctgctgggatgccagccaggtgaccgactccgacgaggacgtgatcattgcccacaactgggacgagctgcgccgtttcatgtgggactacgtcggtatcgtcaggaccaacaagcgcctgcagcgcgcgcagcatcgcgtacgcctgctactggacgaaatcgacgagttctattccaac

SEQ ID NO: 219638 - DNA, 775 bp, Unknown
  Bacterial polypeptide expressing nucleotide sequence isolated from the Sargasso Sea
catatggccctggaccttattactacggccaagttgggttttaccccggacagatgcgtcggagcctatgtctatgacgtgggagctcgaaaagtaaaaaaaattagtgcgggatgtgtagttctcgcaacagggggagctgggaaggtctacctatatacgagcaacccagatgttgctactggagatggcattgcaatggcgtggcgcgcagggtgtgctgtttccaatatggagtttgttcaatttcatccgacctgtctgtaccatcctcaagctaagggacagcttatcaccgaggcattacgtggggagggagccaaactgcttttacaatcaggcgaaagtttcatgaaaaagtttgattcacgagaggagctggcgtctcgtgatatagtagctagggcaatagatcacgagatgaaaagacttggagacgattacgttctattggatatttctcatagatcgaaagattttgtaaaaaggcattttccgaatgttcaccaacaatgtttatcgtatgggataaatataagccaagagccgataccagtagtccccgctgcgcattacctatgcggaggagttatgaccgacctgaagggacgaacctccctgcccggtctttatgcggtcggagaggtcgcctcaacgggactacatggggctaatcgaatggctagtaactcgttgttagagtgtttagtaatagcaagtgcggcggctatggatatccgcagccaaataaaaataccagcggactggctcccga

SEQ ID NO: 219639 - DNA, 885 bp, Unknown
  Bacterial polypeptide expressing nucleotide sequence isolated from the Sargasso Sea
tatgtataatcaaaatgcaaaattctttttaattacagaagcaatgagaggtgaaggagctaaacttttacttcctaacggaaaaaagtttatgcacaaatatgacgatagaggtgtccttgctccaagagacattgtagcaagagcaatagataacgaaatgaaaaaaaatggacatgagtttgtcaatctggatatcagccacatgaaaaaagatttcattatcaagcggtttccctcaatctacaataaatgcttagagtatggcatagatataactaaagataagattccagtggttccagcaacccactacacttgtgggggtgtagagattaataaaaaaggacaaacaaacataaaaaatctttatgctattggagaagtagcacactctggattacatggtgcaaaccgaatggccagtaattcactactagaatgtttatactttgcagatgtagttagtaaagatatatctttgaataataaaaatcttaaaaaaattaacattaataagatcgatcaaaataaatacatacaacatgatgagttagaaaaagttttaataaagcattgctggaaagaaataagaactctgatgtggaactacgttggtatagttagaaacaatcatagactatcctatgcagatcagcggatcaagataatgaaaaaagaaattgatacctttttttacacttacaagattaataaagatatagttgagttaaaaaatttagtatgtattgcagagcttataattaaatcagctatttctagaaaggaaagcagaggtttacattataatattgactatccagaaacactcaataaaccaaaagatacagttataaataaaaatcaatcaagttctttaaatat

SEQ ID NO: 219640 - DNA, 610 bp, Unknown
  Bacterial polypeptide expressing nucleotide sequence isolated from the Sargasso Sea
aaagcgcgttctttcttaattaccgaagcaatgcgtggcgaaggcgcttatttgcgcttaccagacggcgagcgtttcatgctacgttttgatgaacgtgctgaacttgcaccgcgtgatattgtggcacgtaccatcgaccatgaaatcaagcgcctaggtattcgccatgtttggctagatatcacccataaatcaccagaatttattaccgagcacttccctactttatatgcacgacttattgaacttggtatcgatatcaccaaagatatgatccctgtcgttccagctgcacattacacctgtggcggtgttgtcgttaatgagaatagtcaaaccgatttagatggcttatatgcgattggcgagacctcgtatacaggtttacacggcgctaatcgtatggcaagtaactcactgcttgaatgtttcgtgtatggcatgagtgcagctaacgatatccaacaaaaatttgattcggactttaaattccctactgtaccgtcttgggacgagtctcaagttacagatgcggatgaagatgtagtaattctgcaaaattgggatgagttgcgttcaactatgtggaactatgtcggtattgttc

SEQ ID NO: 219641 - DNA, 814 bp, Unknown
  Bacterial polypeptide expressing nucleotide sequence isolated from the Sargasso Sea
attgccacgggcggcgccagcgacttgtttcaatacaccacccacagtgaaccggccaccggagacggcatcgccatggcgtggcgtgccggctgtcacatcagcaacatggagttccaacaattccatcccacctgtttttataaccctggaaaaaaaccgttcctcatcacagaagccttacgcggcgaaggcgccaaactcactctgcccagcggcaaacgcttcatggatcaatacgatgcccgcgccgaactcgcaccgcgtgatattgtggctcgcgctatcgacagcgaaatgaaacgctatgacatcccccacgtgctactgaacatttctcatgtcaaacgcacaacactgcaacacttgtttcctaccatctatgatcattgtctgcaccatggaatcgatattagcgaacaagccattcccgttattcccgccgcacattacacctgcggtggtatcatcacggaccacgtcggccgcaccaatatgaatcacctgtatgcgattggagaaaccgcctgcaccggcttacacggggctaatcgactagcgagcaattccttgttggagtgtttagtgtttgccactcgtgccagccaagatattctttcgcatttctcacctcaacaaccacggcaccttgcaccgaaaacactctcaccctcctcactccacaccccattgcatcagctcaccactgaactcaagcagctgatgtggcaacacgtcggcatcgtgcgtcaagaccagttactcactgaagcgctaaccaaactggataaattgcgccagcgcttcgctgctc

SEQ ID NO: 219642 - DNA, 916 bp, Unknown
  Bacterial polypeptide expressing nucleotide sequence isolated from the Sargasso Sea
agcgatgtcttggtaatcggcagcggtgcagccggaatgacgcttgcccttcacctaaacagaaaatttagcgtttccatgctgtgcaaagataagccaatggaaggctccacatactatgctcaaggaggggtcgcagcggttttgggtgagtacgattccgtatcttcccatgtagcagatacgttagacgttggagctggactttgtaatcccgagatagttgcattcactgttaaacaaagcactaagatcattaactggcttgtcgaactaggcgtaaactttgacaaaaaagtagaaagagatggcagcacagccttccacctcaccaaagaaggaggacattctcatcgaagggtaattcacgcagcagatgcaacaggaaaagaaattgccctaactttgagtgaacatctaaaatcaagaaacaatgttaggttgttccccaaatacgttgcggttgatcttgtgaccaaagattcacttggattgcgaggaaaggattgcattggtgcatatgcacttaatttgaaaacaaaaaaagttgagatcttcaaagctaagtacgtcgtgattgcatcgggtggagcctcaaaggtttaccaatataccagcaacccggacaccgcatcgggcgacgggatagccatgtgctggcgagctggctgcagggtgggaaatctagaattcaatcagtttcatcctacatgccttttccaccctaacgccaaatcttttctgatatctgaatccttaagaggggaaggagcgcacctcttgttaccaaatggagagcgctttatgcataaatacgacgaacggaaagagctggcgcctagagatattgtggcaagggcaattgaccatgagatgaagaagctagggtgtaattccgttttcctagatataagcc

SEQ ID NO: 219643 - DNA, 856 bp, Unknown
  Bacterial polypeptide expressing nucleotide sequence isolated from the Sargasso Sea
atggaatttgttcagtttcatccaaccgcatttgatattggaatagacccagctccattagcgactgaagctcttcgtggagagggtgccaaaataataaattcaaagtatcaaaattttatgaacgatgcccatccagagggggagcttgcgcctcgggatattgtggctcgagcgatattcacagagcaaaagaagggtgaaaaggtttacttagattgtagaggagatttgggctcaaggatgattgatgactttcctacagtttatgaattatgcaaaaaaaataaaataaatccaaaaaatgatccaatcccaatatcgcctgcggctcactatcacatgggcggtatcaaatctgataaatgtggacgaacaaatatatcgggtctgtatgcttgtggtgaaaatgcgtgtactggtattcatggagcaaataggcttgcatcaaactcattgcttgaggcaattgcgtttgctgagataatttcaggtgacataaaagaccaaattaacaaatatgttagaggagcgtcatatcatccaaaaattgtaaaagtaaaaccacttgatcaaaatgatttgctagtactgagagaaacaatgactaaatatgttggcgttgaacgcgaccaagttggtttacagcaagcatttgatacagttcgcgatatttatcttaaataccagacgcatggctatgataataatagcttgataacttcgttgcttattataaaatcagcaatgaatagaactgagcaacgaggaagccattatcgtacagatcatccatatcaggataataaattaaattctcggagttctataaccaaagaagatctaaatttatgat

SEQ ID NO: 219644 - DNA, 775 bp, Unknown
  Bacterial polypeptide expressing nucleotide sequence isolated from the Sargasso Sea
gctaaataaccgaggccaaagatttatgtccagatatagtcctgctatggatctagcaccgcgcgacgtggtcgctcgagcaatagtcgaagagtgtcaaattgaaaacgtcgagcatgcatggttggatattcgcagttcaaccacagggaattcaactgaatggctgacggcgagatttcctcaaatcagttcgtcatgcgcggaagccggcatcgacatatcgaaagacttgatccccgtgtcaccggcagcacattaccttatgggcggtttattaacaaatacggatggtgaaacatctattccaagtctattcgctatcggcgaaaccgcgtgtactggagtacacggagcaaatagactcgctagtaattcgctactcgaaacagtaatcttcgcgcaccgtgcgattgaaaagattcaaagtggcgaaacagattcactagatttgggaaatagcctacagactgtctctctaccaataaagaaagcaactcaaaccggaaatattgatccacagacggtaaaaaagtccgtccaaaaaaccatgtgggacaaggttggagtcgtgaggacccaaactggccttgaagatgcttatgaaaaaatcaaatacttgtcttcgaactttcgttctgatcgaaccagaaacgggtatgagatcaattctttactgatcgttacacaaattatgatcgatgctgcaatacgcagaaatgaatcacgcggagcacattaccgatctgattacccagaccaagatgatgcctgg

SEQ ID NO: 219645 - DNA, 1042 bp, Unknown
  Bacterial polypeptide expressing nucleotide sequence isolated from the Sargasso Sea
atgaacagatctagtgttacagaagttaaaactgattttcttattataggatctggtctctcaggtctttacgcggcaatatatgcatccaaatttggaaaagtagcgttgataacgaaatcttcaatacaagaaagtaattcttattgggcgcaaggtggtatcgccgcagcaataaatagtgatgattcgactgaaattcataaaaaagacactctttctgttggttgtggtctgaataatttagatgcagtaaacattatggtttccgaaggaacagaaagggttttagagctaataaatcaaggcatgagttttgaccgagccgaatctggttttgattttgggattgaggggggtcatagtaggagaagaattttacacgctttaggtaacgaaactggaaaagctgttgttgattttctatcaaaagaagttcaaaagaataataaaattaaaatatatgaaaattcgtttgtaattgacttattctctgactctaagacctgctttggttgtctagttttctctgatacaaaaaaaaataaaatcagcattcattctaagtcgacaatactcgcaaccggtggtgcatgtgggctatattctcaatcatcaaatccttctagtacatcaggcgatgggatagcattagggcttaatgctggcgcaacagttaaagatatggaattcattcaatttcacccaactgttttttcaaaagaaggtgctaaaaattttcttatatcagaagctattaggggagaaggtggtcaattaattaatcattctaaaataaggttcatggaaaactattctaagcaacttgagctagctccaagagatatcgtagcacgcgcgatatttaatgaaatgagaatgaatggagaaaaaaatgttttcttatctcttaaacatctaaagtcgagtctaataaaaaacaggtttaaaaatactttcgaattatgcttaagagagggtttggatataaccaaagatgatattccagtttctcctgccgcacattatatgattggtggaa

SEQ ID NO: 219646 - DNA, 1189 bp, Unknown
  Bacterial polypeptide expressing nucleotide sequence isolated from the Sargasso Sea
ccaatggttgatcgaccaaggtgtgcctttcacccgcgatgaacatgccggcagcgacgacggtggctttgagttccacctgacccgtgaaggcggccacagccatcgccgaatcattcacgctgccgatgccaccggggccgcgattttcaagaccctgctcgaccaggcccgccaacgtccaaatatccaattgctggagcagcgcgtcgccgtcgacctgatcaccgaaaaacgcctgggcctgccgggcgaacgctgcctgggcgcctacgtactcaaccgcaccagcggtgaagtcgatacctatggcgcacgcttcaccattctcgcctcgggcggcgccgccaaggtctacctctataccagcaaccccgacggtgcctgcggcgacggcattgcgatggcctggcgctcgggctgccgggtcgccaacctggagttcaaccaattccaccccacgtgcctgtaccacccgcaggccaagagcttcctgataaccgaagccctgcgcggcgaaggcgcacatttgaagctgcccaatggcgaacgcttcatgcagcgcttcgacccacgcgccgagctggcaccacgcgatatcgtcgcccgcgccatcgaccacgaaatgaagcgcctgggtatcgactgcgtgtatctggacatcagccacaagcccgaagccttcatcaagacccacttcccgaccgtctacgaacgctgcctgaccttcaatatcgacatcaccaagggcccgatccccgtggtgccggccgcgcactacacctgcggtggcgtgatggtcgatcagcatggccgcaccgacgtgccgggcctgtatgccatcggcgaaaccagcttcactggcctgcacggcgccaaccgcatggccagcaattcattgctcgaatgcttcgtgtatgcccgctcggcggcagcggacattcttgagcaactgccgcgcatcccggtaccagccgccctgccccgctgggatgcgagccaggtcactgattcggacgaagacgtgatcatcgctcacaactgggacgagctgcgacgcttcatgtgggactatgtgggcatcgtgcgcaccaacaagcgcctgcaaagggcgcaacatcgggtgcgcttgctgctggatgagatcgacgagttctacagcaactacaaggtcagccgcgacctgatc

SEQ ID NO: 219647 - DNA, 1345 bp, Unknown
  Bacterial polypeptide expressing nucleotide sequence isolated from the Sargasso Sea
atgacccaaaataaacatcacatcgcagatatcgcaattatcggaagcggcgcggctggcttatctcttgccttatcactagctaactattgtaacgttaccgttattagtaaaggcgcgcttaccgaaggctctacactttatgcacaaggtggtatagccgcagtatttgataaaaaaaatgacagtattgaatcgcatgttgaagatactttagatgctggcggcggcctatgtgaccgtgaagctgttcactatacagcaagtaatgcacacgattgccttcaatggctaattgaccaaggtgtgccttttgacatggaatttgatagcaaaggcaaagagcgttttcacttaacgcgagaaggcggtcatagccatcgtcgaattttgcatgccgccgatgcgactggtaaagccgttcaaacaacattaataagccaagtgaaattacataaaaacatcactctacttgagcaatacaatgcaattgatttaattactgataaaaatactggcaaagcaggaacacacgttgagggtatgtatgtgtggaacaaaaaagctaaaaaagtcgaaactatatcggctaaatttgtagcacttgcgaccggtggagcaagcaaggtgtacttatatacatctaatcctgatgtatcaagcggtgacggtattgctatggcttggcgagctggctgtaaagtggctaatatggaatttaatcaattccatcccaccagcttataccaccctgaattacaaaactttctaattaccgaggcaatgcgcggtgagggcgcgtatttaaaacgcccagacggcactcgctttatgaaagattttgatgaacgtgaagagctagcccctcgtgatatagtcgctcgcgcaatcgattttgaaatgaagcgcctaggtgcaaattgcgtttatttagatattagccacaaagataaagaatttattattgagcacttccctaccatttatgcaaaatgcttgagtgttgggttagatattacaaaagaagcgattccggttgtccctgccgcacactacacttgcggtggtgtaatgactgactttaacggtaaaacagatttagataatctatatgccgttggtgaagtagcttacaccggcctgcacggtgcaaacagaatggcaagtaactcattattagaatgcattgtgtttgcccatgctgcagcgaaagatattttaagcaaaattgaacatgcaccagaacccatgaccttgccgcaatgggatgaaagccgtgtaactaactcggacgaagaaatagtcattacgcataattggcatgagctacgcctctttatgtggg

SEQ ID NO: 219648 - DNA, 1615 bp, Unknown
  Bacterial polypeptide expressing nucleotide sequence isolated from the Sargasso Sea
gatgaaacaagtagttgaacaccaatctgacatattagtcataggtagcggtgccgcaggtctgacactagctttgcatcttgctgaaaaagcaaacgtaattctgctctcaaaaggcccactctcggaagggtcaacatactacgcccaaggcggtatcgcctccgtgttcgatgaaagtgataccatcgaatcccacgtggccgatacgttagtggctggtgctggtttgtgcgataaggaagtggtgacttttaccgctgaaaacgccaaaagcgccatgcaatggttaattgaatgtggcgtggcattcgataaagaagaaaccgctggcgataatgccaaagacgcgccttatcatttgacccgcgaaggcggccacagccatagacgcattctgcatgccgccgatgcgactggcaaagaagtgcaaaccacactgcaagaacgcgccctcgcccatcccaatattcaagttttagaacgttacaacgccatcgacctcatcaccacccgtaaattaaatcgccctggcaatcgcgtgttaggcgcttatgtgtggaaccgtaatgccgaacaggttgaaaccattaaggcaaaatttgtcgcattagccacgggcggtagctctaaggtctaccaatacacctcaaaccccgatgtggcgagtggtgatggtattgccatggcgtggcgtgcaggttgccgtgtggctaacatggagtttaatcaattccatccgacctgcctttaccatgccgatgcgcgtaacttcctgctgaccgaagccctgcgcggtgaaggggcttatttacgccgccccgatggcagccgctttatgccagactttgacgagcgagccgaactcgcgccccgtgatatcgttgcccgcgccatcgactatgagatgaagcgtttaggtgccgattgcgtctacttagacatcagccataaagacagcgactttatcatcaagcacttcccaacgatctacagtcgctgcttggaactgggtatcgatatcaccaaggacgccattcctgtggttcctgccgcccactatacctgtggtggcgtgatgacggacttacacggccaaaccgacctcaacggcctctatgccatcggcgaagtcgcctataccggcttacatggtgcgaaccgtttagcgagtaactcgctgctcgagtgcttggtatttgcccgcgccgcgtcgcaggatattgagagccaaatgcacaaaattccattaccggggcaaattccggcgtgggacgagagtaaagtctccaactccgatgaagaagtggtgattgcccacaactggcacgaactgcgcctctttatgtgggactatgtggggatcgtccgctctgataaacgcttggagcgcgcgctgcgccgctgcttgatgttacagcaggaaatccaagagtattacagcaacttcagagtcagtaataacctgctggaactgcgtaacttagtgcaagtggcggagctaattatccgctgcgctatggatcgtaaagaaagccgtggcctgcactacaatatcgaccatcccgagaaggtagactcaccgcaaccaacgattctgcaacctgaaaaataa

SEQ ID NO: 219649 - DNA, 1588 bp, Unknown
  Bacterial polypeptide expressing nucleotide sequence isolated from the Sargasso Sea
atgaaattcgacgtggcgatcgtcggcagcggcctggcagggctgtcggtcgcactcaacctggccagcacgcgacgagtcgcgctgatcgcgaaacggtcgatgatggagggcgcgagcgataacgcgcaaggtggcatcgcggctgtcctcgattcggcggacagcatcgagaaccacgtcgacgacacgctggtcgccggtggcggcttgtgcgacgaaggcgcgacgcgctatatcgtcgagcacggccgcgaagcgatcgaatggctgatctcgcagggcgtgccgttcacgaaggacgacgcggccgagctcggcttccacctcacgcgcgaaggcggccacagccatcgccggatcatccacgcggccgacgcgaccggccatgcggtgctcgccacgctgtcggcgcgtgtgcgccagcatccgaacatcacgttcttcgaaaaccaccacgcgatcgacctgatcacgtcggaccggctcggcctgcccggccgccgctgtcacggcctgtacgcgctcgacgtcgacaacgaccgcacgatcacgatcgaggcgccgcatacggtgctcgcaacgggcggcgccggcaaggtctacctgtacacgacgaaccccgacaccgcgaccggcgacggcatcgcgatggcgtggcgcgcaggttgccgcgtgtcgaacatggaattcatccagttccacccgacctgcctgttccatccgtacgcgaagtcgttcctgatttccgaagccgtgcgcggcgaaggcggcctgttgaagctgcccgacggcacgcgcttcatgcccgcgcacgatccgcgcgccgaactcgcgccgcgcgacatcgtcgcgcgcgcgatcgacttcgagatcaagaagcgcgggatcgactgcgtgtatctcgacatcagccaccagccggaagcgttcctgcgcgaacacttcccgacgatccacgcgcgctgcctcgaattcggcatcgacatcgcgaaagagccgatccccgtcgtgccggccgcgcactacacgtgcggcggcgtcgtcaccgacctcgccgggcgcaccgatctcgcgggcctgtatgcagttggcgaaacgtcgtacacggggctccacggcgcgaaccggctcgcgagcaactcgctgctcgaatgtctcgtgattggccgtgccgcggccgaagcgatcgaggcggccggcttcgatgccgaaacgccggccacgctgcccgcgtgggacgaaagccgcgtgtcggatgcggacgaggaagtcgtcgttgcgcacaactgggacgagctgcgccgcctgatgtggaactacgtcggcatcgtgcgcaccgacaagcgcctcgagcgcgcgaagcaccggctgtcgctgctgcgcgacgagatccaggagtactacgcgaacttccgcgtgacgcgcgacctgctcgaactgcgcaacctcgtcgacgtggcgaccctgatcgtgaagagcgcacactcgcgccgcgaaagccgcgggctgcactacagccgcgactggccgagctcgctgccgaaggcgctgccgagcgtgctcacgccgcgcgcgcgtcgctgag

SEQ ID NO: 219650 - DNA, 1615 bp, Unknown
  Bacterial polypeptide expressing nucleotide sequence isolated from the Sargasso Sea
atgtctgatgctatttatagccctgatgttgtaatagtgggtggaggtgtagccggtttaactgttgcactcaacttagcgccaagaaaagtttgtgtaattactaaaagttcacttggaataaatacttcaagcagttgggctcaaggaggtattgctgcggcagtttcaaaagatgacagtaatgaaagtcatattaatgatactttgactacagcaaaaggcttggcgaatatcgatgcgattaaagaagttgtaaataatgcaaaaggaatcattgatgatttagaggaatacggagttaattttgataaaaatgaagatggtacatttaacttagggctagaaggtgctcatagctttaatagaatcataaggtcaaaaggtgatagttctggtcttgaaattatgcgcggcttaattgaaaaagtaaaaaaaagtgatcacatcacagttttagaaaatgtttcgattgatcggattatgacagacaacaatactatttacggagtaattggaagatttactgatgataatgttcctgacagtaatgtaattattcaaagttctcatgtagttctagcgacaggtggtttgggaggtatttttgcaaatacgaccaacccacgaagttcttatggagagggtgtggcgttggcatctcatgctggtgcaacacttactgacatggagtttgtacaatttcacccaacaggtcttgattttggcttagaccctactcctttggctactgaggcgattagaggtgaaggggcttaccttgtaaatcaagatgaagtaaggtttatgtttggtattcatcctgataatgagttggcaccacgagatcttattgctcaaaatatattcaaacaaattgaaaaaggaaattcagtatttttagattgtagacatatgggtagtaattttaatactcgttttcctcaagtttcatcctattgtgaaaatgcagacttagatcctgaaagagacctgcttccaataattcctgtcgctcattatcatataggtggagtaaaaactgatctgaaaggacagacttctgttgaaggactctggtgctgcggagaggttgctgcaactggtattcatggagcaaaccgccttgcatctaattcactattagagtctcttgtatttgctaagattgttgcaaatgaaataaataaaaaggatataaaaaacgatattcatattagctctaaatttataaaaatttttaaagagaaaactaaaaataaaataagagcaaaaaaatatatatggcaattacggtcttcaatgatgagaaatttaggtatcgttagaaataatgactctattattagaggtctaaatgatgtactaaaaattgagagagagtcaaaaggcctttcagctaaacttaatgatatgattttggttagcaaatttattatcataggcgcttatttaagaagagaaagtcgaggttgtcatttaagatctgattaccaagatactgataaagattttattaagcattttgatattaaatattcagaagtagatggttatatcaaaactattttggattctactatatcagaagttgatgaaaaacttgttagctaaa

SEQ ID NO: 219651 - DNA, 1651 bp, Unknown
  Bacterial polypeptide expressing nucleotide sequence isolated from the Sargasso Sea
atggaccactcccgaccgcctgatgccatcgatcccggcccctgggacgtggtggtggtgggtgccggagcggcggggttgatgacctgcctggagttacccgaggggttgtcggtgttgctgctgaaccgcaacaccggacggcgctcctccagccgctgggcgcaggggggcatcgccgccgtgacccgccccgaagattcctcccgaagccatgccgacgacaccctgagcgccggggctgggctctgtgacggcgatgccgtgcgctttctggtggacgccgcaccccgttgcgtggagcgcctgcagcagctgggcatggcctttgaccgagacggccatggcctggccacaaccctggaagccgcccacagccatcgacgggtactgcatgtgcaggaccgcaccggacgcgccctagtggatgtgttgcgcgagcgggtggaacaacggcccggtctgctgcaccgccgtggggtgcgggtcaccgggctggaggtgcagaacggtcgctgctgcggggtgcaggtgctggatggccaccagctccatcggatccaggccagggccgtggtgctggccagcggcggcggtgggcacttgtttgccaatacaaccaatccagcccaggcctgcggggaggggatcgccctggcctgggacgcaggggcctccgtggaagatctggaattcgtgcagttccaccccacggccctgcggctcgacgatgcaccttgcttcctgatctcagaggcggtccgcggcgaaggcggcgtgctggtggatggccgcgggggaagccctgtggatcagctgccgcaacgggacctggctccgcgggatcaggtgagccgggctctggtgcagcggatgcggcagcagggggtggcccagatgtggctggattttgccgccattccccatgccaaggcggaagcgcgtttccccacgatcctggatcgctgcagcgagttcgggctcaaccccctggagcgaccgatccctgtggcccctgcggcgcactactggatgggcggtgtggccacggatctgcaggccgccaccgatcttcccggcctttacgccgtcggcgaagtggcctgcactgggctgcatggcgccaaccggctggccagcaattccctgatggaatgcctggtgttcgctcaccgcatggcggagatcgacctgggaccggccctgaagccgatcagtcctgccccgccgcaggcctatgggcaagccctggagggagggatcaccagcgcggagctgatgcaacagatcgaacagctgcggctgttctgctggcagcgggctggggtggaccgctccgggcgcgggctcagcgccggcctggaccagctgcgctgcgacctggagcacctggaccaacaaccgttgctggactgcctgcagcaggacaatctgctgctggatgacagcagtcgccgcgatttgaatctgctgctggatctgcgccaccgactgctgaccagccggttgatgctggaggcctgtctgttccggcgggagagccggggcggccatttccgcaccgacgcccctgcaacattgccccagtggcaatgccattcacggctgaacagggcccaggggctccacacccgggccgtgcgcccctgag

SEQ ID NO: 219652 - DNA, 1636 bp, Unknown
  Bacterial polypeptide expressing nucleotide sequence isolated from the Sargasso Sea
atgaagaatattttaaagcaagttaccaatataatccatcacgatgttttaatcattgggagtggtgcagcaggtaacagtttagctcttatgcttcctaataatttatcaattggtattgtatcaaagtctgacatacatgaaggtagtacatattatgctcaaggtggaatatctgctgtctttaatgatttggattctattgataatcacattgaggataccctagaaactggctgtggtttatgtagaaaagatgttgttagagatatagcaaaaaaatcaagaaatttaataaaatggcttcaagaaagaggtgtagaattttcgcacactcaaacaaaatcaggaagtaaatatttagatttaggtatggaaggaggacatagctatccaagaatcgttcatgcagatgataaaacgggtaaagttattcaagaatctttgatagataatttatctaatacagcaaatattaatgcttatacacatagagtagctattgatttgattatcgatgctaacaatgcctgcgttggttgttatatttataatgatcaagcagataaaatagagattcatgttgcaaattttttagttctagcttctggaggagctaataaagcgtacctttacactagcaaccctgatacatcatcaggtgatggaattgcaatggcatatagagctggatgcaatattacaaatatggaatttatgcagtttcatccaacttgtatgtataatcaagatgcaaaattctttttaattacagaagcaatgagaggtgaaggagctaaacttttacttcctaatggggaaaagtttatgcacaaatatgacgatagaggtgtccttgctccaagagatattgtagcaagagcaatagataacgaaatgaaaaaaaatggacatgaattcgtccttctggatatcagccatatggaaaaagatttcattatcaagcggtttccttcaatctacaataaatgcttagagtatggcatagatataactaaaaataagattccagtagttccagcaacccactacacttgtggaggtgtagagattaataaaaaaggacaaacaaacattaaaaatctttatgctattggagaagtagcacactctggattgcatggtgcaaacagaatggccagtaattcattactagaatgcttatattttgctgatgtagtaagtaaagatatatctttgaatagtaaaaatcttaaaaaaattaacaccaataaaattgaccagaataaatacatgcaacatgatgagttagaaaaagttttaatcaagcactgctggaaagagataagaactctgatgtggaactacgtcggtatagttagaaacaatcataggttgtcctatgccgatcagcggatcaaaataatgaaaaaagaaattgatgccttttttttcacttacaagattaataaagatatagttgaattaaaaaatttagtaagtgttgcagagcttataattaaatcagctatctctagaaaagaaagcagaggtttacactataatattgactacccagaaacactaagtgaaccaaaagatacaactttaagtaaaaatcaatcaagttctttaaatattagctctctataaa

SEQ ID NO: 219653 - DNA, 1180 bp, Unknown
  Bacterial polypeptide expressing nucleotide sequence isolated from the Sargasso Sea
tatggctgactctatttatagaccagatgtggttattgtcggtggcggtgtagctggacttactgcagcacttaacctagcaccaagaaaagtatgtattataacaaaaagtactttaggcatgaatacctctagtatgtgggcacaaggtggcattgctgcagcagtgggaattaacgacagtgtcgaaaatcatgttgaagatactgttacaactgcaaaaggtctagctgacaagaatgtcattcgaaaagtcatcggtgaggcagagagtattataagtgatcttgagaacattggggtaaactttgataaaaataatgacggatcttttgatttaggccttgaagccgctcatagcagaaaccgaatagtaagatcaaagggtgatagttccggtattgaaattatgagaggcttaataaaaaaagttagtgaaagtgaaaatattacggttttagaaaacgtctcaattgacagaattatgtcagaaaataacatcatacatggggttattggaagattggtacaagaaaatgttccagataatcatgttgttattgaaagttcaaatgttgtgcttgctactgggggacttggaggaatatttgctaatacaactaacccaagaagttcttatggtgagggaatagcccttgctgcacaagcgggtgcagtcttgactgatatggagtttattcaattccatccaacagggcttgattttggtttggaccctactccacttgcgaccgaggcaattagaggtgatggtgcttatctggtaaatcaaaatgaagagaggtttatgcttggagttcatccagaaaatgagttggcacccagagacctggttgctcaaaatttatttaagcaaatagagcaaggaaactctgtctttcttgattgccgtaaagtgaggagtaaatttgaagcaaaatacccgcaagttgcctcatattgtcaagcggcaggacttaatccaaaaatagatttattgccaatacttccggttgctcattatcatatagggggagttaaaacggacctggatggaaaaacttcagtggaagggctttggtgttgtggtgaagttgcggcaacaggcatacatggcgcaaatcgattggcttccaattcattacttgaatcaatggtatttggagaattgttgcaaaaa

SEQ ID NO: 219654 - DNA, 1111 bp, Unknown
  Bacterial polypeptide expressing nucleotide sequence isolated from the Sargasso Sea
cacccggcttgatgtgcagaacggccgctgttgtggagtgcaggtgctggatggccgccacctgcaactcatccaggcccgcgccgtggtgctggccagcggcggcggtgggcatctgtttgccaacaccactaatccggcccaggcctgcggagagggcattgccctggcctggcaagccggagcagcggtggaagatctggaattcgtgcagttccatcccacggccctgcggctggacgatgccccctgcttcctgatttcagaggcggtgcgcggagaaggcggggtgttggtggatgcccaggggggaagtccggtggaccacctgcggcaacgtgacctggcccccagggatcaggtgagtcgggccctggtgcagcgcatgcgagagcagggcgtggcccagatgtggcttgatttttccgccattccccgtgcccaggcggaagcgcgtttccccacgattctcgaccgctgcagcgaattcggactcaaccccctcgaacggccaatcccggttgcgcctgcggcgcattactggatgggcggtgtcgcaacggatctgcaagccgcgacagaccttccaggcctctacgccgttggcgaggtggcctgcactggggtccatggcgccaaccggctggccagcaactccctgatggaatgcctcgtgttcgcccatcgcctggcggagatcgacctggggcctgccatcaagccgtcgaaccctgccccgccgcaggcttacgggcaagaactggagggagcgatcaccagcgcggggttgatggagcagatcgagcagctgcgcctgttctgctggcaacgggctggcgtggaccgcagtggacgccggctcaacgccggcctggatcgcttgcgctgcgagctggaacgcttggatcaacaacccttgctgaactgtctgcagcgggatgctttgttgctggatgacagcagtcgccgcgatctgaatctgttgctggatctccgccaccgactggtgaccagcaagctgatgctggaggcctgcctgttccgccaagagagcaggggaggacatttccgcacggatgcccccacatcgcagcccccatggcaatgccac

SEQ ID NO: 219655 - DNA, 799 bp, Unknown
  Bacterial polypeptide expressing nucleotide sequence isolated from the Sargasso Sea
cccgacggcagccgcttcatgccggagtttgacgagcgggccgagctggcgccacgggacatagtcgcccgcgccatcgaccacgagatgaagcggctcggcgccgactgcatgtatctggacatcagccacaagccggccgacttcatcatcaagcacttcccgaccatccatgagcgctgccttgcggtcggcatcgacatcaccaaggaggcgatgcccatcgtccctgccgctcactacacctgcggcggcgtgatgatcgacaacaacggccagaccgacatccccggtctctatgccatcggcgaggtgacctacaccggcctgcacggcgccaaccggatggcctccaactccctgctcgaatgcgtggtctatgcccatcaggcgggggccgacatcctggccaagctgccgatgagcgtggagccgccccgtctaccggtgtgggacgagagcaaggtggaagattcggacgaactggtggtgatccagcacaactggcacgagctgcggctgatgatgtgggactacgtggggatagtgcgtaccaacaaacgcctggcccgggccaagcgccgcatcgacctgctcaagcaggaggtgcaagagtactacgcccacttccgggtctccaacaacctgctggagctgcgcaacctgctgcaggtggccgaactcatcgtcaactgcgccctgcaacgcaaggagtcgcgcggcctgcactacaacctggactacccggacatgcaaccggactccaagccaactgtgctgacgccggaacgggactaac

SEQ ID NO: 219656 - DNA, 1549 bp, Unknown
  Bacterial polypeptide expressing nucleotide sequence isolated from the Sargasso Sea
tgttgcccgacaccttaaaatcactttaatcaccaagaccactcttgatgaatgttctacttcatgggctcagggaggcattgcttctgttctctcaaatgatgataaatttgacatacatatagaagatactctaacaaatggtcatgaacttaataatcgcgatgttgttgaaaaaataattaaaaatggtccttcaatgataaattggctagtgaatcaaaaaatcaagttttcgaacaaaaacagaaagcttgatcttactctggaaggaggacatagtaaaaggagaattgtccatgccaaagatcagacgggaaaaattattcatgatagtttagataaaatagtaagaaacaaaaaaaatattacagttaaagaaaaccttcaagtaatagatgtaatttgtagaggtaattctgaaaataaatactgtataggtgcttatgtatatgactctgaaatcaatgaagtcataacttattcaagtaaaaaagtaatactggcaacagggggtgctggtaaaatatatcagtacactacgaacccaaatacatcaacaggtgatggaattgcaatagcttggcgagcaggctgtactatttcaaacatggaatttatacaatttcatccgacatgtctttatcatccagaagttaaatcgtttttaatttcagaatcaatgagaggtgaaggagctaaattgctggatattcatggtaaaccattcatgcacaaatatgatgatagagaagaactcgcgcccagagatattgtggcgagagcaatagataatgaaattaaagcaaacgataacgactttgtatatctagacattagtatgaaaagctcagaatatattatgaatagatttccctcaatttataagaaatgtaaatctattgatatagatattacaaaatcgcctataccggttgtaccagcttctcattatacttgtggtggagtgaacacagatatacatggaagaactaatattaagaatttatatgttattggtgaatcagctcatacaggatttcatggtgcaaatagattagctagcaattcactattagaatgtttagttatgtctaaatattgttcaatagatgtaaatgagaatattgactattctatgcctcattacggcaatatcatgaattgggatgatacttatgttacaaagagtaaagaaagttataaaataagtcataactggggtgatatacgaaaactaatgtggaactatgtagggatagttagatcgcacaaaaatcttaatttagcgctggaaaaaattaatattattgaaaaagaagtaatgaattattatcaacaatattcaataagctctgatttcttggagctcaggaatattgttcaagtttctaaattaattacaaaatcagcattagaacgtaaagagagtcgcggcttacattattgcgaagattttccaaaaacactcaacaaatataatagaaatactgaattatctaaagattcattcaatcaaaatttacagttagtaaaactcaaagtttaa

SEQ ID NO: 219657 - DNA, 965 bp, Unknown
  Bacterial polypeptide expressing nucleotide sequence isolated from the Sargasso Sea
attgattaaaacagacgttcttattataggaagtggagctgcaggaatgacagctgctattgaattatctaataaatttaatgtcacactcataacaaaaaattctctggtcgacagctctacatggtatgcacaaggtggtattgctgctgtcattgattcgaatgacactatcgaagagcatttaagagatacgcttatcgcaggtgatggcttgtgcgatgagaatgcagttagggaatgcgtaagtcatggaagagaagccattgagtggctgagcagtcttggaacaaattttacaactgatcaatctaaagagaattttcatcttacacaggaaggcggtcactctaaaagaagagttgttcatgcagaagatgctacaggaaaagaagtttcaagttctctatcagagatggtaaaaaaaatagagaccatagagatattagaaaaccatatctgtgtagatcttataactcgaaatcaaaggtgtataggtgcttatgttttagatatagattcaaactctgttgaggcttttagttcaggtgctgtgattcttgctactggcggtgcaagcaaagtctatttatatactagtaatcccgatggctcatcaggagatggtattggtttagcttggagagcaggatgtaaggttgaaaatctagaattcaatcaatttcatccaacatgtctttttcatccaaaagccaaatcgttccttattagcgaggctttaagaggtgaaggggcttatttgatcaatcagaacaaagaaaaattcatggaaaagtatgattcaaggctagagcttgctccaagagatgtggtcgctagatctattgataaagaaatgaaaatttccggtgctgataatgtatatctagatataagccataagaattcaaataaaatcaaagagcattttcctaacatatacaatgaatgtcttaaattcggtt

SEQ ID NO: 219658 - DNA, 930 bp, Unknown
  Bacterial polypeptide expressing nucleotide sequence isolated from the Sargasso Sea
tcgatatggaatttgtacaattccatcctacagttttttttaaagatggtgctaagaattttttaatcagtgaagctttaagaggtgaaggtgcaaaactaattaatcattcaggcaagcagttcatgaaaagctacaccccaaaaaaagaactagctccaagagatatagtttcaaaagcaatattcaatgaaatgaagacaaatggggaaaaaaatgtttttttaacattaaaacacctagataaaaacttaattaaaactagatttaaaaatacttacgaactttgtttgcgtgaaggagtagatataactaatgaaaaaataccagttgctcctgcagcacactacttgattggtggaataaagactgatatatatgccagaacaaatattaaaaatttatacgcttgtggtgaagtagcatgctcaggtgcgcatggagcaaatagattggctagcaactctttgctggaatgcctagtgttttctaaaagagccattgattcagctctcgaattttccagaaaaattaagaaaataccaaaaaaaattttaaaaacctctgaacaaatatcgctgtttccttcagaaaaaaaactagaaaaatatctaaaccttagaatgtctatttcacaaattattaataatcatgtgggaatacttagaaataagaaagacttattactagctttagatgaaatatcttctataaagaagaaagatttagacaagaatgacataattgataatagaattctcaatcttaaaacgttgtcatatttaatgacaaaatctgcattattacgcgaggaatcaagaggttgtcatatgagagaggacttctcctcaaaaaataataaatggctcaaacatataaactggaaaatatcatcaggcacattaagattttcttatactaatcactaaa

SEQ ID NO: 219659 - DNA, 1615 bp, Unknown
  Bacterial polypeptide expressing nucleotide sequence isolated from the Sargasso Sea
atgaaacaagtagttgaacaccaatctgacatattagtcataggtagcggtgccgcaggtctgacactagctttgcatcttgctgaaaaagcaaacgtaattctgctttcaaaaggccctctctcggaagggtcgacatactacgcgcagggcggtatcgcctccgtcttcgatgaaagtgatactatcgaatcccatgtagccgatacattagtcgctggtgctggtttgtgcgataaagaggtggtgacttttaccgccgaaaacgccaagagtgcaatgcaatggctaatcgaatgtggcgtggctttcgataaagaagaagccacggggaacaatgctaaagatgccccttatcaccttacccgcgaaggcggccatagccatagacgcattctacatgctgcggatgcaacgggcaaagaggtgcagacaacactgcaagaacgtgccctcgcccatccaaatattcaagttttagaacgctataacgccatcgaccttattaccacccgcaaattaaatcgccccggtaatcgcgtgttaggtgcctatgtgtggaaccgaaatgccgagcaagttgaaaccatcaaggctaagtttgtcgctttagccactggcggtagttctaaggtttaccaatatacttcaaatcccgatgtggctagtggtgatggtattgcgatggcatggcgggcaggttgccgcgttgccaatatggaattcaatcaattccatccaacctgcttataccacgctgatgcccgtaactttttactgaccgaagctctacgtggtgaaggtgcctatttgcgtcgccctgatggcagccgctttatgccagactttgatgaacgtgcagagttagctccccgtgacatcgttgcccgcgccattgactatgagatgaaacgtctcggtgccgattgcgtgtatctggatatcagccataaagatgctgactttgtaatgaagcatttcccgacgatttacagtcgctgcttagaactcggtattgatattacaaaggacgctattccggtcgtcccggcagcccactatacctgtggtggggtgatgacagacttacatggtcaaaccgatctcaatggtctctatgccattggtgaagtcgcttatacaggcttgcatggcgccaaccgcttggcaagtaactcgctgcttgagtgcttggtatttgcgcgggcagcctcccaagatattgagagtcaactgcataaaatccccttaccaggcccaattcccgcatgggatgaaagtaaagtttctaattctgatgaagaagtcgttatcgcccacaactggcacgaactgcgcctgtttatgtgggactatgtgggtatcgtacgctcagataaacgcttagagcgcgcactgcgccgctgcttgatgttgcagcaggaaatccaagagtattacagcaacttcagagtcagcaataacctgcttgaactgcgtaacttagtgcaagtggcagaactcattattcgctgcgcgatggaacgtaaagaaagtcgtgggctgcactacaatattgatcatcctgaaaagtcagcttctccgctaccgaccattttgcaacctgaaaaataag

SEQ ID NO: 219660 - DNA, 1576 bp, Unknown
  Bacterial polypeptide expressing nucleotide sequence isolated from the Sargasso Sea
atgtctcaacgttttgctactgacattctaattatagggggcggtgccgctggcttagcagcggcactgcatctcgctgacttgtatcgcgtaactttactatcaaaaggctcgatggaatcgggggcgtcaagttgggcacaaggaggaatagcggcagtcaccgatcctattgactctttagagtgccaccaaagcgacacgattaccgcagggtcaggtctatgccatcttgatacagtgaaaacagtcgtcgaatctgctccactagtgatcgaacaactcagtcagtggggcgtcgatttcgatttgagaggcaatgaataccacttaacaaaggaaggcggacactctaacagaaggatcctccacgtggccgacgctactggcaaagccatcattgaagtattgacgcaaaaaactcttgaccatccaaatattgatttgtttgaagataaagtcgccattgatttggcaaaacgtagaaacacagcagggcaatatagctgcactggggcctatgtcctcaataaaatcagcaggaaagtcgaggtatttcaggcggcacacaccatccttgccacaggaggagcaagcaaggtttatctctacacaactaaccctgatggatctaccggagacggtattgctatggcatggagagcgggttgtcgagtttccaatatggaatttaatcaatttcacccgacgtgcctgtaccatccgcacgcgggtagttttctgatctcagaagctgttcgtggggaaggaggagttcttcgtttacctaatggcgagcgtttcatgcatcgttttgacgacaggaaagagctagctccaagagatgtggtagccagggctatagatttcgaaatgaagcgccttggagccgattttgtgaccatcgatatatcccatcgatctcagcaatttattttggaccacttcccaacaattgcagacaagtgcttttctttaggaatggatatgaccaaagaagctattccagttgttcctgcagcacactacacatgtggaggggtcacagtagacctcaatggtcttaccgatttaccgaacctttatgcgattggtgaggtctcaagcactggtcttcatggtgcaaaccgtttagccagcaattcgttgcttgagtgtttggtatttgcaaaaagatgttcggagcacatcaaaggagaagggatatcccaagtagaacctggcttcattccccattgggacgaatccaaggtgatcgactctcaagagagcattgtaatcgctcataactgggaagagctaagacgttttatgtgggattatgttggcatagtaagaacggataaacggttaaaccaggccatgcacagaattgaacttctcaaagaggaaattcgagatttttatggtcactacaaaatcagcaacgatttgattgaactcagaaatcttgtcgatgtcgccgaattaatagttagttctgccctaaagagaaaagaaagcagagggttgcactacaatacagatcaccttgatgaactctcagagatcagggatacaatattaaaaccgtaaa

SEQ ID NO: 219661 - DNA, 1615 bp, Unknown
  Bacterial polypeptide expressing nucleotide sequence isolated from the Sargasso Sea
aatgtctgattctatttatagccctgatgttgtaatagtgggtggtggtgtagcgggattaactgttgcactcaatttagcgccaagaaaagtatgcgtaattactaaaagttcacttggaattaacacctcaagtagttgggcacaaggagggattgccgcggcagtttcaaaggatgacagtaatgaaagtcatattaatgatactttgactacagcaaaaggcttggcgaatatcgatgcgattaaagaagttataaataatgcaaaaggcatcattgatgatttagagggatacggagttaattttgataaaaatgaagatggttcatttaacctagggctagaaggtgcccacagctttaatagaatcataaggtcaaaaggtgatagttctggtcttgaaattatgcgcggcttaattgaaaaagtaaaaaaaagtgatcacataacagttttagaaaatgtttcaattgatcgaattatgactgaaaaaaatactatttatggagtaattggaagatttactgacgataatgttcctgacagtaatgtaattatccaaagttcacatgtagttttagcgacaggtggtttaggaggtatttttgcaaatacgaccaacccacgaagttcttatggagagggcgtggcgttggcatctcatgctggtgcgacacttactgacatggagttcgtacaatttcacccaacaggtcttgattttggcctagaccctactcctttggctactgaggcgattagaggtgaaggggcttaccttgtaaatcaagatgaagaaaggtttatgtttggtattcatcctgatcacgagttggcaccacgagatcttattgctcaaaatatattcaaacaaattgaaaaaggaaattcagtatttttagattgtaggcatatgggtagtaattttaatgctcgttttcctcaagtttcgtcctattgtgaaaatgcagacttagatcctgaaaaagacttgctaccaataattcctgtcgcccattatcatataggtggagtaaaaactgatctgaaaggacggacttcagttgatggactttggtgctgcggagaagttgctgcaactggtattcatggagcaaaccgccttgcatcaaattcattattagagtctcttgtatttgctaagattgttgcaaatgaaataaataaagagaatataaaaaaggatattcatattagctctaaatttataaaaatttttaaagagaaaacaaaaaataaaataagagcaaaaaaatatatatggcaattaaggtcttcaatgatgagaaatttaggaattgttagaaataaagactctattatcagaggtctaaatgatgtgcttaaaattgaaagagagtcaaaaggcctttcagctaaacttaatgatatgattttggtcagcaaatttattatcataggggcttatttaagaagggaaagtcgaggttgtcatttaagatctgattaccaagatactgataaagaatttattaagcattttgatattaaatattcagaaatagatggttatatcaaaactatcttggattctactatatcagaagttgatgaaaaacttgttagctaa

SEQ ID NO: 219662 - DNA, 814 bp, Unknown
  Bacterial polypeptide expressing nucleotide sequence isolated from the Sargasso Sea
attgattaaaacggacgttcttattataggaagtggagctgcaggaatgacagctgctattgaattatctaatcaatttaatgttacgcttataacaaaaaattctctagtcgatagttccacatggtatgcccaaggtggtattgctgctgtcattgattcgaatgattctattgaggaacatttaagagacacactaatagctggagatggcttatgcgatgaaaatgcagttagagaatgtgtgagtcatggaaaagaagcgattgaatggctaactagtcttggaacaaactttacaattgataaatcaagagagaatcttcatctcacacaggaaggtggtcattctaaaagaagagttgttcatgcggaagatgctaccggaaaagaggtgtccagctctctctcagagatggttaaaagaataaagactattgaagtcttagaaaatcatatttgtgtggatcttataactagaaatgaaaagtgtataggtgcatatgttttggacatagagtcaaactctgtcaaagcttttagttcaggttctgtaattcttgctactggtggtgcgagtaaggtctatttatatactagtaatcctgatggttcgtcaggagatggcattggtttagcttggagagctgggtgtaaagttgaaaatctagaattcaatcaatttcatccaacatgtctttttcatccggaagcaaaatctttcttgatcagcgaagctttaaggggtgaaggggcttttttgttgaatcaaaataaagagaaattcatggaaaagtatgatgcaaggctagaa

SEQ ID NO: 219663 - DNA, 724 bp, Unknown
  Bacterial polypeptide expressing nucleotide sequence isolated from the Sargasso Sea
atgaaagcaagtgttgaatacctttgcgacgtactgatcattggcagcggtgccgccggtttgtctctcgcattgcgattggcagaccaggccaaagtcctggttctgagcaaggggcccatcagtgaaggggccactttctatgcgcaaggaggcatcgctgccgtgttcgacgagaccgacagcatcgaatcccacgtgagcgacacgctcaacgccggggccgggttgtgtgacccagccgtggtggagttcaccgcccgcaacgcccgcgagtccatccagtggctgatccaacagggggttcccttcgatcaagaggaggacgccgagggcgaatcccactatcacctgacccgcgaagggggccacagccatcgccgcatcttccacgcggcggatgccaccggcaaggcggtgcagctcaccctgatcgatcaggtgcgcgcccaccccaacatccagctgatggagcgcttcaacgcggtcgacctcatcaccacccgcaagctgggtctgccgggcaaccgggtgctgggcgcctatgtctggaaccgcaacgccgagcaggtcgaagtgatccgtgcccgcttcgtggcgctggccaccggcggtgcctccaaggtctaccagtacacctccaaaccggacgtcagctccggtgacggcatccccatggcgtggcgcgccggctgcagggtggccgaactggagttcaacagtt

SEQ ID NO: 219664 - DNA, 1384 bp, Unknown
  Bacterial polypeptide expressing nucleotide sequence isolated from the Sargasso Sea
taccgttgaaagtcacattcaagatactttaaaggtgggcgacggcatttgcgatgagcaagcggttcgctttacgattgaaaacagcaaagctgcaatcgagtggttgatcgacatgggcgttgaatttacccgcacggctgacgggaccgattaccatttgactcaagaaggcggtcacagtcaacgccgggtgattcattccgatgacaccacaggccgagaaatctctgattcgttggcgcaacgagtcagacaacatcaaaacattaccgtttacgaaaaacacctcgctgtcgatttgattaaagacggggagcgttgtctgggggcgtatattcttgaaagagcaacgggtttgattaaaactttttctgccagccataccgttctggctactggtggagccagtaaagtctatttttataccagcaacccggacggagcgagcggtgacggttatgctttagcagcacgcgcagggtgtcgtctggcaaacatggagttcaaccaatttcatcccacctgtctttatcatccgcaggcaaaatcttttttactcagcgaagcgcttcgcggtgaaggggctattttgcgcctcccggacggtgaggcttttatggagcgctttgatgtgcggggagatttggcttccagagacattgtcgcccggtcgattgattttgagatgaagcgttctggcttaaaccacgtcatgctggatatgacccatgctgagaaatcggtgatccaacaaaagtttccgagcatctttgagacgtgcttgtcttttggttacgacatgagcaaagttcctgttccggtggtccctgcagctcactacacttgcggcggggttatggtagatctctccggtaaaaccgatattgaccggctctacgccataggcgaagtttcctacacaggtttgcacggagctaatcgcatggcgtctaattccctgctggaatgcattgtctttggtaaagcagcagctgaagtgattttaaacgatgatcccatcgaccagccggaactgcccttgtgggatagctcaatggtggtggaatcggacgagaaaattattgtcaaccacaattggaacttggtcagacgtttgatgtgggactacgttgggatcgtgcgttccaataaacgtttagccaaagcagctgctgaactggcagctatccaagcagaagtggaggattattattggaacttttcagttacctcagatttgattgagttgcgaaaccttactcaagttgccgaacatataattaaaagcgcgcagctaagaaaagagagtcgcggcttgcacttctctatagatcatccaaaaaagatgaatctcactgaaccaacggtaattaaaccctaa

SEQ ID NO: 219665 - DNA, 814 bp, Unknown
  Bacterial polypeptide expressing nucleotide sequence isolated from the Sargasso Sea
ttgaagctatcaatagactcaacgtcagtctacaacaaaaaagctctttgtgaactaattgatgaaaacacagcatgtatagttgttcaaaacccagatttttttggtagagttcaggactttactgagttatctgaaacatgccatcaatatggtgctcttttgataattgctgtcaccgaaattatatctctgggagcacttaccaatcctggagaaatgggcgcagatattgtttcaggagagggtcagtcacttggtaatcctataagttttggtggaccacatgtgggacttctctctacaagggaaaaatttctccgccaaatgcctggtcgcttagctggagagacagttgatgaggatggcaaaagggggtgggttttaactttatcaacaagggaacaacatattagacgagaaaaggcaactagtaatatctgcactaactctggattgtgcgcgctagctttttctattcacttaagtcttttgggcgaagacggctttactcaattggcaaaaattaaccatcagagggcaatcgatttatctaaggcaatagagagtctggatgaagtagagctaattaacgaaacatttttcaatgagttcactttaaaactgcctaaacccgcaatatctattgttgaagaaatggcaaataaaggtgtcttagcaggtgttcctgttaaaaggctgataccccatgatatagatacggaaaatatgcttattgttgcagcgactgaattgaccaccaattcggatattgaaaaatttgtcacttgcctgagagaaaccttatcttgaa

SEQ ID NO: 219666 - DNA, 160 bp, Unknown
  Bacterial polypeptide expressing nucleotide sequence isolated from the Sargasso Sea
gaatcataaatattcaagagagcaagctgcatatccagcaaaattcttaaaagcaaataaattttggcctccagttgcaagagttgacaatgtatatggagataaaaatattttttgcacttgtccaagtatggacgagtttaaagaagatgcagcataa

SEQ ID NO: 219667 - DNA, 949 bp, Unknown
  Bacterial polypeptide expressing nucleotide sequence isolated from the Sargasso Sea
cccagaacatgttaaatttatttttgccacaacagaaattaaaaaagtaccaataactgttttatcaaggtgtcagagatttgatttacatagaattgaaaataaaattttgtcagatcatttattaaaaatttccaaactagaaaatatagatatagatttagaggctatttctttacttgtaagatcagcagatggatctgtaagagatggtcttagtctattagatcaagcaataactagtccaaatgaaaaagttgactcgcaaactgtaataagcatgctgggattagctgatagagaaaaaatatttaacttaattgaaattattttagaaggagatgctcttggtgcaattaataaatataaagagttgtatgagttaggggcagatatagcaatgatatttgatgaactacttaacgtagtacatttccttgttcaaataaagatagcaccagatttaaaagatgacatttatattcctgaatttgaaagaaataaaggagctgaattgtcatcaaaaatgacattaaataatttgaatattatatggcaaattttatttaaaggttatcaagaattacaaaatagctctcatttatatcaacatggagaaatgattattttaagaattatttatttacatgatggcccaagcccagaagatctaattaaaaaaatggacaaagaagtagtaaaaaaagaacccttagaaaaaaatcttgaactgcaaaatgagtttaatgaaagtaacaaagttctaaattttaatgaaaataaaaaagaaattttaccaaaagaaaatgtagatataatgcatgttcaagactttagacattttgtcgatatgttttttaaaaatagagaaggattgctccacactaagttgtacaatgatgtgaagatagtctcttttaaagagggagaagttactttaaatacatct

SEQ ID NO: 219668 - DNA, 250 bp, Unknown
  Bacterial polypeptide expressing nucleotide sequence isolated from the Sargasso Sea
aaaaatcaaagatggatcgttcgataaagttgacaatcctatcaaaaatgcacctcatacagtagaggaaatatcatcagatgaatggaaacactcatatacaaggcaagaggctgcttacccacattcttatcttttaaacaataaatattggagtcctgttagtcgaattgacaatgtatatggagatagaaatttattttgtgtttgtcctcccattgaagaatatgataaagcaaaaactggataa

SEQ ID NO: 219669 - DNA, 715 bp, Unknown
  Bacterial polypeptide expressing nucleotide sequence isolated from the Sargasso Sea
gcggtaatggcatctttttatgctgtgatgcatgggccagatgggttaaaagctattgcgcaaaggatccacagaaaaaccgttagattagccaagggattggaggcacatggtttcaatgtggaacaaaaacatttttttgatactattacgatagacgtcggtcctatgcaaaatgtaattctcaaatcagcaattagtgaaggaattaatcttagaaagataggcaagtctagaattggaatatcattggatgagagaaccaggccagctataattgaggcagtatggagatcatttggtataaaacgaaaagataaagacttaactacaggttatcgaattccgaaccaattatacagacttactgatttccttacacaccctatatttcatatgaacagagcagagagtgagatgacaagatacatgcgccgtcttgttgacagagatatagcccttgatagatctatgataccacttggctcatgtactatgaaactcaatgcggctgcagaaatgctccccctgtcttggcctgagttttctcaagtccacccatatgctcccaaggaacaaaccttaggctataacataatgatagataacttgtctaaaatgttgtgtgacgtgaccggatatgactctatatcgatgcagtcgaattcaggggcccagggagagtatgctggactgcttacaattgggcgatatc

SEQ ID NO: 219670 - DNA, 202 bp, Unknown
  Bacterial polypeptide expressing nucleotide sequence isolated from the Sargasso Sea
aatgcgccacatacagacttagagttggcatcagatgaatggaaacataaatattcaagagaagatgctgcatatccatctaaatttttaagatcaaataaattttggccacctgtagcaagagtagataatgtttatggtgataaaaatcttttttgtacttgtcctgatatggatgaatttaaagaagacgcagcttaat

SEQ ID NO: 219671 - DNA, 878 bp, Unknown
  Bacterial polypeptide expressing nucleotide sequence isolated from the Sargasso Sea
agctagagatgttaatggtttaacaaacttattagcccaaaatttaaaagaaaatggatttgaattgcttaatgaatctttttttgacaccttaacaatttcaacaaaagacaaaacgaaagaaatcactgaaagggctttatcaaatgaatgtaatctaagaattgtcgatgaaagtactattggagtttctttagacgagacttcttctttagacgatataaaaaaattactttcaattttcttaaataaagatgtaaagataaaacaatctgagaataattctatccctaaggatcttgttagaaaaacagacttcctaacgcacagtgttttctcagattaccaaacagaaaccgagatgttgaggtacataagaaaacttggtgataaagatattgctttagatagggcaatgatccctctcggttcttgtaccatgaaattgaatgctacttctgaaatgatccctgtcagttggcctgaattttctcaaatacatcccttttctccaaaggaacaacttcaaggttttgaaagcttactatccgatatagaaggaatgctagcagaactaacaggttactctgctatatcactccagccaaatgctggttctcaaggcgaattcgcaggcttactagccatagattcttttcataagaacaacaacgaccatgatagaaatatttgcctaattccaaaatcagctcacggaaccaaccccgcttcagctcaaatggtgggactgaaagtaatccctgtcgaatgcgatagtcaaggaaatatagatttgggagatctaaaaagtaaagcagataaacattcaaaaaactttatcttctttgatgattactttaccatctacgcatggggtt

SEQ ID NO: 219672 - DNA, 139 bp, Unknown
  Bacterial polypeptide expressing nucleotide sequence isolated from the Sargasso Sea
caaccagctttccgactggctggtgaagctgaccggttatgacgcgctctgcatgcagccaaactccggcgcgcagggcgaatacgcgggcctgctggcgatccgtcactatcccgaaagccgcaacgaaggaccccgc

SEQ ID NO: 219673 - DNA, 594 bp, Unknown
  Bacterial polypeptide expressing nucleotide sequence isolated from the Sargasso Sea
tatgattgatgagaattcatttgcaagtagacatataggtccaagaaatgatgatattgatctcatgttaaaaaagatcaattgtacatcattagatgacatgattaataaaactgttcctaaacaaatcatatttaaatctcaactgaatttaaaacctggaatgagtgagcaatttaacaaattaaatcttcaactattatcaattaagaataattttaaaaaaacttatattggattaggttatcacggaactataacaccaagtgtaatattaagaaatatttttgaaaatcctggctggtatactgcttacacgccgtatcaacctgaagtttctcaaggaagactggaaatgttaatgaattttcagcagatgattattgacttaacaggaatggaaatagcaaatgcttctcttttagatgagagtacggctgtagctgaggctatgatgttagcctatagacaatcaaagaagttaaaaaaaacattctgcattcaaaattcttgtcatcctcaaactctctcagttttaaaaactcgagcagaacctcttggaataaatattgttgtttctaaaaatactaattc

SEQ ID NO: 219674 - DNA, 319 bp, Unknown
  Bacterial polypeptide expressing nucleotide sequence isolated from the Sargasso Sea
tacagaaagtgaaaatttagaggagatcgataaattttgtaatgctcttataaaaattaaaaaagaaataaatttagtggagtcatcaaagtttgacaaaacagataacccactgaaaaatgctcctcatacttatgttgagttagcttccagtgagtggaaacatgcttattctagagaggaagcagcttttccaactgagtatgtaaaaaataataaatattgggcacccgtcgctagagtagataacgtttttggagatagaaatttagtatgttcatgtccatccatggacgaatataaagatgaagctgcgtaa

SEQ ID NO: 219675 - DNA, 502 bp, Unknown
  Bacterial polypeptide expressing nucleotide sequence isolated from the Sargasso Sea
atgccggacaggattctgattatcgaagacgagcccgccatcgccgatgcgctggtgtatgccctgagcactgagggcttcgacgtgcactggtgcggtctggcgggcgagggcatgcaatggctgcgcgacaacccggttgacctgctggtgctggacgttggcctgcccgacgaaagcggctttgaagtctgtcgccgcatccgccagttttccgccctgccgatcatgtttctgaccgcgcgcaaggaagaagtcgaccgcatcgtcgggctggagattggtgccgacgattacgtcgtcaagccgttcagcccgcgggagatttccgcccgggtgcgcgccattctgcgtcgtacccgggccgagccgctggccagcgaacagccggcgcccgccgagctgttcctgcacgacgccgagcggcggcgcattcgctaccaccggcaatggctggagctgacccgttacgagtacctgattctcagcaccctgctgcgcc

SEQ ID NO: 219676 - DNA, 325 bp, Unknown
  Bacterial polypeptide expressing nucleotide sequence isolated from the Sargasso Sea
ccctgtcccaggaactatgatgattgaaccaactgaaagcgaaaatttatttgaaataaacagattttgtgaagcacttaattcgatctattttgaaattacctcaaacaatgaatcagatagagaaatgttgaagaattcccctcacacattaaaaatgcttacttcaagtaaatggaattttgaatattcaagagaaaatgcttcttttccaaaagattacttggaaactaataaattttggccctcagttagaagagttgatgaagcatatggtgatagaaatttaatttgtagctgtccacctattgagacttatcaataa

SEQ ID NO: 219677 - DNA, 595 bp, Unknown
  Bacterial polypeptide expressing nucleotide sequence isolated from the Sargasso Sea
attgataaaggtttagaaattaaatctgaaactttctttgacactttagtggttaaaattaaggacgctaaaaaaatacatgaaaaagccaatgcaaatggcatgaatcttcgtgatatttctaatgactctgttggaattagtctagatgaaactagcactcaagatgatgtcaaagccatcattgaaatatttgatgatgaacagaataagaacagcaagatcgaacagagttggagcaaagaatttaatagagcaacagattttttaactcatgaagtatttaattctcatcattctgagactcaaatattgcgctatatcagaagtctagctgacaaagatatagctttagatagatctatgattcctcttgggtcatgcactatgaaattaaatgcaacaactgaaatgataccagtaggctggaatggttttgccaacatgcacccacatgcaccagaggatcaagctcaaggctatctagaaataataaatgatttagagaattggcttactcaaataaccggttataaagctatctctctacaacctaacgctggttcacaaggtgagtatgctggcttattagcaa

SEQ ID NO: 219678 - DNA, 883 bp, Unknown
  Bacterial polypeptide expressing nucleotide sequence isolated from the Sargasso Sea
aaaaccacaactgctagacttatagcaatgagtattaattgtaaaaacagggataaaaaaaattgtgaaccatgcggaagttgtgattcatgcaaatcaacaacttcagacagcaatcttgatgttattgagattgatgcagcatcgaatactggagttgatgacattagagagataattgataatgtaaaatataaacccgttatcggagattacaaaatatttataattgatgaagttcacatgctttcaaaaagtgcattcaatgcgctgcttaaaactttagaagaaccaccagaacatgttaagtttatttttgctacaacagaaattaaaaaagtaccaataactgttttatcgaggtgtcagaggtttgatttacatagaatagaaaataaaattttatcagatcatttattaaaaatttccaaactagaaaatattgatatcgacttagaggctatatccttaattgttagatcagcagatggatctgtaagagatggtcttagtctattagatcaagcaataactagtccaaatgaaaaagttgactctcaaactgtaataagcatgctgggattagctgatagagaaaaaatatttaatttaattgaaattattttagaaggagatgcgcttggtgcaattaacaaatataaagaattgtatgaattaggagcagatatagcaatgatatttgatgaactattaaacgtagtacatttccttgttcaaataaaaatagcaccagatttaaaagatgacatttatattcctgaatttgaaagaaataagggagctgaattgtcatcaaaaatgacattaaataatctgaatattatatggcaaattttatttaaaggttatcaagaattacaaa

SEQ ID NO: 219679 - DNA, 331 bp, Unknown
  Bacterial polypeptide expressing nucleotide sequence isolated from the Sargasso Sea
aatgagaaaattttcagatagacatattggtatttccgaagttgatgaaaaatctatgaaagattttttaggaattgaatccttagaacaattaattaaagaaactattcctgatgaaataagaacaaaagagaaattgaagcttgatgatgctatctctgaatcccaatactctaatcatatttatcagctttcacaaaaaaataaatatttcaaaaactatattggattaggttataatgaagcaatacttccacctgtaattcaaagaaatattttggaaaatcccggttggtatacagcatacacaccttatcaagccgaggttgca

SEQ ID NO: 219680 - DNA, 259 bp, Unknown
  Bacterial polypeptide expressing nucleotide sequence isolated from the Sargasso Sea
aaagagataaataaaatcaaggagggtaaatttgataaattagataaccctataaaaaacgcacctcatacagatttagaactagcatctgataagtgggaacataaatattctagagaagaagcggcgtatccatcaagttttcttaaatcaaataaattttggccacctgtcgcaagagttgataatgtttacggagataaaaatctattttgtacttgtccatcaatggatgaatttaaagaagacgcagcctaaa

SEQ ID NO: 219681 - DNA, 333 bp, Unknown
  Bacterial polypeptide expressing nucleotide sequence isolated from the Sargasso Sea
cagttgcaggcactcttatgattgagcctactgaaagtgaatcaagagaagaattagatatattctgtgatgctatgatttctattaggaaagaaatagaggagattgcaacgagtaatgaggattctgaaaataatattctaaaaaattcacctcacactgtagaagaacttagcagtgataaatggacacataattattttagagaaaaagctgcatatccactggattatttaaaagcaagaaagtattggccgcctgtaaagaggatagataacgtttacggtgataaaaacctattttgtacctgtccagatatggatgagttttaga

SEQ ID NO: 219682 - DNA, 217 bp, Unknown
  Bacterial polypeptide expressing nucleotide sequence isolated from the Sargasso Sea
gatgtcatttcctgtgcctggaactttgatgattgagccaactgaaagtgagtctaaagcagaaattgatagatttatcaatgcaatggtctcgataaggaaagaaattgaagaaattgaaaacaatgctgcagattgtgaagataatgttttaaagaatgcacctcatacggcaaaagagcttattgctgatacttcggaatcacacctactctag

SEQ ID NO: 219683 - DNA, 835 bp, Unknown
  Bacterial polypeptide expressing nucleotide sequence isolated from the Sargasso Sea
cgccggggtgacgaagcgcggcgacgtggtcctgtccggcacgctgcatcctcactacgtggcaaccaccgagacgctgctgaaatacctcgaagcggaaataaacgtcctgccgcctgataccgcaggcgatgaggatgtcgcgtcacatattggcgacgacacggcctgcgtgattgtccagtatcccgaccttttcggccgtgtgcgcgatctgcagcccattgcagatgcctgtcacgatgccggcgcgttgctggttgtcgcgatgaccgaggtcgtggcgctcggcgcgctgaaaccgcccggtgacatgggggcggatgtcgttgccgccgagggccggtcgattggcaatcctctaaatttcggtgggccttgcgtggggctgttcgccacccgggacaaatacatccgccagatgcccggccggttggtgggagaaaccgtcgatgtcgacggcaggcgtggctgggtgctgaccctgtcgacccgagaacagcacatccgccgcgaaaaagcgacgagcaacatctgcaccaactctggcttgtgtgcgctggcctttacgatacatatgtcgttgcttggcgaagacgggtttcgaaaattggcgatgctcaaccatgcgcgcaccgtccagctttacgatcgtcttgaagcggctggcctgaatgttctcaacgacagtttctttaacgaaatcgcgatcgatctcggcaagcctgccggaccggtcgtcgatgcgcttgctggtgacgggattctggctggggtgccgctatcgcggctgttgcccaacgtgccactggctgaaaatctgctactggtcgcg

SEQ ID NO: 219684 - DNA, 310 bp, Unknown
  Bacterial polypeptide expressing nucleotide sequence isolated from the Sargasso Sea
tatgatgatagaacctactgaaagtgaaaatttaaatgaattagataaattttgtgaagctcttaattcaatttatactgagattatttctgatgatgattccaagagacaaatgctcaggaattcaccccatacattaaagatgttgacgtccacagactggccatatccatatagtagagaagaggcctcattccctaaaagctatttaaaaactaataaattttggccatcagttagaagagtagatgaagcttatggtgacaggaatttaatttgtagctgccctcctatagagacttatcaataa

SEQ ID NO: 219685 - DNA, 766 bp, Unknown
  Bacterial polypeptide expressing nucleotide sequence isolated from the Sargasso Sea
actggcagccggcggcgctgatcgagcggctggcccgcgacaacaagcgattcgtcgacgtacaggagggccgggtatgagttatcaggcgccattgcgcgatatgcgcttcgtgctgcacgaactgttcgacgctgccggccactgcgagcgtctgggtaacggcctggatcgcgagctgatcgacggcgtgctggaggaggctgcggccttcgccgcaggcgaggtcgcgccgctcaatcgcaacagcgatgaggagggctgccacctggaaaatggccaggtcagcacgcccaagggctttgccgaggcctaccggcaatacgtggacaacggctgggcgagcatgaccgggccggtggaatatggcggccagggcttcccgcaactggtggccttcgccttccacgagatgctgatgggcgcctcgctgtcgttccgcgtctactccgggctgaccgagggcgccgtgctggcgctgcacaagcacggcagcgaaacgctgaggcagcagtacctggacaagctggtcagcggccagtggaccggcaccatgtgcctgaccgagccgcaggccggtaccgacctggcgctgctgcgcacccgcgccgagccgcaggccgacggtagctaccgcgtcagcggcagcaagatctttatcagcggcggcgagcaggacatctccgaaaacatcatccatctggtgctggcgcgcctgccggatgcgcctgctggcgtgaagggcatttcattgctgctggtgccg

SEQ ID NO: 219686 - DNA, 430 bp, Unknown
  Bacterial polypeptide expressing nucleotide sequence isolated from the Sargasso Sea
aatgttacataattctgaaaaagattttattaaaagacacataggtcttaaaaaaaaggacgagaaaaaaatattgaacgaaatcggttacgaatcgttggatgaattgataagcaatactgttccaaaaaatattttattaaaagattcactaagcattggagaacctaattcagaatatgaagcattaagaaagttgagacttatttccaaaaaaaaccaaatttattcaaactttattggaatgggttattatggaacttacacaccaaacgtagttgtaagaaatatatttgaaaacccaggatggtatacttcctatacaccataccagcccgaggtagcacaaggaagattagagatgctcttaaattatcaacaaatgataaccgattttactggaatggacatagccaatgcttccttatta

SEQ ID NO: 219687 - DNA, 587 bp, Unknown
  Bacterial polypeptide expressing nucleotide sequence isolated from the Sargasso Sea
gctgcttaaaactttagaagaaccaccagaacatgttaaatttatttttgccacaacagaaattaaaaaagtaccaataactgttttatcaaggtgtcagagatttgatttacatagaatagaaaataaaattttatcagatcatttattaaaaatttccaaactagaaaatatagatatagatttagatgctatttcattaattgttagatccgcagatggatctgtgagagatggtcttagtctattagatcaagcaataactaacccaaatgaaaaagttgactcacaaactgtaataagcatgttgggattagctgatagagaaaaaatatttaacttagttgaaattattttagaaggagatgcgcttggtgcaattaacaaatataaagaattgtatgaattaggagcagatatagcaatgatatttgatgaactattaaacgtagtacatttccttgttcaaatgaaaatagcaccagatttaaaagatgacatttatattcctgaatttgaaagaaataaggggactgaattgtcatcaaaaatgacattaaataatttgaatattatatggcaaattt

SEQ ID NO: 219688 - DNA, 769 bp, Unknown
  Bacterial polypeptide expressing nucleotide sequence isolated from the Sargasso Sea
atttctataaaaacaacgagtttaaaaatagccaatataaaaaagaagtctttaggtaagcaaattaattttagatattattcaaaagaaatagtttcactatcacttgatgaaacaactagtttgaatgatttatatgagattttatcctgttttgttaatattaaaaactttgattttaatttaattgacgatcaacttagtgattctttgccagcaattgcaaaaagtttaataagaaaaacttcttatttggagaacaaagtttttaatgattatggatctgaaactgactttttgagatatcttaaaaagcttgaggataaagatattgcattaaacaaatcaatgattccactagggtcatgcaccatgaaacttaatgcaacatctgagatgatacctattagttggccaatcgttaattcaatacacccatttgttcctaagcaacaatctcaaggatacaaaattattattgataaacttaaagatatgttgtgtaaaataactggttttgatgaggtatcacttcaacctaatgctggcgcacaaggtgagttagctggcttgatgaccataaaagcttttttagaggcaacaggtgaatcatcaagagatatatgcttgattcctagttcagcacatggcactaatccagcaagtgcaattttggctggaatgagagtagagattataaagtgtgatgaaaacggtaatgttgatacaaaagatttagcatataaaatccaagaatttccagatcaaa

SEQ ID NO: 219689 - DNA, 106 bp, Unknown
  Bacterial polypeptide expressing nucleotide sequence isolated from the Sargasso Sea
tataagtactggccaccagttgctagagtagataatgtttatggagataaaaaccttttctgctcttgtcctgcaatggatgagtataaagagactgcagcataaa

SEQ ID NO: 219690 - DNA, 400 bp, Unknown
  Bacterial polypeptide expressing nucleotide sequence isolated from the Sargasso Sea
tacctcgaaaaacgcctcgaggaggcaggattcgaacttgcgttcccgtcacgtcgggcgagccacgagttcatcgtcagcctaaagaacgaagcgaaggaactgcatgtcaatgctatggacttcgccaaggctttgcttgataagggcttccatgctccaacgacctattttcctctgctggtgccggagtgtttgcttatcgagcctactgagtcggaaacccgggagacggtggatcgatttgtcgacgcgctggtcgaaatcagggaagcagcacgtgtcgatgccgaacaggtaaaaggcgcgccctacacgacaccggtacggcgtctcgatgacgtcaaggccgcacgacaactggacctcgcttggcggccaggtttacccacgggctagt

SEQ ID NO: 219691 - DNA, 763 bp, Unknown
  Bacterial polypeptide expressing nucleotide sequence isolated from the Sargasso Sea
aacaagagaacagcacataaggcgagaaaaagccactagcaatatttgtacttctcaagcgctacttgctgtgatggctggcttttttgctatctatcatggtcccaatggtctgataggaattgctaatgatgtccataaaaaaacttgtaaactttttaatgctcttaagtctggcgatcatgaaattctaaataataacttttttgatactctttctattcacttaaaaggagatatttcggaaataaaaactcgtctactcgatgcaaaaataaatattaattggtttgataataatttagttagtatttcaatagatgaagccacaacctctgacgatattgctgatctagtctttgcgctcacaggaatacctatatcaaatgatcccgaagatggtgatgctagtattaataaagaaatagttagatcctctgattttatgaaacaggagcgttttaataaatatcattccgaaacagagatgatgagatatattaaaagactatctgataaggatatcgcgctcgatagatcgatgattccacttggctcttgtacaatgaaattaaactcagcttcggaaatggcgccagtaagctggccagaatttgcaaatatgcatccatattgtccgaccgatcaaacaaaaggttatcaagttcttattaaggacttaagagaaatgttatcaagtattacaggatattatgatatttcacttcaaccaaatgctggttctcaaggagagtatgcaggt

SEQ ID NO: 219692 - DNA, 934 bp, Unknown
  Bacterial polypeptide expressing nucleotide sequence isolated from the Sargasso Sea
agaaaaatatttaacttaattgaaattattttagaaggagatgcgcttagtgcattgaataggtataaagaattatatgagttaggggcagatatagcaatgatatttgatgaactattaaacgtagtacatttccttgttcaaatgaaaatagcaccagatttaaaagatgatatttatattcctgaatttgaaagaaataaggggactgaattgtcatcaaaaatgacattaaataatttgaatattatatggcaaattttattcaaaggttatcaagaattacaaaatagttctcatttatatcaacatggagaaatgattattttaagaattatttatttacatgatggcccaagtccagaagatttaattaaaaaaatggataaagaagttgttaaaaaagaaaccttagaaaaaaatcttaaagtccaaaatgaaactaatgaaagtaacaaagttctaaactttaatgaaaataaaaaagaaattttaccaaaagaaaatgtaaatataaaacatgttcaagacttcagacactttgttgatatgttttttaaaaatagagagggattactccacactaagttatacaatgatgcgctgttagtctcttttaaagagggagaagttaccctaaacacatctaaaattaatgacattggcttcaatagaactgttgcgaaattaatctctaaatggacaggaagaatatggcagatacattcatctacaagcaatcttggaaaaagtttgcatgatgaagatattattaaccaacaaaaagaaattgaaataatgaaaaatcatccagaagtaaaaaaaatattaaaagaatttcctgaaagtaaaattcacgctattacagaactaggtgaaataaatgatgatgagacagatataaatcaaacaaagatgaaaaaggagaaataat

SEQ ID NO: 219693 - DNA, 187 bp, Unknown
  Bacterial polypeptide expressing nucleotide sequence isolated from the Sargasso Sea
cgaccgcttcatcgaagcgatgatcgcgatccgcgatgaaattcgcgccgtcgaggaaggccgctcggaccgtgaagacaatccgctcaagcacgcgccgcacacggcttatatttcaaacattcatccatgctggagtgaatacaagtttattgccgacaactggaatgactttgccttttcttag

SEQ ID NO: 219694 - DNA, 766 bp, Unknown
  Bacterial polypeptide expressing nucleotide sequence isolated from the Sargasso Sea
ctaccaggtgtgagtctctctccacttgcgggcgcacaaggtgaactctccggagttttgactcttcgcgcagctttaaacgatagaggacaagggcatcgtaagaaaatgctgattcctgataccgctcatggtaccaatcccgcatctgctgctatggcagggtttgatgtgatttctatcggctcaggcccagacggaaacattgaccttgacagtattcgagcagaagcgaattcagatcttgcaggagtgatgtttacccagccaactacacttgggctttttgataaaaaagcaatagagatgtgtaaaatcgtgcatcaagctggaggtttagtttatggagatggcgcaaatatgaatgccctcctcggccgagtaaaactaggtcaccttggcttcgatgtagtgcatatgaatctccataaaactttttcaactccccatggtggtggtggccctggagcagggccaatatgtgtaaccgaagagttatctaaatttctaccaggtcctatagctacaaccaacgaactaaccaaactctatgaattaacaatgccagaaaaaacaattggtcgttcaggagcatttcaagggaattttggggtcttagtgagagcctttacatatattagtctattaggtaaccaaggaatgctagatattagtggcaatgctgtactaaatgccaattatctccttgcaaaattacgagacctttatgagctgccatacgatcgcaaggtgatgcacgaagtcg

SEQ ID NO: 219695 - DNA, 316 bp, Unknown
  Bacterial polypeptide expressing nucleotide sequence isolated from the Sargasso Sea
tatgattgagcctactgaaagtgaatcaagagaagaattagatatattctgtgatgctatgatttctattaggaaagaaatagaggaaattgaaaagggcaatgaggattctgaaaataatattctaaaaaattcacctcacactgtagaagagcttagcaatgataattgggaacataattattctagagaaaaagctgcatatccactggattacttaaaagcaagaaagtattggccgcctgtaaagaggatagacaacgtttatggtgataaaaacttattttgtacctgtccagatatggatgaattttaa

SEQ ID NO: 219696 - DNA, 145 bp, Unknown
  Bacterial polypeptide expressing nucleotide sequence isolated from the Sargasso Sea
tagagaaagcgccgcttatccttctgcgactttaaaatcttacaagtactggccacccgttgctagagtagataatgtttatggtgataaaaatcttttttgctcttgtccatcaatggatgaatataaagagtcagcagcatag

SEQ ID NO: 219697 - DNA, 880 bp, Unknown
  Bacterial polypeptide expressing nucleotide sequence isolated from the Sargasso Sea
ccaaggtttgcagattctattgcctctgattctagatttgcaaatatgcatccctcaatgcctgaagaatttacccagggttgtttaaaggtttattacgaaattggaaactatctgtgtgaaattactggtatggatgatgctagttttcaaccacctgctggtgcctctggtgaactaacaggattattaataatcaaaaaatatttagaagtaaacaatatgaatcacaagacagaaattattgttccggattctgcacatggaactaatccagcttcagcaagaatggctggatttacagttgttgaagttgagacagattcacgcggaatggtaaatattgaaaaattaaaagagattgtgaatgaaaatactgccggcttaatgttaacgaatccaaatactggaggattatttgaagaggaaatcttaacaatttctcaaataattcataatgctggaggacttttatattatgatggtgcgaaccttaatgcaatagttggagcttcaagacctggtgacatgggctttgatatagttcactcaaatttacataaaacatttgccacacctcacggaggtggtggacctggttctggacccgtagcagtaaaaagttttttaagagaatatttaccaggaccaatagcagagaataaagatcgtaaatataactggtatcacccagaaaatagtatcggaagaatgcacggatatcatggaaactttttagttactttgagagcattagtttatatgaaattactcggtaaagaaggtttagataaactcggtgcttatgctgttttgaacgctcgatacttaagttctaaggtttcacaaattattccacttgcatatgatgaaccatgta

SEQ ID NO: 219698 - DNA, 166 bp, Unknown
  Bacterial polypeptide expressing nucleotide sequence isolated from the Sargasso Sea
caccttaatgataactggaatcattcctattcaagagaaaaaagttgctttccccttaactggcaaaaacaaaataaatactggccaccggtagggagagttgataatgccttcggggatagaaacctagtctgtacttgtcctccaattgaagagtatgagtagc

SEQ ID NO: 219699 - DNA, 192 bp, Unknown
  Bacterial polypeptide expressing nucleotide sequence isolated from the Sargasso Sea
ccgccgaagtcgtcgccggcgagtgggatcgtccgtacccgcgaagcctcggcccgttcccggctgagtggacgcgcgcgcacaagttctggccgcaaaactctcgcatcgacgatgtctacggcgacagaaacctcgttgcttcgcgcgctgccgtcgacgtcgccgtcgctcaaaccgcctctggttaaa

SEQ ID NO: 219700 - DNA, 391 bp, Unknown
  Bacterial polypeptide expressing nucleotide sequence isolated from the Sargasso Sea
tatgtcaaaatttaaatctggtttagcaaattcttctaaaaacaaacaccttagcctgcaggaacttgaacagaatgaccgcttcatacaccgccacatcggaccctcggaaaatgagatttctcaaatgcttgatgcgctacaaatttcttcactggataatttgatagacaaggtagtaccggattcaatacgtatgcctagggaactagaacttccagacagtcgtaccgaaacagacgttttgaatcagcttcgtggaatggccggaagaaaccagttggcaaaatcaatgatcggaatgggctatcacaacacatttcttcctggggtaattcaacgtaacatactagaaaatcctgggtggtatactgcctatacaccttatcaa

SEQ ID NO: 219701 - DNA, 533 bp, Unknown
  Bacterial polypeptide expressing nucleotide sequence isolated from the Sargasso Sea
gataagactgatcaaatttttaaaaatgctttagatcaaaaagtaaatattagaaaagttaattcagaaatgttgtcagtatcttttgatgagaaaaaaaatgtttatagagtaaatcaactgttaaaaatttttaatgcagcagaatcaattaaaaaagaagaccctacagttagtctacccaatctaccaaaaaatttactaagaacttcaaaatatttagaacacccagtttttaattcataccattcagaaactgaaatgcttagatacttaaaaaaattagaggataaagatatcgctcttaatagaacgatgattgcattaggctcatgcaccatgaaattaaatgctactgcagaaatgatacctatttcatggagagaattagctgagcctcatccgttcgtacctgtagagcagatggaaggatatagagaattattcaccgatcttaaaaattggctaagatcaattactggtttttctggagtttcacttcagccaaatgcaggcgcccaaggtgaatatgc

SEQ ID NO: 219702 - DNA, 775 bp, Unknown
  Bacterial polypeptide expressing nucleotide sequence isolated from the Sargasso Sea
gaaagtatacccgcaaacagtagtggcagagtagacacagaaaagcttttaggccgccttgacaaaacagttgcagcaataatgataacgaatccgaatacatgcggtcttttcgaagatcaaattgttcgagtcgctgatgcagtgcacgaaatagggggatttttgtactgcgatggtgccaattttaatgcaattgttggtagagtaaaaccgggagaccttaagattgatagtatgcacctaaatttacacaaaaccttttcgacgcctcatggggggggtggacctggaagtggaccagtcgtattatcaaaagagctagcagactatgcccctctgccatttgtggttaaaactgatgatagatttgagctaatcgaaagtgctgaagatactgataagaaaccttttggccgtataaaaggtttccatggacaatttggagtcttcgtcagagcactaacctatatgctaagtatgggctcagacggtttaagacaagcctctggagatgctgttttgagtgcaaattacctattggcgcagttaaaagatgacctaagtatatcgttcgagggaccatgtatgcatgaagtattgattgatgataggtttctaaaagataccggcgtaactactttagattttgcaaaggctatgattgacgaagggtttcacccaatgacaatgtactttcccctagtggttcctggggctttactaatggaaccaaccgaaacagaaagtaaagaatctttggacaactatattg

SEQ ID NO: 219703 - DNA, 870 bp, Unknown
  Bacterial polypeptide expressing nucleotide sequence isolated from the Sargasso Sea
atcgtaccggactctgcgcacggtaccaatccggcatcagcctcgatgtgcggttatcagatcattgagatacccagtgcaccagacgggaggttggatatcgatgccctgagggcggcagtcggcgatgacacagcagcgatgatgatcacaaacccatcaaccatgggcctgttcgagacaaacattgccgaggcctcacagatcgtccatgacgcaggtgggcagatgtactacgatggtgcgaacttcaatgcaatcatcgggaagacagaccccggtaggatgggattcgatgcagtccactacaaccttcacaagaccttcagccaaccccatggtggggggggtcccggaagcgggccaatcggggtgaagggccacctttcggagttcctccccacgccactagcttcccgaagggagtctcaggacggggacccaaccggtgtcggggatggattccactacttctggcaggatgtcgggaacaacagcataggaaaggtgcagcagtggaacggaaatgcaggggcagttgtcagggcatgggcattctacaggaggtacggacgagatctagagaggatgagcgagtacgctgtcctcaactccaactacctgaggcacaagattatgaatccagattcagatgttgccgccaaaataaattgcatgcccagcgagggttccgaggccaatcttgttatgcatgagttcaccctttccatgagccctgtcaaggaagtaaatggggtgactggaaaggacgttgcaaagcgtcttctagattatgggtacatgtcacccaccctctacttcccccagatagttccggagtgcttgatgatagagccaactgagaccgag

SEQ ID NO: 219704 - DNA, 310 bp, Unknown
  Bacterial polypeptide expressing nucleotide sequence isolated from the Sargasso Sea
gcaggcaatccggccctgcggctggctctgcagacccgtgaacagcacatccgccgcgacaaggccaccagcaacatctgcacagcacaggtgcttcttgccgtgatggcgtccttttacgccgtccaccacggcccggacggtctgatggcgatcgctcgccgcatcgtgggtcagcgccgtcagcttgagctggtcctgcagagccttggcttcgtcgttccggagggcgagcgcttcgacacggtcaccgtgacttcacccctctctccagctgtgcatcaagcagttcgggaagcaggtttcaacc

SEQ ID NO: 219705 - DNA, 241 bp, Unknown
  Bacterial polypeptide expressing nucleotide sequence isolated from the Sargasso Sea
aagtctgcgaaaatttgataaagttgataatccaattaagaatgctcctcatacagatatggagcttgcatcagatgactggaaacataattattctagagaggaagcagcctatccagctaaatttttaaaatcaaataaattttggcctccggttgcacgcgtagataatgtttatggagataagaatatcttttgtacttgtccgagtatggatgaatttaaagaagacgcagcttaa

SEQ ID NO: 219706 - DNA, 288 bp, Unknown
  Bacterial polypeptide expressing nucleotide sequence isolated from the Sargasso Sea
gcccgcacgccgcgtacatggctactagcgagaagtacgcgcggcgcatgccgggccgcattattggagagacggtcgaggccaacgaaagaaaaggcagagctttaaggatggccatgcagacgcgggaacaacatattaggagagacaaggcgacgtccaatatttgtaccgcgcaagctctcctggccaacatggccgccgcgtacgcgatctaccacggtgctgactcagcgtcttcattgaaccttacgccatcgacgcgactcgtctccatctcacgatgac

SEQ ID NO: 219707 - DNA, 283 bp, Unknown
  Bacterial polypeptide expressing nucleotide sequence isolated from the Sargasso Sea
tgtgaaactttaataaaaattaaatcagaaattgatggaattaagtctggaaaatttgataaaactgacaatcctataaaaaatgctccacatacagatttagaattagcctcaaatgaatggaatcataaatattcgagagaagaagctgcctatccatcgaagtttttaagatctaataaattttggccaccagttgcaagagtggacaacgtatatggagataaaaatattttttgttcatgtcctagcatggatgaatttaaagaagacgctgcataac

SEQ ID NO: 219708 - DNA, 838 bp, Unknown
  Bacterial polypeptide expressing nucleotide sequence isolated from the Sargasso Sea
ttggcaacaattataacttcttcgggattaaaaattactgaattgctaagatttccaaatgcactacattctttttgttggtttccttggatattgttaagcataactctgattaatcaaaacaaaaatatatatttttcttatttaacaatttttatttcatcattaatgttgttaactgctggatacccttactatattgtctatggtttaatattattttctttatattttatttttgtaattttattaaattttcaacaaaaaaaagagaatcaaatcaaagaaaatctatttatttttataaagtgtataattccatcaattttggcatttattttggcttctccttggctttttaaaataaaagaattaatgaatataaccagagatagaaacttaaatgatattaatttttctttatctggtagttccaatattacagatcagttaggatcttgggtatttcctcctgtagctaatacagaaggttggtattattttggaataataattactttactaataatttttcttttttttacaaattttaaaaaggaaaatgttcaaaataaatatctttttttctttattttattatttgtaattgtatatcaattttcagcttctcaatcttctctgatatttagttttatttggacaaaaatagattttattcaaaattttcgtttttggattagatcaaatattattctagttccaataatatctgttttgatagcattttctttagaaaaatttgaaatttattataataataattattattataaaatttcaaatacaattaaacccaattattgtaataagtttattt

SEQ ID NO: 219709 - DNA, 601 bp, Unknown
  Bacterial polypeptide expressing nucleotide sequence isolated from the Sargasso Sea
gatgatagatatagataaatttgcaagtagacatattggtcctcgaaatgaagatattattgaaatgcttaaagttgttggtagtaaatcactagatgacttaatagaaaaaactgtaccagatcatattatttttaaagataagcttaaattacgtcctggaatgtctgaagaattcaataaaactaatacgcaacttttatctttaaaaaacaattttaaaaaaacttatattggaatgggttattataatacaacaactcccagtgtcattttaagaaatatatttgaaaatcctggatggtatacagcttatacaccttatcaacctgaagtaagtcaaggcagattagaaatgttaatgaatttccaacaaatgataattgacttaacaggaatggatattgctaatgcttctttattagatgaaagcactgcagctgctgaagcaatgatgatggcatttaaaattaaaaagagttcaaagtttaatttttgtgttcaaaatacatgtcatcctcaaactttatcagttttaaaaacaagagctaaacctttaggtattaaaattatttttgataaaccaaattccccgatacat

SEQ ID NO: 219710 - DNA, 1510 bp, Unknown
  Bacterial polypeptide expressing nucleotide sequence isolated from the Sargasso Sea
aatgagcacggtcttcgatttcaagggggcatctggttccggttggtcgcaaccagactcaaacttccaaaacccagatgccgtcccagagagcctcagaaggaaaagactcccaggatggccgagagccagcgaaccggaactggtaaggcactacacgctgctctcgcagaagacgttcgggatagataccggtttctacccgcttgggtcttgcacaatgaagcacaacccaagagtcaacgagaggatagtccagctacctgggatagacagaattcaccccctgcaggactcgtcgcaggtccaaggcctgctagcaatctactacgagatgcaggagatgctggcaatctgctccggaatggacgcagtcacgcttcaaccggtcgccggagcgcaaggagagttcactgcaatcaggtgcatccaggagtatcacaggtctagaggcgatggccacagggacaaggtgatcgtaccagactctgcacatggtaccaatccggcatcagcctcgatgtgcggttatcagatcattgagatacccagcgcatcggacgggaggttggacatcgatgccctgagggcggcagtcggcgatgacacggcagcaatgatgatcacaaacccatcaaccatgggtctgttcgagacgaacatagccgaggcatcacagatcgtccatgaagcaggtgggcagatgtactacgatggtgcgaacttcaatgcaataatcggaaagacagaccccggtaggatgggattcgatgcggtccattacaacctccacaagaccttcagccaacctcacgggggaggaggccctggaagcgggccaatcggggtgaaggatcatctttcggagttcctgcccacgccaatcgcatcccgtagggagtcccaggatggggatccaaacggtgtgggagatggattctactacttctggaaggatgtgggggacaacagcataggaaaggtgcagcagtggaacggaaatgcaggagcagttgtcagggcatgggcattctacaggaggtacggacgcgatctagagaggatgagcgagcacgccgtccttaactccaactacctgagacacaagatcatgaatcccgaaccagatgtcgctgccaaaatcaattgcatgcctagcgagggttcagaggccgatctggtcatgcacgaattcactctttccatgagccctgtcaaggaagtaaacggagtgactggaaaggacgttgcaaagcgtcttctcgattatggctacatgtctcccaccctctacttcccccagatagttccggagtgcttgatgatagaaccaacagagacggagtccaaggaagtactggacaaattcgctgcggacttccacgcagtgctgtcagaagatcccgaaattctgaccacagcgccccatacgactcccgtcaagagggtggacgaggtatgggccgctaggaacctcatactcaggcacccgggaaatgacgaggactag

SEQ ID NO: 219711 - DNA, 1498 bp, Unknown
  Bacterial polypeptide expressing nucleotide sequence isolated from the Sargasso Sea
gatgaaaaattcgaataaaggtttaaatcacgacgaaccaatattgtttgaaattgggggtgtggataaatctggagttgatcttaataaaccaacatttaaagaaaactttattggtgaatgttttgaggatcgagaaattggtttacctggattaagtgagcctgagtcaattagacattatgttagattatcaagaaagaactactctattgatgcaggtctttaccctttaggttcgtgtacaatgaagcataatccaagactaaatgagaaattagcaagattaaaaggattttctgaagttcatccacttcaacctttatcaacatgccagggtgctcttgaacttatagatgaaatttctatttggttaaaagaattaacaggaatgaaagctgttactatgactccaaaagctggtgctcaaggtgaactttgtggaatgcttgcaattaaaaaagcgatagaagcaagaaatgagtgtaatcgaactaaggttttagtccctgattccgctcatggtactaatcctgcaactgctgcttttttaggttttgatgttgtaacaataaaatctgataaaaatggtagattgaattttgatgattttaaagaaaatgtagataaagactttgctgcagcaatgattacaaatccaaatacatgtggtctttttgaggacgatattattgaaatagcaaattatattcatgatgcaggtggttatttgtattgtgacggagctaactttaatgccttagttggcaaagtgaggcctggtgacttgggcattgatgctatgcatatcaatttacataaaacattttctacaccccatggtggaggtggaccagggtctggtccggtagttttctctgatattttaaaggatttctgtccagccccacttttaaaaaaagatgaagaaaattattatttagtggaaaatcataatgacaaagatattgataaatcttttggtcggctttgtgtttttcatggccaaatgggaatgtttgttagagctttatcttacatgatgagtcatggttctgacggtttaagacaagtttcagaagacgcagttctgaatgcaaattatattaaatcttcattagaggatattttgacacctgcttatgaaggatattgtatgcatgaagttttatttaatgatgatttcttaagtggaacaggtgttgagacaattgattttgcaaaggctttaatagataaaggttaccatccaatgacaatatatttccctcttgttgttcatggagcattacttgttgaaccaaccgaaactgagtcaaagaattctattgatcaatttattgaaaccattagggaattagcctcaaaaactcaagatggagaagatttctttaagaaggctccaatttatactcccattagaagattggatgaaacgaaagccgcaagaaacccagttttaagatggcaaaagaatgacgtaattgcagcagagtag

SEQ ID NO: 219712 - DNA, 553 bp, Unknown
  Bacterial polypeptide expressing nucleotide sequence isolated from the Sargasso Sea
ccctcacgtaaaaaaagaaaaaaacaattatgaaacatatacaccaaaaaattcaataggaagacttaatgggtttttaggttcatttggtatagtattaagggcttatgcatacatcagaagcttaggctctcaaggattaaaagaaatatctgaaaatgcaataattaatgcaaattatattcaagaaaagctaaaatctcactataccttaacttcttctagaaattgtatgcacgaaactgttctttctgctataaagcaaaaagaaaatgggattaaagctttagatatagcaaaaaaattacttgatgaagggtttcatgctccaacaatgtacttccctctaatcgttgaagaggcactaatgattgagccaacagaaagtgaatctaaagaaacgatagatcaatttatcgaatgcatgataaagataagtgagttgtcagaaaataatcctaatgaaatacttaatgctcctataaatcttccagttgaaagattagatgaagctcttgccgcaagaaatcctgtactaacctggaaaaaataa

SEQ ID NO: 219713 - DNA, 1498 bp, Unknown
  Bacterial polypeptide expressing nucleotide sequence isolated from the Sargasso Sea
atgaaaaattccaataaaggcctaaatcatgatgaaccaatattattcgatattggagatatagataaatctggagtcgatcttaataattcaacctttaaagaaaatcttattggaggtagttttgatgaccgagaaattggtttacctggattaagtgaacctgaatcaatcagacattatgttaggttatctagaaagaattattctattgatgcgggactttatccattaggttcatgtactatgaagcataacccaagattgaatgaaaaattagctagattaaaagggttttctgaagttcatcctcttcaaccaatatcaacatgtcaaggagcccttgagcttatcgatgaaatatctaattggttaaaagaattaacaggaatggaagcagttactatgacgccaaaagctggagcgcaaggtgaactctgtggaatgttggccattaaaaaagctatagaaacaagaaatgaaaaccatagaaataaggttctagttcctgactcagcacacggaactaatccagctacagcagcttttttaggttttgatgttgtaacaattaagtctgatgaaaatggtagattgaatttcgaggatttcaaagaaaaagttgatgaaaattttgctgctgcaatgattactaatccaaatacatgtggcctttttgaagatgatattattgagatagcaaattatatacatgatgctggcggatacttgtattgtgatggagctaattttaatgctttagttggtaaagtaaggcctggggacttaggtattgatgctatgcacattaatttacataaaacattctctactccccatggtggcggaggtcctggatcagggcccgttgttttttccagtattttgaaagatttttgtccagctccacttctaaaagaagttgatgaaaaatattatcttgttgaaaataatgatgatgaagaaattgatgaatcttttggtcgactttgtgtttttcatggccaaatgggtatgtttgtaagagcattatcatacatgatgagtcatggctctgatgggttaaggcaggtatcagaagatgctgttttaaatgcaaattacattaaatcttcattagaagatattcttactccagcttatgatggttattgtatgcatgaggtattatttaatgatgattttttaagtggtaccggtgttgaaactattgattttgcaaaggccttaatagataaaggttatcacccaatgactatatatttccctcttgttgttcatggagcgttactggttgagccaacggaaactgagtcaaaaaattcactagatcagttcattggaactataagagaattagctattaaaattcatgaagacgatgaattttttaaaaaggctccaatttatacacctattagaaggctagatgaaactaaagcagcaagaaacccagttttaaggtggcaaaaaaatgaagttattgcagcagagtagt

SEQ ID NO: 219714 - DNA, 1567 bp, Unknown
  Bacterial polypeptide expressing nucleotide sequence isolated from the Sargasso Sea
ggtgcattatcactagatgaaacgactacgattactgctgagttcaatgaagtagtaacattaactggctctattcaatttgtattaagttcaaatgctggtaccactttagaaattcagacggttgctgatggattggatgccaatgataatcccgttagtcagggttcagtactttatacggtaattactggtgatcttgaggcttcagatttaagtatcagttccattggattttcatcggatggtaaaataactgatgctgctggtaatgaggttacttcaatttctgaacctggaggccaagcattggatgataatgcagctctaactgttgagactgtagcgccagtcattggctcaattacaactacctatgcaactggagtatatggtgagggagcagaaatccctgtcacattaaattttctcaatggagcagctggaagcgcagaagatgtagctttaacaggtacgggtactattaatattgctgtgggcggtgttgctaatggaggaacagctacctttagtgcagcaagtgatgcaacggttacaggtacctatacggtaggagcaagcgatacagaaggaaatatatcagttgaatctgctgctctggttggcgcgggaacccttacagatgtagctggaaatacagcagtcctcactatgccttcatctatattttctggaaaaacaatcacaattgatcggaccaaaccattccttaatactattacgactaatgattatgctacaacagatacgccaactcttagaataggggatcagatagatattcttctgaattttgataatacagtaaagcttgctaatggaaatataattgttacttttaatactacaaatactgcaggaacggcaacagtttcacctgcatctggagatcaaacattaacagcaacgtataccgtttcagagggagaatctacagctagattagatatttccagtgtagcgctagatcccgctgatgccgatgttacactaacagataatcctacctatgcagcaaataatgctacctttaaaccaaacaatattgatgaagcaagtggatttacgccagttaccgcttttactacaggtggatggaatatcgctgtggatggagtatatccttttatttctaatatgacatcagatacagatgattcaacctatggcattggatctgtaattagtgtaacagttaattttaatgaagcagttacttccaataacacactagaacttccttttggtcttacatcaaatatttcttttgcagcaattacttctgcagctactagcgttacaggaacgtatacagttgtagaaaatgatgatgttgcagcactagatgtcacaggagcagctgtgaataatgggacaataattgatgctgcatccaatgagcttcagactgccggacttacgctaccagcaagttcaaatttaaccgatgttccaaaggcaattgtgattgatggtgttcgaccggctgctccatcaattagttcggcaactccagcaggcggttccgcttcacttacaaatgcta

SEQ ID NO: 219715 - DNA, 190 bp, Unknown
  Bacterial polypeptide expressing nucleotide sequence isolated from the Sargasso Sea
gctgcggtttgaaatttcatcacttcaaatagcagcaaaagcatgggggccagccgatggattccaggtattggcttttcatggttggctcgacaacgcagcaacatttgatcaccttgcgccatttttgccggattggaggttggtttccctggacatgcccgggcatgggcattcctctcaccgtcct

SEQ ID NO: 219716 - DNA, 610 bp, Unknown
  Bacterial polypeptide expressing nucleotide sequence isolated from the Sargasso Sea
atggtaagagtaagcagagtaagaagaataataagaaagatagatccttggactgttctgaaagtcacctttgtgttaaattttgttgttgcccttactattgttttaggcttttcaattctttgggttttattaattaacgcaggagtaccacaggggttagaggacatcgcaaaaagattagctttgttagatgaaaactctacactcgtaggcaatatagaagctcttttctcgtcagtcgtatttttagcaacagtttatttgcttactcaaacagctttggcaacaataggcgcttttttctacaatttagtttccgatcttgtaggaggcatagaggttgttgtcttagaggagtcttacggagaagccccgccggtagttaaagaaaaacaaaagaaaccaaaaaaagaaaaagacaaaaacaaagagaccgtcttgatgactttatctaaaaccgtaaaaaaaattaggtctgagaggaaacaagaggaagaagttgtttatccggaaatgccgagaccagacgtaccaagagacatagaggagcaaacgctttcagactcttttaaaaatattccaaacgaagaagacgaatataaataac

SEQ ID NO: 219717 - DNA, 883 bp, Unknown
  Bacterial polypeptide expressing nucleotide sequence isolated from the Sargasso Sea
atgaggctatctaccgactacgtcccgctcgcgcgcgacgatctcgccgccggcgtcccgctcggcttcgatctcttcgatgccgacggcgccgcactgctgccggccggcacgacgctgcacgatgccgcgcagcatgctttcctgttcgaccatttccgtccggtacgacggcgcgacgacgccgaagccgcggccgagccgcgcgcgcctgacgcggtgcctcacgcgcagcggatgggactgtcgccgggcgcttcgatcggcatccggcgtcgggtcggcacgacccgcgggctgcagcgctgccggttgatcggcatcgccgcatcgggcgcgctgttcgtcgagccgcagccggcggccgcgctcgacttcgcgcgtggcgacgacatcgaggccgtggcaatcggccgtgccgcggtgtcgcgtttcggcgcgacggtcgagtcggtgcaggaagcgggcgccgcgcggttcttggtgctgtcgccgcccggcttcgtagaccggctgcgcacgcgcgcggaaccgcgcgtgccggtgcggatcgccgcctgctgcgcgggcgggtcggagggcgcggaaggcatcgggatggtgcacgacatcagcgtgagcggcctgtcgattgccgtcgaccggccgatcgccgccatcggcgaaaccttgcgcgtgcagcttccgtacgcggcgggcgaccgggtcgagctgctggcgctcgacggcacggtgcgcgccgttcatgccgatccggccgcgcccgcgctgacgctgcatcacgcggcgttcggcgaaacaggcgccgacgacctgatccgcctcaaggcgctgctgttcgaccggttgatggcgtcgccggataccggccggcggcgctgat

SEQ ID NO: 219718 - DNA, 913 bp, Unknown
  Bacterial polypeptide expressing nucleotide sequence isolated from the Sargasso Sea
ggctggacttcaagccgtaactattaagactacaaacgaaggtgatatagacttagatgacctaaaagacaaagtaaatgaaaatgtatgcgtactaatgttaacattgccatcaactttaggtctttttgaaccaaatatattagaaataacaaaggttatccatgataatggagggctggtttatgcagatggtgcgaacctaaatgcactattaggagttactaaatttggcgatcttggtattgatatttgtcactcaaatcttcataaaactttttctactccccatggaggaggagggccaggatcgggcccagtaatggtagcaaaatatttagaaagcttcttaccctaccctcatataaaaaaagaaggcaatgattacaaacaatataaacctgaaaatacagtcggaaggcttaatggtttttatgggtcttttgggatattggtaagggcctatgcttatataaggtcattgggcaaagctggtttgaaagaaatttctgaaagtgcaataataaatgcaaattatattcaggagaaactcaaaaaagactataaactaacttcttctaggtactgtatgcatgaaaccgtactatctgcttctcagcaaaaagaagacggagtaaaagctatcgatattgcaaaaaagctgttagatgagggttttcacgctccaacaatgtattttcctctaattgtagacgaagctttgatgatagagccaactgagagtgaatctaaagaaactatagatagatttattgatgctatgataatgataagcgaattatctaaaagtaatccaaaagaaattattgatgcgcctgtaaaccttcctgtagaaagattagatgaagcgcaagcagcaagaaatcctgtattgatttgggccaaaaagtga

SEQ ID NO: 219719 - DNA, 226 bp, Unknown
  Bacterial polypeptide expressing nucleotide sequence isolated from the Sargasso Sea
aatggtaaatcagataaagaagacaatccttctaaagaattctccgcatacagctaaaaaactcatttctgatgactggaaccattcttataaaagatcagaggctgcttaccctgtgagctctttagaagatggaaaatattggcctcctgtaggaagagtagataatgtttatggagatagaaaccttatgtgcagctgtccgtctatggaagactacatttaa

SEQ ID NO: 219720 - DNA, 472 bp, Unknown
  Bacterial polypeptide expressing nucleotide sequence isolated from the Sargasso Sea
tatatcgcggcagagcggattaaatgcgcatgaattcattgttgattgtagatcatttaaatccactgctaatattactaatgaagatattgctaaaagattaattgattatgggtttcatgctcctactatgtcttggcctattccgggaacactaatgattgaacctacagaaagtgaaacaaaatcagagcttgataaattttgtgatgcgatgattgcaattaaaaaagaaattgttgaaatagaattgggtaaaatgcctcaagatgacaatgttttagttaatgctcctcatacagtacacgatatttgtgatgattggaatcacccctactcaaaagaaagtgctgtttttcctacccaatggaataaagaaaataagttttggccatatgtttctagaatagataatgcttttggtgatagaaatttcttttgtgtttgtccagatattgattcttataaataa

SEQ ID NO: 219721 - DNA, 343 bp, Unknown
  Bacterial polypeptide expressing nucleotide sequence isolated from the Sargasso Sea
atgaatcaaattaaatctttcgttgatagacatattggtattagtgctgatgaccaaaaagatatgctggattttcttggttacaaagatatgcattcgtttattgaggatgtcgtacctgaaagtatattagaggatgattatttagatcttggagatggattatcagagatggcggctctgaagaagcttgataaggttgctaagcaaaacaaagtctttagatcttacattgggcagggttactatggaaccgttactcctaaggttattaaaagaaatgtatttgaaaatcctggatggtatacctcatatactccatatcaagctgagattctcaagg

SEQ ID NO: 219722 - DNA, 322 bp, Unknown
  Bacterial polypeptide expressing nucleotide sequence isolated from the Sargasso Sea
gatgatgattgaaccaacagaaagtgaatcaaaagaagagttggatcgttttgcagaagcaatgattacaattgctgatgaaattaaagaaatagaaaacgggatttatccaaaagacaataaccctctggtaaatgcaccacacactgcacaatcactaattgctgctgaatggaatcatccttacacaagagaaaaagcagcctaccctaccaaattcacttttgctaataagtattgggtacctgtttccagaatagatgatgcctttggagatagaaaccttgtttgtagttgtcctcctctagaagaatatgcttaa

SEQ ID NO: 219723 - DNA, 452 bp, Unknown
  Bacterial polypeptide expressing nucleotide sequence isolated from the Sargasso Sea
gatgagcggcttcgcgcagcgccatctggggccgtccccggcagaacagcagcagatgcttgcgcgtctgggctgcagtgacctggagcacttgctgcagcaatgcgtgcccgcggagatcctgatcgacgctgctgaggcggccaaggatctgccgcaagggtgtgaagagcgtttggctctgcgcgagctggagcagcgggcagaagccaatacggttcgccgcagcctcattggtctgggttactacgacacggcgacgccagcgttgattcagcgtcacgtctttgaaaatccctcctggtacaccgcttacaccccctatcaggcagagattgcccaaggccgccttgaggccttgctcaatttccaaaccctgatcagcgagctcactggtctgccgatcgccaacgcttccttgctggatgaggccacggccgctgcggaagcca

SEQ ID NO: 219724 - DNA, 180 bp, Unknown
  Bacterial polypeptide expressing nucleotide sequence isolated from the Sargasso Sea
gtcataccggttgagtgcgatgaagaaggaaacatcgatattgttgatttaaaacaaaaagcagagattcatgaaaaaaatctttcttctcttatgataacttatccatcaacacatggcgtttttgaaacaaatgttagtgaggtttgtgatgtcattcattccaccggtgcctttgtc

SEQ ID NO: 219725 - DNA, 490 bp, Unknown
  Bacterial polypeptide expressing nucleotide sequence isolated from the Sargasso Sea
aatgattatagcattctatatcgcggcaagagtggattaaatgcgcatgagttcattgttgattgtagatcatttaaatccactgctaatattactaatgaggatattgctaaaagattaattgattatgggtttcatgctcctactatgtcttggcctattccaggaacgctaatgattgagccaacagaaagtgaaacaaaatcagagcttgataaattttgtgatgctatgattgcaattaaaaaagaaattgttgaaatagaatcaggtaaaatgcctcaagaagacaatgttttagttaatgctcctcatactgtacacgatatttgtgatgattggaatcacccttattcaaaagaaagtgctgttttccctacccaatggaataaagaaaataagttttggccatatgtttctagaatagataatgcctttggggatagaaattttttctgtgtctgtcctgatattgactcttataaataat

SEQ ID NO: 219726 - DNA, 175 bp, Unknown
  Bacterial polypeptide expressing nucleotide sequence isolated from the Sargasso Sea
aaatggcaatgttgctcatgagtgtattattgatattagatcaattaaaagcgaaacaggtatttcagaagaagatatagctaaaagattaattgattatggatttcatgcgccaacaatgtcatggccagttgctggaacaatgatgattgaaccaacagagagtgagagttta

SEQ ID NO: 219727 - DNA, 666 bp, Unknown
  Bacterial polypeptide expressing nucleotide sequence isolated from the Sargasso Sea
gatgttaaaagcaatatcttcaaaatcaattgataatttaatcgagaatactgttccaaagaatattttaataaaagacgaacttaaaattgatgaacctatgtcagagaatgatgctctaaaaaaattgaaacttttgtcaaaaaaaaatgaagttttccgtaattttataggaatgggttactataatactgttactcccaatgttatcttaagaaatatactcgagaatcctggttggtatacttcttacactccataccaacctgaagtagcccagggaagattagaaatgttaattaatttccaacaaatgataatggatttaactggtatggatatagcaaatgcttcgttgttagatgaaggaactgctactgctgaagcagtgggtttatgtcaaagattggataaaaataattcaaaaaagatatttgtatcaagttcatgtaaccctcaaacaatagatataattaagacaagggttgagccattcaatatagagctaattattggtgatgaggaaaaaattttaaaaggtattaaagataaaattatttgtggtgttttagcttaccctggaactttaggtgaaattaaagaccctagtgagtctataagcttaattcataaaaaagaaggcaaagtaattgttgttagtgatct

SEQ ID NO: 219728 - DNA, 526 bp, Unknown
  Bacterial polypeptide expressing nucleotide sequence isolated from the Sargasso Sea
atgagatcacttataggccttggttattatgacaatcatatgcctaaagtaatccaaagacatgttcttgaaaatccaaggtggtacacgtcttatactccatatcaagcagaaattgcaccaggaagattagaagctctatttaattttcagaccattgtttgtgaactaaccggattccctgtcgccaatgcttctttgttggatgagggtactgctgcagcagaagccatggccctgagtttttccgccagaaaaaataattcttcaaaagtgtacttagtggagtcaaatgtttttgttcatacttttaatgttctacaaaccagagcaaaccctttgggaatatccttaaaacgttttactcaaagcacccttcctaatcatgatgatgtttttgggatgttgttgcaattacctggtaaaaatggacaattatatgatcccaccttcttgatatcccaagcacatagatcaaaaattatagttacggcatgtattgatcccctagcacaagttttgatta

SEQ ID NO: 219729 - DNA, 430 bp, Unknown
  Bacterial polypeptide expressing nucleotide sequence isolated from the Sargasso Sea
tagggaaataaaaaatcaatacggtgtcactgaagaagatattgcgaaaagattaatggattatggttaccatgccccaactatgtcttggccggttaatgggactatgatgatagagcctactgaaagtgaatcaaaagaagaaattgatcgtttttgtgaggctctgatttcaatcaaagatgaaattttaaaaatagccgatggtatgtaccataaaaatgacaatccattaaaaaacgcaccacacactgcaacacatatagcatctgataattggcctcatagatactcacgcaatgaagctgtgtatccagctaatcatttaaaaagccataagtattggccgccagtaggaagaattgataatgctttcggagatagaaatttaatatgcacctgtttgcccccaagtgaatatagtgattaa

SEQ ID NO: 219730 - DNA, 833 bp, Unknown
  Bacterial polypeptide expressing nucleotide sequence isolated from the Sargasso Sea
ggcattccaatgggttatggcggtccccatgctgcctttatagcaacgaaggatgaatacaagaggcaattgccgggtcgtatcatcggtctttcaaaagataaatataataaacccgcgtttcgtatggcgctgcagactcgagaacagcacataagacgcgatagagcgacatctaatatttgtacagcacaagctttattagccaatttagctgtaatgtatgctatttatcacgggccacaagggttgcttgccattgccaataaaattcatcaattgacgtcgtcttttcataagaaggcattatcaatgaatttgccaatcagaaaaacgattcattttgatactgtagtaattgatgtcgataaggaatctaaaaataaaatcaaacaaaaatgtgaactaaattcattcaatctgaatttttttgatacagctgttggaatatccattgatcaaacgacagaaacaaatgacttggaattgattctaactatttttcaagatgtattaaagaatgatagttctaaagttacaatgcctctcattgaatctgatattgaggctaaatatttaagaaataacgctatattaacacaagaaatatttaatagttatcactctgagacatctttaatgcgatacatgaaaaagctggaggataaagatgtaggacttactaaaacgatggttccattaggttcttgtacgatgaaactcaattctgcggcatcgatgatgccattatcatggactgaatttgctaatgtacatcccttttgtcctcaagatcaagtaaagggatacctagaaattattcataatatgga

SEQ ID NO: 219731 - DNA, 366 bp, Unknown
  Bacterial polypeptide expressing nucleotide sequence isolated from the Sargasso Sea
aatgttacataattctcaaaaagattttttaaaaagacacattggaccttcagatgaagatcaaaataaaatgcttaaggaacttaattacaaatcactagatgatttaatcaagagcacagttccagaaaagatccaattgaaagatgaattaaatattggcgagtctaattcagaatatgaagcattaagaaaattaaaagcgatttcgaaaaaaaatcaaatttactctaactttatagggatgggttattatggtacctatacgccatatgtaattctaagaaatattttagaaaatccaggctggtacacttcttatacaccttatcaacccgaggtagctcaaggaagattagaaatgct

SEQ ID NO: 219732 - DNA, 484 bp, Unknown
  Bacterial polypeptide expressing nucleotide sequence isolated from the Sargasso Sea
aatgattgatataaattcatttgctagtcgtcatattggaccaagaaacattgatattaaagaaatgttaaagctagttggttttaaatctctagatgaattaatatcgaatactgtacctgataaaattttatttaaagataaattaaatcttcgcccaggcatgtctgaagattttaataaaactaatatgcaacttttgtctcttaaaaataattttaagaaaacatatattggaatgggatattataatacaataaccccgagtgtaattttaagaaatattttagaaaatcccggatggtatacagcctatacaccttatcaacctgaagtttctcaaggaagacttgaaatgcttatgaactttcagcaaatgattattgatttaacaggtatggaaatcgctaatgcctctttacttgatgaaagtactgcggctgatgaggcaatgatgatggcttttaaaattaaaaaaaattaa

SEQ ID NO: 219733 - DNA, 985 bp, Unknown
  Bacterial polypeptide expressing nucleotide sequence isolated from the Sargasso Sea
ttttatgctatttatcatggaccctctggattaacgcaaattgctaagagattagttgagttgagaataaatttagaatcaagtttagctgctttaggttttgatattcctgatgggattagatttgatagtgttgatgtttattctgagcactctcagaggatccataatgaagctttaaaaaatggctataacttaagaattttgccgttgggatcaactattgaaaattcaactggctttgggatctctttagatgagcttagtaatgaaaaagaaataaaagatattttgactttcatagcaaaccttctagaaaaagaagaagatttagagcataaaatatttgagaaagaatttcatcttgaaagtttagctttgagatccagtgcatggatgcagcaagatatattcacaaattaccaaagtgaaactgaattaatgagatatatattccgacttgcagaaaaagatttttctttggtagatgggatgatgccattgggaagctgtaccatgaagttaaattctgcagcagagttaaatccagtctcttgggctaatttatcttccatgcatcctttttccccaccagatcaaaccaagggctattcaaaaataatatctgacctagaaaaatggataagtgagattgttggtttaaaatcagtttcttttcaaccaaatgcaggctcgcaaggagagtttgcaggtttattggcaattaattcttattttgaatcaaaaggtgaactattaagaaaaaaatgtttaattccaaaaagtgctcatggaacaaatcctgctagtgcagtcatggcaggttttgaagttttaactgttgaatgtgatgacgaaggaaatattgattatcaagatttgtcaatcaaggtcaagaaatttgatacccatataggggctcttatgttgacttatccctctactcatggagtttttgaattacaaatcagaaagatatgtgatt

SEQ ID NO: 219734 - DNA, 289 bp, Unknown
  Bacterial polypeptide expressing nucleotide sequence isolated from the Sargasso Sea
tagattttgtgatactttaataaagattaaacaagagatagatttagttaaatctggcgagtttgataaaatagataatccaattaagaacgccccccatactgatactgagcttgcctctgataattggacccataaatactctagagaacaagctgcttatccagctaaatttctgcgagtaaataaattttggcctcctgtagcaagagtagacaatgtatatggagataaaaatattttttgcacttgtccaagtatggatgaatttaaagaagatgcagcttaa

SEQ ID NO: 219735 - DNA, 851 bp, Unknown
  Bacterial polypeptide expressing nucleotide sequence isolated from the Sargasso Sea
agctttttttgcatgtaaagaagaccataaaagatatattcctggaagaattattggtgtttctatggatagtgaaggaaatccagcacttagaatggctcttcagactagagaacaacacataaaaagagcaaaagcaacatcaaacatatgtactgcacaggcacttttagcggttatggcaagtatgtacgctgtttttcacggacctgaaggtcttaaatttatcgccaaagaaataagaaacaaagcgcatcaacttagaactgcattaattaaagcgggagtaagcacaattaatgggcaacattttgatactgtttgcataaatgaaaaagtagatgttatcaaaaagtatactgaagatgctgaaataaacataggatttattgacgataaagctatcatttctattgatgaaacaacttcttgggaaatgcttgaaaagctatctagtgttttaagtaaagcacttaacgtcactatagaaatccaaaaagaggaaactgatctttctaataacgatagaactgacgattttttatctcaaaatgttttcaattcttatcattctgaaacagagatgatgagatacatcaaaagattggaaaataaagatttatcattaacacatgccatgatttcattagggtcgtgcacaatgaagttgaatgctgctacggaaatggagcccattacttggcctgaatttgctaatcttcatccttttactcctacaaatcaaacgcaaggttaccagcaaattttcaaagaacttgaaaaggacttatgcaacataactgggtttagtggaatgtcacttcaaccaaatagtggtgctcagggagaat

SEQ ID NO: 219736 - DNA, 472 bp, Unknown
  Bacterial polypeptide expressing nucleotide sequence isolated from the Sargasso Sea
attgttgattttacaggtatggatattgctaatgcttctttattagatgagggtacagcagcagcagaggctatgggacttagtcatagattaaataaaaaagatagtaatttagtttttgtatctgaagattgtcatccccaaacaataaatgtaattcaaacaagagctgaaccaatgggtttaaaagttttagttggtaaagaagacgaagttttagatggattaaaagaagatttagtctgcggaattttgcaatatcctggaactttaggagatattaaagacccaggtgaagcaattagtaaaattcataaaaaaaatggaaaggctgtgttagcttgtgatctattagcgttagcaaaattgaaaacaccaagagaacttggagctgatatagcagttggaagctctcaacgatttggtattccaatgggatatggaggtccaccatgcagcctttttgcaacga

SEQ ID NO: 219737 - DNA, 151 bp, Unknown
  Bacterial polypeptide expressing nucleotide sequence isolated from the Sargasso Sea
ccagggtcgcctcgaggcgctcctgaacttccagcagatggtcgccgacctcaccggcctcgcgatctcgaacgcgtcgctgctcgacgaagccaccgccgccgccgaagcgatgacgctgctgcagcgcaccggcaagccgacgtcgaac

SEQ ID NO: 219738 - DNA, 460 bp, Unknown
  Bacterial polypeptide expressing nucleotide sequence isolated from the Sargasso Sea
tatagtggagaaaaaggaagatctgctcatgaatttataattgattgtagagaatttaaaaaatataatattgaagttgtagatattgcaaagagacttatagattatgggtttcatgctccaactgtttcattccctgtcccaggaactatgatgattgaaccaactgaaagcgaaaatttaaacgaaataaatagattttgtgaagcacttaattcaatctattttgagattacctcaaataatgaatctgatagagagatgttaaagaattcccctcatactctaaaaatgctaacttcaagcgaatggaattatgaatattctagagaagatgcgtctttcccaaaggtttacttgaaaactaataaattttggccctcagtaagacgggttgatgaagcatacggagatagaaatttaatttgtagctgcccacctattgagacttatcaataat

SEQ ID NO: 219739 - DNA, 550 bp, Unknown
  Bacterial polypeptide expressing nucleotide sequence isolated from the Sargasso Sea
taataatatccatcataatgcaagatatttaaaaaaatctttagagattcttggatttgaaattatttctaaaaattactttgatacattattaataaaaacaccagaagctaaatattgggttaataaatcaattgagcaaggtattaattttaggttagtggatgatgaaacttttactttgtctttagatgaaactaccacattgcaagaagttgataatctagtaaatttttttaatgaacaaaatattgatatttttgcagaagaagttgaaaatagaattgacgtttcatgttttgaaaatggcttaatcagagaagacaaaattcttactcatcctgttttcaatatttaccattcagaaactgaaatgatgagatatttaaaaaaactcgaaaataaagatgttgctttaaataggtcaatgataccacttggatcatgtactatgaaactaaatgctgcttctgaaatgttacctataactcttcctggtttttctaatgcccatcccttttctagagactcatcaaagacatggatataa

SEQ ID NO: 219740 - DNA, 348 bp, Unknown
  Bacterial polypeptide expressing nucleotide sequence isolated from the Sargasso Sea
cagttccaggtactatgatgatagaaccaactgagagtgaaagcttgaaagaactagatagattttgtgataccttaataaaaattaagtctgaaattgacaaaattaaagcaggaaagtttgataaaattgataatcctataaagaatgcaccacatacagatctagaattagcttcaaatgaatgggcacataaatatactagagaagatgcagcttatccatcagagtttttaaaatttaataaattttggccacctgttgctagagtagacaatgtatatggtgacaaaaatcttttttgttcttgtccaagcatggatgaatttaaagaagatgctgcttaat

SEQ ID NO: 219741 - DNA, 863 bp, Unknown
  Bacterial polypeptide expressing nucleotide sequence isolated from the Sargasso Sea
tagggaacaacatataagaagagacaaagctacaagtaatatttgtactgcccaagctttgctagcaattgtttcagctgcatatgctatttaccacggaccagatggaataaaaactattgctgagagagtttctcaattagctaaaaattttgcagataaattgaaacaatctggatatgaaatacattcagatcatttctttgatacagttacaattgtaacaaaagataaaactgatcaaatttataaaaatgccttggatcaaaaggtaaacattagaagagtaaattctgaaatgctagcagtttcttttgatgaaaagaaaaatgtttatagagtaaatcaattactaaaaatttttaatgctgcagaatcaattaaaaaagaagatccaacagtaagtttaccaaatcttccaaaaaatttgttaagaacttcaaaatatttagagcacccagtttttaattcttatcattcagaaactgagatgcttagatatttaaaaaagttagaagataaagatattgctttaaatagaactatgattgcacttggttcatgtactatgaaattaaacgctactgcagaaatgatacctatttcgtggagagaattagcagagcctcatccatttgtgcctattgagcagatggaagggtatagagatttattcactgatcttaaaaattggctaagatcaattacaggcttttctggagtttcacttcaaccaaatgcaggtgctcaaggggaatatgcaggattaatggttattagaaaatatcatttagatagaggcgaagaaaacaggaatatatgtttaatacctagctctgcacatggaactaatcctgctagtg

SEQ ID NO: 219742 - DNA, 918 bp, Unknown
  Bacterial polypeptide expressing nucleotide sequence isolated from the Sargasso Sea
gagcacatatcagggagagaaaaggcgactagtaatatttgtacggctcaatctttgttagcaataatttcttccttttatgcaatttatcatggctcttctggcttgacaaaaatggctaagaggctcgtgatattaagatctcatttagagtcttgtctacgcgaactaggatttactattcctcttggaaataggttcgatagtgttgatatttattctgaagaatccgaaaagattcataaagaagctttaaaaaatggatttaactttagaattctacctctaggatcaaggattgaggattctactggatttggaatttctctcgatgagcttactgatgaaaatgaaatctataagattttaaatttcatagcaaatgccattgaagaaaaacgagatttcaaagaaagtgcacttaataagttttttcagcttgagggtattcctttaagaaatcaagaatggatgcaacaaaatatatttaaaaactatcagagtgagactgatttaatgagatatatttttaaactttctgagaaagatttttctctggttgatggaatgatacctttaggaagttgtactatgaaattgaatgctgcagcagaactaagtccaatttcatgggataatttatcttcaatccatccgtttgcaccttctagtcaaactaagggttatttgaaaataataaatgatcttgagaaatggataagtgaacttgttggcttgaagtcagtttcatttcaacctaatgctggctctcaaggcgagtttgcgggtttattggctataaattcttattttgcttcaaaaggtgatttattaagaaaaaaatgcttaattcctcaaagtgctcatggaacaaatcctgcgagtgctgttatggcaggttttgatgtcgtaactata

SEQ ID NO: 219743 - DNA, 946 bp, Unknown
  Bacterial polypeptide expressing nucleotide sequence isolated from the Sargasso Sea
agatcaatgccaggaagaatagttggtgtttcagtcgataggcatggcaacaaagcttacagactggctctacaaacaagagagcaacatataagaagagataaagctacaagtaatatttgtactgcccaggctctgctcgcaatagtttcagctgcatatgttgtatatcatggtccaaaaggaattaaaaaaatagcagacactgtttcacaacttgcaaaaaattttgcagataaaataaaacaatctggctatgagctttactcagattatttttttgatactgttactgtaaaaacactagacaaaacagataaaatttataaaaacgcacttgatcaacatgtaaacataagaaaagttaactctgaaatgttagctgtttcatttgatgaaagaaaaaatctttacagagctaatcaggtgttaaaaatttttaactgttcagaaacaattaaggaaacgactaaggaaacgacaaacaaaagcttatctaatttaccaaaaactttattaagaacctcaacatatttagatcatccagtttttaacagttaccattccgaaaccgcaatgcttagatatttaaaaaaattagaagactctgatatcgcattaaatcggtcaatgatagctttaggctcatgtacgatgaaattaaattcagtttccgaaatgatacctgtaacttggaaagagttttcacatccacatccatattcccccatcgaacaaatggatggttatagagaattatttactgatctaaaaaattggctaagatcaataacaggtttttctggtgtttctttgcaaccaaatgctggagcacaaggagaatttgctggcttaatggttattagaaagtttcatgaaaaaaatggtcaaagaaatagaaatgtttgcttaataccgagctctgcgcatgaactaatccagcaag

SEQ ID NO: 219744 - DNA, 724 bp, Unknown
  Bacterial polypeptide expressing nucleotide sequence isolated from the Sargasso Sea
gcaactaaagatgaatataaaagatctatgccaggaagaattgtaggtgtctctgttgatagacacggaaacaaagcatatagattatcattacaaacaagggaacagcatataagaagagacaaagctacaagtaatatttgtactgcccaagctttattagcaattgtgtcagcagcatatgctatttatcacggtccagaaggcatcaaaactattgccgaaagagtttctcaattagctaaaaattttgctgataaattgaagcaatcaggatatgaaatttattcagatcatttctttgatactgttacaattgtaactaaggacaaaactgatcaaatctataaaaatgctttagaccaaaaagtaaatatcagaaaagtaaattctgaaatgctagcagtttctttcgacgaaaagaaaaatgtttatagggtaaatcagttattaaaaatttttaatgcagcagaatcaatcaaaaaagaagatccaacagtaagtttacctaatttaccaaaaaatttattaagaacttcaaaatatttagaacaccctgtttttaatttgtatcattctgaaactgagatgcttaggtatttaaaaaaattagaagataaagatatagctcttaatagaaccatgattgcacttggttcatgtactatgaaattaaatgcaactgcagaaaaaataccaatttcatggagagaattggcagagc

SEQ ID NO: 219745 - DNA, 654 bp, Unknown
  Bacterial polypeptide expressing nucleotide sequence isolated from the Sargasso Sea
agctactagtaatatttgtactgcccaagctctgttagccattgtttctgcagcttatgctatttttcatggcccaaacggtataagaaaaatttcagagagggtttcacaacttgctaacaattttgcagataagataaaaaaatctggatatgaaatatattctaacaacttttttgacacagtagtaataaaaacaaaagataatacagaaaaaatatttaaaaatgccttagatcaaaaggtaaatattagaaaagttaattctgaaatgttggcagtttctttcgatgaaaagaaaaatgtttatagagccaatcagctattaaagatatttaattgcacagaatccattaaagacaatcctactgaaagtttgccaaatttaccaaaaaatcttttaagaacatcaaagtatttagaacatcctgtttttaatagttatcattcagaaactgaaatgcttagatatttaaaaaaactagaggataaagatattgcgcttaatcgttcaatgattgcgcttggatcgtgcactatgaaattaaatgcagttgcagagatgatacctatatcttggagagaatttgctgaaccgcatccatttgttccagttgaacaaatggaaggttttaaaaaactttttactgactt

SEQ ID NO: 219746 - DNA, 724 bp, Unknown
  Bacterial polypeptide expressing nucleotide sequence isolated from the Sargasso Sea
atgtataaagaaaatttttctgaaagacatattggccctaactcttcagagcttaaaaaaattttaaaaacaattggagttaagagtattaatcatcttctagacgaaactattcctgactctataaaaattaataaaaggctcaatttgcctgattcaataactgaacatgaatttcttaaagaaataaaatcattatcctataaaaacaaaaaatttaaaacttatattggcttaggctatcatgatacatttacaccatctgtaattcaaagaaatattttagaaaacccaggatggtatacagcatataccccataccaagcagaagtagctcaaggcagacttgaagctttattaaattttcaaacaatggtatgtgatttaacaaaaatggagattgcaaatgcttcattattagatgaaagtacttctgcagcagaggcaatgactttactgtataataatagaacagctcaacagaaaaatgataatactcttagtttctttattgatgaaaatattctacctcaaacaaaatcagttcttgagacaagagcaaaacctattggtattaaattagaagttggtgatatctctaagattaaaactgataaatattttggttgtatcatccaatatcctggaaaaaatggaaatgtaaaaaaccttaatcctgttttaaaaaaacttcaaaaaaatgacataaaggttattatagcag

SEQ ID NO: 219747 - DNA, 412 bp, Unknown
  Bacterial polypeptide expressing nucleotide sequence isolated from the Sargasso Sea
tatgacatccaaatttgggtctaatttgtttatagataggcatcttgggttaggagataatgatgaaagaattatgctgaacaagctcggttttaataatattgatcaatttataaatcaagttattcctgatgatattcagcttaaagataaatcttcagaaatattgccccaaggttgttcagaaattgaggctttaaacgaattagaagagattgcgaataaaaatactaaaatgagatcacttataggccttggttattatgacaatcatatgcctaaagtaatccaaagacatgttcttgaaaatccaaggtggtacacggcttatactccatatcaagcagaaattgcacaaggaagattagaagctctattttattttcagactattgtttgtgaactgacagga

SEQ ID NO: 219748 - DNA, 877 bp, Unknown
  Bacterial polypeptide expressing nucleotide sequence isolated from the Sargasso Sea
ggtccaaaaggaattaaaaaaatagcagacactgtttcacagctagctagaaattttgcagataaattaaaacaatctggttacgaactttactcagattatttttttgatactgttacagtaaaaacactggataaaacagataaaatttacaaaaatgcattagatcaacatgtaaacattagaaaagttaattctgagatgttggcagtttcatttgatgaaagaaaaaatctttatagagctaatcaggtattaaaaatttttaattgttcagaaacaattaaagaaacaactaaagaaatcacaaaccgaagtttatctaatcttccaaaaactttattaagaacctcaacatatttagatcatccagtttttaatagttatcactctgaaaccgcaatgcttagatatttaaaaaaattagaagactctgatatcgcattgaataggtcaatgatagctttaggttcatgtacgatgaaattaaattcagtttccgaaatgataccagttacttggaaagaattttcacatccgcatccatattcccccattgaacaaatggacggttatagagagttattcactgatttaaaaaattggctaagatcaataacaggtttttccggtgtttctttgcaaccaaatgctggagcccaaggagaatttgctggcttaatggttattagaaagtttcatgaaaaaaatggtcaaaaaaagagaaatgtttgtttaataccgagctccgcacacggaactaatccagcaagcgctcaaatggctggcatgaaagtagtagttgttaattgtgatgcgttcggaaatgttgattatgaagatttaaagaaaaaggccgaagaatactcagatactt

SEQ ID NO: 219749 - DNA, 424 bp, Unknown
  Bacterial polypeptide expressing nucleotide sequence isolated from the Sargasso Sea
ttaaaagaagcgtcaggcattactgaaatggacgtagctaagcgcttgcaagattacggcttccactcacccactatgtcgttcccagttgcgggcacgctaatgattgagccaactgagtctgagtcaaaaggcgagatagaccgctttatcgaagcaatggtgtcaatcaaaggcgaaattgataaagtaatctctggcgaatggtcaatcgaaaacaacccacttgtgtttgcaccgcatacacaagctgacgtacttggcaacgaatgggaccgcgcgtacgaccgtttttacgctgcattcccagtgccttcggtagctaaagacaagttctggccaactgttacacgtatagatgacgtatacggcgaccgtaatttagtatgttcatgcccagcggtagagacatatagagattaat

SEQ ID NO: 219750 - DNA, 382 bp, Unknown
  Bacterial polypeptide expressing nucleotide sequence isolated from the Sargasso Sea
tatgagtaaatataaagcggattgttttgccagaaggcacattggaccaggtgagcgtgatgttgcaagcatgactaaaaaacttggtttttcatctctggatagccttgcaaaggctgttgttccagaagagatttatcaacaaagacaaagcctttctttcagttcagcagatgagcttactgcattaaacagggctaaaaatattgcatcagagaatcaattatttaataattttattggaatggggtattcaggaacgatagtacctgctgtgattcaaagaaacttatttgaaaatccaggttggtatactcagtatactccttatcaacctgagatttctcaaggtcggctcgaagccctttttaattttcaaact

SEQ ID NO: 219751 - DNA, 628 bp, Unknown
  Bacterial polypeptide expressing nucleotide sequence isolated from the Sargasso Sea
tatgattgaagatacttctaaagaatttattcgaagacatattggaccaacaagtcatgaagaaaatactatggtccaaaaagttggcgctcaatctctcgaggacttaatagaaaaaactgttcctcaaaaaatacttataaaagaaaacttgaaaattgatgaaccaatgtcagaaaatgatgctttgaagaaattaaaattactttctaagagaaacgaaatttatcgaaattttattggaatgggttattacaatacaattactcctaacgtaatactaagaaatatattagaaaatcctggttggtatacttcttacacgccctaccagccagaggtagcacaaggtcgattagaaatgttactaaatttccaacaagtcattatggatttgaccggaatggatatcgcaaatgcttcattattggatgaagggacggctgctgcagaagcagtgggtctttgtcaaagactagataaaggtgattcaaaaaaaatatttgtatcaagttcttgtaacccacaaacaatagatattatcaaaacaagagttgaacctttcgggatagaaattatcgttggtagtgaagataaagaactaaataaaatcgaagataaaataatt

SEQ ID NO: 219752 - DNA, 414 bp, Unknown
  Bacterial polypeptide expressing nucleotide sequence isolated from the Sargasso Sea
tatgatcgaagatacttcaaaagaatttattcaaagacatattggtccttctgttaaagatcaagacagcatggtaaaaaaaattggggctaaatctcttaatgatttaatagataaaactgttcctcaaaatatccttatcaaagataatttaaaaatcgatcaacccatgtcagaaaatgaagctttaaaaaaattaaaattactttctcatagaaatgaaatttatagaaattttattggcatgggttattataatacaatcacacccaatgttattttaagaaatatactagaaaatccaggctggtatacttcttacacgccttaccagccagaagttgctcaaggtagattagaaatgttactaaattttcaacaggttattatggatttaacaggaatggatattgc

SEQ ID NO: 219753 - DNA, 350 bp, Unknown
  Bacterial polypeptide expressing nucleotide sequence isolated from the Sargasso Sea
aatgattgacgataattcaaaagaattcataaaaagacatattggcccttcagatgatgagcagtcaaaaatgcttcaacacgtaggatatagttcacttgaggatttaatgaaaaacactgttccagaaaaaattttattgaaagatgatctcaatatagatgagccgctatctgaaaatgatgctttaaaaaaattaaaatctatatctaaaaaaaacaaaatttttaaaaactttattggtatggggtactataattctattactccaaacgtaatcttaagaaatatcttagaaaacccaggctggtatacctcttacacaccctaccaacctgaagtagcccaaa

SEQ ID NO: 219754 - DNA, 532 bp, Unknown
  Bacterial polypeptide expressing nucleotide sequence isolated from the Sargasso Sea
agactcaccgaaattgccattgttaatgctaactatatgaagacaaaacttgaaaaaaactttaaaattctatatagtggagaaaatggaagatctgctcatgaatttataattgactgtagagaatttaaaaaatataatattgaagtagtagatattgcaaagagattgatagactatgggtttcatgctccaactgtttcattccctgttcctggaactatgatgattgaaccaactgaaagtgaaaatttaaatgagataaacagattttgtgaggcacttaattcgatctattttgagattacctcaaataatgaatcagatagagaaatgttgaagaattctcctcacactctaaaaatgctaacttcaagcgaatggaattatgaatattctagagaggatgcgtctttcccaaaagattacttgaaaactaataaattttggccctcagtaagacgggttgatgaagcatacggtgatagaaatttaatttgtagctgcctacctattgagacttatcaataat

SEQ ID NO: 219755 - DNA, 526 bp, Unknown
  Bacterial polypeptide expressing nucleotide sequence isolated from the Sargasso Sea
aatgatagatattaattcttttcttagtagacatattggtcctcgtgaaaatgatataaaaatcatgcttgatgcaattaattgcaaatctttagatgaattaattgataaaactgtaccagagcatattatttttaaaaataaattaaaattaaaacctggaatgtctgaaaattttaataaaataaatcttcaattattatccttaaaaaatacctttaaaaaaacatatattggacttggatattacaacactgtaacaccaagtgtaattttaagaaatatacttgaaaatccaggatggtatactgcatataccccatatcaaccagaggtttcccaaggtagactagaaatgttaatgaactttcaacaaatggttattgatttaacaggaatggatattgcaaatgcatctttgcttgatgaaagtactgctgttgctgaagcaatgatgatgtcttataaaataaaaaaagataataaaaaaactatttgtatccaaaataaatgtcatccacaaact

SEQ ID NO: 219756 - DNA, 391 bp, Unknown
  Bacterial polypeptide expressing nucleotide sequence isolated from the Sargasso Sea
agactaattgattttggttatcatgctccaactatgtcgtggcctgttgcaggtacgattatgattgagccaaccgaaagtgaaaatttagaggagatcgataaattttgtaatgcattgataaaaataaaaaaagaaattgatttagtggagtcatcaaaatttgataaaatagacaatccattaaaaaatgctcctcatacttatgttgaattagcttccagtgagtggaaacacgcttactcaagagaggaagccgctttcccaactgagtatgtaaaaaataataaatactgggcaccagtagcaagagtagataacgttttcggagatagaaatttagtgtgttcatgtccctcaatggatgaatataaagatgaagctgcttaat

SEQ ID NO: 219757 - DNA, 304 bp, Unknown
  Bacterial polypeptide expressing nucleotide sequence isolated from the Sargasso Sea
ttagaggaaatagatagattttgtaatgctttgttaagcattaaagatgaaatagataaaatagagacagggaaatttgaaaaaaaggataatccaataattaatgcacctcatacatatttagaattatcttcagatgaatggaagcattcatattcaagagctgaagctgcttttcctaaaacctatttaaaagagtacaaatattgggcccctgtggctagagtggacaatgtttatggagatagaaatcttgtatgttcttgtccatctatggatgagtataaagatgcagctgcttaaa

SEQ ID NO: 219758 - DNA, 388 bp, Unknown
  Bacterial polypeptide expressing nucleotide sequence isolated from the Sargasso Sea
atggaatacggtcattttaaggaagaaaatttttcaaaaaggcatattggtcttaacgaattagataaaaggaagcttttaaaaaaacttggttatggaacgatggataagttcattaatgatgttgtgcctcaaaatataaaaagaagtgcacctatgaaaattgaaaaagagctttcagaaaaacagcttctttcaaaaatcaaagagtatgcatccttaaacaaaactatgatctcaatgattgggcaaggtttttatagcacgcatacaccttcagtacttttaaggaatattctagaaaacccatcttggtatactgcttacacaccttatcagcccgaaattagtcaaggcaggcttgaagcattattaaattttcaaacaa

SEQ ID NO: 219759 - DNA, 758 bp, Unknown
  Bacterial polypeptide expressing nucleotide sequence isolated from the Sargasso Sea
tgagagagtttcacaattagcaaaaaactttgctgataaaataaaacaatctggatatgaattatattcagattatttctttgatactgtaactataatcactaaagagaagaccgatcagatttttaaaaatgctttagatcaaaaagtaaatataagaaaagtaaattcagaaatgcttgccatttcttttgatgaaaaaaaaaatgtttatagagttaatcaattattaaaaatttttaatgcagcggagtctattaaaaaagaagatcctacagtaagcttacctaacctaccaaaaaatttattgagaacttcaaaatacttagaacatcctgttttcaattcttatcactccgaaacagaaatgcttagatatcttaaaaagttagaggataaagatatcgcacttaatagaactatgattgcattagggtcatgtaccatgaagttaaatgctactgcagaaatgatccctatttcatggagagaattagctgagccccatccattcgttcccgttgagcaaatggaaggatatagagctttgttcactgatcttaaaaattggctaagatcaattactggtttttctggtgtctcacttcagcccaatgcaggggctcaaggagaatatgctggattaatgttgattagaaaataccatttagatagaggtgaacaaaacagaaatatatgtttaataccaagctcagcacatgggactaatccagcaagtgcacagatggttggaatga

SEQ ID NO: 219760 - DNA, 803 bp, Unknown
  Bacterial polypeptide expressing nucleotide sequence isolated from the Sargasso Sea
tcttgcaaaaatatttgctgatggtttgaaatcaggcggctaccaactgcattcagaaaattactttgatacagttactattagaactaatgaaaaaacagatactataaataacaaagctttatctgagaaaattaatttaaggattgtagacaaaaataccttatcagtagcatttgacgaagtaaaaagagttgaccatgtaaacactttattaaaaatatttggagttaaaaaaacgtttaataatactgatacagttgaattaaataatttaccacaaaatcttttaagaacatctaaataccttactcatcctatttttaacaaatatcattcagaaactgaaatgcttcgttatttaaaaaaattggaagattgcgatattgctttgaatagatctatgattgcacttggctcatgtaccatgaagctaaatgctacagccgagctaatccctgtgacctggaaagaattctctcagccacacccgtttgtgccccaagatcaaatgaagggatataaagttttatttaatgatttagttaatgatttaaaggaaatcacaggttttgatgcagtttctcttcaaccaaattccggtgctcaaggtgaatattcaggattaatgacaatacgtaagtttcatttaaataataatcaaaaaaatagaaacgtgtgtttaataccagagtcagcacacggcacaaatcctgcaagtgcacaaatgtgcggaatgaaagtagtagttattaattgtgacgatgaaagtaatgttgatctaaaagatttaaaagaaaaaa

SEQ ID NO: 219761 - DNA, 265 bp, Unknown
  Bacterial polypeptide expressing nucleotide sequence isolated from the Sargasso Sea
tattaaagaggaaatagacatggtcaagtcaggcaagtttgacaaagtagataaccctattaaaaatgcacctcataccgacattgaattagcttcagatgaatggaatcataaatattcaagagagcaagctgcatatccagcaaaattcttaaaagcaaataaattttggcctccagttgcaagagttgacaacgtatatggagataaaaatattttttgtacttgtcctagtatggatgagtttaaagaagatgcagcataa

SEQ ID NO: 219762 - DNA, 331 bp, Unknown
  Bacterial polypeptide expressing nucleotide sequence isolated from the Sargasso Sea
gatgatagagccaactgaaagtgaaggcatgtcggaacttgatagattttgtgatactttaatcaagattaaacaagagatagacaaaattaaatcaggtaaatttgataaagatgataatccaattaaaaatgctcctcacacagactctgagctggcttcagatatttgggagcataaatacactagacaagaagcagcttatccagccaaatttttacgtgtaaataaattttggcctccagtagcaagagtagacaatgtatatggtgataagaatattttttgtacatgtccaagtatggatgaatttaaagaagatgcagcataa

SEQ ID NO: 219763 - DNA, 766 bp, Unknown
  Bacterial polypeptide expressing nucleotide sequence isolated from the Sargasso Sea
gtcgcctgcggccggtgcccacggcgaactgtgcgggttgatgactgcccgcgccgcgcttgaagcgcgcggcgatgcccgaaagcgcgtgctggtgccggactccgcacatggcaccaaccctgcgacggcggcgatctgcggctattcggtggaggcgatcccgctgaacgatcggggccgggttgatcttgcggcgttgaaagcggcactggatgaagaagtagctgcgttcatgttgaccaaccccaacacctgcggcctgttcgaggacgaaatactcgaacagtcgcaggcggtgcatgatgtcggcgcgtttttttactgcgacggcgccaatttcaatgccatcgtgggacgagtgcggccgggcgatctcggtatcgactgcatgcatctaaatttgcacaagacgttctccaccccccatggcggtggcggcccgggcagcgggcctgttgttctgtcggaggcgttggcatcccatgcgccgctgccgtgggtggtccacggcgatgacgggtacgaagtggtcgaacacgaggcgggtgccggtgacgcggagccatatggccggatgaaagcgttccatggccagatgggcatgttcgtccgggcgctggcttatatgatgagccatggcgccgacggtcttaaacaggtgtcttcagatgccgtgcttaacgccaattacctactggcgcggctgtcggacgaactgacgctggcgtatgacggcccgtgcatgcacgaagtactgttcgac

SEQ ID NO: 219764 - DNA, 364 bp, Unknown
  Bacterial polypeptide expressing nucleotide sequence isolated from the Sargasso Sea
agctcaaggaagacttgagatgttattaaattttcaacaaatgattgttgattttactggaatggatatagctaatgcctctttattagatgagggtacagcagcagcggaggctatgggcttaattcacagattgaacaaaaaagatattaatttagtttttgtatctgaggattttcatcctcaaacaataaatgtaattcaaactagagctgaaccgttgggtttaaaaatattggttgttaaagaagatgaggttctagaacagttaaaagaagatttggtttgtggaattttacaatatcctggaactttaggagatattaaagacccaagtgaagcaattagcaaaattcataaaaaa

SEQ ID NO: 219765 - DNA, 348 bp, Unknown
  Bacterial polypeptide expressing nucleotide sequence isolated from the Sargasso Sea
catgatagacgatacttcaaaagaatttatcagtaggcacattggtccgagcactgaagaccaaaaagagatgttaaaagcaatatcttcaaaatcaattgataatttaattgagaatactgttccaaagaatattttaattaaagacgaacttaaaattgatgaacctatgtcagagaatgatgctctaaaaaaattgaaacttttgtcaaaaaaaaacgaagttttccgtaattttataggcatgggttactataatactgttaccccaaatgttattttaagaaatatactcgagaatcctggttggtatacttcttacactccataccaacctgaagtagccca

SEQ ID NO: 219766 - DNA, 360 bp, Unknown
  Bacterial polypeptide expressing nucleotide sequence isolated from the Sargasso Sea
aatgatagacgatacttcacaagaatttattaataggcatattggtccttcgaaaaatgatcaagaaaaaatgttagattatattgaaagtaaatctattaatcacctaatacaaaatactgttcctaaaaatattttactaaaagatgagttaaaaattggagactctctttctgagagcgaagcattgaaaaaacttaaaattatttctcaaaagaatgagacttttagaaattttattggaatgggatattataattgttttactccgaatgttgtagtgagaaatattttagaaaatccaggttggtatacttcttacactccttatcaaccagaagtagctcaagggagactaga

SEQ ID NO: 219767 - DNA, 649 bp, Unknown
  Bacterial polypeptide expressing nucleotide sequence isolated from the Sargasso Sea
actgggcggtaaaaaatctatagaggcaatatcctctgctccttggggatcagcattggctagtttaatttcatacggttacattaaacttcttggggaaaaaggtcttagaaaatgtagtgaaattgcaattttaaactcaaattatatcaaaaaaagattacagggagcatatgagatcctatattctgggataaatggaaaagttgctcatgagtttataattgattgtagaccctttaaaaagaatggaatagaggtaatagatatcgcgaaaagattaatggattatggatttcatgctccaactgtttctttccctgtcccaggaacgatgatgattgaacccactgaaagtgagaatatggaagagattgataggttttgtgaagctatgatttcaataagaatggaaattgattctgataatcctgctgattatgcaatgctaaaaaatgcacctcacactgaaaaaatgataactagtgataaatgggatttcccatatacgcgtcaaaaagctgcttttccacttgagtttgttagagaaaataaattttggccttcggttaggcggattgatgaagcatttggagatcgtaatttaatttgcagttgtacttcaatagattatttcgtaaagacttga

SEQ ID NO: 219768 - DNA, 340 bp, Unknown
  Bacterial polypeptide expressing nucleotide sequence isolated from the Sargasso Sea
aatgttacctaattcagaaaaagattttataaaaagacacattggaccttcaaaagaagatcaatcaaaaatgttaaaagaattaaattataaatcattagatgatttaattgacagcacagttccagaaaaaataaagtttaaaggtgaactaaatattggtgagccgaattcagaatacgaagcgttaagaaaattaagagctatttcaaagaaaaatgaagtttactcaaattttattggaatgggttattatggaacatatacaccatatgtaattttaagaaatatattagaaaatccgggctggtacacttcttatacaccttatcagccagag

SEQ ID NO: 219769 - DNA, 304 bp, Unknown
  Bacterial polypeptide expressing nucleotide sequence isolated from the Sargasso Sea
cttatctgagcttgatagattttgtgatactttaattaatatcaaatctgaaatagatatgattaagtcaggtgagtttgataaagtagacaatcctattaagaacgctcctcatacagacatagaacttgcttcagatgattgggaacataaatatacaagagagcaagctgcttatccagctaagttcttaaaaacaaataaattttggccaccagttgcaagagtggacaatgtttatggagataagaatattttttgtacttgtccaagtatggatgagtttaatgaagacgcggcttaa

SEQ ID NO: 219770 - DNA, 619 bp, Unknown
  Bacterial polypeptide expressing nucleotide sequence isolated from the Sargasso Sea
aatgatagacgatacttcacaagaatttattaatagacacattggtccttcagataaagatcaagaaaaaatattagactatattggtagtaagtctcttgatcaacttatacaagatacagttcctaaaaatattttacttaatgatgaattaaaaataggtgactcactttcagaaagcgaagctttgaaaaaactcaaagttatctcacaaaaaaatgagacttataaaagctttattgggatggggtattataattgttttactccaaatgttgttttgagaaatattttagaaaatccaggttggtatacatcttacactccttaccaacccgaagtagcccaaggaagattagagatgcttatgaatttccaacaattagtaattgattttacaggaatggatattgccaatgcttcattattggatgaggctactgcagctgcagaagctgtcggtcttgcacaaagagtttctaaaaataattcaaaaaaagtttatgtatcggaaacgtgtaatcctcaagttattgatttaattaagactagaattgagccttttggtctagaacttttaataggtaatcaaaaagatttaataaaatttaaatggtga

SEQ ID NO: 219771 - DNA, 414 bp, Unknown
  Bacterial polypeptide expressing nucleotide sequence isolated from the Sargasso Sea
tatggaggaccacacgtctgctttttttgctacttcagaaaattttaaaagaaaaatacctgggagaataatcggcgtatcaaaagacaatcatgggtcgaaagccttaagaatggctttgcaaaccagggagcaacacatacgtatagaaaaagcaacatctaacatttgtactgcacaagtacttctcgcaatcatgtcatcaatgtatgcagtttatcatgggccaaaaaatataatttctattgccaacaaggtgcacaatctaagttctaatcttgcgacttctcttaatcaagccgggctaaagattttgcatcaacaattttttgacacaattaaaatactacctaataataattgggaaatagaggcacaaaatgaaaaaatgaattttaggaaattcgaagatgg

SEQ ID NO: 219772 - DNA, 928 bp, Unknown
  Bacterial polypeptide expressing nucleotide sequence isolated from the Sargasso Sea
gtagctgctgacctattaagtttaactttactgaaagccccaggtaaatttggagttgatatagttgtaggcacatctcaaagatttggtattcctcttggatatggtggacctcatgctgcattttttgctactaaggaagaatacaaaagatatatacccggaagaataattggtcaaactattgatatggacaataatccagctttcaggatggctcttcaaactagagaacaacacataaaaagagatagagctacatcaaatatttgtacagcacaagttttattagctgtaatggcaggtatgtacgctgtttttcatggtcctaaagggttaaagaatattgctcaagagatccatgataaagcaaaaaaattagattcaattttaaccaaccttggaattgatcagttaaatgaaagtttttttgatactttaaaaatctcagttccttctgaagaaataagagaaattgcagaaaaaaacttaattaattttttatacataaatgattcaaccatttcaatttccttaaatgaaggcgttgataaaaaagaacttaataaaatcattaatgtttttgaagtttttatgaagaaaaaagtaaataaagattctcaaatttctaattcttctagactacctgaaaatcaatcaagaaaatctgattttttatctaataaaacattcaattcatatcattcagaaacaactctaatgagatatattaaatctctagaacaaaaagacctttccctaactcattcaatgattccattaggttcttgtactatgaaattaaattcagccagtgaaatgcttccaataagctcatcaaaatggtctgatattcatccttttgttcctcttaaccaggttgaaggttacacacaaatactaagtgaactttcaaatcaattaaata

SEQ ID NO: 219773 - DNA, 394 bp, Unknown
  Bacterial polypeptide expressing nucleotide sequence isolated from the Sargasso Sea
aatgttaaaaggggttagtgagaagagagcattggaattacttaaaaaagtaattgataaaaataaaaatgccaagtttatgataggtaaaggttttaataacaataatatgccttctgttataaaaagaaatattttaatgaaccctaaatggtatactccatataccccatatcaagcagaaatctcacaaggtaggttagaatcattatttaattatcaaactatgattaaaaatataactggattacctgtatccaatgcttcattattagatattggtagcacttcagcggaagtattaagtatgagccattcatttcataaaagaaaaagaaataaatttatattatcagaaacagttcatccttatattatagacattttaaaatta

SEQ ID NO: 219774 - DNA, 907 bp, Unknown
  Bacterial polypeptide expressing nucleotide sequence isolated from the Sargasso Sea
ttgcgatcttcttgctttgacaatgttaaatctccagggagaaatgggtgcagatattgctgtggaaaattcacaaagattcggagttcctatgggttttgtggcccacacgcagcttttatttcatgtagggaagaatacaaaagactactaccaggaaggattataggtagatctgtagacaagaatgacaatcttgcatataggatggcactacaaacgcgagaacagcacattagaagagagagagctactagcaatatatgtacagctcaggcgttgctggcaataacatcagccgcctatgcaatttaccatggcccgaaaggaataaagaagataggattaaggacccacaagctggctcgtattcttagtaaaagtttaacaactttaggtttcgatttgattaataagatttattttgacactatagcaatcaaacttcctcgtaaaaaaatgacatcaattaaatcacaagctcaaaaaaataaattaaatttcagatatttttcaaacgaaataataacaatatctatggatgaaacatcgactattggagatgtggaaaaaattttgaaatgtttttcaactgtaaagaatttggatttagaagaaattgtcaattctataaaatatgatttagatgtgattccgaagaattttactaggaacaaagactatcttacccatcctgtttttaattcttacaagtctgagacagattttgtcagatacttaaaagcacttgaggataaagatattgctttgaatagatcaatgattcctttgggctcttgtactatgaaactaaattccactagtgagatgattcctataagctggacaaagattaacgcacttcatccatttattccaaagacgcaagcaaaagggtacgagttcg

SEQ ID NO: 219775 - DNA, 478 bp, Unknown
  Bacterial polypeptide expressing nucleotide sequence isolated from the Sargasso Sea
atgattgacgatacttcaaatgaatttataaatagacacatcggtccttcagaagaagatcaggccaaagttttaagctatttaggctcaagttcgcttgaacaattaataaaagatactgtcccggaaaatattttattaaaagaagatttaaagataagtgattcattatcagagagtgaagcattaaaaaaactaaaaattatttctaaaaaaaatcaaacttttagaaattttattggaatgggatactataattgtttcacaccaaacgtaattttaagaaatatattagaaaatcctggctggtacacatcttacacaccctatcaacctgaagtcgcacagggaagactagaaatgcttttaaactttcaacaagtgataattgatcttacaggaatggatatcgctaatgcatctctgttagatgagtctacggctgcagctgaagcagtaggattagctcaaagaatat

SEQ ID NO: 219776 - DNA, 388 bp, Unknown
  Bacterial polypeptide expressing nucleotide sequence isolated from the Sargasso Sea
aatgatcgatataaattctttcgcaagtagacacattgggcctagaaatgaagatatagactcaatgttaaaattcataaaatgtaaaaatctcgatgaactaattcaaaaaactgtccctgatcatattttatttaaagataaattaaaattaaaaccaggaatgtcagaagattttaataaagttaatatgcaacttttatcattaaaaaataaattcaaaaaaacatatattggtctaggttatcataatactgtgacaccaagtgttattttgagaaatattcttgaaaatcctggttggtatactgcatatacaccatatcaacctgaagtctctcaaggccgtttagaaatgctaatcaactttcaacaaatgataatttga

SEQ ID NO: 219777 - DNA, 559 bp, Unknown
  Bacterial polypeptide expressing nucleotide sequence isolated from the Sargasso Sea
gatacagtaacaattaaaacaaatgataagacaagctctatttatctaacggctttaaatgaagatattaatttaagaaaagttgatgacaaacatatatccgtagcatttgatgaagcgaaaaaactaaatgatgtaaatatattgttaaaaatatttggcgtttctaaagtaattaatcaggatgtaaaagttgagcttaataatcttcctaaaaatcttttaagaacatcaaagtacctaactcatcctgtttttaataaatatcattctgaaacagagatgctaaggtatttaaaaaaactcgaagattgtgatatcgcgctaaatagatccatgattgctctaggttcttgtactatgaaacttaatgcaacagccgagttgatgcctattacttggaaggaattttctttgcctcatccatttgtgccaacagatcaaatggaagggtataaaattttatttaatgacctgataaacgatctaaaagaaattactggatatgatgcagtttctttacaaccaaattctggtgctcagggtgaatacgcaggat

SEQ ID NO: 219778 - DNA, 768 bp, Unknown
  Bacterial polypeptide expressing nucleotide sequence isolated from the Sargasso Sea
tatgacatccaaatttgggtctgatttttttatagacaggcatcttgggttaggagataatgatgaaagaattatgctgaataagcttggttttaataatattgatcaatttataaatcaagttattcctgaagatattcagcttaaagataaatcttcagaaatattgccccaaggttgttcagaaattgaggctttaaacgaattagaagagattgcgaataaaaatgctaaattgagatcacttataggccttggttattatgacaatcatatgcctaaagtaatccaaagacatgttcttgaaaatccaaggtggtatacgtcttatactccatatcaagcagaaattgcacagggaagattagaagctctatttaatttccagactattgtttgtgaactaacaggattccctgtcgccaatgcatctttgttggatgagggtacttctgcagcagaagctatggcaatgagtttttccgcaagaaaaaataaatcttcaaaagtctacttagtggagtcaaatgtttttgatcatacttttaatgttctacaaaccagagcaaaacctttgggaatatccttaaaacgctttactcaaagcaatctccctaatcatgatgatgtttttggaatgttgttgcaattacctggtaaaaatggacaattatatgatcctacatttttaatttcccaagcacatagatcagaaattattgttacggcatgtattgatccactagcacaagttttgattaaaccaat

SEQ ID NO: 219779 - DNA, 426 bp, Unknown
  Bacterial polypeptide expressing nucleotide sequence isolated from the Sargasso Sea
catgaaatccacggctaattcagatttatttattaatagacaccttggcttgagtgatgctgatgagcagaaaatgctctccaagattggttttaaaaatattgatgaatttataaatcaagttattcctgaagatattcagcttaaagataaatcttcagaaatattgccccaaggttgttcagaaattgaggctttaaacgaattagaagagattgcgaataaaaatactaaaatgagatcacttataggccttggttattatgacaatcatatgcctaaagtaatccaaagacatgttcttgaaaatccaaggtggtacacgtcttatactccatatcaagcagaaattgcacaaggaagattagaagctctatttaattttcagaccattgtttgtgaactaacaggattccctgtcgccaa

SEQ ID NO: 219780 - DNA, 853 bp, Unknown
  Bacterial polypeptide expressing nucleotide sequence isolated from the Sargasso Sea
aaatccagtttttagatgccacagaacggaaaccaaaatgatgcgctatttacatcaattagagatgaaagatttgtcattaaacactagtatgatacctcttggatcttgcactatgaaattaaactctgctactgaaatggaggcattaagttggccaagttttgttaatattcatccctttgctccaattgaacaaactaagggttatgaaaacctaattaaagaattgaacgcttttctcatcaaaattactggatttgatagtatttcaatgcaacccaattcaggatcacagggagaatatacaggcttgctcttaatacgtgcttaccatttatttaatggcaatagtaaaagaaacatatgtttaatcccaacctctgctcacgggacaaacccggcttccgcagtgatggcaggaatgagagtggttcctattctttgtgatgaaaaaggaaatatttctctgaaagatttaatgcaaaaaatgaataagcattctgaagaactatcagcggttatgctaacctatccatccactcatggtgtctttgagccaaaaataaatgaaatctgtaattctatccatgagcacggtgctcaagtatattttgatggtgcaaacctcaatgcaatggtaggtctttgtaaaccaggagaatttggatgtgacgtaatgcatattaacctgcataaaacattttgtattccacatggaggaggaggtccgggcatgggacctattgtctgtaaatcgcatttatctgatttcctacctaatcattctcaattgaaaactggaggaattaatgccatctcacctgtttcttctactcctttcggaagcagt

SEQ ID NO: 219781 - DNA, 682 bp, Unknown
  Bacterial polypeptide expressing nucleotide sequence isolated from the Sargasso Sea
tatcaatctacacaaaacgttttgtatccctcatggaggtggcggcccaggaatgggtccaattgtttgtaaaaaccatttaaaagaatttttaccatctcatgtcatttatgaaaaaactaaagattctgcaggcgctgtctctgcttccccttttgggagtagtagtattttagttatttcctgggcctatattgccatgcttaactcccttggattacagctagccactaagttagcaatattgaatgcgaattacatggcaaagaggcttgaaggccactatccaatccttttcaaaggagaaagtggcttcaatgctcacgagtttattattgatcttagggaaataaaaaatcaatacggtgtcaatgaagaagatattgcaaaaagattaatggattatggttaccatgccccaactatgtcttggccggttaatgggactatgatgatagagcctactgaaagtgaatcaaaagaagaaattgatcgtttttgtgaggctctgatttcaatcaaagatgaaattttaaaaatagctgatggtaaataccatcaaaatgacaatccaataaaaaacgcgccacacactgcaacacatatagcatctgataattggcctcatagatactcacgcaatgaagctgtgtatccagctaatcatttaaaaaacccataa

SEQ ID NO: 219782 - DNA, 337 bp, Unknown
  Bacterial polypeptide expressing nucleotide sequence isolated from the Sargasso Sea
ctgcagcccaatgccgggtcccagggggagtacgcagggctgctggtgatccgggcctggcatcgctccaggggcgacgaccatcgtgatgtctgcctgatccccaccagtgcccatgacacgaacccagccagtgccgtgatggcgggtctcaaggtggtggccgtggcttgcgacgccgacggcaatatcgatcagcaggatctggctgcccgggcagcggagcacgccgaccgcctggcggccctgatggtcacctacccctccacccatggcgtgttcgagaccggcattcgcgggatttgtgagctggtgcatcgccacggtggtcaggtgt

SEQ ID NO: 219783 - DNA, 844 bp, Unknown
  Bacterial polypeptide expressing nucleotide sequence isolated from the Sargasso Sea
gatggagattattcacttaggatggctcttcaaactaagagaacaacatattaaaagagacagagcaacatcaaatatctgtactgcacaagttctgttagcagtaatggctggaatgtatgcagtctatcatggtccaaatggcttaaaagaaatttcaaaatcaattcaccttaaggctgtttatctaaaaacaagtttaaaatctattggacttcaaattaaatattctaatttctttgacacagtaactgttatatgtgaatcaaaaaaaataaaagaattagcagttataaaaaagattaatttttgctatctctcagataatgaaatatcaatttctgtaaatgaaaaaactaacttaaatgatctaacagaaattatttcagtttttgaagactatgctaaaaaagaatcaaatattaaagaattcccaaaagatatcgaagttgttaatgaaagaaaatccaacattttatctcatcccgtttttaattcataccactctgagacttcattaatgagatatataaaatcattagaaaataaggatttatctctaactcagtctatgatttcacttggatcttgcactatgaagctaaattcagcttcagaaatgataccattaagttggacggagtggagtagcatacatccttttgtccctgttgatcaagcaaaaggatatcacgaggtaataaatagattagaaaggtacctttcagaaattacaggttttgctgcaacttctttacaacctaattctggtgctcaaggagaatacagtggattaatggtaatcaaatcttatttagataaaaaaggtgatagtcacagaaac

SEQ ID NO: 219784 - DNA, 310 bp, Unknown
  Bacterial polypeptide expressing nucleotide sequence isolated from the Sargasso Sea
gaaagtttaaacgaaatcaatagattttgttctgcactccaaaaaattaaacaagaaattgataaagttcattcaggtgattatgataaagtggataatccacttaaaaatgcgccacatacacacgttgaattaagttcaaacaaatgggaacataagtatgaaagggaagaagctgcatatccttctgaaattttaaaaactgttaaatattggccaccagttgcaagagtagacaatgtttatggtgataaaaatttattttgtacttgcccatctatggaagagtacgaagattcagcagcttaaa

SEQ ID NO: 219785 - DNA, 346 bp, Unknown
  Bacterial polypeptide expressing nucleotide sequence isolated from the Sargasso Sea
aatgtcatggccagtagctggcactctaatgatagaacctactgaaagtgaatctaaattagaattggataggttttgtgatgcaatgatagaaataagaaaagaaattaaaaggatagaaaaaggtaccttagacaagaaagacaatatgctaaagaatgcccctcattgcgctgaacatttaacagaaaataattggaagcatgaatattctagggaagaagcagcctaccccttaaactcattaagagagaataaatattggtgccctgttggaagaatagataatgtctatggagatagaaatctagtttgtagttgtccctcgatggaggaacttaattaa

SEQ ID NO: 219786 - DNA, 808 bp, Unknown
  Bacterial polypeptide expressing nucleotide sequence isolated from the Sargasso Sea
atgtataaagaaaatttttctcgaagacatattggtccaagtacttctgagttaaatgatatgctaaagataattggagtaaaatcaattgaggacttgttatcccaaactattccagagaaaatcagattaaaatctgacttagatatacctgacgctatttctgaaatggaattcctaaaggaaattaagagattttcaacactaaatagaaatttcaaaacatacattggacttggttatcacgacactttcaccccttcagtaatacaaaggaatattttagaaaatcctggatggtataccgcctacacaccatatcaaccagaaattgctcaaggtagacttgaagctttattaaattttcaaactatgatttgtgatctaactaaaatggagattgcaaatgcctctctattagacgaaggaacgtcagctgcagaagcaatgattatgatgtataacaataggtctaaagaccaaaagtctcaaaatcttgatagattttttgttgattcaagcatactcccacaaactctgtcagtattaaaaacaagagcttatccattaggtatagagattgaaattgatgaaataaataatataaattctgatgattgttttggatgtattattcaatatcctggtaaaaaaggaaacttaccaaatattaatgaaattttatcaggtattaaaaatgaagattttaaaatagtcttggctgttgacttaatgtcattagtaattattgagcctccaaatcctgaaaaagttgatgttgtagttggtactactcaaagatttggaa

SEQ ID NO: 219787 - DNA, 157 bp, Unknown
  Bacterial polypeptide expressing nucleotide sequence isolated from the Sargasso Sea
gcgctcctgaacttccagcagatggtcgccgacctcaccggcctcgcgatctcgaacgcgtcgctgctcgacgaagccaccgccgccgccgaagcgatgacgctgctgcagcgcaccggcaagccgacgtcgaacgtgttctacgtcgccgacgacg

SEQ ID NO: 219788 - DNA, 378 bp, Unknown
  Bacterial polypeptide expressing nucleotide sequence isolated from the Sargasso Sea
aaagattaattgattatgggtttcatgctcccactatgtcttggcctattccaggaacactaatgattgaaccaactgagagtgaatcaaaatctgagcttgataaattttgtgatgctatgatagcaattaaaaaagaaattattgaaatagaatcaggtaaaattccacaggaagacaatgttttagttaatgctccacatactgttcacgacatttgcgatgattggaatcatccctattctaaagaaaatgctgtttttccagctcaatggagtaaagaaaataaattttggccatatgtttcaagaattgataacgcttttggcgatagaaattttttctgcgtatgtcctgatataaattcatataaatgaa

SEQ ID NO: 219789 - DNA, 733 bp, Unknown
  Bacterial polypeptide expressing nucleotide sequence isolated from the Sargasso Sea
agtcaaatgaattattcaattgatactcaattctatcctttaggtagttgtaccatgaaatataaccctaagattaatgatcaattagcatctctaaaaggatttagtaatatacatcctttgattgaggaatctttagtccaaggctcattagaattgatgtttaatttacaaagttatctgtcaaatatttctggaatgaccgctacaagcttatccactatggctggtgctcagggggaattagctggagtcttaatgataaaagcttttcatgagaaacaatctacttcttcaaaacgaaatgtaatattgataccagatagtgctcatggaacaaacccagcatctgcttcaatggctggtttctcagtaaaatctattccttcagatcaaaacggtaatatggatattgatgtactaaaagaaaatgctaatgaaaatcttgcaggtattatgctgactcttccgagtacgttaggtttgtttgataatcaaatagtcgatatttgtaatattgttcatgaagctggtggtttagtatacggcgatggggcaaatatgaatgcgtggatggggcagacaaaattaggggatttaggttttgatgttattcatataaaccttcataaaacctttagtactccacacggcggcggcggcccaggttcaggtccagtttgtgtaaatgatactttgttaaattatttacctggccctgtagtacaaagaa

SEQ ID NO: 219790 - DNA, 842 bp, Unknown
  Bacterial polypeptide expressing nucleotide sequence isolated from the Sargasso Sea
aatgaacgacgtgttctacagaagagataaagcgacaagtaatatttgtactgcccaagcacttttagcaataatttcagctgcttatgcaatctatcatggacctgaaggtattttaaaaattgcaaatagaacatcgaaacttgcaaaaatattttctgacagcttagaagaaaatggttttaaaatattttctaaaagcttttttgatacagtcacaattgaaacaaatgaaaaaactgaaactatttttaataaagctttagcagaaaaaataaacctaaggagggtaaacaaaaaaactttatcggttgcttttgatgaagtaaagaagataaagcatgttaatactcttctaaaagtatttggagttaaaaaagaatatgataactcggtgaacgtagagctgaataatttgccaaaaaatctattaagaacatcaaaatatttaacacatccaatttttaataaatatcactcagaaacagagatgcttagatatctaaagagactagaagattgcgatattgccctaaatagatcaatgattgccttaggttcttgtacaatgaagttaaatgcaacagctgagctaataccagttacatggaaagaattttctttacctcatccatttgtacccgaggatcagatgaaaggttataaggttttgtttaatgacttaataaatgacttaaaagaaattactggctttgatgctgtctctcttcaaccaaactctggagcacaaggggaatactctggattaatgacaattagaaaatatcatatcaataataaacaaaaaaatagaaatatatgtctaattcctgaatctgcac

SEQ ID NO: 219791 - DNA, 890 bp, Unknown
  Bacterial polypeptide expressing nucleotide sequence isolated from the Sargasso Sea
agacactgtttcgcaacttgctaaaaattttgcagataaattaaaacaatctggctatgaactttactcagattatttttttgataccgttactgtaaaaacattagacaaaacagataaaatttataaaaacgcactagatcaacaagtaaacataagaaaagttaactctgaaatgttggcagtttcatttgatgaaagaaaaaatctttacagagctaatcaggtgttaaaaattttcaactgttcagaaacaattaaagaaacaactaaagaaacgacaaacaaaagcttatctaatttgccaaaaaatttattaagaagctcaacatatttagatcatccagtttttaatagttaccactctgaaaccgcaatgcttagatatttaaaaaaattagaagactctgatattgcattgaatagatcaatgatagctttaggttcatgtaccatgaaactaaattcagtttctgagatgatacctgtaacatggaaagaattttcacatccacatccatattctcccatcgaacaaatggatggttacagagagttattcaccgatttaaaaaattggctaagaacaatcacaggtttttctggtgtttctttgcaaccaaatgctggagctcaaggagaatttgctggcttaatggtaattagaaagtttcatgaaaaaaatggtcaaaaaaagagaaatgtttgtttaataccgagttctgcgcatggaactaatccagcaagcgctcaaatggccggcatgaaagttgttgttgttagttgtgactcacatggaaatgtagattatgaagatttaaagaaaaaaactgaagaatactcagatactttgtccacactgatggttacttatccatcaactcatggag

SEQ ID NO: 219792 - DNA, 774 bp, Unknown
  Bacterial polypeptide expressing nucleotide sequence isolated from the Sargasso Sea
cttggggtatgtccaagaaaactctaacttttttgacacacttaaaataaaagtctcaccagatcaaaagaaaggaattcataaaaaagcagaaaaaaattcaatcaatttcagatactttgaatctgaacatgttggtatatctttagatgagacaacttctccttctgatgtaatggccatcttaaatattttttctgattttgcagataatgcaattgaagtacatctcaataatatagaagaggttcagcttaaattatcaactgaacttcaaagaaaatctgaatttttatctcatgatgtatttaataaataccaaactgaacatgaaattttaagatacatgaagaggttagagaacaaagatctctcattggtccattccatgatatcactgggttcatgtacaatgaagctaaatgctactgctgaaatgattcctgttacctgggaagaaatgaaccttcacccttttgttcccatgagtcaagctaaaggttatgaaaaaatgataagtgagttaaatatatggctctctgatataacaggattttctaagctttcttttcagcctaactctggtgcacagggagaatacactggactcatggttattagagcatttcacatggataatggaaatgataatagagatatagcattaattccttcttctgcacacggaacaaacccagcctctgctataatggcaggaatgaaggttgtggttatagcttgtgataaacatggaaatatagatttagatgactt

SEQ ID NO: 219793 - DNA, 151 bp, Unknown
  Bacterial polypeptide expressing nucleotide sequence isolated from the Sargasso Sea
tgggatcatccgtacacaagaagtgaagcagcttacccatctaaacatcaaaaaaatcataaatattggccacctgtaagcagaatagataatgcatatggtgatagaaatcttgtatgtacatgtcccacaatagacgattataaataat

SEQ ID NO: 219794 - DNA, 613 bp, Unknown
  Bacterial polypeptide expressing nucleotide sequence isolated from the Sargasso Sea
aatgatagatatagataaatttgcaagtagacatattggacctagaaatgaagatatcattgaaatgctaaaagttgttggtagcaaatcactagatgacttaatagaaaaaactgttccagatcatattatttttaaggataagcttaaattacgtcctggaatgtctgaagaattcaataaaactaatacgcaacttttatctttaaaaaataattttaaaaaaacttatattggaatgggctattataatacaacaactcccagtgtaattttaagaaatatactagaaaatccaggatggtatactgcttatacaccttatcaacctgaagtaagtcaaggcaggttagaaatgttaatgaatttccaacaaatgataattgatctaacaggaatggacatagctaatgcttcattattagatgaaagtactgcagctgctgaagcaatgatgatggcttttaaaattaaaaagagttcaaggtttactttttgtattcaaaatacatgccatcctcaaactttatctgttttaaaaactagagctaaacctttaggaattaaaattatttttaataaaccaaatgaagatacgtttggctgtttaatt

SEQ ID NO: 219795 - DNA, 544 bp, Unknown
  Bacterial polypeptide expressing nucleotide sequence isolated from the Sargasso Sea
aatgatagatattaattcttttgcaagtaggcatataggtcctagaaacgatgacattaaagaaatgttaaaagttgttggttgcgattcattagatgatttgattcaaaaaactgtacccgatcatattatttttaaaaataagcttaaattaagacctggtatgtcagaagaatttaataaaactaatacccaacttttatctttaaaaaataattttaaaaaaacatacattggaatgggatattataacactatcacaccaagtgttatactgagaaacattttagaaaatcctggttggtatactgcttacactccttatagttctgaagcatcacaaggtcgtttagaaatgcttatgaactttcagcaaatgattattgatttaacaggaatggatgtgtgtaatgcatctttattagatgaaggtactgctgctgcagaagccatgacgatggcatttaaaattaataaaagttctaaaaataatttttgtattcaaaatacgtgtcatccccaaacactatcaatattgaaaact

SEQ ID NO: 219796 - DNA, 601 bp, Unknown
  Bacterial polypeptide expressing nucleotide sequence isolated from the Sargasso Sea
atggcaaataatacaagagacttttcctacagacatattggtctaaaagactctgatgttaacaacattcttcatgatcttggttataaagatatgaagacatttctcaaagatctaatgccagaatcgatctatgacaaaacagatataactttgcctgatgctctggatgaagcatcagcacttaaaaaattaaagtcgatttcaaaaaaaaataaggtttataaaagttacgtaggacaaggcttttataactgccatgttccaagtgtcattaaacgaaatgtgtttgaaaatcctggttggtatacatcctatactccttatcaaccagaaatcgcacagggtagactggaagccttaatgaattatcaaactatgattgctgatctcacagcaatggatatttctaatgcttctttactagatgagccaactgctgctgctgaagcaatgatgctagctcatagagtatcaaaatctaaatccaacaaattctttattcatgaaaaatgtttcaatcaaacaatatccattatccaaagtagagctaaacccttaaatattgaaattgaaattggtcaagaaatgtcaaaatcag

SEQ ID NO: 219797 - DNA, 742 bp, Unknown
  Bacterial polypeptide expressing nucleotide sequence isolated from the Sargasso Sea
tttggataaatacgtgaaagacagatcaaaagatttttcaactagacatattggaatcaaagatagtgaagcaaaacaaatgcttcaggatcttggttataacgatatggataagtttctgaaagatttaatgcctgaatcaatctttgatcttagtgccctaaagttacctgaacctcttgatgaagcttcggccttaaaaaatttaaaagcaatatcaaagaaaaataaagtttataaatcatttatagggcaggggttctatggttgtaatgtgccaaccgttatcaaaagaaatgtctttgaaaatccaggatggtacacatcctatacgccttatcaacctgagatcgctcagggtcgtttagaggctctaatgaactaccaaactatggttgctgatttaacaggcatggatatttcaaatgcctccttgctggatgaaccaaccgctgccgctgaagcaatgatgttggcaaacagagtggctaaatctaaatcgaatgtgtttttcattcacgagaatagctttcctcaatcgattgccattatgaagtctcgagcaaaacctctaggcattgaaattgaagttggtgaagaaatggattctaaaaaagaatattttggttgttacgttcaatatcctggcgatgatggatcaataatagatttctctgctgtttcagaatcaattcatgcacaaggtggtttgctcatagttggttctgatttattggcttta

SEQ ID NO: 219798 - DNA, 730 bp, Unknown
  Bacterial polypeptide expressing nucleotide sequence isolated from the Sargasso Sea
gggccctatagctcttaaatctcatctatctcaatttgctccaaatcatgtagtaataaatctagatggattaccgattgaaaatacagcagtctcagcagctccttggggtagcccaggcattctgcctatatcactaatttatataaaacttatgggtgagcatggacttaaaaagtcatctcaagtggcaattctgaatgcaaactatttagctaatagattgaaaaagtatttccctattgttttcactggaaaaaatggattaattgcacatgagtgcatcattgacattcgacatttgaaagacaccttaggaattactgaagaagatattgcaaaacgtttaattgattacggatttcatgctccaactatgtcgtggccagttccaggaactttaatgattgaacctactgaaagcgaacccaaggaagaaattgaccgattttgtgaagcaatgatttctataagaaaagaaacaaaaaaaattgaaagtggagattgggataaagttgacaatcctttaaaaaatgctccgcatcaatccgatgatctaactgatccaaaatggaatcatctttattcaaaaaaaatagctttctatcctttggattcagtacgccaaaaaaaatactggccacctacagctagaatagataatgtctacggcgacagaaacgttgtgtgcacatgtcctccaatggaaatttttgaggaacaggagtga

SEQ ID NO: 219799 - DNA, 142 bp, Unknown
  Bacterial polypeptide expressing nucleotide sequence isolated from the Sargasso Sea
agatatgaacgatctaaagctgcttacccagtggatagtctgtatgagaataaatattggcctcctgttggcagagttgacaatgtttacggggacaggaatttagtttgcagctgcccttctatggaagactacgattaag

SEQ ID NO: 219800 - DNA, 531 bp, Unknown
  Bacterial polypeptide expressing nucleotide sequence isolated from the Sargasso Sea
catgtcaaacgccaaatctcttgaacagttagagcaaaagcaagattttattcgccgccatattgggccaagcccagcgcaagtaagcgatatgctaagcgctcttgaagtatcgagtgtacaagagctgatcgatcaaactgtaccggctaacattcgcctagagcaaccgctaagcattggcgaaagccgtactgaagttgaaacactaagctacttaaaatcagtagcaagcaaaaataaagttttcaaatcgtacattggccaaggctaccacccaacacatgtaccgcacgtaattttacgtaacgtacttgaaaacccaggttggtatacagcgtacacgccatatcagccagagattgcacaagggcgtttagaatcattactaaacttccagactatgacccttgatttaaccggccttgatttagcaagtgcgtcgttacttgacgaatcaaccgctgcagccgaggcaatgggccttgcaaaacgtgtatctaaagctaaaaaaacccaatgccttttttt

SEQ ID NO: 219801 - DNA, 448 bp, Unknown
  Bacterial polypeptide expressing nucleotide sequence isolated from the Sargasso Sea
attgatattcagaccaattaaagcaagttcaggaatctctgaggaagatttagcaaaaagacttatcgactttggttaccatgctccaacaatgtcatggcctgttgctggtacaatcatgattgagccaactgagagtgaaaatttaggggagattgataaattttgtaatgcacttataaaaattaaaaaagaaattaatttagtggagacatcaaagtttgacaaaatagataacccgctgaaaaatgcacctcatacttatgtcgaattagcctccagtgagtggaagcatgcttattcaagagaagaagcagcttttccaactgagtatgtaaaaaataataaatattgggcaccagttgctagagtagataacgtttttggagatagaaatttagtatgttcatgtccttcaatggatgaatataaagatgaagctgcttaa

SEQ ID NO: 219802 - DNA, 382 bp, Unknown
  Bacterial polypeptide expressing nucleotide sequence isolated from the Sargasso Sea
aatgatagacgatacttctcaagaatttattaatagacatattggtccttcaaaagaagatcaaaaaaaaattttaaattatattggcagtaaatctttagatgatttaatacaaaatactgttccagaaaatattttacttaaagatgaactaaaaatcggacattcactatctgaaagtgaagcgttgaaaaaactcaaaataatttctcaaaaaaatgaaactttcagaaattttattggtatgggatattacaattgtttcactccaaatgttattttgagaaatattttagaaaatcctggttggtatacttcttacaccccatatcagccagaagttgctcaaggaagactcgaaatgctactgaatttccaacaa

SEQ ID NO: 219803 - DNA, 333 bp, Unknown
  Bacterial polypeptide expressing nucleotide sequence isolated from the Sargasso Sea
tgatgatagagccgactgaaagtgaaggcttatcagaaattaatagattttgtgatactttaattaagattaaacaagaaattgaaaaaataaaatcaggtgaattcgataaaatagataatccaattaaaaatgctcctcatacagactctgagcttgcttcagataattgggaacataaatatacaagacaggaagcagcttatccatcaaaatttttaaaagctaataaattttggccacctgttgcaagagtggataatgtatacggtgataaaaatattttctgtacatgcccaagcatggatgaatttaaagaagatgcagcataat

SEQ ID NO: 219804 - DNA, 360 bp, Unknown
  Bacterial polypeptide expressing nucleotide sequence isolated from the Sargasso Sea
ctatgtcatggcctgtagctggcactatgatgatagagccaactgaaagcgaaggtttatcagaaatagacagattttgtgacactttaattaagattaaacaagaaattgaaaaaattaaatcaggtgaatttgataaaattgataatccaattaaaaacgctcctcacactgatactgaattatcatcagatgtatgggaacataaatattcaagacaagaagcagcatatcctgcaagttttctaaaacaaaataaattttggcctccagttgcccgggtagacaatgtttatggagataaaaatatattctgtacatgtccaagcatggatgagtttaaagaagacgcagcataac

SEQ ID NO: 219805 - DNA, 240 bp, Unknown
  Bacterial polypeptide expressing nucleotide sequence isolated from the Sargasso Sea
aaagtgggaaatttgataaaaatgataatcctttaaaaaatgcaccgcatactcacatcgaacttactgctaatgaatggaaacataaatatgatagagaaagtgccgcatatccttctgcgactttaaaatcttacaagtactggcctccagttgctagagtagataacgtttatggagataaaaatcttttttgctcttgcccatcattggatgaatataaagattctgctgcataaa

SEQ ID NO: 219806 - DNA, 238 bp, Unknown
  Bacterial polypeptide expressing nucleotide sequence isolated from the Sargasso Sea
gacatcagaatttgacaaaatcgataatccattaaaaaatgctcctcatacttatattgaattggcatctaatgagtggaaacataagtatactagagaagaagctgcatttccaaaccaatatgtaaaaaattataaatactgggcacctgttgcaagagtagataatgtatatggcgataggaatcttgtatgttcctgcccatcaatggatgaatataaagatgaagctgcataa

SEQ ID NO: 219807 - DNA, 776 bp, Unknown
  Bacterial polypeptide expressing nucleotide sequence isolated from the Sargasso Sea
catgatagacgatacttcaaaagaatttatcagtaagcacattggtccgagcactgaggaccaaaaagagatgttaaaagcaatatcttcaaaatcaattgataatttaattgagaaaactgttccaaagaatattttaattaaagacaaacttaaaattgatgagtctatgtcagagaatgatgctctaaaaaaattgaaacttttgtcaaaaaaaaatgaagttttccgtaattttatcggtatgggttactataatactgtgaccccaaatgttattttaagaaatatactcgagaatcctggttggtatacttcttacactccataccaacctgaagtagcccagggaagattagaaatgcttattaatttccaacaaatgataatggattttactggcatggatatagcaaatgcttcgttattagatgagggaactgctgctgctgaagcagtgggtttatgtcaaagattagacaaaaataattcaaaaaagatatttgtatcaagctcatgtaaccctcaaacaatagatataattaagacaagggttgagccattcaatatagagctaattattggtgatgagggaaaaattttaaaaggtattaaagataaaattatttgtggtgttttagcttaccctggaactttaggtgaaataaaagaccctagtgagtctataagcttaattcataaaaaagaaggcaaagtaattgttgttagtgatctgttatctttaacaagactcaaaacccctgcagaacttgggg

SEQ ID NO: 219808 - DNA, 640 bp, Unknown
  Bacterial polypeptide expressing nucleotide sequence isolated from the Sargasso Sea
atgatcaatataaattcattcgcaagcagacatattgggcctcgcaatgaagatattacagctatgctaaaaattgttaactgtaaaagtcttgatgaattaattaaaaaaaccgttcctgaacatattctatttacggataagttaaaattaaaacctggtatgtctgaagatttcaataaagtaaatatgcaattattatctttaaaaaataaatttaaaaaaacatatattggtcttggttattataatactattacccctagtgtaattttaagaaatattttggaaaatcctggatggtatactgcatacacgccatatcagcctgaagtgtcccaaggtcgcttggaaatgctgatgaattttcagcaaatgattattgatttaactggtatggacattgcaaatgcatctttattagatgaaagtactgctgcagctgaagctatgatgatggcctataaaattaaaaaaagtaagcaacatactttttgtattcaaaatagctgccatcctcaaactctatctgttctaaaaacgagagctaatcctcttggtataaaaattatcatcggtcaacctgatgaagatacttttggttgcttaatacaaaatccagatacttacggtgagatag

SEQ ID NO: 219809 - DNA, 724 bp, Unknown
  Bacterial polypeptide expressing nucleotide sequence isolated from the Sargasso Sea
aatgttacataattctcaaaaagattttttaaaaaggcacattggaccttcaaatgaagatcaaaataaaatgcttatggaacttaattacaaatctcttgatgatttaatcaaaagtacagttccggaaaaaatccaattgaaagatgaattaaatattggtgactcaaattcagaatatgaagcattaagaaaattaaaagcaatttcaaaaaaaaatcaaatttactctaacttcataggaatgggttactatggcacttatacgccatatgtaattttaagaaatattttagaaaatccaggttggtatacttcttatacaccttatcaacccgaggtggctcaaggaagattggaaatgctgcttaatttccaacaaatgatagttgatttcacaggaatggatatcgcaaacgcatctttattagatgaaggaacagcagctgctgaggctatgggattaagtcatagattaaataaaaaggacagcaatttagtttttgtctcagaaaattgtcacccacaaacaataaacgtaattcaaacaagagcagaaccaatgggattaaaagtacttgttggtgatgaagataaattaatagatcaattaaaagaagatttagtttgtggtatattgcaatatccgggaacgttaggagatataaaagatcctagtgaagcaataagtaaaattcataaaaaaaatggtaaagcaatatta

SEQ ID NO: 219810 - DNA, 685 bp, Unknown
  Bacterial polypeptide expressing nucleotide sequence isolated from the Sargasso Sea
ctggcgccgttcctgccgggccatgcgcacatggcacgcaaggaaggtgcagtcagcgccgcgccgttcggcagcgccagcatcctgccgatcacctggatgtacatcaccatgatgggcggcaacggcctcaagcgcgcgtcgcagatggcgattctcaacgccaactacatcgcccgtcgtctggaagagcactacccggtgctgtactccggtgaaggcggcctggtggcgcacgagtgcatcctcgacatccgtccgctcaaggacagcagcggcatcagcgtcgacgacgtggccaagcgcctgatcgacttcggcttccacgccccgaccatgtccttcccggtggccggcaccctgatgatcgagccgaccgagagcgagtccaaggaagagctggatcgcttctgcgacgccatgatcgccatccgcgaggaaatccgcgcggtcgagcaaggccgtctggacaaagacgacaacccgctgaagaacgccccgcacaccgccctggagctggttggcgaatggcaccacgcctacagccgcgagcaggccgtgtacccgctggcgagcctgatcgaggccaagtactggccgccggtaggccgcgtggacaacgtctacggtgaccgcaacctgatctgcgcctgcccgtccatcgaggcgtatcaggacgcgtaag

SEQ ID NO: 219811 - DNA, 436 bp, Unknown
  Bacterial polypeptide expressing nucleotide sequence isolated from the Sargasso Sea
atgttagaaaataataaaagtttctttagaagacatattggtaattctgagcaagaacaacaaaaaatgcttgatcagcttgattataagaatattaaagacttaatatcaaatacggttccaaataatattcactttaaagagcctttaacaattggtgagccaaattcggagtatgaagcgctcagaaaacttaaaaatatatccaaacaaaacaagatttattcaaactttttaggaatgggttattacggaacctacatacctaacgtaatcttgagaaatatattagagaacccaggttggtacacatcttatacgccatatcaaccagaggtagcccaaggtagattggaaatgctattaaattttcaacaaatgatcactgactttacaggtatggatattgctaacgcttcgcttttagatgaaggca

SEQ ID NO: 219812 - DNA, 940 bp, Unknown
  Bacterial polypeptide expressing nucleotide sequence isolated from the Sargasso Sea
aaaagtgctcacggaaccaatccggcaagtgcacagatgtgtggtatggatattttaatagtaaactgtgatgataaaggtaacgttgacttaactcacttagataaaaaaatcgaagaagcaggagataaattgtctgctttaatgattacatatccatcaacacatggtgtatttgaggaaagtattgttgagatttgtaaaaaaatccatgatgccggaggacaagtgtatcttgatggcgctaattataatgcaatggttggtgtagctaaaccaggtaaatttggacctgatgtatgtcatatgaatctgcataagacattttgtatacctcatggaggaggtgggcctggagttggagctataggattaaaaaaacatttagcagattttgctcctggacatcccatgtttaaaaatgaaattggtttaacaactcaagaggcagtttctgcagctccttggggcagcgcttctattttacctatttcttattcctatatttctatgatgggtgacgatggtttaaaattagcaactcaagttgcaattttaaatgctaattatattaaagaaagattaaaaaattattatcctattttatatactggtaagaataatatggtggcacacgaatttattattgatattaggccatttaaacaagaattaaatatttcagacgaagatattgctaaaagactaatcgattatggatttcatgcacccacaatgtcttttcctgttcccggcactctgatgattgaacctactgaaagtgaatcaaaagaggaactagatagattttgtgaggcaatgatttctattcacaatgaaattactatgattagagatggtaaatttgataaagtagataatcctataaaaaatgcccctcataccattgaagaagtatcttctgacaatgggatcacaa

SEQ ID NO: 219813 - DNA, 994 bp, Unknown
  Bacterial polypeptide expressing nucleotide sequence isolated from the Sargasso Sea
agtagctttgcgcaaacaatagccatcatgcaaagcagagctagacccctaggcattgaaattcatattggcgattcgatggacaaagatagtgaatattttggctgctattaccaatatccaaatgcaaatggtggtattgctgacatgtctgaagtagctgaagaaatacataataaaaatgggttgtttattgttggtacagatttacttgctctaacattgataaaagcaccaggagaatttgacgcagacattgtaattggctcagctcaaagatttggtgtgccaatgggctttggtggaccacatgcaggatttatagctgttaaggacgcattcaaaagatcactcccaggaagactaattggactcacacaggatcaacagggtagaccgtgctataggttggcactacaaacaagggaacaacacatcagaagagaaaaagctacaagtaatatatgtactgctcaagcacttttagcaataatgtctagtttttatgccatatatcatggaccagacggtcttaaggaaattgcctcgagagttcatcaaaaaacaaaagtattagctcataatctaactgcaaatggctttaaattagttgaaaacactttttttgatactttagtaattgaggttgctgacgccaatccgattcataaaaaagcattggagcataaatttaatttcagaaaaatttctaataatctcattggacttagttttgatgaaactaccaaggatgaggatgtaaaaaccattctaaacatatttagcgaaaatatttcaatatctgaaaaagctgaagatgttgtacctgataacttgatgcgtaattcactctaccttacacatgaagtttttaactcatatcactccgaaacccagattctaaggtacattagaagtttagcggacaaagatattgcactagatagatctatgattcctttgggctcatgtactatgaagcttaatgctactt

SEQ ID NO: 219814 - DNA, 943 bp, Unknown
  Bacterial polypeptide expressing nucleotide sequence isolated from the Sargasso Sea
tccagataaaatacagttcaaaggtgaactaaatattggagagccgaattcagaatatgaagcacttagaaaattaaaatcaatttcaaaaaaaaaccaaatttactccaattttattggcatgggttattatggaacttatacaccgtatgttattttaagaaatatattggaaaatcctggttggtatacttcatacaccccttaccaacctgaagtagctcaaggaagattagaaatgctattaaactttcaacaaatgattgttgattttacaggaatggatattgcaaatgcatctttgcttgacgagggaactgcagcagcagaggccatgggcttaagtcatagacttaataaaagtgacagtaatttagtttttatttctgagaattgccatccacaaacaatcgacgttattcaaactagagcagaacctatgggtcttaaagttcttgttggaaatgaggataaagttttagatcagttaaaagaagatgttgtttgtggaattttgcaatatccaggaactttgggtgacattaaagatccaagtgaacatataagtaaaattcataaaaaaaatggtaaagcgatcttggcttgtgatttattggcacttgccaaactaaaaacaccaggagaacttggtgcagatatagcggttggtagctcacaaagatttggtattccaatgggttatggaggaccgcacgcagccttttttgcaacaaaagatgaatttaaaagatcaatgcctggtagaattgtaggtgtttcagttgatagacatggaaacaaggcttacaggttatcactacaaactagagagcagcacatcagaagagacaaagcaacaagcaatatttgtacggcacaagcattactagcgattgtatcagcagcttatgcaatttatcatggaccacgatggaataaagga

SEQ ID NO: 219815 - DNA, 979 bp, Unknown
  Bacterial polypeptide expressing nucleotide sequence isolated from the Sargasso Sea
agttgttgttgtgaattgcgatgaagacggaaatgtagacttaaaagatttaaaaagtaaagttgacaaatactccaatgatctggcggcactaatggttacttatccttcgacacatggagtttttgaagaaaagatcacagaaatatgcgactacgttcacaaagctggcggccaagtatatatggatggtgcaaatttaaatgctttagtcggaattgctaaacctggtaaatttggtccagacgtctgccacataaaccttcataaaacattttgtatacctcacggtggcggtggaccgggtatgggtccgatagcatgtgcaaaacatttagaagatttcttaccaaatcattcagttataaaaagtattggcactgataaaagtcttggttcagtatccgcagccccttggggaagctcaagtattttagttatatcatggatgtatattaaaatgatgggagctgaaggtttaaaaaaggcatctcaagtagcaattttaaatgcaaactatatttcaaaaagattatcaaaattttataaagttttatacactggaaaaaatggaaatgttgctcacgagtgtataattgatttaagacctattaaagctaaatcaggaatttcagaagaagatatagcaaaaagactgatcgactacggttaccacgctccaacaatgtcttggccagtcgcaggaacattaatgattgagccaactgaaagtgaaggattagacgaaatgaatcgtttttgtaacgcattaatatcaattaaagaggaaattgacaaagttgataaaggaaattttgacaaaaaagataatcctctaaaaaatgctcctcatacttatttagagttaagttctaatgaatggaaacattcttacactcgagaagaagctgcgttcccaaaagaatatttaaaagataataaattctggccaccagtagcaagagttgacaatgtatag

SEQ ID NO: 219816 - DNA, 478 bp, Unknown
  Bacterial polypeptide expressing nucleotide sequence isolated from the Sargasso Sea
atgaccaagcaaaccctgacacaactagagcaacacgagttatttctaacccgccacattggcccaaatgctgagcagcaacaagaaatgctcaactttattggtgccgagtcgttagaagacttaaccgcgcaaactgttcctggcaaaattcgtttaccacaagagctcacaatcggtgaatcatgtggcgaagccgaaggtatcgcttatattcgcaacatagcaaacaaaaacaaagtgtttaaaagctatattggtatgggttactacggtgtacaagtgccaaacgttattttgcgtaacgtgtttgaaaacccaggttggtacactgcttatactccatatcagccagaaatcgcccagggccgtttagaagccattttgaacttccaacaagtgtcaatggacctaacaggtcttgacctagcgtcagcctcattgctggacgaggccactgccgcagcagaagccatgg

SEQ ID NO: 219817 - DNA, 895 bp, Unknown
  Bacterial polypeptide expressing nucleotide sequence isolated from the Sargasso Sea
aaatcagtttcttttcaaccaaatgcaggctctcagggagagtttgcaggattattggcaataaattcttattttgaatcaaaaggcgaactttctagaaaaaaatgtttaattcctaaaagtgctcatggaacaaatcctgctagtgcagttatggcaggatttgatgttttaacgattgaatgtgatgacgaaggaaatattgattttcaagatttatcgataaaggttaagaaatttgataaccaaataggagcccttatgttgacctacccttctactcatggagtttttgaattgcaaatcaggaagatatgtgacttaattcattctgttggaggatttgtctatttagatggagcaaatttgaatgctcaggttggattatgcaaacccggtaattatggtgttgatgtttgtcatttgaatttacataaaacattctgcattccacatggaggcggaggtccaggagtgggaccagttgctgcatcagaaactttaagcccatttcttcctactcattctttaatggataataatttatctaatagttctaattatgtttcttctgccaaacatggtagtgcaagtattctgccaataagttggatgtacataaaaatggctggtctaagtggtttaaggaaagcaactgctcatgcaattttatctgcaaattatattgcgcattctttaaagcataaattcaagattctttataaaggaaaaaataattttgtcgcacatgaatgtattttagattttagagatttaaaatcaaaaaccggtttgagtgtaaatgatttagctaaacgattaatagattatagttttcatgccccaactataagttggcctgttccagagaccataatgatagagcctactgaaa

SEQ ID NO: 219818 - DNA, 901 bp, Unknown
  Bacterial polypeptide expressing nucleotide sequence isolated from the Sargasso Sea
agatgagggtacagctgcagctgaagctatgggtttaagttatagaatttgtaaaagtgaaacaaaaaaagtttttgtctcaaaaaattgtcatccccaaaccattgatgtgatcaaaacaagagccgaaccactaggtttaaaagtaatagtaggggatgaagacaaagatattaatgagaatattgtttgtgggattatacaatatccaggaactttaggagacatcaaggatcctagcgaagctattagcaaaatacacaaaaaaaatgggaaagctgtattgatttgtgatttattggctcttgccaaaattaaaacacctgccgaattaggagccgatatagcagtgggaagtgctcaacgttttggaattccaatgggttatggaggtcctcatgccgcgttctttgctactaaagatgaatacaaacggtcaatgccaggaagaatagttggtgtttcagtagatagacatggcaacaaagcttataggttgtctctacaaacaagagagcaacatataagaagagataaagccacgagcaatatttgtaccgcccaagctttgctagcaatagtttcagctgcctatgccgtatatcacggtccaaaaggaattaaaaaaatagcagacactgtttcacaactagctaaaagctttgcagataaattaaaacaatctggttatgaactttattcaaattatttttttgacactgttaccgtaaaaacattggataaaacgaataaaatttataaaaatgcattacgtcaacaagtaaatataagaaaagtaaattctgaaatgctagcagtttcatttgatgaaagaaaaaatatttatagagctaatcaattgttaaaaatttttaactgttcagagacgataaggaaacga

SEQ ID NO: 219819 - DNA, 865 bp, Unknown
  Bacterial polypeptide expressing nucleotide sequence isolated from the Sargasso Sea
tatgacatccaaatttgggtctaatttgtttatagataggcatcttgggttaggagataatgatgaaagaattatgctgaacaagctcggttttaataatattgatcaatttataaatcaagttattcctgatgatattcagcttaaagataaatcttcagaaatattgccccaaggttgttcagaaattgaggctttaaacgaattagaagagattgcgaataaaaatactaaaatgagatcacttataggccttggttattatgacaatcatatgcctaaagtaatccaaagacatgttcttgaaaatccaaggtggtacacgtcttatactccatatcaagcagaaattgcacaaggaagattagaagctctatttaattttcagactattgtttgtgaactgacaggattccctgtcgctaatgcatctttgttggatgagggtactgctgcagcagaagccatggctatgagtttttccgcaagaaacaataaatcttcaaaagtgtacttagtggagtcaaatgtttttgatcatacttttaatgttctacaaaccagagcaaagcctttgggaatatccttaaaacgctttactcaaagcaaccttcctaatcatgatgatgtttttggaatgttgttgcaattacctggtaaaaatggacaattatatgatcctacattcttagtatctcaagcacatagatcagaaattattgttacggcatgtattgacccactagcacaagttttgattaaaccaatttctgaatttggtgttgatgtagcagtgggaagtatgcaaagatttggtgttccaatgggtttttggtgggcctcatgcagcatattttgcttgtag

SEQ ID NO: 219820 - DNA, 946 bp, Unknown
  Bacterial polypeptide expressing nucleotide sequence isolated from the Sargasso Sea
tgcgactaaagatgaatttaagagatccatgccaggaagaattattggtgtttctgtagatagacatggaaataaagcttatagactcgcattacaaactagagaacaacatataagaagagataaggcgacgagtaatatatgtactgctcaagcactgcttgcaattgtttctgcagcatatgcaatttaccatggtcctaaaggaattaggacgatatcagaaagagtttctcaacttgctaaaaattttgccgataaacttaaacagtcaggttatgaactttattcagactatttctttgatactgtaacagtgttaacaaaagataaaactgaacaaatatttcaaaatgctttatctcaaaaagtaaatatcagaaaagtaaattctgaaatgttagcagtgtcttttgatgaaaagaaaaatgtttacagagcaaatcaacttttaaaaatatttaattgtgctgaagctataaaagaaaatccaacggaaagtttacctaatcttccaaaaaatttacttagaacttctaaatatttagaacacaaagtatttaatagttatcactcagaaacagaaatgattaggtatttaaaaagacttgaggataaagatatagctcttaatagaacaatgattgcgctgggttcatgtacaatgaaactaaatgccgttgcagaaatgatacctattagttggagagaattctcagaaccacatcctttcgctccaatagaacaaatggaaggttttagaactttatttactgatttgaaaaattggttgagatcagtaactggattttctggagtttctttgcaaccaaatgcaggtgctcaaggagagtatgctggtcttatggtgattagaaaatatcatatggagagaggtgaaaaaaatagaaatgtatgcttaatccctagttcggcacatggtaca

SEQ ID NO: 219821 - DNA, 804 bp, Unknown
  Bacterial polypeptide expressing nucleotide sequence isolated from the Sargasso Sea
aatgaaaaaagacgttaaatattatcagcatcagtttgtagatagacacgtagggccaaaccaagaagaattatcacaaatgcttcatactattggtgtaggatcaattgaagagttaattgatttatccataccaaaatcaattcaatcaaaagaaaaattaaacgtaggcaatggcatatcagaaaaagaacttatcgaaaaattaaaatcaattgctgaaaagaatacaataatgaaaacatatatagggatgggatactataattgtataaccccaccagttattcagcgaaatattttagaaaaccctggttggtatacacaatatactccatatcaagcagagataagtcagggcaggctagaggctttaataaattttcaaacgatggtctgtgatcttacagcattacctattgccaatgcatctttactggatgaggcaactgctgctgctgaggcaatgacaatgacttatagaatgagtaaagatcgtaacatttttttagtatcaaagcattgtcatcctcaaacaattgatgtgctgaaaacaagatctgaacctttaggtattactatacaattatgtgatgatgatgacttcattttcaatcaaaatgtttttggatctattttacagtatcccgatacaaatggatcagtgaataattttcaaaaattaacaaatgctgcccataaagaatctgcttatgtaattattgcaactgatctaatgagcttagctttactaaaaccaccaggagagcttggtgctgatgttgctctaggctcatctcaacg

SEQ ID NO: 219822 - DNA, 802 bp, Unknown
  Bacterial polypeptide expressing nucleotide sequence isolated from the Sargasso Sea
atgttaccaaattcagaaaaagattttttaaagagacacattggaccttctaaagaagatcaatcaaaaatgttaaaagaattaaattataaatcgctagatgatttaattgacagcacagtgccagaaaaaataaagtttagaggtgaattaaacattggtgaatcaaattcagaatatgaagctttgagaaaattaagagcaatatcaaaaaaaaaccaagtttactcaaattttattggtatgggttattatggaacttatacaccttatgtaattttaagaaatatattagaaaatccaggttggtatacttcatatacaccttatcagccagaagtagctcaaggaagacttgagatgttattaaattttcaacaaatgattgttgattttactggaatggatatagctaatgcctctttattagatgagggtacagcagcagcggaggctatgggcttaagtcacagattgaacaaaaaagatagtaatttagtttttgtatctgaggattgtcaccctcaaacaataaatgtaattcaaactagagctgaaccgttgggtttaaaagtattggttggtaaagaagatgaggttctagaccagttaaaagaggatttagtttgtggaattttacaatatcctggaactttaggagatattaaagacccaagtgaagcaattagcaaaattcataaaaagaatggtaaggctgtattagcttgtgatttgttagcattagcaaaattaaaaacaccaagagaacttggtgctgacatagcagttggaagctcacaaa

SEQ ID NO: 219823 - DNA, 934 bp, Unknown
  Bacterial polypeptide expressing nucleotide sequence isolated from the Sargasso Sea
catggtaataagagcattccaccgagataaaggaaacgataagcgaacaatttgtttgattcctgaatctgctcatggtactaatcctgccagcgctgtgatggccggaatggatgttattgtcatcaagtgtgatagctcaggaaatatcgatgttaaagatttaaaagaaaaagcgtatgctaataaagaaactttgtcagctttaatgatcacctatccttcaacgcatggggtttttgaagagtcggttaatgaaatttgcagtatcattcatgattgcggcggtcaagtatatcttgatggtgccaatttaaatgctatggttggtttatcgaggctaggagattttggtgcagatgtatgtcacattaatttacacaaaacctttgctattccacatggtggtggcggtccaggaatgggccctatctgtgttgccgaacatctctcatcctacttacctgggcacacagttcttgataataattcaaagtcgatctctgcaatatctgctgctccgtatgggagtgcaagcatcttaccaatttcatggggttatattaccatgcttggaagtgatggattgaaaaaagcttcagaaattgccatattgaatgcaaactatatggcgaaaagacttgaaagtgatttttcagttttataccgaggaataaataagacttctgcgcatgaatttattattgatctcaggagattaaaaaatgatacagggataagcgacgaagacgtagcaaagcgtttaattgattatggatttcatgctcccacaatgtcatggcctgtaccgggaaccctaatgatagaaccaacagagagtgaatcgaaacgggagcttgatagattttgcgatgcaatgatatctattaagaaagaaatcgataaggtcgttagtggagaatttgatcctgaa

SEQ ID NO: 219824 - DNA, 982 bp, Unknown
  Bacterial polypeptide expressing nucleotide sequence isolated from the Sargasso Sea
gcaggttttgacgtgttaactgttgaatgtgatgacgaaggaaatattgattatcaagattatttaatcaaggtcaagcaatttgataaccaaataggggctcttatgttgacttatccctctactcatggagtttttgaattacaaatcagaaagatatgtgatttaattcattctgtgggaggatttgtctatttagatggagcaaatttgaatgctcaggttggattatgcaaacctggaaactatggcgttgatgtttgtcatttgaatttacataaaacattctgcattccacatggaggtggtggtccaggagtaggtccagttgctgcatcagaaactttaagcccataccttcctgctcattctttaatggataataatttatctaatagttttaatttcgtatcttctgccaagcatgggagtgcaagtattcttccaataagttggatgtatataaaaatggcaggtcttagtgggttaagaaaagcaacttctcaagcaatattatctgcaaattatattgcgcattccttaaaacataaattcaagatcctctataaaggaaaaaataattttgtcgcacatgaatgtattttagattttagagatttaaaatccaaaactggattgagtgtcaatgatttagctaaacgattaattgattatagttttcatgccccaactattagttggcctgttccagaaaccataatgatagagcctactgaaagtgaaagtttggcagaagtagatagattttgtgaggctatgctattgattggagaagaaatcagtgaaatagaaaataatcatgaattaaaaaataataatgtaataagcaatgcaccccatacgctgaaagagttaattgctgataattggcaatatccttattcaaaagaaaaggcttctttcccttataaaactccaacaactattaagttttggtcttcagtttctaggatcaataatg

SEQ ID NO: 219825 - DNA, 1067 bp, Unknown
  Bacterial polypeptide expressing nucleotide sequence isolated from the Sargasso Sea
tattacagggtatgaggcggtttctcttcaacccaatgcaggatctcaaggagagtatgccggtttacttgcaatagatgcctatcataaacaaagaggtgatgaaaaaagaaatatttgcttaatacccaaatcagctcatggaactaaccctgcttccgctcagatggtgaatatgattcccattcctgtcgaatgtgatgatgaaggaaatatagatatccaagatcttaagcagaaggctgaagaaaataaagagcagctagctgcaattatgatcacctatccctctactcatggtgtgtttgaagatactgtaaaagaggtttgtgaaattattcataaaaacggcggacaggtttatttagatggagcaaatttaaatgccatggtagggatttgttatccaggagagttcgggggtgatgtatcgcacttaaacttgcataaaactttctgtatacctcatggtggtggaggtccgggggttggcccgatcggagttaaagagcatttaaaagattttctaccaggatttcatgaaaaagattctatcgtcggtccagtatctgcctcaaattggggaagtgctagcatactccctatcagctggatgtatataaggatgatgggctcagatcatttgaagaaggcctctgaaatagctattttaaatgccaattatattgccaagagacttcaagaccattaccaagttttatataaaggttctaatggtttagtagctcacgaatgcatccttgatgttagagatctaaaggaattagatattgaagtagaagacatagcaaaaagattaatagattatggcttccatgcgcccactatgtcttggccagttccaggaacactaatgatagagccaactgagagtgaatctaaaaaggagatagacaggttttgtgaagctatgatttcaataaaggaagaaattcaaagaataaaatctggaactcttccgaaggaaaataatatgctaaaaaatgctcctcatacttcactacatatctcggaagatgaatggacacatccgtatagtagatgaa

SEQ ID NO: 219826 - DNA, 922 bp, Unknown
  Bacterial polypeptide expressing nucleotide sequence isolated from the Sargasso Sea
ttaaattttgaagtaaaatctataaattattttgataccttattaataaaagatacaaaatctaaatactgggtaaataaatctatagacaatggtataaattttagatttgtaaatgacgatcatttttctatttccttagatgaaactacatcactacaagatgtagataatttaattaaattttttaatgaaaacaataatgaaatatacgcagaagaaattgaaagtaaaattgaagattcgatttttaaaagtgatttagatagaaaagataaaatattaactcatcctgtatttaatatctatcattctgaaacagaaatgatgagatatttaaaaaaattagaaaataaagacgtttctttaaatagatcaatgatacctcttggatcttgtactatgaaattaaatgcggcatcagaaatgcttccaattactttaccaggtttttcaaatgcgcatccattcttagagccacatcaacgtgagggatataatgaaatgatgagtgaattaatatcgatgttaaaagatattactggttttgatgcagtttcactccaacctaatgcaggagcacaaggtgagtttgctggtttattagctatacaaaaatatcatgagaaaaattcagatactaaaagaaatatttgtataattcctaaaagtgctcatggaactaatccagccagtgcacagatgtgcggtatggatattttaattgtaaactgtgatgacaaaggtaatgtagatttaactcacttagataaaaaaatagaagaggcaggtgatagactgtctgctttaatgattacttatccatcaacacatggtgtattcgaagaaagtattgttgagatttgtaaaaaaattcatgaagctggtgggcaagtttatctagatggcgctaattataatg

SEQ ID NO: 219827 - DNA, 841 bp, Unknown
  Bacterial polypeptide expressing nucleotide sequence isolated from the Sargasso Sea
atggcactagttggtattgcaagacctggaaattttggcccagatgtatgtcatataaatttgcataaaactttttgtattccccatggtggcggtggacctggaatgggacctatagcgtgtaaaagacatttagaacctttccttcctaatcatcctgtaattaaagattgtggtcctgcttctggaattggatctatttcagcagccccttggggtagcgcaagtattttggctatttcatggatgtatataaaaatgatgggatccgaaggattaagaatagcgacagaaaatgcaatacttaatgcaaattatgttgcttataaactaaaagatttttttccaattttatacaaaggcaaaaatggaaatgttgcccatgagtgtataattgatattagaccaataaaaaatgacactggtataactgaagaagatatagccaaacgtcttattgattttggttttcatgcaccaacaatgtcttggccagtggcaggaacaatgatgattgaaccaacagaaagcgaaagtttaagagagttagatagattttgtaatgcattaataacaatcaagaatgaaatcgataaaattaaatcaggtgaatatgacaaaactgacaatccaataaaaaatgcacctcatacggatgtcgaattagtatctaatgagtggaaacataaatattcaagagaagatgccgcttatccagctgtgtatctaaaagaaaataaattttggcctcctgttgcaagggttgacaatgtttatggagataaaaatttattttgttcttgtcctagcatggatgagtttaaagaagatgctgcataat

SEQ ID NO: 219828 - DNA, 928 bp, Unknown
  Bacterial polypeptide expressing nucleotide sequence isolated from the Sargasso Sea
agatggttatagagaattatttacagatttaaaaaattggcttagatcaattacaggtttttcaggtgtatcattacaaccaaatgctggagctcaaggagagtttgctggtttaatggttattcgtaaatttcatgaaaaaaatcgtgaagacaatcgaaatgtttgtttaataccaagttcagctcatggtacaaaccctgcaagtgcacaaatggtaggcatgaaagttgttgttgttaaatgtgatcaacatggaaatgtagactttgaagatttaaaaaataaagctgaagaacattcaaataatcttgccgcattaatggtcacttatccttcaacacacggtgtttttgaagaaaagataactgatatatgtgaacttgttcataagcatggaggtcaagtttatatggatggtgcaaatttaaatgcattagtaggaattgcaaaacctggtaaatttggtccagacgtttgccatattaatttacataaaacattttgtataccacacggaggaggtggaccaggtatggggccgatagcatgcaaaaaacatttagaaggttttttacctaaacattctgtaattaaagattgtggacctgccactgggattggagctgtctctgctgcaccttggggaagtgcaagtattttatcaatttcgtggatgtacattaaaatgatgggatcagaaggattaaaaaaagcttctcaagttgcaattttaaatgcgaattatattgctcataagttaaaagattattttccaattttatataagggcaaaagtggaaatgttgcccatgagtgtattattgatattagaaaattaaaaaaagaaacaggaataaccgaggaagatattgcaaaaagattaatagactttgttttcatgcgccaaacatgtcatggccagtag

SEQ ID NO: 219829 - DNA, 1018 bp, Unknown
  Bacterial polypeptide expressing nucleotide sequence isolated from the Sargasso Sea
aaagatagtaatttagtttttgtatctgaggattgccatcctcaaacaataaatgtaattcaaactagagctgaaccaatgggtttaaaagttttagttggaaaagaagaagaagttttagatcaattaaaagaggatttagtttgtggagttttacaatatcctggaactttaggagatattaaagatcctagtgaagcaattagcaaaattcataaaaaaaacggtaaggctgtattagcttgtgatttattagcattagcaaaattaaaaacaccaagagaacttggtgctgatatagctgttgggagctctcagcgatttggaataccaatggggtatggaggtccacatgcagcattttttgcaactaaagacgattataaaagatcgatgcctggtagaattgttggtgtgtcggttgatagacatggtaacaaggcatatagattatctttacagactagagagcaacacatcagaagagataaggcgacaagcaatatttgtactgcacaagctttattagcaattgtttcagcagcatatgctatttatcatggcccagatggaattaaaaatatttctgaaagagtttctcaattagcaaaaagttttgctgataaaataaaacagtcaggttatgaaatttattctgattatttttttgatactgttacaattattaccaaagaaaagactgatcaaatttataaaaatgctctaaatctgaaagttaatatacgaaaagtaaactctgaaatgcttgctgtctctttcgatgaaagaaaaaacgtttatagagtaaatcaattattaaaaatttttaatgctgcagaatcaataaaaaaagaggatccttcagttaaattacctaatttaccaaaaaatttattaagaacttcaaaatatttagagcatccaatttttaacttatatcattcagaaactgaaatgcttagatatcttaaaaagctagaggataaggatatagcattaaatagaactatgatagcac

SEQ ID NO: 219830 - DNA, 862 bp, Unknown
  Bacterial polypeptide expressing nucleotide sequence isolated from the Sargasso Sea
ttggaaaatttaaataaaataaatctcttttcaaaacgccaccttggttcgggtgaggctgatattaattatatgcttcaggaggttggatacgactctatgagctcttttattgactcagtagttcctggatcaatcctcaaaagaaatgctgttcaaataggcgaagaaaagactgaagaagaagttctggaagagttgagagcaatagcttctaaaaataaggtattcaaaagttttattggtcaaggtcattataataatttcacaccatctgtaatccttagaaatgtttttgaaaatcctgggtggtacacctcgtatacaccctatcaaccagaaatatctcaaggaagattagaagctttaattaactttcaaacaatggttagtgatcttaccgccatggaattatctaatgcttctttacttgatgaagcaactgcagccgcagaagcgatgacactagcgaagcgctcgtctaaatcaaaatctgattcttttttcgtagatgaaaatagttttcaaaatacaataaatgttctcaaaactcgagccgagcctttgggtataaagcttatatttggtaaccctactgatctttcaagccatgaggtctttggtgcattccttcagtatccaggttcaaacgggaaaattactgatatgagccaacatattaaatcatgccatgaccaatctgctttagctgttataggttctgatcttttggcattaacaatcctgaaaccccccggggaaatgggggcagatattgtcattgggtcctcacagagatttggcgtacctttaggatgcggaggaccgcatgcagcttttatggcagttagcgacaaatgaa

SEQ ID NO: 219831 - DNA, 799 bp, Unknown
  Bacterial polypeptide expressing nucleotide sequence isolated from the Sargasso Sea
ttgtcatttgaatttacataaaacattctgcattccacatggaggtggtggtccaggagttggcccagttgctgcatcagaaactttaagcccataccttcctactcattttttaatggataataatttatctaatagttttaatttcgtatcttctgccaagcatgggagtgcaagtattcttccaataagttggatgtatataaaaatggcaggtcttagtgggttaaggaaagcaacttcgcacgcaattttatctgcaaattatattgcgcattccctaaaacataaattcaagattctctataaaggaaaaaatgattttgtcgcacatgaatgtattttagattttagagatttaaaatccaaaactggattgagtgttaatgatttagctaaacgattaattgattatagttttcatgccccaacaattagttggcctgtttcagaaaccataatgatagagcctactgaaagtgaaagtttggcagaagtagatagattttgtgaggctatgttattgattggagaagaaatcagtgaaatagaaaataattatgaattaaaaaataataatgtaataagcaatgctccccatacgctgaaagagttaattgctgataattggcaatatccttattcaaaagaaaaggcttctttcccttataaaactccaacaactattaagttttggtcttcagtttctaggatcaacaatgcatatggcgatcgcaatttaatttgttcatgcaatgtaaatcaagatgagactttagaagaaaaaaaatgtgcttaa

SEQ ID NO: 219832 - DNA, 1000 bp, Unknown
  Bacterial polypeptide expressing nucleotide sequence isolated from the Sargasso Sea
cgagccctaagaatgccccttcaacaaagagagcagcatattagaagagcaaaagctacttcaaacatatgtacagcacaagtgctgctttcagtgatggcaagcatgtacgcagtctatcatggcagagatggtatcatatctatagcaaataacatccatgaaaaaacctctcttttggctagctcattagctaaatcagggttcaaaattgtacacagccaattctttgatactataaggattaagcttgaaaagagtcaaagcgaattaataaaagaggaagcattgaaaaatcatattaacctgagatattttgacaatcatgacattggtatttcgctcgatgaaactgtcaatgataatgatttaattgatatactgactacgttcaacgcaaaaattactgatacggttaattatagtatagaggtcaaaagaaattcagattttatgagacatccggtttttaattcttatcaatctgaaactgaaatgatgagatacattcataaacttgaaacaaaggatttagctcttaacaccagcatgatttcattaggttcctgcactatgaaattaaatgctgcaacccaaatgatccctgtttcttggaatgaattctctaatcctcatccttttgcgccccttgatcaaaatgaaggatatttaaaactcttcgatgatctttctaattggctcaaaaatattactgggcttgatggatgctctttgcagccaaattccggtgctcaaggagaatacactggtcttttaacaattcgggcttatcatattgataaaaaaaataccgaaaaaaatatttgtttaataccggagtcagcgcatggtacaaatccagctagcgctgtgatggcaggaatgaatgtagttccaataaaatgcgattctatggggaatattgatattgaagacttaaaggataaaattcattctcacaaagatcaaatttcttgtatgatggtgacctacccttcaa

SEQ ID NO: 219833 - DNA, 914 bp, Unknown
  Bacterial polypeptide expressing nucleotide sequence isolated from the Sargasso Sea
tgctcaaggcgaatatgcaggactgatggttatacgcaaatatcatcttgaaaggggagagtctaacagaaatgtttgtttaattcctagctctgctcatgggactaatccagcaagtgcgcaaatggttggaatgaaagtggtagtggttaactgtgataaacaaggcaatgttgattttgaagatctaaagaaaaaagcagaagcgcattctgagaatttaggtgcattaatggtaacatatccatccacacatggcgtttttgaggaaaaaatatcagatatatgtgagttagtacataaacatggtggccaagtttatatggatggtgcaaacttgaatgctcttgttgggatagcaaaacctggaaattttggtccagatgtatgtcatataaatttacataaaactttttgtattccacatggaggtggtggaccaggtatgggcccaatagcatgtaagagacatttagaaatatatttgccctcacatcctgttataaaagattgtggtcctgcaactggtataggtcctgtctctgcagcaccgtggggaagttcaagtattctatctatttcttggatgtacattaaaatgatgggttctgagggtttaaaattagcaacccagattgcaattttaaatgctaattatattgcacataaattgaaaaatcattttccaattctatataaaggaaaaaatggtaacgtagctcatgagtgtattatagacatcagatcaattaaaaatgatactggtgtaacagaagaagatattgcaaaaagattaatcgattttggttttcatgctccaactatgtcttggccagtgcctggaactatgatgattgaacctacagaaagtgaaagtttacaagaactcgatagattttgtgattgcttgataa

SEQ ID NO: 219834 - DNA, 967 bp, Unknown
  Bacterial polypeptide expressing nucleotide sequence isolated from the Sargasso Sea
ttattcggatcatttctttgatacagttacaattgttactaaagataaaactgatcaaatctataaaaatgctttagatcaaaaagtcaatattagaagagtaaattctgaaatgctagctgtttcttttgatgaaaagaaaaatgtttatagagtaaatcaattactaaaaatttttaatgcagcagaatcaattaaaaaggaagatccaacagtaagtttacccaatcttccaaaaaatttattaagaacttcaaaatatttagaacatcctgtttttaattcttatcattcggaaacagagatgcttagatatttaaaaaaattagaagataaggatatagctctaaatagaactatgattgcacttggctcttgtactatgaaattaaacgctactgcagaaatgatacctatttcatggagagaattagcagagcctcatccatttgtgcctattgagcagatggaaggatatagagatttattcactgatcttaaaaattggcttagatcaattactggtttttctggggtttcacttcaaccaaatgcaggcgctcaaggggagtatgcaggattaatggttattagaaaatatcatttagatagaggtgaggaaaatagaaatatatgtttaataccaagttcagcacatggaaccaatcctgctagtgcccaaatggttggaatgaaagttgtcgttgttgattgtgataaagaaggaaatgttgattttgaagatttaaagaaaaaaatagaaatgcattctgaaaatcttggagcattaatggtcacttacccgtctactcacggagtatttgaggaaaaaattacagatatatgtgagttaattcataaacacggtggccaagtttatatggatggtgcaaatttaaatgcgcttgttggtatagcaagacctggaaattttggtccaagatgtttgtcacataaacttacataa

SEQ ID NO: 219835 - DNA, 979 bp, Unknown
  Bacterial polypeptide expressing nucleotide sequence isolated from the Sargasso Sea
gtcggtgtatcagtcgatagacatggtaataaggcatatagattatctttacaaactagagagcaacacatcagaagagataaagcgactagtaacatttgtactgcgcaagctttattagcaattgtgtcagcagcatatgccatttatcatggtccagatggaattaaaaatatttctgaaagagtgtctcaattagcaaaaagttttgctgataaaattaaacagtctggatatgaactttattctaataatttttttgatacggttacaattattacaaaagaaaaaactgatcaaatttataagaatgctttgaatcaaagagttaatatacgaaaagtaaattctgaaatgttagctgtttcttttgatgaaagaaaaaatgtttatagagtaaatcaattattaaaaatttttaatgcagcagaatcaattaaaaaagaggacccttcagtaagtttacctaatttaccaaaaaacttattaagaacttcaaaatatttagaacatccagttttcaacttatatcattcagaaactgaaatgcttagatatttaaaaagattagaagacaaagatattgcattgaatagaactatgattgcacttggctcatgtacaatgaagttaaacgctgctgccgaaatgatcccaatatcatggaaagaatttgcagaacctcatccgtttgttccaatagaacaaatggagggttttagagatttatttactgatttaaaaaattggttgcgatctataactggtttttcaggtgtttctttgcaacctaatgcaggtgctcaaggtgagtatgcaggcttaatggttatcagaaaatatcatttagatagaggtgagcctaatcgtaatatatgtttaattccaagttcagcacatggtactaatccagcaagtgcacaaatggtgggaatgaaagtagttgttgttaattgtgataaagcaggggtaatgtaga

SEQ ID NO: 219836 - DNA, 490 bp, Unknown
  Bacterial polypeptide expressing nucleotide sequence isolated from the Sargasso Sea
tttgtacaaggggtcaaatggcaatgtggcacacgaatgtattattgatattagaaaaataaaatcagaaccaggaatacgggaggaagatattgcgaaaagattaattgattatggttttcatgcaccaactatgtcctggcctgttgctggcacaatgatgatagaaccaactgaaagtgaaagccttacagaaatagacagattttgtgaaactttaattaagattaaaaaagaaatagacaagattaagtccggagagtttgataaagtagacaatccaattaagaacgcacctcatactgatcttgaactgtcttctgacgaatggaaacacaaatactcaagagaagaagcagcttatccatctaaatatttaaaaacaaataaattttggcctccagttgctagagttgataatgtttacggagataaaaatatattctgcacttgtccaagtattgacgaatttaaagaagatgcagcttaa

SEQ ID NO: 219837 - DNA, 934 bp, Unknown
  Bacterial polypeptide expressing nucleotide sequence isolated from the Sargasso Sea
gccccaagatcaaatgaaagggtataaggttttatttaatgatttagttaatgatttgaaggaaatcacaggttttgatgcagtttcccttcaaccaaattcaggtgctcaaggagaatattcaggattaatgacaatacgtaaatttcatatgaataataatcaaaaaaatagaaatgtatgtttgataccagagtcagcacacggtacaaatcctgcaagcgcacaaatgtgcggtatgaaagtagtagttgttaattgcgatgaagaaggcaatgttgatttaatagatttaaaagataaggtaaataagtattcaaaagatttagctgctctgatggtaacctacccatcaacacacggagtattcgaagaaaaaattagtgaaatttgtgattatgtccataaagctggcggtcaagtttatatggatggtgcaaaccttaatgcactagttggtattgcaaaacctggaaaatttggaccagatgtttgtcatattaacttacacaaaactttttgtattccacatggaggaggagggccaggcatgggtccaatcgcatgcgcaaaacacttaaaagattttttaccaaatcataacattactaaaaataatagatccgagaaaagtttaggctctgtatctgctgcgccatggggaagtgcgagtatattaccaatttcttggatgtatataaagatgatgggagctgaaggtttaagaaaagcatctgaggtagcaattttaaacgcaaattacatatcaaaaaaattatctaatcattataaagttctctacaaaggaaaaaatggaaatgttgcacacgaatgtattatagatcttagaccaataaaatctaagtcgggaatttcagaggaagatatcgccaaaagatataatagattacggttatcacgccccaacaatgtc

SEQ ID NO: 219838 - DNA, 780 bp, Unknown
  Bacterial polypeptide expressing nucleotide sequence isolated from the Sargasso Sea
aaggttttagtcggtaaagaagatgaagttttagaccagctaaaggaaaatttagtatgtggaattttacaatatcctggaactttaggagatattaaagacccaagcgaagcaattagcaaaattcacaaaaaaaacggtaaggctatattagcttgtgatctgttagctctagcaaaattaaaaacaccgagagaacttggtgccgacattgcggttggaagctcccaaagatttggcattccaatgggatatggaggtccacatgcagctttttttgcaactaaagatgagtataaaagatcaatgccaggaaggattgttggcgtatcagttgatagacatggtaataaggcatatagattatctttacaaactagagagcaacacatcagaagagataaagcgactagtaatatttgtactgcccaagctttattagcaattgtgtcagcagcatatgctatttatcatggtccagatggaattaaaaatatttctgaaagagtgtctcaattagcaaaaagttttgctgataaaataaaacagtctggatatgaactttattctaataatttttttgatacggttacaattattacaaaagaaaaaactgatcaaatttacaagaatgctctgaaccaaagagttaatatacgaaaagtaaattctgaaatgctagccgtttcttttgatgaaagaaaaaatgtttatagagtaaatcaattattaaaaatttttaatgcagcagaatcaatcaaaaaagaggaccttcagtaa

SEQ ID NO: 219839 - DNA, 984 bp, Unknown
  Bacterial polypeptide expressing nucleotide sequence isolated from the Sargasso Sea
ggtgggctcagcacaaagatttggtgtgccaatgggatttggtggtccacatgcaggttttatggcggttaaagatgtctataaaagatctctacctggcagattaatcggattaactcaagatagtaaaggacgtccttgctacagactcgcactacaaactagagaacaacacattagaagagaaagggcgacaagtaatatttgtacagctcaagcattattagcaattatgtctagcttttatgcaatttaccacggtccaaatggtctaaaatctattgcgagtgatgttaaagaaaaaacactaaaaattgctaatgagctctctagaaaaggatatgttattaaaaataacaattttttcgacacactagttatggaacttgaaaatccagaacaagttcatctaagagcaaaggataaaaaaattaatttaagacttatctctgaaaaagaattaggcctgagttttgatgaaatgacaacggatcaggatgttaataacatatctgagctttttgaggatctaaaaaagccattgaaaaaatatgaaataaactgggataaatctttcgatagaaaaacagagtatttaaatcatgaagtatttaacagccatcactcagaaacacaaattctaaggtatatcagaagtctatctgacaaagatatagctctggataggtgcatgattccattgggttcttgcacaatgaaattaaacgctacttctgaaatgattccagttggctggaatggatttgcaaatgttcatccacatgcgccaactgatcaaaccgaaggttatcaaaaaataatttgtgatttagaggattggctatcacaaattacaggttataaagcaatctctttacaacctaatgcgggatctcaaggtgaatatgctggactgcttgctatcgatagctttcataaggctaataacgaccatgatagaaatatatgtttaattccagaatc

SEQ ID NO: 219840 - DNA, 967 bp, Unknown
  Bacterial polypeptide expressing nucleotide sequence isolated from the Sargasso Sea
aatgttaatacaatatcaaaataaatttggagaaatagaagatttttcaaggctatcagattactgcaaaaagaataagtccttgcttgtttgtgctactgatcttcttgccttaactcttttgagacctccaggagaaattggtgctgatattgttataggttcatcccaaaggtttggagtcccaatgggatttggagggccacatgctgcatttatggctacacatgagaattttcaaaggtcgatgcccggaagaattataggggcatctaaagatgctagcggaaatctatcttacaggcttgcacttcaaacaagagaacaacacataaggcgagaaaaagccacaagcaatatttgtacttctcaagcgctacttgctgtgatggctggcttttttgctatctatcatggtccaaatggtctgataggaattgctaatgatgtccataaaaaaactcgtaaactttttaatgcccttaagtctggcgatcatgaaattctaaataataacttttttgatactctttctattcgcttaaaaggagatatttcggaaataaaaactcgtctactcgatgcaaaaataaatattaattggtttgataataatttagttagtatctcaatagatgaagccacaacctctgacgatattgctgatctggtctttgcgctctcaggaaagcctatatcaaatgattccgaagatggcgaagctagtcttaataaagaaatagttagatcctctgattttatgaaacaggagcgttttaataaatatcattccgaaacagagatgatgagatatattaaaagactatctgataaggatatcgcgctcgatagatcaatgattccacttggctcttgtacaatgaaattaaactcagcttctgaaatggcgccagtaagctggccagaattgcaaacatgcatccatattgtccgaccgatcaaacaa

SEQ ID NO: 219841 - DNA, 418 bp, Unknown
  Bacterial polypeptide expressing nucleotide sequence isolated from the Sargasso Sea
aggtatttcagaagaagatatagctaaaagattaattgattatggatttcatgcgccaacaatgtcatggccagttgctggaacaatgatgattgaaccaacagagagtgagagtttatctgaactggatagattttgtgacacattgattagcattaaagaggaaatagatatggtcaaatcgggcaagtttgacaaagtagataaccctattaaaaatgcacctcacaccgatattgaattagcttcagatgaatggaatcataaatattcaagagagcaagctgcatatcctgcaaaattcttaaaagcaaataaattttggcctccagttgcaagagttgataacgtgtatggagataaaaatattttttgcacttgtccaagtatggatgagtttaaagaagatgcagcataa

SEQ ID NO: 219842 - DNA, 1042 bp, Unknown
  Bacterial polypeptide expressing nucleotide sequence isolated from the Sargasso Sea
atatttaattgtgctgaagctataaaagaaaatccaacagaaagtttacctaatcttccaaaaaatttacttagaacttctaattatttagaacacaaagtatttaatagttatcactcagaaacagaaatgattaggtatttaaaaagacttgaggataaagatatagctcttaatagaacaatgattgcgttgggttcatgtacaatgaaactaaatgccgttgcagaaatgatacctattagttggagagaattttcagaaccacatcctttcgctccaatagagcaaatggaaggttttagaactttatttactgatttgaaaaattggttgagatcagtaactggattttcaggagtttctttgcaaccaaatgcaggtgcccaaggagaatatgctggtcttatggtgattagaaaatatcatatggagagaggtgaaaaaaatagaaatgtatgcttaatccctagttcggcacatggtacaaatcctgcaagtgctcaaatggcaggaatgaaagttgtcgtcgttaattgtgataaagatggaaatgtcgactatgaagatcttaaaaagaaagccgaacagaattcagaaaatcttggtgctttaatggttacttatccgtcaacgcatggagtttttgaggaaagaatatctgacatatgcgaattaatccataagcatggaggccaagtttatatggatggcgcaaaccttaacgctttagttggtattgctaaacctggtaactttggacctgatgtttgtcacataaacttacataaaacattctgtattccacatggtggtggtggtccaggtatgggaccaatagcatgtaaaagacatttggaaatatatttgccaacacatccagtaataaaagattgtggtccagctacaggtatcgggcccatatctgcagccccttggggaagttcaagtattttatcaatttcatggatgtatataaaaatgatgggttcagaaggtcttaaacttgcatcacaaatagcaattttaaacgctaactaca

SEQ ID NO: 219843 - DNA, 778 bp, Unknown
  Bacterial polypeptide expressing nucleotide sequence isolated from the Sargasso Sea
cggcccttcaccggctgagatggcccatatgctggagacactaggcttatccgacctagacagtctaattgatgaaactcttccaaaatcaatacgccaaaaaaatcctttaaactttggaaagccaaaatcagaaagggctcttttaagtcacatgcgggtaactgcttcaaaaaataaagttctgacaagtcttatcggtcaaggttatcatggaacagtgactcctccagtaattcagagaaacattttagaaaaccctgcgtggtatacggcgtatacaccttatcaacctgagataagtcaggggcggttggaagcattattaaattatcaaacaatgatatccgatcttaccggcctagaaatcgccaatgcttctctcttggacgaagccacagcttgtgctgaagcaatgacaatggctgaaagagttgccaagtcaaaagcaaaagcttttttcattgatgagaattgtcatatacaaaacattgaagttatgaaaacaagggctcgtcctttaggtattgaaatcgttgtgggtgatcctgacaatcttaatccatctgacgtatttggagcaatttttcagtacccaggcacttttggtcatgtaaaagattttacaagccatattgaaaaactccatgaaaacaaagctattgcagtgatcgccgcagacccactttctcttacactactaaaggaaccaggggctatgggggctgatatagccattggtagcacacaaagatttggcgtgccgattggctatggc

SEQ ID NO: 219844 - DNA, 808 bp, Unknown
  Bacterial polypeptide expressing nucleotide sequence isolated from the Sargasso Sea
cgccctaggttcatgtactatgaaattaaatgctactgcagaaatgatacctatttcttggagagaattggctgagccccatccatttgtacctgtcgaacagatggagggatatagagaaatgttcacagatcttaaaaattggctaagatctattactggtttttctggagtttcacttcagccaaatgctggagctcaaggtgagtatgctggtttaatggtaataagaaagtatcatttagatagaggggatgaaaatagaaatatatgtttaatcccaagctcagcacatggaactaatccagcaagtgcacagatggttggaatgaaagttgtagttgttgactgtgataaagagggaaatgttgattttgaagatttaaagaaaaaagcagaattgcattcagacaatcttggtgctttaatggtaacttacccatcaactcatggtgtatttgaggaaaaaattaaagatatatgtgaagtaattcatgaacatggtggtcaagtttatatggatggagcaaaccttaacgcacttgttggagttgcaaaacctggaaattttggtcctgatgtttgtcatataaatttacataaaacattttgtattccgcatggcggaggaggacctggaatggggccaatcgcatgtaaaagacatttacaagtttatctgcctaaccatccagtggtaaaagattgtggacccgcaagtggaataggtgccgtttcagcagccccttggggaagctcaagtattttatcaatttcttggatgtatattaagatgatgggatctgag

SEQ ID NO: 219845 - DNA, 616 bp, Unknown
  Bacterial polypeptide expressing nucleotide sequence isolated from the Sargasso Sea
aatgattgacgataattcaaaagaatttattaaaagacatattggtccttcagaagaagatcaatctaaaatgttgcaatacataggatataagtcgcttgacgatctgatggaaaacactgtgccggaaaagatcttattaaaagatgaactaaaaattgaccagccgatgtcagaaaacgatgctttaaaaaaattaaaatctatatctaaaaaaaataaaatttttagaaattttataggaatgggatattataactcaataacacctaacgtaattttaagaaatattttagaaaatcctggatggtacacttcttatacaccttatcagcctgaagtagcgcaaggcagacttgaaatgcttttaaattttcaacaatcaataattgacttaacaggcatggatattgctaatgcctctttattagatgaggcaacagcaacagcagaagcagtaggtttaagccaaagattagataagactaactcgaaaaaaatatttatttcaaataattgtaatcctcagacaattgatcttaaactatccttggttaaagttatccacaaggccacaaaatatggtttcaatgttcaccttttgattcacttttga

SEQ ID NO: 219846 - DNA, 493 bp, Unknown
  Bacterial polypeptide expressing nucleotide sequence isolated from the Sargasso Sea
atattatataaaggaaccaaaggtaatgtagctcatgagtgcattatagatataagacctattaaatcagaaacaggtattacagaagaggatattgcaaaaagattgatagattttggttttcatgcacctacaatgtcttggccagtagcaggaactatgatgattgagccaacagaaagtgaaagtttagtagagttagatagattttgtgacacattgataaaaatcaagtcagaaataaataaaattaaatcaggagattttgataaagttgataatcctataaaaaatgctccacatactgatttagagttagcttcagataactgggatcataaatattctagagaagaagcagcatatccagctaaatttttacgtgtaaataaattttggccaccagttgcaagagttgataatgtatatggagataaaaatatattttgtacatgtcctagtatggacgattttaaagaagatgctgcataga

SEQ ID NO: 219847 - DNA, 886 bp, Unknown
  Bacterial polypeptide expressing nucleotide sequence isolated from the Sargasso Sea
tctgcaacatgtgcaccagcacggtggtcaagtgtacttggacggcgccaacatgaacgcccaagttggcttaacctctccaggctttatcggtgccgacgtatcgcaccttaacctgcacaaaaccttcgcgattccacacggcggcggtggtccaggtatgggcccaatcggcgtgaaagcgcacttagcgccgttcgtagcgggtcacgttgtagtgaaaccaggccgtgaaagcgataacaatggtgcagtttctgctgcgccatacggtagtgcgggcattctgccaatcagctggatgtacattaagctgctcggttcaaacggcctgaaaaagtcgactcaaactgcgctgttaaacgctaactacgtgatgaagaagctgtctgaacactacccagtactgttccgtggccgtaatgatcgcgtcgcgcacgaatgtattatcgacctgcgtccaatcaaagaagcctctggcgtgaccgaaatggatatcgctaagcgtctgaacgactacggtttccacgcgccaaccatgagcttcccagttgcgggcacgctgatgattgagccaaccgaatctgagtctaaggttgaactggaccgctttatcgacgctatggtgtcaatccgcgccgaaatcgctaaggttgaagcaggcgagtggccagcggataacaacccgctgcacaacgcgccacacactatggccgatattatggacccagcgttcgattcacgcccatacagccgtgaagtggccgtgttcccaagtgccgcagtgcgtactaacaagttctggccaaccgtgaaccgtattgatgacgtgtacggcgaccgtaatttgttctgtgcgtgtgtgccgttatcagactacgagtaa

SEQ ID NO: 219848 - DNA, 571 bp, Unknown
  Bacterial polypeptide expressing nucleotide sequence isolated from the Sargasso Sea
atgttacataattctcaaaaagattttttaaaaaggcacattggaccttcagatgaagatcaaaacaaaatgcttaaggaacttaattacaaatcacttgatgatttaatcaaaagtacagttccagaaaaaatccaattgaaagatgaattaaatattggtgagtctaattcagaatatgaagcattaagaaaattaaaagcgatttcaaaaaaaaatcaaatttactctaactttataggaatgggttattatggaacttacacaccatacgtaattctaagaaatattttagaaaatccaggttggtatacttcttatacaccttatcaacccgaggtagctcaaggaagattagaaatgctgcttaatttccaacaaatgatagttgattttacaggaatggatattgcaaatgcgtctttattagatgagggaacagcagctgcagaagcaatgggattaagtcatagattaaataaaaaagatagtaatttagtttttgtctcagaaaattgtcacccacaaacaatcgatgtaattcaaacaagagcagaaccaatgggataaa

SEQ ID NO: 219849 - DNA, 608 bp, Unknown
  Bacterial polypeptide expressing nucleotide sequence isolated from the Sargasso Sea
cagcgcaagcattttacccattagctggatgtacattgctatgatgggtgaagatcatcttagaaaggcaacacaagttgcgatattaaataccaattatttagctaaaagacttaaagatcattataagattttatacacaggtaatgagggcttagtagcccatgaatgtattttagatgtaaggccatttaaagaatcatgtggcattgaagctgaagatattgcaaaaagattaattgattatggatttcatgctcctactatgtcatggcctgttgcaggaactttaatgattgagcctacagaaagtgaatctctcgatgaattaaatagattttgtgatgcaatgatcggaattagaaacgaaattaaagctattgaagaaggaatttcagataaagaagacaatctattaaagaatgctcctcactgtattgatgacgcaatagaagattggaattattcttacactaaaaaagaagcttattatccaaataatcaaaccaaactccaaaaatactggccaccggtaggaagagttgataatgtctatggtgatagaaacttagtttgcacttgcccaagcataaaagattttaagtaaa

SEQ ID NO: 219850 - DNA, 512 bp, Unknown
  Bacterial polypeptide expressing nucleotide sequence isolated from the Sargasso Sea
acttaaagattatttcccaattctttataaaggttcaaatggaaatgtagctcatgaatgtataattgatattcgatctattaaaactgaaacagggattaccgaagaagatatagctaaaagattgattgattatggttttcatgcaccaacaatgtcatggccagtagcaggcacaatgatgattgaaccaactgaaagtgaaagcttgtccgaactagatagattttgtggtactttgattagcattaaatcagaaatagatatgattaaatcaggaaaatttgataaagttgataatccaattaaaaatgcacctcacacagatattgaattagcgtcagatgaatggaatcataaatattcaagagagcaagctgcgtatcctgcaaaattcttaaaagcaaataaattttggcctccggttgcaagagttgataacgtatacggagataaaaatattttttgtacttgtccaagtatggacgagtttaaagaagatgcagcataac

SEQ ID NO: 219851 - DNA, 385 bp, Unknown
  Bacterial polypeptide expressing nucleotide sequence isolated from the Sargasso Sea
attgatttttggatttcatgcaccgactatgtcatggcctgtagctggcactatgatgatagagccaactgaaagtgaaggtttgtcggagctcgatagattttgcgacactttaattaagattaaacaagagatagataagattaaatctggtgaatttgataaagttgataatccaataaaaaatgctcctcatacagactctgagcttgcatctgataattgggaacacaaatacactagacaagaagcagcttatccagctaaatttttaaaagctaataaattttggccaccagttgcaagagtagacaacgtatatggtgataaaaatattttttgtacatgtccaagtatggatgaattcaaagaggatgcagcatag

SEQ ID NO: 219852 - DNA, 493 bp, Unknown
  Bacterial polypeptide expressing nucleotide sequence isolated from the Sargasso Sea
aacccatgaaaaattaaataaagttggtcctgtatcaggtacaaactggggaagtgctagcatcctcccaattagttggatgtatatgaagatgatgggagcagaagggttggtggcagctactcaatccgccatcttaaacactaactacatagcctctattcttaaagatcattacgagatactgtttaaaggagaaaatggattagtggctcacgaatgcatcattgacataaggccgcttaaagaaaagactggcatagacatagaagatattgctaaaagactaattgattatggatttcatgctcccacaatgtcttggccggtagctggcactctaatgatagagcctactgaaagtgaatctttaaaggaaatagataggttttgcgaagctatgattaaaataaggaaagaaatagaggatatagagaatggtaaatcagataaagaagacaatccttctaaagaattctccgcatacagctaa

SEQ ID NO: 219853 - DNA, 892 bp, Unknown
  Bacterial polypeptide expressing nucleotide sequence isolated from the Sargasso Sea
atgaccaagcaaaccctcactcagttagaacagcacgatttattcttacgtcgccatatcggcccggatagcagccaacaacaagaaatgttgaactacgttggtgctgagtctctggacgatctgactgcgcaaatcgtgcctgagtcgatccgtttaagccaagagttgagcattggtgattcctgcggcgaagccgaaggcattgcttacattcgtggtttagccaaacaaaaccaagtcttcaaaagctacattggtatgggttactacggtacccaagtgcctaatgtgattttacgtaacgtcttcgaaaatccaggttggtacacggcgtacacgccttatcagccagagatcgcccaaggccgtttagaagccattctaaacttccaacaagtgtcgatggatttaaccggtttagatttagcgtcagcgtcactgctggacgaagcgactgccgccgccgaagcgatggcgctggctaagcgtgtatctaaagccaaaaaagccaacatcttctttgttgccgatgacgtattcccacaaaccttagacgtagtgaagactcgcgctgagtgttttggttttgaagtggtggtaggtcctgcccatgaagccgtaaaccacgaactgtttggtgccctgttccagtattcaaaccgtttcggtcaaatcactgacttcactgatttattcgccgaattacgcgcgaaaaacgtgattgtgactgtcgctgccgacatcatggcattagtgttactcaagtcaccgggtgccatgggcgccgacgtggtcttcggtagcgcacaacgtttcggtgtgccgatgggctttggtggtccacacgcggccttcttcgtggcccgtgacgagcacaaacgctctatgc

SEQ ID NO: 219854 - DNA, 905 bp, Unknown
  Bacterial polypeptide expressing nucleotide sequence isolated from the Sargasso Sea
acagacaaaaatgataaaagagttaggttataattctcttgatgatttaattcataatactgttcctgaaaaaatctactttaaagataaactaagtattggtgactcaaattctgaatatgaagctttgagaaaattaaaagctatttcaaaaaaaaatcaaatattttcaaattttattggcatggggtattatggaacttacacgccttatgtcattttaagaaatattttagaaaatccaggatggtatacctcttataccccttaccaaccagaagtagcacaaggcagacttgaaatgcttttaaattttcaacaaatgattgttgattttacaggcatggatattgcaaatgcttctttacttgatgaaggtacagcagcagcagaagcaatgggattaagtcacagacttaataagaaagatagtaatttaatttttatatctcaggattgtcatccacaaaccataaatgtagttcaaactagagcagaaccaatgggtctaaaagttttaataggcaaagaagatgaagttttagataatttaaaagaagacctggtatgtggtattcttcaatatcctggaactttggggaatattaaagatccaagtgaaagtattagtaaaattcacaaattaaacggtaaagtaattattgcatgtgatttgctagcattggctaaattaaaaacaccaggagaacttggagcagatatagccgtaggtagttcacaaagatttggaatacccatgggatatggtggtccacatgcagcgttttttgccactaaggatgaatataaaagatcaatgcctggaagaattgttggtgtatccgttgatagacacggcaataaagcatacagattatctcttcaaactagagagcaacacataa

SEQ ID NO: 219855 - DNA, 925 bp, Unknown
  Bacterial polypeptide expressing nucleotide sequence isolated from the Sargasso Sea
gttgatagacatggaaataaggcatacagattgtcacttcagaccagagagcaacacattagaagagacaaagctacaagtaatatttgtacagcccaagctttattagcaattgtgtcagcagcatatgctatttatcatggtccagatggaattaaaaatatttctgaaagagtatctcaattagcaaaaaattttggagataaaataaaacaatctggatatgaactatattcagattatttttttgatactgtaactattattactaaagataagactgatcagatttttaaaaatgctttagatcaaaaagtaaatattagaaaagtaaattcagaaatgttgtcagtctcttttgatgagaaaaaaaatgtttatagagtaaatcaactgttaaaaatttttaatgcagcagaatcaattaaaaaagaagaccctacagtaagtctacccaatctcccaaaaaatttactaagaacttcaaaatatttagaacatccagtttttaattcataccattcagaaactgaaatgcttagatacttaaaaaaattagaggataaagacattgctcttaatagaacgatgattgcattaggctcatgcaccatgaaattaaatgctactgcagaaatgatacctatttcatggagagaattagctgagcctcatccgttcgtacctgtagagcagatggaaggatatagagaattattcaccgatctaaaaaattggctaagatcaattactggtttttctggagtttcacttcagccaaatgcaggcgctcaaggcgaatatgcaggattaatggttataagaaaatatcatttagataggggcgatgaaaatagaaacatatgtttaatacctagttcagcacatggaactaatccagcaagtgcacaaatggtggaatgaa

SEQ ID NO: 219856 - DNA, 448 bp, Unknown
  Bacterial polypeptide expressing nucleotide sequence isolated from the Sargasso Sea
attgatttaagacctataaaagcaaaatcaggaatctctgaagaagatattgcaaaaagattaatagattatggctaccatgcccccacaatgtcatggcctgtcgcaggaacattaatgatagaaccaactgaaagtgaaagtttaggagagataaaccgtttttgtaatgctttaatatctataaaagaagaaattgataaagtagatagtggaaacttcgacaaaaaagataatccacttaaaaatgcccctcatacttacttagaattaagttcaaacgaatggaaacattcatacactagagaagaggccgcatttccaaatcagtatttaaaagataataaatattggccacctgttgggagagtagataatgtttatggagatagaaatttagtctgttcttgtcctagtcttgacgaatacaaggatgaggccgcttaaa

SEQ ID NO: 219857 - DNA, 930 bp, Unknown
  Bacterial polypeptide expressing nucleotide sequence isolated from the Sargasso Sea
gcgtctttacttgatgaaggaacagcagctgccgaagctatgggtttaagtcatagacttaataaaagtgatagtaatttagtttttgtttcagagaactgccacccacaaacaattgacgttattcaaactagagcagagccaatgggtcttaaagtacttgttggaaacgaggataaagttctagagcagttaaaagaagatattgtttgcggagttttacaatatccaggaactttaggtgatattaaagatcctagtgaggccataagtaaaattcataaaaaaaatggaaaagcaattttagtttgtgatctccttgcactttctatgctaaaaacaccaagagagcttggagcagatattgcagttggtagttcccaaagatttggtattccaatgggttatggaggacctcatgcagccttttttgcaacaaaagatgaatacaaacgatctatgccaggtagaattgttggggtttcagtggacaggcatggaaaccaggcctatagattgtcattacaaactagagagcaacatattagaagagacaaagctacaagtaatatttgtactgctcaagccttactagcgattgtttcagcagcatatgccatttatcacggccctgatggaattaaaagtatttccgaaagagtatctcaactagcaaaaaattttgcagataaaataaaacaatctggatatgaattatactcagattatttttttgatactgtaactattataaccaaagaaaagacagatcagattttcaaaaatgctttagaccaaaaagttaatattagaaaagtaaattcagagatgctggctgtttctttcgacgaaagaaaaaatgtttatagagtaaaccaactactaaaaatatttaatgctgcagagtcaattaaaaaagaggatccaact

SEQ ID NO: 219858 - DNA, 858 bp, Unknown
  Bacterial polypeptide expressing nucleotide sequence isolated from the Sargasso Sea
tgattatattaaaataggtggttacaaaattttatcagatcatttcttcgataccgttacaattaagaccaatgaaaaaacaaattctatttatgaagctgcattaaaagagaatataaaccttagaaaagttaatcaagagcatttatcagttgcttttgatgaagcaaaaaagcttgatgatgttaatttactattaaagttatttggagtttctaaaattataaagcaagacgtaagggttgaattagataatcttccaaaaaatctcttaagaacttcaaaatatttaacccatccagtttttaacaaataccattctgaaactgagatgctaagatacctaaagaaactagaagattgtgatattgcgctcaacagatcaatgattgctttgggatcttgtacaatgaagctaaatgcaacagcagaattaattcctatcacctggaaagagttttcacttccacatccttttgttcctacaaatcaaatggaaggttataagattctttttaatgatctaataaatgatttgaaagaaattactggatacgacgccgtttctttacagcctaactctggagctcaaggagagtacgcaggtctaatgactataagaaaattccacaagaataataaacaagaaaatcgtaacgtttgtctaattccggactcagctcatggaactaatccggcaagtgcccaaatgtgcggaatgaaagtggttgtagttaattgtgacgaagatggaaacgttgatatagatgaccttaaaaataaagctgaaaaacactcaaaagatttagccgctttaatggtaacttacccctctactcatggagtattgaggaaaaa

SEQ ID NO: 219859 - DNA, 397 bp, Unknown
  Bacterial polypeptide expressing nucleotide sequence isolated from the Sargasso Sea
aaaagactaattgattatggatttcatgcacctacaatgtcttttcctgttcccggtactcttatgattgagcctactgaaagtgaatcaaaagaggagctagatagattttgtgaagcaatgatttctattcacaatgaaatcactatgattagagatggtaaatttgataaagtagataatcctataaaaaacgcaccacatacaattgaagaagtatcttctgacaattgggatcacaaatattcacgtaaagatgctgcctacccacatgcttatttaataaataataaatactggagtccagtcagtagaattgataatgtatacggtgatagaaatttattttgtgtttgccctccaattgatgaatatgatgtggctaaaacaggataat

SEQ ID NO: 219860 - DNA, 906 bp, Unknown
  Bacterial polypeptide expressing nucleotide sequence isolated from the Sargasso Sea
aatgttagcagtgtcttttgatgaaaaaaaaaatgtttacagagcaaatcaacttctaaaaatatttaattgtgctgaagctataaaagaaaatccaacggaaagtttacctaatcttccaaaaaatttacttaggacttctaattatttagaacacaaagtatttaatagttatcactcagaaacagaaatgattaggtatttaaaaaggcttgaggataaagatatagctcttaatcgaacaatgattgcgttgggttcgtgtacaatgaaactaaatgccgttgcagaaatgatacctattagttggagagagttttcagaaccacatcctttcgctccaatagagcaaatggaaggttttagaactttatttactgatttgaaaaattggttgagatcggtaactggattttcaggagtttctttgcaaccaaatgcaggtgcccaaggagaatatgctggtcttatggtgattagaaaatatcatatggagagaggcgaaaaaaatagaaatgtatgtttaatcccaagttcggcacatggtacaaatcctgcaagtgctcaaatggcaggaatgaaagttgtcgtcgttaattgtgataaagatggaaatgtcgattatgaagatcttaaaaagaaagccgaacagaattcaaaaaatcttggtgctttaatggttacttacccctcaacgcatggagtttttgaggaaagaatatctgacatatgtgaattaatccataagcatggaggccaagtttatatggatggcgcaaatcttaacgctttagttggtattgctaaacctggtaactttggaccagatgtttgtcacataaacttacataaaacattctgtattccacatggtggtggtggtccaggtatgggaccaatagcatg

SEQ ID NO: 219861 - DNA, 670 bp, Unknown
  Bacterial polypeptide expressing nucleotide sequence isolated from the Sargasso Sea
aataggtttaaccaatcaggaggcagtttcagcagcgccttggggcagtgcatctattttacctatttcatattcttatatttctatgatgggtgacgatggtttaaaattagcaactcaagtagcaatattaaatgctaattatattaaagaaagattaaaaaattattaccctattttatatactggtaagaataatatggtagcacatgaatttattattgatattaggccatttaaacaagaattaaatatttcagatgaggatattgctaaaagactaattgattatggatttcacgctcctacaatgtcttttccagttccaggcactctcatgattgagcccactgaaagtgaatcaaaagaggagctagatagattttgtgaagcaatgatttctattcataatgaaattactatgattagagatggtaaatttgataaagtagacaatcctataaaaaatgccccacataccatagaagagatatcttctgacaattgggatcataaatatacccgtaaagaagctgcttaccctcatgcttatttaataaataataaatactggagtccagttagtagaattgataatgtatatggggatagaaatttattctgtgtttgtcctccaattgatgaatacgaagaggctcaaactggataa

SEQ ID NO: 219862 - DNA, 485 bp, Unknown
  Bacterial polypeptide expressing nucleotide sequence isolated from the Sargasso Sea
tatgacatccaaatttgggtctgatttgtttatagataggcatcttgggttaggaaataatgatgaaagaattatgcttaacaagcttggttttaataatattgatcaatttataaatcaagttattcctgaagatattcagattaaagataaatcttcagaaatattgccccaaggttgttcagaaattgatgctctaaatgaattagaagagatcgcgaataaaaatactaaaatgagatcacttataggccttggttattatgacaatcacatgcctaaagtaatccaaagacatgttcttgaaaatccaaggtggtatacgtcttatactccatatcaagcagaaattgcacaaggaagattagaagctctatttaattttcagactattgtttgtgaactaacaggatttcctgtcgccaatgcatctttgttagatgagggtactgctgctgcagaagctatggccatgagtttttctg

SEQ ID NO: 219863 - DNA, 924 bp, Unknown
  Bacterial polypeptide expressing nucleotide sequence isolated from the Sargasso Sea
aaaacttttgagaacttctacttatttagatcacccagtatttaataattaccattcagaaactgaaatgcttaggtatttaaaaagattagaagactctgatattgctctaaatagaacaatgatagcacttggttcttgtactatgaagttaaatgcagtttcagagatgatccctgtaacttggcaagaattttcacaacctcatccatttgctccagtagagcaaatggagggatttagagaactttttacagatttaaaaaactggttaagatcaattacaggtttttctggtgtctcactacagcctaatgctggagctcaaggtgaatttgcagggctaatggtgattagaaaatttcatgaaaaaaatggagaactaaatcgtaatgtttgtttaattcctagttcagcacatggcactaaccctgctagcgctcaaatggtaggaatgaaagttgttgtgattaaatgtgatgaacatggaaatgttgattatgaagatttaaagaaaaaagctgaggagcactctgaaaatttggcagcactaatggtaacatacccttcaacacatggtgtttttgaggaaaaaataattgatatatgtgacttgatacataaacatggaggtcaggtttatatggatggtgcaaatttaaatgctttagtaggaattgcaaaaccaggtaaatttggcccagacgtttgccatataaatttacataagactttttgtattccacatggaggtggaggaccaggaatgggtccgattgcttgtaaaaaacatctagaaatatttttacctagacatccagtaattaaagattgtggccctgccacaggaataggtgcagtatcagccgcgccatggggaagttctagtattttatctatctcatggatgtacatcaaaatgat

SEQ ID NO: 219864 - DNA, 917 bp, Unknown
  Bacterial polypeptide expressing nucleotide sequence isolated from the Sargasso Sea
agttttcaatcctatattggtttaggatatcacccaacaattgttccgccagcaattcaaagaaatatttttgaaaatccgggctggtatacagcttacacaccatatcaagccgaaattgctcaaggtcgtttagaagcaatcttaaacttccaaactactgttatcgaattaacaggaatggaaattgccaacgcttcattacttgatgaaagtactgctgctgcagaagctatggcattattgtttgatgttcgtactcgcgaccaaaagaaaaacaacgtcaataaattttttgtttctgaagaaattcttcctcaaacactttctgttcttcaaacacgttctactcctattggtgtagaattagttatcggaaaccacgaaacatttgatttttctagtgactatttcggagcaattttacaatatccgggtaagtatggtcaagtaaatgattatacttcatttattgcaaaagctaatgaaaacgaaataaaagtagccgttgctgctgatatcttatcattggtaaaactaacgcctccaggagaaatgggtgcagctgttgtagttggaacaacacaacgttttggaatcccaatgggttatggcggaccacacgcagcattttttgctaccaaagaagaatataaacgctcgatgccgggtagaattattggcgtaacgattgactccaatggtaatcgagcacttcgtatggctttacaaactcgtgagcaacacattaaacgcgaaaaagcaacttcaaatatatgtacagcacaagtattattatctgtaatggcaggtatgtttgctgtatatcacggtccaaaaggattacgatacatagcagacaaagtacactcaatggcggttactttggcaaatgctttaaacaagcttgggtgtat

SEQ ID NO: 219865 - DNA, 724 bp, Unknown
  Bacterial polypeptide expressing nucleotide sequence isolated from the Sargasso Sea
atcggaaactttaagcccatttcttcctactcattctttaatggataataatttatctattagttccaattacgtatcttctgccaagcatgggagtgcaagtattcttccaataagttggatgtacataaaaatggctggtttttgtggtttaaggaaagcaactgcgcatgcaattttatctgcaaactatattgcgcattctttaaagcataaattcaagattctttataaaggaaaaaataattttgtagcgcatgaatgtattttagattttagggatttaaaatccaaaactggtttgagtgtaaatgatttagctaaacgattaatagattatagttttcacgccccaactataagttggcctgttccagagacgataatgatagagcctactgaaagtgaaagtttggttgaattggatagattttgcgaggctatgctattgattggagaagaaatcagcgaaatagaaaaaaatgttgcattaaagaataataatgtaataagtaatgccccccatactctgaaagagttaattgctgataattggcattacccttactcaaaagaaaaagcttcttttccttataaaactccaacgtctataaagttttggtcttcagtttctaggatcaataatgcatatggcgatcgcaatttaatttgttcttgcaatgtaaatcagggcgaaactttcgaagaaaaaaaatgtgcttaa

SEQ ID NO: 219866 - DNA, 907 bp, Unknown
  Bacterial polypeptide expressing nucleotide sequence isolated from the Sargasso Sea
tttctttgataccctaaaagtggaaatgacgaaaaaagataaagcttctctaaaaaaattatcagaggaagctaaaattaattttagatattatgactctaaccacgttggtatctctctcgacgaaacaaagggttataaagatgttttggatgtattagaagtattctctgagttatctaataagaacttagagattgatttagattctctagaaaattataaccatgaagaaaatcaaaatttaatcagagaatcaaccttcttagagcacgaagtttttaataaataccaaacagaacatgagatattaaggtatatgaaaagacttgagaacaaggatttatctctggtccattctatgatctctttaggttcatgtacaatgaagcttaattctacaactgaaatgattccagtaacttgggaagagatgaaccttcatccttttgtcccaaaagaccaatatcaaggttacgaaaaaatgatcaaagagttaaatatatggttatcggaaataacaggtttttcatctctatctttccagccaaactcaggtgctcagggtgaatatacaggtctaatggttataagggcttatcatttagataacagaaataatcaaagagatattgccttaattccatcttcggcccacggaactaaccccgcttccgcaataatggcaggtatgaaagttgttgtgattcagtgtgacaagcatggaaatattgatatcgacgatttaagagaaaagtgtgaacaatattctgaaaacttaagttgtcttatgataacttatccatcgactcacggagttttcgaagatcatattgttgaggtctgtaaacttattcacgataatggtggtcttgtatacatggatggtgcaaatatgaatgctcaa

SEQ ID NO: 219867 - DNA, 774 bp, Unknown
  Bacterial polypeptide expressing nucleotide sequence isolated from the Sargasso Sea
ataccaaaagctttattaagaacctcaacatatttagatcatccagtttttaatagttaccattctgaaaccgcaatgcttagatatttaaaaaaattagaagactctgacattgctttgaataggtcaatgatagctttaggttcatgcacgatgaaattaaattcagtttctgaaatgatacctgtaacatggaaagaattttcacatccacatccatattcccctattgaacaaatggatggttacagagaattatttactgatttaaaaaattggctaagaacaataacaggtttttctggagtttctttgcaaccaaatgctggagcccaaggagaatttgctggcttaatggttattagaaagtttcatgaaaaaaatggtcaaaaaaaaagaaatgtttgtttaataccgagctctgctcatggaactaatccagcaagcgctcaaatggctggtatgaaagttgttgttgttaattgtgatgcacttggaaatgtagattatgaagatttaaagaaaaagtcagaagaatactcagatactttgtccacactaatggtaacttatccgtcaactcacggagtttttgaagaaaaaataacagatatttgtgatttagttcataaacatggtggtcaagtttatatggatggggcaaacctaaatgcattggttggtattgcaaaaccaggaaattttggtcctgatgtttgccatattaatttacacaaaacattctgcatacctcatggcggaggtggtccagga

SEQ ID NO: 219868 - DNA, 822 bp, Unknown
  Bacterial polypeptide expressing nucleotide sequence isolated from the Sargasso Sea
tttgaccaccataaaaaaaaataatcttttttctaagaggcacataggagttaactctcaagatagggattttatgttgcaatccatagggtatgattctatggatagttttattgatgcggttgtaccggaaaatatacttgagaaggaaaaaattgatcttggagaagaaaaaaccgaagaagaagctctctacgagctaagactcattgcacaagaaaataaggttttcaaaagctttataggacaaggtcattacaatacatacactcctaaagtaattcttagaaacgtacttgaaaaccctggctggtatacatcctacacaccttaccaacctgaaatatctcaaggtagattagaagctctcattaattttcaaacaatggttagcgatcttacaggtatggatattgctaatgcatctctgctagatgaagctactgccgctgcagaagcaatgacgcttgctaaaagagtttccaagtctaagtcagatatcttctatgttgatgaaaatagttttgaaaataccataaatgttttaaaaactagggccaagccattgggaatagacataatagttggacctatagagcaggctaaagatgcagactgttacggtgcatttattcaatacccaggctcagatggctcaattcaagatcattctgaaattgttgactcgattcatggaaaaagaggaattgccgtatttgcttcggacttattagcattatgcctagttaaacctccaggagagatgggagcagatatagttgtaggttcgtctcaaagatttggtgttcctctggggtgtgg

SEQ ID NO: 219869 - DNA, 514 bp, Unknown
  Bacterial polypeptide expressing nucleotide sequence isolated from the Sargasso Sea
tagactaaaagaccattttccaattttatataaaggatcacaaggaaatgttgctcatgaatgtattattgatattagagcaattaaatctgaaacaggtattacggaggaagatatagcaaaaagattaattgattttggttttcatgcgccaactatgtcttggccagtggctggcacaatgatgattgagccaacagagagcgagagcttgcctgaattagatagattttgtgacactttaattaaaataaaacaagaaatagataaaattaaatcaggtaactttgacaaagttgataatccaattaaaaatgctcctcatacagactccgagcttgcttcagataattgggaacacaaatacacgagacaagaagcagcttatccagctaaattcttaaaggctaataaattttggccaccagttgcaagagttgataatgtatatggcgataagaatattttttgcacatgtccgagcatggacgaatttaaagaagatgcagcataa

SEQ ID NO: 219870 - DNA, 849 bp, Unknown
  Bacterial polypeptide expressing nucleotide sequence isolated from the Sargasso Sea
gtctcatccaatttttaatatttatcactcagaaactgatattatgagatatttaaaaaaattagaaaataaagatatagctcttaatcgctcaatgatacctttaggttcatgtactatgaaattaaatgctgcttctgaaatgttgcctataacattaaatggtttttctaatgctcatccatttttagaatctcatcaaagagaaggttataatcaattaatgattgaattaattgctatgttaaaagatataacaggatttgatggtatttctttgcagcctaatgcaggtgctcaaggtgaatttgctggccttttagctattaaaaaatttcatgataataataaagaagataatagaaatatttgtataattccaaatagtgcacatggaactaatcctgcaagtgcacaaatgtgtggaatggaagtatcaattgttaagtgtgataaatatggaaatgtagatattgatcatttaaggcaaaaaattaatgaagcaggtataaatttagcagccttaatgattacttatccttcaactcatggagtttttgaagaaggtatagtcgagatatgtaatttaatacatgatgcaggtgcccaggtatatatggatggagcaaatttaaatgctttagtgggtatcgctaaaccaggattttttggacctgatgtttcacatatgaatttacacaaaaccttttgcatacctcatggaggaggaggcccaggtatgggtcctataggtgtcaaaaaacatttaattccttttttgcctggacatcctttaatagataatgaaattggacttcagcaaaatcaagaagctatttcttctgctcc

SEQ ID NO: 219871 - DNA, 777 bp, Unknown
  Bacterial polypeptide expressing nucleotide sequence isolated from the Sargasso Sea
acttgtaaggcaagtggttccagattctattttacttcgtggtgatggtagattaccagaaggttgtggtgaacaagaggcactcacagaattaaaagagattgctgaattgaatgtagttaaaagaactttaataggacagggatattatggtacgattacaccaccagtaattcaaagaaatgtatttgaaaatcctgcatggtatacatcttatacaccatatcaagcagagatatctcaaggtagattagaagcattatttaattatcaaacactgattactgaacttactggattaccagttgcaaatgcatcattattagatgagggaacagcagctgctgaagcaatgatacttgcatataatcaaggtaagaaaaaggattttatagttgacagtaaaatattttcacaaacattagatgttttaaaaacaagagcaaaaccacttggtattaatataattaaaattgatttagatgcaacaatcgcactagaagaatttacaaatgcatttggattattagttcaattaccagatagtaatggaagattgaaacatcatgatggattattaagatgtgctgatgtttacaaatgtatgaagattgcaatcgtagatccgatgtgtcaggtattaatgaaacctgtgggcgaatggggatttgatgttgcagttggtagtatgcagagatttggagttcctatgggatatggagggcctcatgcagcattctttgcaaccactgagaaatataaacgaaagattcctgg

SEQ ID NO: 219872 - DNA, 931 bp, Unknown
  Bacterial polypeptide expressing nucleotide sequence isolated from the Sargasso Sea
tataaaaaaaactgttccagaaaaaattcttttaaaagatagtttagaaattggagattccaattctgaatacaaagcactcagaaaactaaaaaatatttcaaaaaagaataaaattttttcaagttttattggtatgggatattatggaacccatacaccctacgtaatcttaagaaatatattggagaatcctggctggtatacctcatatacaccttatcaacctgaagtcgctcaaggacggcttgaaatgttgttaaattttcaacaaatgattattgattttacgggtatggatatagccaatgcatctcttttagatgaaggtacagcagctgcagaagcaatgggtctaagttatagagtttcaaaaactgacactaaaaaagtatttgtttcaaaaaactgccatccacaaacgattgatgttatcaaaactagagctgaaccactgggattagaaatagtggttggggatgaagataaagatattaatgaaaatattatttgtggaattctccaatacccaggaaccttgggtgacataaaagatcctagtgaagctattagcaaaattcataaaaataatggcaaagcagttttagcatgtgatttacttgctttagcaaaactcaaaacaccagctgaactaggagcagatatagctgtaggaagttctcagagatttggaattccaatgggctatggaggtcctcatgcagcattttttgcaacaaaagatgaatataaaagatcgatgcctggaaggatagttggtgtttcagttgatagacatggcaaaaaagcatttaggttagctcttcaaactagagaacaacacattagaagagataaagccaccagcaatatttgtacagcccaagcattgctttgcatagtttcagcagcttatgcaatttatcatgga

SEQ ID NO: 219873 - DNA, 851 bp, Unknown
  Bacterial polypeptide expressing nucleotide sequence isolated from the Sargasso Sea
tatgttaaaagatataactggatttgatgctatatctttacaacccaatgcaggagctcaaggagaatttgccggattattagctataaaaaaatttcatgatcataataatgaaaataatagaaatatttgtttaataccaaatagcgctcatggaactaatccagcaagtgcacaaatgtgtggcatggaagtatctattgtaaagtctgatatttatggaaatgttgatattgatcatctaaaacaaaaaattaacgaagctggtttaaatctagcagctttaatgatcacatacccttcaactcatggagtttttgaggaaagtatagttgaaatatgtaatttaatacatgacgcaggtggtcaggtttatcttgatggtgcaaacatgaatagtttagtaggaatagccaagccaggtttttttggtcctgatgtttctcatattaatttgcataaaactttttgcataccccatggaggaggtggtccaggtatggggccaattggagttaaaaaacatttaataccttttttgccaggacatcctttagtaggtaacgaaataggtttacaaaaccaagaagcagtatctgcggccccatggggaagtgcatctattttgccaatttcttattcctatatttctatgatgggtgatgttggattaaaacaagcaactcaagttgcaattttaaatgcaaattatataaaaacaaatttagaaccttattttccaatattatataaaggaaaaaataatatggttgcacatgaatgtattatagatttgagacctataaaagaaagtttaaacattaccgaggaagatatgcaaaacgcctaat

SEQ ID NO: 219874 - DNA, 943 bp, Unknown
  Bacterial polypeptide expressing nucleotide sequence isolated from the Sargasso Sea
catcctcaaactatcagcgttatgaaaacacgatctgaacccattggagtaaaacttaaagttattccggtggaagaattcaacttttcagaaaatacctttggctgtctaatacaatgcccatcaaccgatggtaaagttttcaactacaaaagtttatctcaatccgctcatgatgctggtgcttttattgctgttgcaactgatttactaagtcttgcgctcatcacagaacctggagcttgcgatgcagatattgctgttggtagctcacaaagatttggtgtcccattggggtttgggggtcctcatgcggcctttcttgcagccaatgagagcttcaaaagaaaaatgccaggaagaataattggactttctaaagattcagaggataatctagcgtttcgtatggcacttcaaacaagagagcagcacattagaagagataaagctacatcaaatatttgcactgcccaggttttactttctgtaatagcaggtatgtacgcagtataccacggtcccaaaggtattcttcaaattgcaaatactattcatgaaaacactaagagacttgcctcttcccttgaggaaaatggctatgaaatcagacatgatcaattctttgataccattagatttggaacaaatggtaaaaaaattaatactaaagacctcagcgttaattttagacatttcaacaatggtgacattggtatttcattagatgaaactacctcgcaaagcgatattgataatcttcttaagctctttaaatgtaaagataaacctagtgaccattttacgctaagagagtctagaaattcagaatatttaacgcacgaagttttcaattcgtatcattcggaaacagaaatgatgcgatatctaaagaaattagaaacaaaagatctcagtcttaatacccagtatgatttctctg

SEQ ID NO: 219875 - DNA, 478 bp, Unknown
  Bacterial polypeptide expressing nucleotide sequence isolated from the Sargasso Sea
ttcaaatggtaatgtagcacacgaatgtattattgatattagatctatcaaaagtgacacaggtatttcagaagaggatatagctaaaagattaatagattatggatttcatgcaccaacaatgtcatggccagttgctggaacaatgatgattgaaccaactgaaagtgagagtttatctgaactagatagattttgtaacactttgattagcattaaaaaagaaatagatatggtcaagtcaggcaagtttgataaagctgataaccctataaaaaatgcacctcatactgatatagaattagcttcagatgaatgggatcataaatactcaagagagcaagctgcatatccagcaaaattcttaaaagtaaataaattttggcctccggttgcaagagttgataacgtatatggagataaaaatattttttgtacttgtccaagcatggatgagtttaaagaagatgcagcatag

SEQ ID NO: 219876 - DNA, 544 bp, Unknown
  Bacterial polypeptide expressing nucleotide sequence isolated from the Sargasso Sea
gctatattaaatgcgaattatatttcaaaaaaattatcagaacattataaagttttatataccgggaaaaacggtaatgttgcccacgagtgtatcattgacattagacccattaaaaccaaatcaggaattacagaagaagatattgcaaaaagattgatcgactttggttatcacgctccaaccatgtcgtggccagttgcaggaactatcatgatcgaaccaacagaaagtgaaagtctggtagaaataaatcgtttttgtaatgctctcataaaaataaaagaagagattgataaagtagacaaaggagattttgacaaaaaagataatcctcttaaaaatgctcctcacacctatctcgaattaagtgcaaatgagtggaaacattcttatacaagagaacaagccgcattcccaaatcaatacttaaaagataataaatattggccgcctgttgcaagagtagataatgtttatggagatagaaatttggtttgttcttgtcctactcttgacgaatacaaggatgaggccgcttaaa

SEQ ID NO: 219877 - DNA, 677 bp, Unknown
  Bacterial polypeptide expressing nucleotide sequence isolated from the Sargasso Sea
cgaaattagtatacaaaaacaggaagctgtttcagctgcaccatggggtagtgcatctatccttcctatatcttattcttatatatcaatgatgggttcagaaggcctaaaaaaagctactcaagttgcaatcttaaatgctaattatataaaaaagaaattagatccttatttcccaattctttatagaggtaaaaataatatggtagcgcatgaatgcatcatagatattcgaccgtacaaagaattgtataatattactgaagaagatgttgcaaaaagattaatagattatggttttcatgctcctactatgtcttttcctgtaccgggaactctaatgatagaaccaacagaaagtgaatcaaaagaagaaatagatagattttgtacggcaatgatatcaatttatgaagaaatacaaaaaataaaagataatatttttgataaagaagataatcctcttaaaaacgcccctcatacaatggatgaaatatcagctgataaatggaaccataaatacactagacaagaagcagcattcccaatttcttatttaaaaaataagaaatattggcctccagtttctagaatagataatgtttatggagatagaaatttattttgtgcatgcccaccattggaagattatgaaaatatgaaaaagtctgcataat

SEQ ID NO: 219878 - DNA, 492 bp, Unknown
  Bacterial polypeptide expressing nucleotide sequence isolated from the Sargasso Sea
aatgttacataactcacaaaaagactttttaaaaagacacattggaccttcagatgaggatcaagataaaatgctgaaggagcttaattacaattcattagatgatttgatcaaaagcacagttccagaaaagatacaattgaaagatggattaaatataggtgagtctaattctgaatatgaagcattaagaaaattgaaagcaatttcaaaaaaaaatcagatttattcaaattttatcggtatgggttactatggaacatacactccatatgtaattttaagaaatattttagaaaatccaggttggtatacttcttataccccttaccagcctgaagtagcacaaggaagattagaaatgcttctaaacttccaacaaatgattgttgatttcaccggcatggatattgcaaacgcatctttgcttgatgaaggaacagctgctgcagaagctatgggattaagccatagattaaataaaaaagatag

SEQ ID NO: 219879 - DNA, 499 bp, Unknown
  Bacterial polypeptide expressing nucleotide sequence isolated from the Sargasso Sea
atgttacataattctcaaaaagattttttaaaaagacacattggaccttcagatgaagatcaaaataaaatgcttaaggaacttaattacaaatcactagatgatttaatcaaaagtacggttccagaaaagatccaattgaaagatgaattaaatattggtgagtctaattcagaatatgaagcattaagaaaattaaaagcaatttctaagaaaaatcaaatttactctaactttatagggatgggctattatggcacttatacgccatatgtaattctaagaaatattttagaaaatccaggttggtacacttcttatacaccttaccaacccgaggtagctcaaggaagattggaaatgctgcttaattttcaacaaatgatagttgatttcacaggaatggatattgcaaatgcatctttattggatgaaggaacagcagctgcagaagcaatgggattaagtcatagattaaataaaaaggacagcaatttag

SEQ ID NO: 219880 - DNA, 397 bp, Unknown
  Bacterial polypeptide expressing nucleotide sequence isolated from the Sargasso Sea
atgtctgaatttcataaaaaacatattggtccttcacagagtgaaatcaaagaaatgttgcaatatcttgattgcagtagtctcaatgatcttcttgataagattgtgcctaaaaatattcttgatatagatgacatgtctattggaaatgaagtattctctgaaaatgatattttaaatcacgttaaaaatattggtactaataataaagtccatagatctttaatcggccaaggttattatgataccattactccaaacgttattttaagaaatatacttgagaatccaggctggtatacacagtatactccatatcaacctgaaatctcacaaggtagattggaagctcttttgaattatcaaactaatgattactcgaaattactgcttacca

SEQ ID NO: 219881 - DNA, 814 bp, Unknown
  Bacterial polypeptide expressing nucleotide sequence isolated from the Sargasso Sea
caagctgagatctctcaaggcaggttagaagcgctcatcaattttcaaaccatggttggagatctaacagggtttgaaatagctaatgcctcccttcttgatgaggccactgcagcagcggaatcaatgactttagctcacagggttggaaaatctaaatcccaaagattttttattgatcaaaactgttttccccaaacaatctctgtggtgacagccagagccaagccaattggtattgaggtaatggtaggtgacccaaagcaattaactgatttaaaagaagaaacatattttggcgctttgcttcaatatcctggtaatgatggagcagtcattgatttctctcaaggaattgaaagtatgcatgcacaaaatggtttggtgatcatggcaacagacttgttggctctaacattgttaaaaagcccaggtgagatgggtgctgatatagcaataggaagctcacaaagatttggggtgcctctcggctttggtgggccgcatgcagcatttatggctaccaaagaaaaatataaaagatccttacctggaagattggttggagcatcaatcgatgaggatggcagaacagcatatagattagctttacaaaccagagaacagcacataagaagagagaaagctacaagtaatatatgtactgcccaagcgctcttagcgatcatggcaggtttttatgctgcatatcatggccctgctggattaaaacaaattgctcagtctgttcgctcaaaggcaactgccttggcaaaaggaattaatgagcttgggtatgatctcaagtcttcta

SEQ ID NO: 219882 - DNA, 905 bp, Unknown
  Bacterial polypeptide expressing nucleotide sequence isolated from the Sargasso Sea
aaatagagtctttagatcttatattgggcagggttactatggaacagttacccctaaggtcattaaaagaaatgtttttgaaaatcctggatggtatacctcatatactccttatcaagctgagatttctcaaggaaggttagaggcacttataaatttccagacaactatctgtgagttaacctcaatggaaatagctaatgcatctcttcttgacgaagctacagccgcagctgaagctatgatgctagcaaaaagagtatcaaaaaataaatctaattatttctttgtcgataaaaactgtttcaagcagactatttctgttcttaaaacgagggctaagccatttggtattgagcttgagataggagatcctcaagattttaatgaaaaagatttttttggaatgttaatacaatatccaaataaatatggagagattgaggatttctcaaaactatcagattactgtaaaaaaaataagtccttgctagtttgtgccaccgatcttcttgccttggctcttttaagacctccaggagaaattggtgctgatattgttataggttcatcccaaaggtttggtgtcccaatggggtttggagggccacatgctgcatttatggctactcatgaaagttttcaaaggtcgatgcctggaagaattattggagcttctaaagatgctagcggaaatttatcctataggcttgcacttcaaacaagagaacagcacataaggcgagaaaaagccactagcaatatttgcacttcccaagcactactagccgtgatggccggtttttttgcaatttatcacggccctaaagggttgataggaattgctaatgatgtttataaaaaaacttgtaaactttttagtgctattaagtctagcgatcatg

SEQ ID NO: 219883 - DNA, 853 bp, Unknown
  Bacterial polypeptide expressing nucleotide sequence isolated from the Sargasso Sea
caccacttctgaagatattaaaattttatgggaagtgtttttagaaaataatgattttccgtcggtcaacgaaatagatttagaatttacaactggaaaaaatgacaccatgattccacaaaatcttgtccgtaattcagattttctaacacaccctgtttttcatctaaatcaatccgaaacagcaatgcttcgttacctgcgctaccttcaggataaggatatcgcgctcgataaatccatgattcctctgggttcatgcaccatgaagctcaacgctacttccgaaatggtaccaataagctggccagaattttccaacatgcatccttttgcaccagtgaatcagacagaaggatacaagaaactgatcagtgatctggaaaattatctgataaaaataaccggatttgatgcagtttcgatgcaaccaaattctggcgcccaaggtgagtatgcaggtttactggccatccacaactaccataaatcaagaggggaagggcagcgcaatgtctgcctgattcctagctcagctcatggtacaaatcctgccagtgcttcaatgacaagcatgaaaagcgtgatcgtgaagtgtgatgaaaatgggaacatagatgtaaagaacttgagtgaactggcagataaacacgctgacaacctggctgcattaatgataacctatccttcaacgcatggagtatttgaagacagcttaatacgcatctgtgaaatcattcataataaaggaggccaagtatatatggatggtgcaaaccttaacgccctgatgggaattgctcagccagggaaacttggaccggatgtgctgcacatgaaccttcacaaaacc

SEQ ID NO: 219884 - DNA, 808 bp, Unknown
  Bacterial polypeptide expressing nucleotide sequence isolated from the Sargasso Sea
aatcggtcctgatgttttgcacatgaacctccacaaaaccttctgtattccccatggtggaggaggtccgggaatggggccgattgggtttaaaaaacatctcgcgccttttgctccaagtcatgcggtttgccccgttcaagatgttcctgaagaaaacagcgcggtttctgcggcaccttatggaagtccggggatccttccaatttcctgggtttatatcaaactgatgggaggtccgggtcttttgaaagccaccaaggttgcgattctcaatgcaaattacattgcatcaagagtagggaaacatttcccggtggtctatactggaaacaacggtcgggttgcccatgaatgcatcatcgacgttcggccttttcgggagacagccggaattaccgaagaggatgtggcaaaaagattgatcgattatgggttccattctccaaccatgtcatggccggtggcagggaccttgatgatcgaacccactgaaagcgagcctttagaggaattggatcgtttttgtgatgcattgattgcgatccgtgcagaaattcagaggcttgaagaaggagaatgggacgcagacgacaatcccctccacaatgctcctcacaccgccgaagatcttgctgatcctgagtggaatcactgctacacccgcgaggaagcggtttatcctcttccggatttacgggtcaacaaatactggcctccagtcaatcgtatcgataatgtttttggagaccgtaatgttgtttgttcatgccctccaattgaaagctatcaggaggtcgaggcataa

SEQ ID NO: 219885 - DNA, 675 bp, Unknown
  Bacterial polypeptide expressing nucleotide sequence isolated from the Sargasso Sea
tatgacagctaaaaataaatctgattttttaaatcgacatgttgggcttaacaactctgatataaagaagatgctcaagcgcctagatattaaatcattagatgacctaattaaaaaagtgatcccaaaaaatatactatctccaatttctgaaaatttattaaaaaaagatttatctgagacagaagcacttgcccaattaaagaaatattctaaaaaaaataagctatataaatcatttattggtatgggatactacggtacgttagtacctaacgtaattaaaagaaatatacttgaaaatcctgggtggtacacacaatataccccttaccaagcggaaatcagtcaaggaagacttgaagcccttttgaattttcaaactatgatttctagtgcaactgggttaccacttgccaatgcatcgctcttagatgaatcaacagctgccgctgaggcaatgaccatgttttacggttcaacaaaagataacaataaaaactcgtttttcatttctaaaaattgtcacccccaaacaattgatgtcctaaaaaccagggctgaaccgttgggaataaagttaattattggtgatgaaaattcatctactttggataattctattttcggaatgttattacaatacccagcatctgatgggaaaatcattgatta

SEQ ID NO: 219886 - DNA, 297 bp, Unknown
  Bacterial polypeptide expressing nucleotide sequence isolated from the Sargasso Sea
aaatcgacaggttctgcgatgcgatgcttgccattgccggtgaggtagagaaggtcgagaaaggcgtctggccggcggatgacaacccgctagtgaacgcgccgcataccgcggccgacctgatgcgggacgactggacacacccctacagccgcgaacaggcagccagccccgagggtaacagccaggcaaacaaatactggccgccagtcagccgcgtcgacaacgcctttggcgaccgcaacctgatctgcagctgccccagcatcgatgaatgggaggctgctgccgaataac

SEQ ID NO: 219887 - DNA, 947 bp, Unknown
  Bacterial polypeptide expressing nucleotide sequence isolated from the Sargasso Sea
tacaccccctatcaatctgaaatttctcaaggtcgattagaagcattatttaattttcaaacaatggttgtagagttgactaaaatggatatagcaaatgcatccttattagatgaaagctctgcgactgctgaaggcatgcaattattacatcgggttagatcaaaagaaaaaaaagctgctagtacctgtttagtatgtaaagacatatttcctcaaacactagatgtattaaatacaagagcaaacccacttgatataaaattaaaatcattttcatcttcagaaacattgtccttgtcagatcctgataatgatatttttgggctaattattcaatatccaaaccaatatggctcaatcacagatttaacgtcacttgttaaatcagctcacgaaaataatattaaagtttgtgtaattacagatttacttgcacttaccttactaaagcctcctggggagtttggcgctgacatagtagtcggcaactctcaacgatttggtgttccattaggttatggtggcccacatgccgctttcatagcaacacgacaagagttccaaaggcaattaccaggacgaattataggcttatctattgataagcataataaccctgcgtatagaatggctttacaaacaagagagcaacatattagaaaagaaaaagcaacatcaaatatatgcacagcgcaggctttactggctattcttgctggcatgtatgccgtatatcacggaccaaatggactaaaagaaatcagcacaaaagtacatcaccttacaacacaattaaatacggctttaaaagaaatgaatatcacacagaaaaacactagtttctttgatacgcttcatatagaagtttcagaagaagttatgaaaaaaataaaagaaaaaacacaaacaaaacaaattaacttcagattcattaatttcacaca

SEQ ID NO: 219888 - DNA, 949 bp, Unknown
  Bacterial polypeptide expressing nucleotide sequence isolated from the Sargasso Sea
ttcactgatcttaaaaattggttaagatcaattacaggtttttctggtgtttcacttcaaccgaatgcaggtgctcaaggagaatatgctgggttaatggtaattagaaaataccatttagataggggagaagaaaatagaaatatatgtttaattccaagctcagcacacggaacaaatcctgcaagtgcacaaatggttggaatgaaagttgtagttgttgattgtgataaagaaggaaatgttgattttgaggatttgaagaaaaaagcagaagaacattcagaaaatctcggagcattaatggttacatatccgtctactcacggtgtattcgaagaaaaaattacagacatttgtgaactgatacataaacatggtggtcaagtttacatggatggtgcaaacttaaatgcacttgttggtattgcaagacctggaaattttggtcctgatgtttgtcatataaacttacacaaaacattctgtattccacatggtggtggaggaccaggaatgggaccaattgcatgtaaaagacatttgcaagtttacttgcctaatcatccagtagttaaagattgtggtcctgctacaggaataggagcagtttcagctgcaccatggggaagctcaagtattttatcaatttcttggatgtatattaaaatgatgggttctgaaggtttaaaactagctacgcaagtcgccattttaaacgcaaattatatagctcatagacttaaagatcatttcccaattttgtataaaggttcaaatggaaatgttgctcatgaatgtattatagatattcgatcaattaagagtgagataggaattacagaagaggatattgctaaaaggttaatcgattatggtttccacgcacctacaatgtcttggccagttgcaggaactatgatgatagagccaacagagagcgagagct

SEQ ID NO: 219889 - DNA, 534 bp, Unknown
  Bacterial polypeptide expressing nucleotide sequence isolated from the Sargasso Sea
atgcaaattatatttcaaagaaactatctaatgattacaaagttttatacactggcaaaaatggtaatgtcgctcacgaatgtataattgatatcagaccaataaaagctagttcaggaatttctgaagaagacttggctaaaagactaattgattttggttatcatgctccaacaatgtcatggccagttgcaggtacaattatgatcgagcctactgaaagtgaaaatcttgaagagattgataaattttgtaatgctttaataaagattaaaaaagaaataaatttagttgaatcatcaaaatttgataaaactgacaatccattaaaaaatgctcctcacacatatattgaattatcttctaatgagtggaaacataaatatactagggaagaggcagcttttccaaatgagtatgtaaaaaataacaaatattgggcgccagtcggaagagttgataacgtttacggagatagaaatttagtatgttcatgtccatcaatggacgaatataaagaagaagctgcataaa

SEQ ID NO: 219890 - DNA, 892 bp, Unknown
  Bacterial polypeptide expressing nucleotide sequence isolated from the Sargasso Sea
aaaaaggaattatcaaaaattaatcaagatataatttgtggggttttagcttatcctggaactctgggtgagataatagatcccagtgaaagcataagtcaaattcataaaaaaaatggaaaagcaattttaatatgtgatttattatctttaactaagttaaaaactccagcagaacttggcgctgatatagctgtaggtagtgcccaaaggtttggtattccaatgggctatggtggtccacatgcagcattttttgctactaaagaagaatttaaaagatcaatgccaggtagaattattggtgtatcgaaagatagacatggaaaaaaagcatacagactttctttacaaacaagggaacaacatatcagacgagataaagcaactagtaacatatgcacggctcaagcattgttagcaataatatctgcagcctttgctatttatcatgggcctgatgggatacttaaaatagcaaacaggacttctaaattggcaaaattatttgctgatgaaattaaaaaaggtggtttccaaatattatcagaacatttctttgatacaataacaattaaaacaaacgataagacaaactctatttatcaaactgccctaaatgaaaatattaatttaagaaaagttgatgacaaacacatatcagtggcatttgatgaggcaaaaaaacttaatgatgttaatatattattaaaaatatttggagtttctaaaataattaatcaggatgttaaagttgagcttaataatattcctaaaaatcttttaagaacatcaaagtatctaactcatcctgttttcaaaatatatcattcggaaacggagatgcttaggtatttaaaaaaacttgaagattgcgatattgcacttaatc

SEQ ID NO: 219891 - DNA, 843 bp, Unknown
  Bacterial polypeptide expressing nucleotide sequence isolated from the Sargasso Sea
gttcggtattccaatgggttatggaggacctcatgcagccttttttgcaacaaaagatgaatacaaacgatctatgccaggtaggattgttggggtttcagtggataggcatggaaacaaagcttatagattgtcattacaaactagagagcaacacattagaagagacaaagctacaagtaatatttgtactgctcaagccttactagcgattgtttcagctgcatatgctatttatcacggtccagatggaattaaaagtatatccgaaagagtatctcaactagcaaaaaattttgctgataaaataaaacaatctggatatgaattatactcagattatttttttgacactgtaactattattaccaaagaaaagaccgatcaaatatttaaaaacgctttagaccaaaaagttaatataagaaaagttaattcagaaatgctgtctgtttcttttgacgaaagaaaaaatgtttacagagtaaatcaactattaaaaatttttaatgcagcggaatctattaaaaaagaggatcctactgttactttaccaaatttaccaaaaaatttattaagaacttcaaaatacttagagcatcctgtttttaattcatatcactcagagacagagatgcttagatatcttaaaaaattagaggataaggatatagctcttaatagaacaatgattgcactgggttcgtgcactatgaaattaaatgctactgcagaaatgatacctatttcttggagagaattggcagaacctcatccatttgtacctgttgaacagatggagggatatagagagatgttcacagatcttaaaaattggttaag

SEQ ID NO: 219892 - DNA, 925 bp, Unknown
  Bacterial polypeptide expressing nucleotide sequence isolated from the Sargasso Sea
aaaatatttaaaaatgctttagatcaaaaagtcaatattcgtaaagtaaactctgaaatgttgtcagtttcttttgatgaaaagaaaaatgtatatagagcaaaccaattattaaaaatttttaattgcactgagtctattaaagaaaatcctacagaaaaattgcctaatttaccaaaaaaattgcttagaatatctaaatttttagagcatccagtatttaattcttaccattcagaaacagagatgcttagatatttaaaaagattagaagataaagatgtagcactgaatagatcgatgattgccttgggatcttgcacaatgaaacttaattctgttgctgaaatgatacctatcagctggagagaattttcagaaccacacccatttgtgcctgttgaacaaatggatggttttagaagtttgtttacagatttaaaaaattggttgagatcaataacagggttttcaggagtatcattacaaccaaatgcaggagcacaaggagagtatgctggtttaatggtaataaggaagtttcattcaagtaggggagaaaaaaatagaaatgtttgtttgataccaagttctgctcatggaactaatcctgcaagcgcacaaatggttggtatgaaagtagtggttgttgattgcgataaagaaggcaatgtagatttcgaagatttaaaaaagaaagccgaacaaaactcatctaatttagcctcattaatgattacttatccatcaacacatggtgtctttgaagaaaaaattactgaaatttgtgaattgattcataagcacggtggtcaagtgtatatggatggtgcaaatttaaatgcattagttggaattgctagaccaggaaactttggtccggatgtttgtcatattaatttacataaaacgttctgtatcccac

SEQ ID NO: 219893 - DNA, 523 bp, Unknown
  Bacterial polypeptide expressing nucleotide sequence isolated from the Sargasso Sea
tttaagtacaaactacttggctaagaggcttggggagcactataaaattctatataccggtaaaaataaccttgtcgctcatgaatgcataatcgatgttagaccatttaaagaatcttgtggcattgaagcagaagatattgccaaaagactgatagattatggttttcacgctcctactatgtcctggcctgtggctggcacactcatgattgagcctactgaaagtgaatcactagaagaactcaataggttttgtgaggctatgattggcatcagagaagagatcagagcaattgaagaaggcaaattctctcaagataataaccctctcaaaaacgcaccacattgcgtagatactttaattgaagaatggacatatccttatagtaaaaaagaggcttattatccaaacaatcaaattaagcaccaaaaatactggcctcctgttggtagggtcgataatgtttacggcgatagaaatttggtttgcacttgtccaagcattaaagagttcaaataa

SEQ ID NO: 219894 - DNA, 883 bp, Unknown
  Bacterial polypeptide expressing nucleotide sequence isolated from the Sargasso Sea
aattcagtttaaaggtgaattaaatattggtgaaccaaactcagaatatgaagctttaagaaaattaaaagcaatttcaaaaaaaaaccaaatttactcaaattttataggcatgggttattatggaacatacacaccatacgtaattttaagaaatatattagaaaatccaggatggtatacatcatatacaccttatcagcctgaagtagcacagggtagattagagatgctattaaactttcaacaaatgattgttgattttacaggaatggatatagcaaacgcgtctttacttgacgaagggacagcagctgcagaagctatgggattaagtcatagactaaataaaagtgatagtaatttagtttttgtttcagagaattgccacccacaaacaattgacgttattcaaactagagcagagccaatgggtcttaaagttcttgttggaaacgaggataaagttttagaacagttaaaagaagatatagtttgtggagttctacaatatccaggaacgttaggtgatattaaagaccccagtgaggccataagtaaaattcataaaaaaaacggaaaagcaattttagtttgcgacctacttgcgctatctatgctaaaaacaccaagagaacttggggctgatattgcagttggtagctcgcaaaggtttggtattccaatgggatatggaggacctcatgcagccttttttgcaacaaaagatgaatacaaaagatctatgcctggtaggattgttggagtttcagtggataggcatggaaacaaagcttatagattgtcattacaaactagagagcaacacattagaagagacaaagctacaagtaatatttgtactgctcaagccttactagcg

SEQ ID NO: 219895 - DNA, 796 bp, Unknown
  Bacterial polypeptide expressing nucleotide sequence isolated from the Sargasso Sea
ttttactgatttaaaaaattggctaagatctattacaggtttttcaggaatttcattacaaccaaatgctggtgcgcaaggagagtatgcgggattaatggttataagaagatatcatttagaaaggggagaaaaaaatagaaatgtttgtttaattccaagttctgcacatgggactaaccctgccagcgctcaaatggttggcatgaaggtagttgttgtcaattgtgataaagagggcaatgttgattttgaagatttaaaaaagaaagccgaactccattcagaaaatttgggagctttaatggtaacgtacccatctacgcatggagtatttgaagaaaaaatttctgaaatttgtgagttgatccataaaaatggaggacaagtctatatggatggagcaaatttaaatgcactagtcggaatagcaagaccgggaaatttcgggccagatgtttgtcatataaacttgcataaaacattttgtataccacatggaggtggtggtccaggaatgggaccaattgcatgcaaaaaacatttggagatttatttacctacgcacccagtagtaaaagattgtggacctgctacaggaataggagctgtttccgctgcaccatggggaagttcaagtattttatcaatatcatggatgtatataaaaatgatggggtccgaaggattaagattagcaactcagattgctattctaaatgcaaattacgttgcctatagattgaaagatcatttcccaatattatataagggcagcaaaggaaatgtggcgcac

SEQ ID NO: 219896 - DNA, 835 bp, Unknown
  Bacterial polypeptide expressing nucleotide sequence isolated from the Sargasso Sea
cccgaggatcaggccgaagggtaccttgagatgatcggggacctgtcggccaagctgtgcgagatcaccggctatgacgacctgtcgatgcagcccaattccggcgcgcagggggaatatgcgggccttctgaccattgccgcctatcaccgcgccaatggcgaggggcatcgcaatatctgccttatcccgatgagtgcgcatggcaccaacccggccagtgcgcaaatggttggctggaaggtggtggcggtgaagtcggcggagaacggcgacatcgacatggaggatttccgcagtaagaccgagcagcattcgcagaaccttgccgcctgcatgatcacctatcccagtacgcatggcgtgttcgaggaaggggtgaaggagatttgccagatcacccatgaccatggcgggcaggtttatatcgatggcgcgaacctgaatgccatggtcgggctgagccggcccggcgatcttggcggggacgtgagccatttgaacctgcacaagaccttctgcattccgcatggcgggggtggccccggcatggggccgattggcgtcaaggcgcatctggcgccgcatttgccgggtcatcccgaaaccggaggcgtggaggggccggtgagtgcggcgccctatggctccccctcgatcctgccgatcagctgggcctattgcctgttgatgggcggtgagggcctgacgcaggcgacgcgggtggcgatcctgaatgccaactatatcgccaagcggctggaggggtcttatgacgttctttacaagggccggaacggccgcgtggcgcatgagtgcatcatcgacacccggc

SEQ ID NO: 219897 - DNA, 923 bp, Unknown
  Bacterial polypeptide expressing nucleotide sequence isolated from the Sargasso Sea
acaattgacgttattcaaactagagcagagccaatgggtcttaaagtcctagttggaaatgaggataaagttctagagcaattaaaagaagatattgtttgcggagttttacaatatccaggaactttaggtgatattaaagaccctagtgaggccataagcaaaattcataaaaaaaatggaaaagcaattttagtttgcgatctccttgcgctttctatgctaaaaacacctagagagcttggagcagatattgcagtgggaagctcacaaaggtttggtattcctatgggttatggagggcctcatgcagccttttttgcaacaaaagatgaatacaaacgatctatgcctggtaggattgttggggtttcagtggataggcatggaaacaaggcttatagattgtctttacaaactagagagcaacacattaggagagacaaagctacaagtaatatttgtaccgctcaagctttactggcgattgtttcagcagcatatgccatctatcatggtccagatggaattaaaagtatatctgaaagagtatctcaactagcaaaaaattttgctgataaaataaaacaatctggatatgaattatactcagattatttttttgatacagtaactattattactaaagaaaagactgatcagattttcaaaaatgctctagatcaaaaagtaaatattagaaaagtaaattcagaaatgctgtctgtttctttcgacgaaagaaaaaatgtttatagagtaaatcaactattgaaaatttttaatgctgcggaatctattaaaaaagaggatcctactgtaagtttaccaaatttacctaagaatttattaagaacttcaaaatatttagaacatcctgtttttaattcatatcactcagagaccgagatgcttagatatct

SEQ ID NO: 219898 - DNA, 454 bp, Unknown
  Bacterial polypeptide expressing nucleotide sequence isolated from the Sargasso Sea
tgtataattgatatcagatctataaaaaatgatacaggaataacagaagaagatatcgctaagagattaatagattttggttttcatgctccgacaatgtcttggccagtgccaggaaccatgatgatagaaccgactgaaagtgaaagtttaaatgaaattaatagattttgtgacactttaattaaaattaaaaaagaaattgataaaataaaaaatggagaatttgataaaattgataatccaattaaaaatgctccacatactgatctagaattagcatcaaatgaatggaaacataaatattctagagaagatgcagcatatccttcaaaatttttaaaatctaataagttttggccaccagtttctagagtcgataatgtttatggtgacaaaaatcttttttgtacttgtccaagcatggatgaattcaaagaagacgcagcttaaa

SEQ ID NO: 219899 - DNA, 938 bp, Unknown
  Bacterial polypeptide expressing nucleotide sequence isolated from the Sargasso Sea
tggtgaatggggtgcggacatcgtggtcggtaactcgcagcgcttcggggttccaatgggttttgggggcccgcacgccgctttcatgtctgcacaagatgcattcaagcgtaagcttccggggcgcattatcggtgtttccgtagatacggatggcaacccggctttgaggatggctttgcagaccagagaacagcacatacgccgggacaaggccacgtcaaacatctgcaccgctcaggtgcttctggcaattatggcaggagcgtacgcggtctatcacgggcccgatggcctgaagcgtatcgcagagcggattcgcgatcaggcgggtgtgctcgctaccgggctcaggatgctcgggcatgaggttctcacgaatgactttttcgacacgattcgggtccgaccatcaggggacgtgagtgaagtcctcggtctggcgctaggaaacgggatcaatctccggagttttggtgacggtacggttggtatcgcactggatgaagtcacacgtccgaacgatctcgacgacttgttttcggttttcaataaaggcagtgagccagctttcaatgcacgctctctagcggagcaggagagtttgccggtgcttcccgcttgggccgaccgggcatcaccgtatctcgagcatgaggtcttcaataaatatcattccgaaaccgagatgctacggtatctgcacaagctcgaggcaaaggacctctcgctaaatacgagtatgatcccgctcgggtcatgcacgatgaaactaaatgcaacctcgcagatggccggggtaacgtctcctgaagcaggtaaacttcatccgtttgctcctgaggatcaggtagaaggatacaaaattattttcagcgagcttgagcagtggttagcagagatcacgggattttcagccacgtcacttcagccgaact

SEQ ID NO: 219900 - DNA, 592 bp, Unknown
  Bacterial polypeptide expressing nucleotide sequence isolated from the Sargasso Sea
tcttatatagccatgatgggtaacaagggtttaaagaaagcaactcaggtcgctatcttgaacgcaaattatttagctaaaaaacttgaggatcactttcctgtattataccgcggtaccagtggatatcatgctcacgaattcattatagatataagacccattcgtgagtcctcagacatcagcgaagaagacatcgccaaaagattaatggattacggctttcacgcacctactatgtcatggcctgttccaggaaccatgatgatcgaaccaacagagagtgagtccaaacccgaacttgatcgattcatcgaagctatgatctcaataaaaaaagaaatagataatgttgtttctggggaatatgaccctattgataatcctttaaaaaatgcaccacatacagcagagcatgctctctcagataattggtcacatccctattcgaggcatggtagctcattccccatggattggcaaagtgaatataaatattggcccagtgttggccgaatagataatgcttatggagatagaaacttagtttgcacatgtccctcaacggatgattatagagatacagattaat

SEQ ID NO: 219901 - DNA, 894 bp, Unknown
  Bacterial polypeptide expressing nucleotide sequence isolated from the Sargasso Sea
gcaacagctgaagcagttggactgtcacaaagattagataaaacaaactcaaaaaaaatattcatctcaaataattgcaaccctcagactatagatcttatcaaaactagaacaaatccgtttggcctagaattaattattggtgacgaaaacaaagttctttcaaaaattaaagaagatattatttgtggagtgttatcttaccctggaactttaggtgaaataatagatcctagtgaaagtataagtcaaattcataaaaaaaatgggaaagctattttagtttgtgatctccttgcattagccaaattaaaaacacctgctgagctcggtgctgatattgcagtcggaagtgctcaaagattcggtattccaatggggtacggtggcccacatgcagctttttttgctactaaagaggaatttaaaagatcaatgcctggaagaattataggtgtttcaaaagatcgacatgggaaaaaagcttatagattatctttacaaaccagagagcaacatattagaagagacaaagccacaagtaacatctgtactgctcaagctttattagcgataatatctgctgctttcgcgatttatcatggccctgagggaatacttaaaattgctgatagaacttctaaattagcaaaattatttgcagatgaaattaaaaatgggggttacaaaattctatctgatcatttttttgatactgttacaattaaaactaatgaaaaaacaaattctatttatcaagcggcattaaaggaagaaattaacctaagaaaagttgatgaaaaaaatttatcagttgcatttgatgaggccaaaaaacttgatgatgtgaatttattattaaagatttttggactttctaaaataattaaacaa

SEQ ID NO: 219902 - DNA, 838 bp, Unknown
  Bacterial polypeptide expressing nucleotide sequence isolated from the Sargasso Sea
ttacaaacaagggaacaacatatcagacgagataaagcaactagcaacatatgtacagcgcaagcattattagcaataatatctgcagcctttgctatttatcatggacctgatggaatacttaaaatagctaacaggacttcaaaattagcaaaaatatttgctgatgaaattaaaaaaggtggttttcaaattttgtcagaccatttttttgatacagtaacaattgaaacaaaagacaagacaaactctatttatcaaaaggccttaagtgaaaatattaacttaagaaaagttgatgacaaacacatatcagtagcatttgatgaagcaaaaaaacttaacgacgttaatacattgttaaaagtatttggagtttctaaaataataaatcaggatgtaaaagttgagcttaataatcttcctaaaaatcttttaagaacatcaaagtatctgactcatcctgttttcaataaatatcattcagaaacagagatgctaaggtatttaaaaaaacttgaagattgtgatatagcacttaatcgatcaatgattgccctaggttcttgcactatgaaacttaatgcaacagcagagttaatgcctattacttggaaggaattttctttgccacacccatttgtgccaacagatcaaatggaagggtataaaattttatttgatgacctaataaatgatttaaaagaaatcactggatatgatgcagtttctttacaaccaaattctggtgctcagggtgaatacgcagggttaatgacaataagaaaatttcacgaaagtaacggacaaggtacccgagatgtttgtttaattccta

SEQ ID NO: 219903 - DNA, 1048 bp, Unknown
  Bacterial polypeptide expressing nucleotide sequence isolated from the Sargasso Sea
gaaatcgattgcttcgaaaataaaatcgctcgttcctacatcgggatgggttactacgacaccatcacaccgaatgtgatcctcaggaatctcctcgaaaatctggctgggtatacggcctacactccttatcaggcagaggtttctcaaggaagacttgaagcattgttaaattatcaacaaatggtgatggatctcaccgggatggatattgccaacgcatcactgcttgatgaagcaacggctgcagcggaagcaatggcctttagcagaaggatttcacggagcaaaagcatgaagttttttgcgtccgaagattgtcatccccaaaccctagatgtcctgaaaacccgtgcagaacctatgggaatcgaactggttttaggaacaccagaagaaaacctggaaaccgaattttttggggttttgcttcagtacccctctaccacgggcgtcattcatgatattggaaagtggattgagcaatggcatcaaaatgacaccatggtttctgtggcaaccgatctgttaagtttggttttactcaaaccacctggggagttgggggctgatgttgtcattgggaactcccaaagatttggcgtgtctatggggttcgggggacctcatgccgccttttttgcaactcatgaccgccacaaacgttccatgccgggcaggctgattggagtttcggtggatggacgcggaagacgggctttgagaatggcccttcaaaccagggaacaacacatccgccgtgaaaaagcgaccagcaacatctgtactgctcaggtgctacttgcagtcattgcaggatgctatgcggtttatcatggaccagatggactcaaatcgattgccggaagagttcacaggatgacaatgttgtttgcaaaatcattgaaaaaaatcggaatccgttgcagtgaacatttttttgataccgtccatattgatgcgggaaataatagggatcaaatctacgagagtgctctgcagcaggggttgaactttcgaaagatcggttcctaccatttgggtgttc

SEQ ID NO: 219904 - DNA, 673 bp, Unknown
  Bacterial polypeptide expressing nucleotide sequence isolated from the Sargasso Sea
tatggatttctctaaacgacatattggacctgatgatagtgatataaataaaatgttatcatatcttggttttgattccatcgaacaattaataaatgctaccattcctgatggtattcaatttaacgacgagttgaatattggtaaatcaattagtgaatatgagtttttgaatacaatcaaaagaattggcaaaaaaaatcaagtcgttaaatcatatattggtactggttattatggtacagttaccccaccagtaatacttagaaatattttagaaaatccaggctggtatacagcttatactccttatcaagcagaaatttcgcaaggccgtttagaagcactgcttaattttcaaacaatggtaaccgatatgactggtctcgatatttcaaacgcctccttgcttgatgagtcaacagctgccgcagaagcaatggttttgatgttcagatcatcgcgaaatagaaacacttttcttgtatccgaccaatgccacccgcaaactattgatgttttgaaaactagatctcgaccgattgacataaatcttaaagttatagccacagaggagtttgttttcaatgaagaaacctttggttgcctaattcaatgtccaacgaccgatggaaaggtttttagctataaagaattagccaaatctgcacat

SEQ ID NO: 219905 - DNA, 859 bp, Unknown
  Bacterial polypeptide expressing nucleotide sequence isolated from the Sargasso Sea
tatgcttaaagaattgggttataataacttagaagaactaattgataaaacagtcccaaaaaaaattcttttaaaagaaaatctaagtattggtgaacctaattcagagtataaagcacttagaaaattaagagatatctctcaaaaaaataaaatttattcaagttttattggaatggggtattacggaaattataccccatatgtaatactaagaaatattttagaaaatccaggatggtatacttcttatactccgtatcaaccagaagtggctcaaggaagattggagatgcttttaaattttcagcagatggtaattgattttacaggtatggatattgcaaatgcatctcttttagatgaggggacagcagcagccgaagccatgggtttaagttatagaatttgcaaaaaagataccaaaaaagtctttgtctcgaaaaactgtcaccctcaaaccattgatgtgattaaaacaagggccgaaccattaggtttagaaataacagtaggagatgaagataaagatattaatgagaatattgtttgtgggattatacaatacccaggaactttaggagatataaaggatcctagtgaagctattagcaaaatacataaacaaaatggaaaagcagtaatagtttgtgatttattagctctcgctaaaattaaaacacccgccgaattaggagctgatatagctgtggggagcactcaacgatttggaattccaatgggttacggaggacctcatgccgcgttttttgctactaaagatgagtacaaaaggtcaatgccaggaagaatagtgggtgtttcagtggataggcatggcaacaaagcttatagattg

SEQ ID NO: 219906 - DNA, 895 bp, Unknown
  Bacterial polypeptide expressing nucleotide sequence isolated from the Sargasso Sea
atgctatttaaaccgacagattatttaccttacgattttgcaaatcgacggcatattgggccatccggtgaagaaattcaacaaatgcttgccctgttagaagttaacagcctcgatgaattgatagataagacagttccacaaggtattcgacaattagatgttttaaagtgggaaagagcaaaatcggaaagagaggttctgtatcacttgaggcaaacagcgtcaaaaaataaagttcttatttcgcttattggacaaggttatcatggtactgtgacaccacccgtcatacagaggaatattttagaaaatccagcatggtacacttcatatacgccatatcagccggaaattgcgcaaggtcgcttagaggctcttttgaattttcaaactatggtctcagatttgacaggtctggatattgccaatgcatccttgttggatgaggctacagctgctgcagaggcgatggtgatgtctcaaaggatttctaaatctaagtcaaaaatattttttgtcgacgaaaatagtcaccctcaaaatattgcagtcttaaaaaccagagcggaaccaattggtattgaaattattgttgggaaggtgacggaaacggattttaccagtgggttttttggggctatatttcaatatcctggaacccacggaagtctcgaagatttttcggatcaaataaatgccatacattccacaggtgggatcggtataatttcggctgatatcctggctttaacgattctcaaagagccaggtgctatgaatgctgatatcgccattggatcgacacaaaggtttggtgtgccggttggatttgggggtccgcatgcagcttatattgcaactattgataaatacaaaagatcttaccgggtcg

SEQ ID NO: 219907 - DNA, 648 bp, Unknown
  Bacterial polypeptide expressing nucleotide sequence isolated from the Sargasso Sea
aatgttaaagaatgcccaaaaagattttataagaagacacataggttcttctgaaaaagaacaagctaagatgcttcaagatcttggttataaaaacctagatgaacttatagaaaaaactgttccagaaaaaattcttttaaaagatagtttggagattggagatcctaattctgaatacaaagcactaagaaaactaaaaaatatttcaaaaaagaataaaattttttcaagttttattggaatgggatattatggaacccatacaccttatgtaatcttaagaaatatattggaaaatcctggttggtatacttcatatacaccgtatcaaccagaagtcgctcaaggacgacttgaaatgttgttaaatttccaacaaatgatcattgattttactggaatggatatagccaatgcctctcttttagatgaaggcactgcagctgcagaagcaatgggattaagctatagggtttcaaaaacagacactaaaaaggtatttgtatcaaaaaactgccatccgcaaactatagatgttataaaaactagagctgaacccttgggattagaagtagtagttggagatgaggataaagatattaatgaaaatattatttgtggaattcttcaatatcctgggaactt

SEQ ID NO: 219908 - DNA, 835 bp, Unknown
  Bacterial polypeptide expressing nucleotide sequence isolated from the Sargasso Sea
ttggttggtatagcaaggcctggaaattttggtccagatgtttgtcatataaacttacacaaaacattttgtattccacacggtggaggaggtcctggaatgggaccaattgcatgtaaaagacatttacaagtttatctacctaatcatccagttgttaaagattgtggacctgctacaggaataggagcagtttcagcagccccttggggaagctcaagtattttatcaatttcttggatgtacattaaaatgatggggtctcaaggtttaaaactagctacccaagttgcaatactaaatgcaaactatattgctcatagactcaaagaacattatccaattctttataaaggttcaaacggaaatgtagctcacgaatgtataattgatatacgatctattaaaactgaaacagggattaccgaagaagacatagctaaaagattaatagattatggttttcatgcaccaacaatgtcatggccagtagcaggcacaatgatgattgaaccaactgaaagtgagagcttatctgaactggatagattttgtgatactttgattagcattaaatcagaaatagatatgatcaagtcaggaaaattcgataaaattgataatccaattaaaaacgcacctcatactgatattgaattagcctcagatgaatggaaacataaatattcgagagagcaagctgcatatccagcaaaattcttaaaagcaaataaattttggcctccagtcgcaagagttgataacgtatacggagataaaaatattttttgtacttgtccaagtatggacgagtttaaagaagatgcagcataat

SEQ ID NO: 219909 - DNA, 910 bp, Unknown
  Bacterial polypeptide expressing nucleotide sequence isolated from the Sargasso Sea
attagaaaatatcatttagatagaggcgacaaaaatagaaatatatgtttaataccaagctcagcacatggaacaaatccagcaagtgcccaaatggttggaatgaaagttgtggtcgttaactgtgataaagaaggaaatgtagatttcgaggacttaaagaaaaaagccgaattacattcacagaatttgggagcgttaatggttacatacccttcaacacatggagtatttgaggaaaaaattatggatatctgtgagttaattcataaacatggtggtcaagtttacatggatggggcaaatttaaatgcattagttggtattgctaaaccaggaaactttggtccagatgtatgtcatataaatttacacaaaacattttgtatacctcatggagggggaggacccggaatgggtccaattgcttgtaaaagacatttacaagtttatttacctaatcatccagttgtaaaagattgtggacctgcaactggtattggtgcagtttcagctgcaccttggggaagttccagcattttatcgatttcttggatgtatatcaaaatgatgggatctgatggtttaagacttgcaacaaaagtagcaattttaaacgcaaactatcttgctaaaagactcaaagatcattttccaattctatataaaggatcaaaaggaaatgttgctcatgagtgtattatcgatattagagcaataaaatcagaaacaggagttacagaagaagatatagcaaaaagattaatcgattttggttttcatgcgcctaccatgtcttggccagtagctggtacaatgatgattgagccaacagaaagcgagagcttgccagagttagacagattttgtgacactttaataaaaattaaacaagagatagataaaatta

SEQ ID NO: 219910 - DNA, 889 bp, Unknown
  Bacterial polypeptide expressing nucleotide sequence isolated from the Sargasso Sea
cacgggaccaatcctgccagcgcgatgatggcatccatgaaagtcgtcattgtccaatgtgatgaagagggcaacattgatctggaagatcttgaggcaaaagctcaaaaacattcatcagaactttcagctttgatgattacttatccctccacccacggtgtttttgaagaaacgctgaccaagatttgcgatatcatccatcatcatggtggccaggtttacatggatggtgcaaatctgaatgccctggtcggcatagcccagcccggaaaaatcggtcctgatgttttgcacatgaacctccacaaaaccttctgtattccccatggtggcggaggtccgggaatggggccgattggatttaaaaaacatctcgcgccttttgctccaagtcatgcggtttgcccggttccaggtgttcctgaagaaaacagcgcggtttctgcagcaccttatggaagtcctgggatccttccaatttcctgggtttatatcaaattgatgggaggtcctggtcttttgaaagctaccaaggttgcgattctcaatgcgaattacattgcatcaagagtggggaaacatttcccggtggtctatactggaaacaacggtcgggttgcccatgaatgcatcatcgacgttcggccttttcgggaaacggccggaattaccgaagaggatgtggcaaaaagattgatcgattatggattccactcgccaaccatgtcatggccggtggcagggaccttgatgatcgaacccactgaaagcgagcctttagaggaattggatcgtttttgtgatgcattgattgcgattcgtgcagagattaagaggcttgaagaaggtgaatggaacgcagacgacaatcccctccaaaacgctc

SEQ ID NO: 219911 - DNA, 886 bp, Unknown
  Bacterial polypeptide expressing nucleotide sequence isolated from the Sargasso Sea
ttgctttggcaaagtaaaaaccccagcagagttgggagcagatatagcagtaggaaattcacaacgatttggatcccaatgggttatggtggaccacatgctgcattttttgcaaccaaagatgagtttaagagatcaatgccaggaagaattataggagtctcagttgatagacatggtaacaaggcttatagacttgcccttcaaacaagagaacaacatataagaagagataaggctactagtaacatttgtactgcgcaggctttattagctattgtttcagcagcttatgctatttatcacggacctaatggtataagaaaaatctcagaaagagtttcacaattagcaaataattttgctgataagataaaaaaatccggttatgaaatatattccaacaatttttttgatacagttgtaattaaaacaaaagataaaacagaaaaaatatttaaaaatgctttagatcaaaaagtaaatattaggaaagttaattctgaaatgttggcagtttcttttgatgaaaaaaaaaatgtttatagagccaatcagttattaaaaatatttaattgcgctgaatcaataaaggacaatccaacagaaagtttaccaaatttgcctaaaaatcttttaagaacgtcaaagtacttagaacataaagtttttaatagctatcattctgaaactgaaatgcttagatatttaaaaagactagaggacaaagatattgcacttaaccgttcaatgattgctttgggatcatgcactatgaaattaaatgcggttgctgagatgatacctatatcctggagagaattttcagaaccacatccttttgtaccagttgaacaaatggaaggttttagaacactttttacag

SEQ ID NO: 219912 - DNA, 828 bp, Unknown
  Bacterial polypeptide expressing nucleotide sequence isolated from the Sargasso Sea
ccaagatggtatacttcttatactccatatcaagcagaaattgcacaaggaagattagaagctctatttaattttcagactattgtttgtgaactaacaggattccctgtcgccaatgcatctttgttggatgagggtactgctgcagcagaagcaatggccatgagtttttccgcaagaaaaaataaatcttcaaaagtgtacttagtggagtcaaatgtttttgatcatacttttaatgttctacaaaccagagcaaaacctttgggaatatccttaaaacgttttactcaaagcaatcttcctaatcatgatgatgtctttggaatgttgttgcaattacctggtaaaaatggacaattatatgatcctacattcttaatttcccaagcacatagatcagaaattattgttacggcatctattgatccactagcacaagttttgattaaaccaatttctgaatttggtgttgatgtagcagtggggagtatgcaaagatttggtgttccaatgggttttggtggcccccatgcagcatattttgcttgtagcgaaaaatataaaaggcttatacccgggagaatagttgggcagactctatctaaaaatggagaaaagtcactaagactagcattgcaaacaagagagcaacatattagaagggaaaaggccactagtaatatttgtactgctcaatctttgttagccataatttcttctttttatgctatttatcacggaccctctggattaacgcaaattgctaagagattagttgagatgagaataaatttagaatcaagtttagctgctctaggttttgat

SEQ ID NO: 219913 - DNA, 805 bp, Unknown
  Bacterial polypeptide expressing nucleotide sequence isolated from the Sargasso Sea
ggcactttctaggaggtcttctaaagctaaatcaaatatcttttttgttgatgaaaattgtttcgtaaatacaattaatgttcttaaaacaagagctttccctttaggaattcaaattaaaattggttcaatagaagaagctaattcttgtgattattttgggatgctccttcaataccccggggctgacggaagaattactaactttgagaagattgtcgctgaatctcaaaaaaaagatgctctgataacctttgctagcgatttattagcacttaccttgttgaaagcacctggagaattaaatgctgacatagttatcggttcctcacaaagatttggggtcccccttggatgtggaggccctcatgcagcttttatggcagtgaaggatgaactaagaagatctcttcctggaagaattgtgggtgcttcaatagatgattcaggaaaccttgcatacagattagccctgcaaacgagagaacagcacataagaagggaaaaagctactagcaacatttgtacatctcaggcgttacttgcaattatggctggtttctatgctgtttatcatggtcctcaaggattaaaacaaatagccaaaaatattaacaatttaacaaatttattagcgcaaaatttaaaagaaaatggatttgaattgcttcaagaatctttctttgacacgttaacaatttctacacgagataaaacaaaagaaatcattgatagagctttatcaagagaatgcaatctgagaattgtagatgaaagcactcttggaatttctttagacgagact

SEQ ID NO: 219914 - DNA, 896 bp, Unknown
  Bacterial polypeptide expressing nucleotide sequence isolated from the Sargasso Sea
tattgctaatgcatctttgttagatgaaagtactgctgctgcagaagctatgatgatggcatataagattaagaaaactaaacagcagaccttttgtattcaaaattcttgtcaccctcaaactttatcagttttaagaacaagagctaatcctcttggaataacaattattgaaggtaaaccaaacgaagatacttttggttgtttaatacaaaatcctgatacttacggagaaattgaagatttagaaacacttattaaaagtaataaatctaatgaaattatatctattgttgccgcagatattatgagtatggttgtcatgaattcaccaggctcatatgatgctgatattgttataggtagttctcaacgttttggagttccaatgggtttaggaggacctcatgcagcattttttgcaactaaagatgaatttaaaagattaatgccaggtaggttaataggtgtatcagttgatagaaacaataaaagatcttacagaatggctcttcaaactcgtgaacaacacataagaagagaaaaagcaactagcaatatttgtactgctcaagctttattagcaataattgccgcagcgtatgctatttatcatgggccagaaaggttaataaatattgcgtctactataaatcacaatactagatatcttaaaaaatcattagaaaaattagattataaaattaaatctaataaattttttgatacaatagttattgaagacgctaaagctagagactggtttaataaatctgtggaagagggaattaattttagattaattaacaacacaacattttcaatcacgattgatgaaactacaactttagaagacatcaataatctaattgctttttttaatacagcccaataaa

SEQ ID NO: 219915 - DNA, 929 bp, Unknown
  Bacterial polypeptide expressing nucleotide sequence isolated from the Sargasso Sea
gttttcgaggaaaattagtgaaatttgtgattatgttcataaagcaggtggtcaagtttatatggatggtgcaaatctcaatgcgttagttggtattgcaaaacctggaaaatttggaccagatgtttgtcatattaacctacataaaactttttgtatcccgcatggagggggtggcccgggcatgggcccaatcgcttgcgccaaacatttaaaagattttttaccaaaccacaatattactaaaaaaacgagatctgaaaaaagtttgggttctgtatctgctgcaccatggggtagcgcgagtatactacctatttcctggatgtatattaagatgatgggagcagaaggtttgaaaaaagcttccgaagtagcaattttaaatgcaaattatatatcaaaaaaattatctaatcactacaaagtactttacaagggtaaaaatggaaatgtggctcacgaatgtataatcgatcttagaccgataaagtctaaatcgggaatttcagaagaagatatagctaaaagattaatagattatggatatcatgcaccaacaatgtcctggccagttgctggaacattaatgattgaacctacagaaagtgaaaatttagcagagataaatcgtttttgtaatgcattgatatctattaaaaaagaaatcgacaaagtagacaacggtggttttgacaaaaaagataatcccttgaaaaatgcccctcatacacatattgaattaagtgcaaatgaatggaaacactcatataaaagagaagaagccgcatttcctaatcagtatttgaaagataataagtattggccaccagttggaagggttgataatgtttttggtgatagaaatttagtttgcacttgcccaagtcttcaagagtataaagaagaggcggctttaatattaaatg

SEQ ID NO: 219916 - DNA, 976 bp, Unknown
  Bacterial polypeptide expressing nucleotide sequence isolated from the Sargasso Sea
aaatggcatgagttaggaacacttgtaagtgttgcttcggatccgatgagtcttgttttaatcaagcctcccggagaatcaggagcagacgtggttattggaagcacccagagatttggggtcccaatggggttcggcggacctcatgctgcttattttgccgcacgagaaaaaaatatgagaagtgtccccggaagaattataggagtctcaattgatcggcggcaaaaaaccgcactgagaatggctcttcaaacaagggagcagcatatccgcagagagaaagctacaagcaacatctgcacagcacaagttttactcggagtaattgcaggatgttacgcaatatttcatggtcctgaaggactacgaattatcgcaaagcgtatacatagaatgaccggtattctcgcagaaggattaaagagttttggaatatcggtggaaaatcaacattattttgacacgctcactatttcagcaggtaagagggataacgaaatttacgaaaaagctttggtcaaaggaattaaccttagaaaaataggaagcagcaaattaggaatctcactggatgaaaccacaactgctgaagatatacaaatcctatgggaagttttttcagaaaataatgattttccttctctcaaagaactggattcagattttacaagtggaaaaaaagacaccgctattccgcacaaccttattcgcaaatcagattttctaacacatcctgtttttcatatgcatcactccgaaacagcaatgcttcgttacttgcgttacctgcaggataaggatattgcactggacaaatcaatgattccactaggttcatgcacaatgaaactcaacgcgacttccgaaatggtccccattagctggccagaatttttccacatgcacccttttgcaccagtgaatcagacagaaagatacataaaactgatcagtgacttggaaaattattgat

SEQ ID NO: 219917 - DNA, 857 bp, Unknown
  Bacterial polypeptide expressing nucleotide sequence isolated from the Sargasso Sea
tacacaccaaattattttaaaggcactaagattgctattgtagatcctctctgtcaggttcttatgcaacctgtaggtgagttaggatttgatatagcagttggtagtatgcagaggttcggagttcctatgggttttggaggacctcatgcagcattctttgcaaccactgagaaatataaacgtaagattcctggacgtattgtagggcagtctctagattcccaaggtaataaagcactacggctagcattgcaaacaagggaacaacacataagaagagacaaagcaacgtccaatatatgcaccgcccaagcactacttgcaaatatggcaggtttttacgctgcctatcacggtgcggaaggtttgaaaaaaatatcaaccagagtattaaaatataggcagacgctactaaaagcattgaagtggattggaatagaggttgatgagtctgaaggttttgataccgttagatttaaaagtttcctagcattagaaggattcaatgttaggtatgaagatggatggactatgataactttagatgagtgtaccacagaagaagaattaaaacaacttatagattctcagttagatttaaacaatccatttgatactatagatcatgtacttgattctataggagactatcactggttaacagttcctatgcgaacacaagaatggttaactcaagaagtatttaatagataccacagcgaaactgagatgatgagatatatgcataggttagcatctaaggattattcattagtacatggtatgatgccactcggtagttgtactatgaaattaaatgcagcagcagaattgatgcctgtatcgtggccaga

SEQ ID NO: 219918 - DNA, 755 bp, Unknown
  Bacterial polypeptide expressing nucleotide sequence isolated from the Sargasso Sea
atgtttaatcccaagttcggcacatggtacaaatccagcaagcgcacaaatggttggaatgaaagtcgttgttgttaattgtgataaagagggaaatgtagatttcgatgatttaaagaaaaaagtagagcaacattcagaaaatcttgcagctttaatggtaacttacccatctacccatggagtatttgaggaaaaaataactgatatttgtgagttagttcataaacatggtggacaggtctatatggatggagcaaatttaaatgcccttgttggagttgcaaagcctggaaattttggtccagatgtttgtcatattaatctgcataaaacattttgtattcctcacggtggtggcggacctggaatgggacctatagcttgtaaaaaacatttacaggtttatctgcctaatcatccagtaataaaagattgcggaccaacaagtggaattggagcagtatcagcagctccttggggtagttcaagtattctatcaatctcttggatgtatattaaaatgatgggatcagaaggattaaagcttgctactcaagttgcaattttaaacgcaaattatattgctcatagacttaaagatcactttcctattttgtacaaaggtgcaaatgggaatgttgcacacgagtgcataattgatattagaaatattaaatccgaaacaggggtaactgaagaagatattgcaaaaagaatgatagattttggatttcacgcaccaactatgtcat

SEQ ID NO: 219919 - DNA, 816 bp, Unknown
  Bacterial polypeptide expressing nucleotide sequence isolated from the Sargasso Sea
taattcataaacacggtggccaagtttatatggatggtgcaaatttaaacgcgcttgttggtatagcaagacctggaaattttggtccagatgtttgtcacataaacttacacaaaacattctgtattccacatggtggtggaggaccaggaatgggaccaattgcatgtaaaagacatttacaagtttatttgcctaatcatccagttgttaaggactgtggacctgccacaggaataggagcagtttcagcagcaccttggggaagttcaagtattttatcaatttcctggatgtatattaaaatgatgggttctgaaggtttaaaattagctactcaaattgcaatattaaatgcaaattatatagctcatagacttaaagatcattacccaattctttataaaggttcaaacggtaatgtagctcatgaatgtattattgatattcgatctattaaaactgaaacagggattactgaagaagatatagctaaaagattgatcgattatggttttcatgcaccaacaatgtcatggccagtagcaggcacaatgatgattgaaccaactgaaagtgaaagcttgtccgaactagatagattttgtgatactttgattagtattaaatcagaaatagacatgatcaaatcaggaaaatttgataaagttgataatccaattaaaaatgcacctcatacagatattgaattagcttcagatgaatggaatcataaatattcaagagagcaagctgcatatccagcaaaattcttaaagacaaacaaattttggcctccgggttgcaagagttgaa

SEQ ID NO: 219920 - DNA, 948 bp, Unknown
  Bacterial polypeptide expressing nucleotide sequence isolated from the Sargasso Sea
tgatgctgacgtacgcactctgtgggacgttttcacgctaccggaaaattctgtcgaagacctgaaaacatgtgaaccatcaactcagtcacttcttccggacacctgcattcggaaaagcgacttcctcacccactctgtctttcatgcacatcgcagtgagacccagttgctccggtatcttcgtgaattagctgatcgtgaccttgcactcgaccgaacaatgattccattgggaagttgcaccatgaagctgaatgcaaccagtgaaatgattccgatcagttggcccgagttcgctgacatccatccctttgcaccatctcaccaacttcagggatatcaaattctccaggatcagctctgcaagtggctgggtgaagccactggatatgcaggcatcagccttcagccgaacgctggaagccaaggagaatacgccggactccttgtcattcgggcctggcaacgtgctcgcggagaagggcaccgaaatatctgcctgattccagcatcagctcatggaacaaatcctgcaagcgcacagatggccggcatgaaagttgttgtcaccggctgtgacgaccaaggaaatgttgaccttgttgaacttcgggaaaagtgcgagcagttcactgatcagttggctgctgtgatgattacgtacccaagcactcacggcgtcttcgaatctgagatcaagaatctttgtgacattgtccatgatcatggtgggcgggtgtacatcgatggtgcaaacatgaatgcattagttggaactgccgaacccgggcactttggtggtgatgtgagtcatctcaatcttcacaaaacattttgtattccacacggtggcggagggcccggtgttgggccagtctgtgttgttgaagacctcgtgccttttctgccaggccacgaaaacagtggtgtccaaacgagtggcgg

SEQ ID NO: 219921 - DNA, 532 bp, Unknown
  Bacterial polypeptide expressing nucleotide sequence isolated from the Sargasso Sea
aatgttaaaaaacgctcagaaagattttattcaaaggcatataggaccttctaaagaagaacagaaagttatgcttaaagaattgggctataataacttagatgagttgattgccaaaacagtcccagaaaaaattctattaaaagaaaatctaagtattggtgaaccaaattcagaatacaaagcgcttagaaaattaagagacatctcccagaagaataaaattcattcaaattttatcggaatgggatattacggaaattataccccatatgtaatactaagaaatattttagaaaatccaggatggtatacttcttatactccttatcagccagaagtggcacagggaagactggagatgcttttaaattttcagcaaatggtaattgattttacagggatggatattgcgaatgcatctcttttagatgagggtacggctgcagctgaagctatgggtttaagttatagaatttgcaaaatagaaaccaaaaaagtttttgtctcgaaaaactgtcacccccaaacc

SEQ ID NO: 219922 - DNA, 643 bp, Unknown
  Bacterial polypeptide expressing nucleotide sequence isolated from the Sargasso Sea
ttagaaatcgccaatgcctcactattggatgagtcaactgcttgtgctgaggctatgaccatggcacgaagaatcgctaaatcaagttcaaacaatttttttgttgatcaagagtgtcaccctcaaaacattgaagttttaaggacaagggcagaacctctaggattaacaataattgtagggcatcctgataaagacctaaatcagagtgattgtttcggtgccatatttcaataccctggtacccacggcttcataaatgatttcacagcaaatattactagtctgcatgaaaataatgcagtggcaattatctctgcagatccactatctcttactttgcttaaagcgcctggcgaaatgggtgccgatatagcggtaggatcaactcaaagatttggggttcctcaaggttttggaggtccacacgcagcctacatggctacaaaggatgcatttaagagattcttaccaggtagaattgttggagtctcagtagatagtagaggaaataaagcttatagattagctctccagacaagggaacaacatattcgaagagaaaaagcgaccagtaatgtgtgtactgcacaagcgttattagctgttaaagcttctttctatgcagtcatgcatgggccag

SEQ ID NO: 219923 - DNA, 876 bp, Unknown
  Bacterial polypeptide expressing nucleotide sequence isolated from the Sargasso Sea
tccaaatgcaaatggtggtattgctgacatgtctgaagtagctgaacagatacataataaaaatgggttgtttattgttggtacagatttgcttgctctaacattgataaaagcaccaggagaatttgacgcagacattgttattggctcggcccaaagatttggtgtaccaatgggctttggtggcccacatgctggatttatagctgttaaggacgcattcaaaagatcactccctgggagactaattggactcacacaggaccaacagggtagaccgtgctatagactggcacttcaaacaagagaacaacacattagaagagaaaaagctacaagtaatatatgtactgctcaagcgcttctagctataatgtccagtttttatgctatataccatggtcccgatggtcttaaggagattgccttgagagtacatcagaaagcaaaagtattagctcataatctaactgcaaatggctttaaattagttgaaaatactttttttgataccttagtcatagaggttactgatgctaattcgattcataaaaaagcattggagcataaatttaatctcagaaaaatttctaacaatcttattggtcttagttttgatgaaactaccacggatgaagatgtaaaaaccattctaaatctctttagcgaaaatacctcaatgtcaaaaaatgttgatgatgttgtatctgataacttaatacgtaaatcactataccttacacatgaagttttcaattcatatcactccgaaacacagattctaaggtatatcagaagtttagcagataaagatattgcactcgatagatctatgattcctttaggctcatgtactatgaagcttaatgctacttc

SEQ ID NO: 219924 - DNA, 652 bp, Unknown
  Bacterial polypeptide expressing nucleotide sequence isolated from the Sargasso Sea
acgtaatattttcgaaaacccagggtggtatacacaatatactccttatcaatctgaaatttctcaaggacgattggaagcgcttttcaactttcaaactatgattgtagaacttacaaaaatggatatagcaaatgcatctttattagatgaaagctcagcaacagcggaagccatgcagctcttacacagagtaagagataaagaaaaaaagaatgctaccacttgtttagtatgtgaagatatttttcctcaaacattagacgtccttaacacacgagcgaatccattaaatataaacctaaaatttttcaactctcaagaaactttaacatcattaaaagagacgatatctgatcctgaaaatgaaatatttgcaattattttgcaatatcctaaccaatatggaaatgcatctgatataacagcacttgtgaatctagctcatcaacaaaaaattaaagtctgtgtaattactgacttaatggcattaacattattaaagcctccaggagaatttgatgttgatattgttgttggaaattcacaacgatttggagttccacttggatatggtgggcctcatgcagctttcattgctactaaaaacgaataccagcgacagttaccaggtcgtatcatcggtctttca

SEQ ID NO: 219925 - DNA, 907 bp, Unknown
  Bacterial polypeptide expressing nucleotide sequence isolated from the Sargasso Sea
aactggattagatattgctaacgcatctttattagatgagagtactgcagctgcagaagctatgatgatggcatacaagattaataaaaataaaaagcagaccttttgtattcaaaattcttgtcaccctcaaactttatcagttttaagaacaagagctaatcctcttggaataacaattattgaaggtaaaccaaacgaagatacttttggctgcttgatacaaaaccctgatacttttggagaaattgaagatttagacacacttattaaaaacaataaatctaaggaaattatatccattgttgctgcagatattatgagcatggttgttatgaaatctccaggctcatatgatgctgatattgttataggcagttctcaacgttttggagttcctatgggattaggagggcctcatgcagcattttttgcaactaaagatgaatttaaaagattaatgccaggtaggttaataggtgtatcagttgatagaaacaataaaagatcttacagaatggctcttcaaactcgtgaacaacacataagaagggaaaaagcaaccagcaatatttgtactgcccaagctttattagcaataattgcagcagcctatgctatttatcatgggccgaaaaggttaataaatattgcgtctactgtaaatcacaatactagatatcttaaaaaatcattagaaaaattagattataaaattaaatctaataaatattttgatacaatagttattgaagacgctaaagctagagactggtttaataaatctgtggaagagggaattaattttagattaattaataacacaacattttcaatcacgattgatgaaactacaactttagaagacatcgataatctaattgctttttttaatacaactaataaa

SEQ ID NO: 219926 - DNA, 730 bp, Unknown
  Bacterial polypeptide expressing nucleotide sequence isolated from the Sargasso Sea
atgatgaggtatctaaaaaaattagaaaacaaagatatagcattaaatcgatctatgattccattaggatcatgtaccatgaaacttaattcagcaactgaaatgttacctattacactttctggattttctaatgctcatccttttttagaatcacatcaacgagagggttacaatcaattaatgattgagcttattgcaatgttaaaagatattactggttttgatggaatatctttacaaccaaatgcaggagcacaaggtgaatttgctggtttacttgctataaaaaaatatcatgagagcaataatgaagcaaatagaaatatttgtttaatacctagtagcgctcatggaactaatcctgctagcgcacatatgtgtggcatggaggtgttaattgtaaaatgtgatgatgaaggaaatgttgatatagatgatttaaaagaaaaaattgtaaaagcaaaagataatatagccgctttaatgattacttatccatcaactcatggtgtatttgaagagagtattactgaaatatgtaaattaattcatgaagcgggaggtcaagtatatatggatggagctaatttaaatgctttggtaggtatagcaaaacctggagtttttggacctgatgtatctcatatgaatttgcataaaactttctgcattccccatggtgggggaggaccaggtatgggccctattggtttaaaaaacatttgat

SEQ ID NO: 219927 - DNA, 880 bp, Unknown
  Bacterial polypeptide expressing nucleotide sequence isolated from the Sargasso Sea
tcattctatgccgtatttcatgggcctgagggtttaaaagcgattgctcaacgcattcaccgaaaaaccgtgaggctcgcgaagggtttagaaaaagctgggttcaaagtggaacccgacgccttctttgataccatcacagtcgatgtcggattatttcaaaaaggtgtcatgagcgcggcagtccaagaaggaataaatttaagagcaattggaaaaaataaagtagcagtatcttacgatgaaacaaccagacgcgatactacggaagctgtctggagagcctttggcctaaatatgagggataatgatttagaaccaagctatagaatacccaataacctattacgccaaagtacttatttggaacatgaagtatttcatatgaatagggccgagacagaaatgatgcgttatatgaggcggctatctgatagggatctggcactagaccgagcgatgatcccccttggttcctgcactatgaagttgaattccgcggctgaaatgatgcccgtaagctggcgagagttttccttactccacccttttgcgcccaaagaccaagcaaaagggtatgaggaaataataacagatttatctcaaaaactttgcaccatcaccggatatgacgctatttccatgcaaccaaactctggagcccaaggagaatatgcaggtcttttaactatcgccgattaccataattccagaggtgaaagtcatcggaatgtgtgtcttattccgacgtccgcacatggcaccaatccggcaagtgcacaaatggtgggctggaaagtggtgccagttaattctgccgataatggagatatagacattgacgactttaaggcgaaagcagagctttatagtaatgaac

SEQ ID NO: 219928 - DNA, 613 bp, Unknown
  Bacterial polypeptide expressing nucleotide sequence isolated from the Sargasso Sea
tatgtcatatttattttctcaacgtcacattggacctgataaaaaacaggtaaaggaaatgctttctatcctaggtttctcctccctagaagattttataattaaaatcgttccaaaaaatattttatctgactttcaagataaagtattagatagcagaagtgaagtagaaacactaaacaggttgaaagaacttggtgatttaaacaaagtgttttcctcatacataggacaaggttattataatactcatcttccaggagtcattaaacgcaacatattagagaatcctggctggtatactcaatatacaccataccaagctgaaattagtcaggggcgacttgaggctttattaaattttcaaactatggtgtcagatcttacaagtcttccaatttcgaatgcatcactacttgatgaagcaactgcagctgcagaagctatggtaatgttttttaataactctaaagtttctacaaaaattaactttcttgtttctgataaatgccatcctcaaactattgatgttcttaaaactagatctgaaccaatgggaattaacttaagacttggtcaaattaaaaactctgatttcgatgatactgttttt

SEQ ID NO: 219929 - DNA, 1033 bp, Unknown
  Bacterial polypeptide expressing nucleotide sequence isolated from the Sargasso Sea
aatgttacataattctcaaaaagattttttaaaaagacacataggaccttcagatgaagatcaaaataaaatgcttaaggaacttaattacaaatcactagatgatttaataaaaagtacagttccagaaaagatccaattgaaagatgaattaaatattggtgagtctaattcagaatatgaagcattaagaaaattaaaagcaatttcgaaaaaaaatcaaatttactctaactttatagggatgggttattatggcacttatacgccatatgtaattctaagaaatattttagaaaacccaggttggtacacttcttatacaccttatcaacccgaggtagctcaaggaagactggaaatgctgcttaattttcaacaaatgatagttgatttcacaggaatggatatcgcaaatgcatctttattagatgaaggaacagcagctgcagaagcaatgggattaagtcatagattaaataaaaaagatagtaatttagtttttgtatcagaaaaatgtcacccacaaacaatcgatgtaattcaaacaagagcggaaccaatgggattaagagtacttgttggtgatgaagataaaatattagatcaattaaaagaagatttagtttgtggtatattgcaatatccgggaacgttaggagatataaaagatcctagtgaagcgattagtaaaattcataaaaaaaatggtaaagcaatattagcttgtgatttattagcacttgctaagttaaaaacaccaagagaactgggagcagatattgctgtaggaagctctcaaagatttggaattcctatgggttacggtggacctcatgcagccttctttgcaactaaagacgaatacaaaagatctatgccaggaagaatagttggggtatctgttgatagacatgggaacaaagcatacagattatcattacaaactagagaacaacatataagaagagataaggctacaagtaatatttgtactgctcaagctctattagcaattgtgtcagcagcgtat

SEQ ID NO: 219930 - DNA, 790 bp, Unknown
  Bacterial polypeptide expressing nucleotide sequence isolated from the Sargasso Sea
tttgttaagaacatcaaattatttaactcatcctgtattcaataagtatcattcagagactgaaatgatgagatacttaaaaaggctggaggatagtgacattgctctaaatagatcaatgattgcactaggctcttgtacaatgaaacttaacgctactgctgaaatgatacctatctcttggaaagagttttctatgccacatccttttgtgcctgaaaatcaaatgggaggttataaaatactatttaatgatttaattaaagatcttaaagaaattactggatttgacgctgtttctttacagcctaactctggtgctcaaggagaatatgctggtttaatgacgataagagcttttcataaaaataacaaccaacctaacagaaatatttgtttaattccaaattctgctcacggaactaatcctgcaagcgctcaaatgtcaggcatgaaagtagttgttataaattgtgatgagaatggaaatattgatttagacgatttaaaaattaaatcagaaaaatattctaaagaccttgctgctttaatggttacctacccttcaactcatggtgtatttgaagaaaaaataaaagaaatttgtgagatcgtacattcaaaaggtggtcaagtttatatggatggagcaaatttaaacgctctggtaggaatagctaagccaggacaattcggaccagatgtatgtcatataaatcttcacaaaactttttgtattcctcacggtggaggaggtcctggaatggggccaatagcttgcgcaaaacat

SEQ ID NO: 219931 - DNA, 469 bp, Unknown
  Bacterial polypeptide expressing nucleotide sequence isolated from the Sargasso Sea
cgagcagcacacgagtttatcattgactgtcgtttttttaaagataaaggaatcgaagtaattgatattgccaaacgtttgatcgattatggttttcatgctccgacggtatcgttcccagtttcaggcaccatgatgattgaacccactgaaagtgaaaatttggcagaattagatcgtttttgtgaagcatttatttctattcgctatgaaattgaggccagcacaaaagaacaaaccaacaacttattgcgaaatgcacctcataccttgacgcagttgacagcgcacgagtggttactgccctatacgagagaagaagcagcatatccattgcagtttgttcgtgaaaaaaagttttggccaagcgttcaacgcgtcgacgaagcttatggggacagaaacctcatgtgtacttgtgcacccattgaaatgtatgaagaaaaacaggttacggaaattcaataat

SEQ ID NO: 219932 - DNA, 378 bp, Unknown
  Bacterial polypeptide expressing nucleotide sequence isolated from the Sargasso Sea
gaggccagccactcggctggcattacaaactcgagagcaacatattcgacgagaaaaagctacgagcaatatctgcaccgctcaggtacttttagctgtcatcgcgtcaatgtacgcagtttggcatggccccgatgggctgcgggcgattgccacgcgtgtccacgacctgacatcaaagttggcgttgggcttacagggcgttggctttccagtattgaacgaatccttttttgacaccctgagggtgtcggcacctggccaagcatctgacatcgtcgcccgtgccctcaaggagggcttcaatctgcattttgtaaatgcagatgtagtcggcattgccttagatgagacctgcgatacagcgctcattgaggc

SEQ ID NO: 219933 - DNA, 868 bp, Unknown
  Bacterial polypeptide expressing nucleotide sequence isolated from the Sargasso Sea
aaaactttattaagaacctcaacatatttagatcatccagtctttaacagttaccattccgaaaccgcaatgcttagatatttaaaaaaattagaggactctgatattgcattgaatagatcaatgatagctttaggttcatgcacgatgaaattaaattcagtttctgaaatgatacctgtaacatggaaagaattttcacatccacatccatattcccctattgaacaaatggaaggttacagagagttatttactgatttaaaaaattggttaagaacaataacaggtttttctggtgtttctttgcaaccaaatgctggagcccaaggagaatttgctggcttaatggttattagaaagtttcatgaaaaaaatggccaaaaaaagagaaatgtttgtttaataccgagctcagcacatggaactaatccagcaagtgctcaaatggctggcatgaaagttgttgtggttaattgtgatacatttggaaatgtagattacgaagatttaaaaaaaaaggcagaagaacactcagatactttatccgctctaatggtaacttatccgtcaactcatggagtttttgaagaaaaaataactgatatttgtgatttagttcataaacatggtggtcaagtttatatggatggggcaaatctaaatgcattagttggtattgcaaaaccaggaaattttggacctgatgtatgccatattaatttacataaaacattctgtatacctcatggcggaggtggtccaggtatgggtcctattgcttgtaaaaaacatttagaaatttatttaccaagtcacccagtaattgattgcggccctccctcaggaataggtgcaatttcagcgg

SEQ ID NO: 219934 - DNA, 959 bp, Unknown
  Bacterial polypeptide expressing nucleotide sequence isolated from the Sargasso Sea
cgatgtaaattagataatttacctaaaaatttagtaagatcttcaaagtttttaacacatccagtttttagcaaatatcattctgaaactgaaatgatgagatatttaaaaagattagaagatagtgatattgcactaaataggtcaatgattgcattaggctcttgcacaatgaagttaaattctaccgcagaaatgataccaatttcctggcaggaattatctttaccacatccttttgtgccagaagatcaaatgcagggttataaaatgatatttaatgatttgataaaagatttaaaagaaatgactggtttcgatgctgtttctcttcaaccaaattcgggagcccagggcgagtatgcaggacttatgacaataagaagttaccatagaaataataatcaaagtaatagaaatgtatgtttaatacctagttcagcacatggaacaaatcctgcgagcgcccaaatgtctggtatgaaagtagttgtgataaattgtgatgacaatggcaatatagatattaatgacctaaaagataaagctcaaaaatattctaaagatttagcagctttaatggttacttatccttcaacacatggagtttttgaagaaaaaataaaagagatatgtgaaatcgtacataaagaaggtggtcaagtttatatggacggcgctaatttgaacgctttagttggtgtagcgaagccaggagaatttggccctgatgtttgtcacataaatttacataaaacattttgtatacctcatgggggcggcgggcctggaatgggaccaatagcctgcgcgaaacacttagaagaatttttgccaactcatcatcatttaaaagaaagaaactccaaaaaaggtatgggagcagtttcagccgcgccatggggaagtgcaagtattttagctatctcatggatgtatattaaaatgatgggtgctaa

SEQ ID NO: 219935 - DNA, 723 bp, Unknown
  Bacterial polypeptide expressing nucleotide sequence isolated from the Sargasso Sea
gatggagggatatagaacattgttcactgatcttaaaaattggttaagatcaattactggtttttcaggagtctcactccagccaaatgcaggcgctcaaggtgaatatgcaggattaatggttattagaaaatatcattcagacagaggcaataaaaatagaaatatatgtttgataccaagttcagcacatggaaccaatcctgcaagtgctcagatggttggaatgaaagttgtagttgttaattgtgataaagagggaaatgtcgattttgaggatttgaagaaaaaagcagaaattcattctgaaaatcttggagctttaatggttacttatccatctacacatggtgtatttgaggaaaaaatatcagatatttgtgaattaattcacaaacatggaggtcaagtttacatggatggagcaaacttgaatgcacttgttggaatagcaaagccaggaaattttggcccggatgtatgtcatataaacttacacaaaacattctgtattcctcatggtggaggaggacctggaatgggacctattgcatgtaaaaaacatctgcaagtttatttacctaatcatccagttgttaaagattgtgggcctgcaaccggcataggtgctgtttcagcggccccctggggaagctcaagtattttatctatttcttggatgtacataaagatgatgggatcagagggattaaaacttgctac

SEQ ID NO: 219936 - DNA, 589 bp, Unknown
  Bacterial polypeptide expressing nucleotide sequence isolated from the Sargasso Sea
aatgttacacaattctcaaaaagattttttaaaaagacacatcggaccttcagatgaagatcaaaataaaatgcttaaggaacttaattacaaatcactagatgatttaatcaaaagtacagttccagaaaagatccaattgaaagatgaattaaatattggtgagtcaaattcagaatatgaagcattaagaaaattaaaagcaatttcaaaaaaaaatcaaatttactctaacttcataggaatgggttactacggcacttatacaccatacgtaattctaagaaatattttagaaaatccaggttggtacacttcttatacaccttatcagcccgaggtggctcaaggaagattagaaatgttacttaatttccaacaaatgatagttgatttcacaggaatggatattgcaaatgcatctttattagatgaaggaacagcagctgcagaagcaatggggttaagtcatagattaaataaaaaagatagtaatttagtttttgtctcagaaaattgtcaccccacaacaatcgatgtaattcaaactagagcagacccaatgggattaaaagtgcttgttgggtga

SEQ ID NO: 219937 - DNA, 610 bp, Unknown
  Bacterial polypeptide expressing nucleotide sequence isolated from the Sargasso Sea
gccaaatgcgggagctcaaggtgagtacgctggtttaatggtaataagaaaatatcatttagacagaggagatgaaaatagaaatatatgtttaattccaagctcagcacatggaactaatccagcaagtgcacagatggttggaatgaaagttgtagttgtagattgtgacaaagaaggaaatgttgactttgaagatttaaagaaaaaagcagaattacattcagacaatcttggtgcattaatggtaacttacccatcaacacatggtgtatttgaggaaaaaattaaagatatatgcgaagtaattcatcaacatggtggtcaagtttatatggatggagcaaatttaaatgcacttgttggtgttgcaaaaccaggaaattttggtcctgatgtttgtcatataaacctgcacaaaacattttgtattccacatggcggtggaggacctggaatgggacctatcgcatgtaaaagacatttacaagtttatcttcctaatcatccagtcgtaaaagattgtggacctgcaagcggaataggtgctgtttcagcagccccttggggaagctcaagtattttatcaattttcttggatgtatattaa

SEQ ID NO: 219938 - DNA, 688 bp, Unknown
  Bacterial polypeptide expressing nucleotide sequence isolated from the Sargasso Sea
aatgttaaaagaattaaattatcaatcattggatgatttaattgacaacactgttccagaaaagataaagtttaaaggtgaacttaatattggtgagtcgaattcggaatatgaggcattaagaaaattaagagcaatttcaaagaaaaataaagtttactcaaattttattggtatgggttattatggaacctatacaccatatgtaattctaagaaatatattagaaaacccaggctggtatacttcatacacaccttatcagccagaggtagctcaaggaagacttgagatgttattaaactttcaacaaatgattgttgactttacaggaatggacattgctaatgcatctttattagatgagggcacagcagcagcagaggctatgggtcttagtcatagattaaataaaaaagatagtaatttagtttttgtatctgaggattgtcatcctcaaactatagatgtaattcaaacaagagccgaaccaatgggtttaaaagttttagttggtaaagaagatgaagttttagataaattaaaagaggatttagtttgtggaattttacaatatcctggaactttaggaaatattaaagacccgagcgaagcaattagcaaaattcataaaaagaatggtaaggctgtattagcttgtgatttattagctttagcaaaattaaaa

SEQ ID NO: 219939 - DNA, 847 bp, Unknown
  Bacterial polypeptide expressing nucleotide sequence isolated from the Sargasso Sea
atgattgacgataattcaaaagaatttattaaaagacatattggtccttccgaagaagatcagtctaaaatgttgcaatacgttggatacaaatcattagaggatctaatgagcaatactgtgccagaaaaaatcttattaaaagatgatcttaagatcgatcagccaatgtctgaaaacgatgctttaaaaaaattaaaatctatatctaaaaaaaataaaatctttaaaaattttattggaatgggatactataattctattacacctaatgtaattcttagaaatattttagaaaatccaggatggtatacatcttatacaccttatcagcctgaagtggcacaaggtcgtcttgaaatgcttttaaattttcaacaatcaataattgacttgacgggtatggatatagctaatgcttctttattagatgaagcaacagcaactgcagaggcagtaggattaagccagagattagataagactaattcaaaaaaaatatttatttcaagcaattgcaatcctcagacaattgatctcataaagactagaacaaatccttttggtttagaattgatcattggtgacgaaaaaaaagaactttcaaaaattaatgaagacattatttgtggagttttatcttatccgggaactttaggtgagataaatgatcctagtgaaagcatcagtcaaattcacaaaaaaaacggtaaagctattttagtttgtgacttattggctttagctagattaaaaactccagctgaacttggagctgacattgctgtcggtagtgctcaaagatttggtatcccaatgggttacggtggccctcatgcagcatttt

SEQ ID NO: 219940 - DNA, 559 bp, Unknown
  Bacterial polypeptide expressing nucleotide sequence isolated from the Sargasso Sea
cgggcgactcaggtcgcgatcctttcagccaactatattgccaagcgcttggaggggcattacgacaccctatacaaaggctacagcggaatggtcgcgcacgaatgcattcttgatacccgtccaatccaggagaatgctgggttgacagtcgatgatgtcgcgaagcgtatgattgactatggtttccacgcccccaccatgtcctggcccgtggccggaacgctcatggtggaaccgaccgaatccgaaccgcgcgaggaattggaccgcatctgcgacgccatgatcgccatcgccagcgaagcgacgcgggtcgctgcaggggaatggcccgccgacgacaacccactggtcaattcgccgcatacggtaggcatgatcacccatgacaattggctccatccctacagtcgggaaaacgcggcctatccggtcgaaaacctgcgtcgttccaagtattggtctcccgtcagccgagttgacaatgtctacggcgatcgcaatttggtctgtacctgcccacccctggaggcctatatggacacggcagaataac

SEQ ID NO: 219941 - DNA, 832 bp, Unknown
  Bacterial polypeptide expressing nucleotide sequence isolated from the Sargasso Sea
aaaaataaaatactcaccattgttgcagcggatataatgagtttaatattgatgaaatcccctggctctatgggggcagatatagttattggctcaacccaaagatttggcatacctatgggcttaggagggcctcatgcagcatattttgccacaaaagatgaatttaaaagattaatgccaggtcgcattattggagtttcagtagatagaaataaaaaacgttcatttagaatggctcttcagacaagagaacagcatattcgaagagaaaaagctacaagtaatatttgtactgctcaggctttattagccataatgtcggcagcctatgcaatttttcatggtccaaaaagattatataatatagcttctgaaattcatcgaaacacacttttattaaaaaaaagtttagaatatttaaattttaaatgtaaatcaaaagttttttttgatactatattgatagaaaataattcttctattcattggtgtaataaatccaaaaaaaatggatataattttcgtcttattgatgaaaatcatttttctatttccctagatgaaacaacttctttggaagacgttgataatattattaattttttcaatgatagtaataaaaaatttaactatgaagaaattgaatctaatattgattttaatgaaatttttgacaatgatatttctcgccaagataaaatattatcacatcctatatttaatatttatcattctgaaacagatatgatgagatatttaaaaaaattagaaaataaagatattgcacttaatcgatcaatgattcccctaggatcatgtactatgaaat

SEQ ID NO: 219942 - DNA, 880 bp, Unknown
  Bacterial polypeptide expressing nucleotide sequence isolated from the Sargasso Sea
tccataactggtttttcaggtgtttcacttcaacctaatgcaggtgctcagggtgaatatgcgggattaatggttatccgaaagtatcatttagatagagatgaggccaatcggaacatatgtttaattccaagttcagcacatggtactaatccagcaagcgcacaaatggctggaatgaaagttgttgttgttaattgtgataaagaaggaaatgttgattttgatgacttaaagaaaaaagcagagcaacattctgaaaaccttggggcattaatggtaacttacccatccactcatggagtgttcgaagaaaaaatatcagatatttgtgagttagttcataaacatggtggtcaggtttatatggatggtgcaaatctaaatgcattagtgggaattgctaaaccaggaaattttggtccagacgtttgtcatattaacttacataaaacgttttgtattcctcatggtggaggaggacctggaatgggacccattgcttgtaaaagacatttacaagtctacttgcccaaccacccagtaataaaagattgtggaccaacatctggaattggagcggtttccgcagcgccttgggggagctcaagcattttatcaatttcttggatgtatattaaaatgatgggatcagcaggattaaagcttgctactcaagttgcgatattgaatgcaaattatattgctcatagattaaaagatcacttcccaattttgtataaagggtcaaatggcaatgtggcacacgaatgtattattgatattagaaatataaaatcagaaacaggtataacagaagaagatattgcgaaaagattaattgattacggttttcatgcaccaactatgtcctggcctg

SEQ ID NO: 219943 - DNA, 862 bp, Unknown
  Bacterial polypeptide expressing nucleotide sequence isolated from the Sargasso Sea
acgacggagatgatcccgatcacctggccggagttggccaacatgcatcccttcgcgcccgagtcgcagacggcggggtaccgcgagatgttcgccgcgctcacgaagcagctcgtggagatcacgggcttcgacgacatgagcctgcagcccaactcgggggcgagcggcgagtacgcgggcctgatggcgatccgcgcgtaccaccagagccgcggcgacgcgcacagggacgtgtgcatcatccccgtctcggcgcacggcaccaaccccgcgtcggcggcgatggtcgggtacaaaatcgtcgtcgtcggcaccgacgccgacggcaacatcaacgtcccggagctcaaggccgcggcggagaaacacagcgccaacctggcggccctgatggtcacctacccgtccacgcacggcgtgtacgaggacgggatcaaggaggtgtgcgacacgatccacgcgcacggcgggcaggtgtacatggacggcgcgaacatgaacgcgcaggttggcttgacgagccccgggcacatcggcgcggacgtgtgccacctcaacctgcacaagacgttctgcatcccgcacggcggcggcgggcccgggatggggcccatcggcgtgaaggcgcacctcgcgccgttcatgcccgaccacccgagcgcgaagctcgacggcgccacgcccgcgggcggcgccacgcccttcggcgtcgtgagcgcggcgccgtacgggtcggcgctgattctgcccatctccttcgcgtacatctccatgatgggcgcggcggggctgaccaacgcgagcaagcgcgcgatcctgaacgcgaactacatggccaagcgcctcgaggaccactacc

SEQ ID NO: 219944 - DNA, 779 bp, Unknown
  Bacterial polypeptide expressing nucleotide sequence isolated from the Sargasso Sea
aatgttaatacaatatccaaataaaattggagaaattgaagatttttcaaggctatcaaattactgtaaaaaaaataagtccttactggtttgtgccaccgatcttctagcattgactcttttgaagccgcctggagaaattggtgctgatattgttataggttcatcccaaagatttggcgtcccaatgggttttggcggtccacatgctgcatttatggcaacacatgagagttttcaaagatcaatgccaggaagaattattggcgcttcaaaagacgctagtggtaatctttcctacaggcttgctcttcaaacaagagaacagcacataaggcgagaaaaagctactagcaatatttgcacttctcaagcgctactagctgtgatggctggtttttttgcaatttatcatggtcccaatgggttgataggaattgctaatgatatacataaaaaaacttgtaagctttataatgctcttaagtctagtgatcatgaaattcttaacaataacttctttgatactatctctataagcttagaaggacaattttcggaaataagagaaataaaacatcgtcttctcgatgcaaaaataaatattaattggttttatgctgacttggttagtatttcaatagatgaagccacaacctctgatgatattgctgatctagtctttgcgctaacaggtaagtctatatcaaataattccaaagatggtgaaaccagtcttgataaagaaatagttagatcttctgattttatgaaacaag

SEQ ID NO: 219945 - DNA, 808 bp, Unknown
  Bacterial polypeptide expressing nucleotide sequence isolated from the Sargasso Sea
gatgataaggttggtatttcattagacgaaacgtgtgatagggagctcatagagcgtctttggtctttgatgtcctttgacaatgcaaatcagccttcttttgattcaatacaagctaccgagattagagatgcactaccatcgggtctagaacgcaccactgaatttttgacccatccggttttcaacagctatcactctgaaaccgaaatgttacgatatataagacggttgtcggataaggatattgctcttgataggtcaatgatcccgctaggttcttgcaccatgaaattaaatgctactacggaaatgatcccggtaacatggccagaatttagcgcaatccatccctttgcgccaaaagaccaagtagaaggctacatcgaattgataaccgaattagaacggatgctctgtatttgtacaggctatgcagccgtatcacttcagccaaacgcgggatcccagggtgaatatgctgggttgctggcaatccgggcttatcatagaagcaggggggaagtagagagggatatttgtctaatacctagttcggctcatggtactaacccagcttctgctactatgtgcggtatgaaggtaatcgtcgtgaattgtgataattatggaaatattgatattgcggatctccgtgaaaaaactgctcaatacgaaaaatcactcgcagcgataatggtaacatacccttcaactcatggtgtatttgaggacggcattcgggaggtttgtgaaatagttcataatgctggtgggcaggtgtacgtagatggtgctaacttaaatg

SEQ ID NO: 219946 - DNA, 886 bp, Unknown
  Bacterial polypeptide expressing nucleotide sequence isolated from the Sargasso Sea
ttctaaaaagaacaaaattttcaggaattttattggaatgggatactataattctatcacgcccaatgtaattctcagaaatatttttgaaaacccagggtggtatacatcgtatacaccttaccagcccgaagtagcccaaggtcgtttggaaatgcttttaaatttccagcaatcgattatcgatttaacaggtatggatatcgctaacgcctctttgttagatgaagctacagcaactgcagaagctgtaggattaagtcagagattagataaaacaaattcaaaaaaaatatttatttcgagcaattgtaaccctcaaactattgatcttataaaaacaagaacagacccttttggtttagaacttattattggtgacgagaaaaaggagctaccaaaaattaatgaagatataatttgtggcgtaatatcttatccaggaactttaggagagataatcgaccctagtgaaagtataagtcaaattcataaaaaaaatggaaaagccatcttagtttgtgatctattatcattagctaaattgaaaactccagcagaacttggcgctgatattgcagtaggaagtgctcaaagatttggaataccaatgggatatggcggtccccacgcagctttttttgctaccaaagaggcatttaaaagatcaatgccaggaagaataataggtgtctcgaaagatagacatggaaaaaaggcttatagattatcattacaaacaagggaacaacatattagaagagacaaggcaacaagtaacatttgtaccgcacaagctttgttagcaattatttctgctgcttttgcgatatatcacggacctgatggaatacttaaaatagctaatagaacttctaaattagca

SEQ ID NO: 219947 - DNA, 967 bp, Unknown
  Bacterial polypeptide expressing nucleotide sequence isolated from the Sargasso Sea
agaaaatcattcaatcactagaaaatcagttatcacaaataactggcttgcaaaaacaagttggcagcccaattccggtgcacaaggtgaattggcagggttgatgagtatcagaagttattatgatgcaattggcgaatctcatcgaaacattgcatttattccaacatccgctcacggaacaaacccagcgagtgcatcattatgtggcttaaaaatagtacaaatccaatgcaagcaaaatggagagatttgtacaaatgatttaacaaaaaaatgtacgcagtacaaaaatgaacttgctgtaattatgatcacgtatccatcaacgtttggcgtatttgatgcaaacatcacgcaaatatgcgatcaagttcataactgtggcgcgcaagtctatatggatggtgccaacatgaacgcccaagttggtctaacaagtccgtttacaattggtgccgatgtttgtcatttgaatctacataaaacattctgtattccacacggtggtggtggtcctggtgtaggcccaatttgtgtggcttcgcatttagcaccatatttaccaaataccgaaccattatcaacacatttaaacaaacatgattacatcattgcatccgccccttatggaagtgcaagcattttattaatttcatatgcctacatacaaatgatgggatcgacagggcttaaaaaagcatcccaaatagcaatattgaatgctaattatattgctaaaaaattagcacctcattataacattatgtatacaaatgaaaatgggcgagtggctcatgaactcatcatcgattgcaaatcgtttaaaaagtcagcaaatattaccgttgaagatattgcaaaacgattaattgattatggatttcatgcaccaacaatgtcatggccagtaccagacaccttaatgattgaacccactgaaagtgaaggacttgacgaaataaat

SEQ ID NO: 219948 - DNA, 853 bp, Unknown
  Bacterial polypeptide expressing nucleotide sequence isolated from the Sargasso Sea
ttgactcttttgagacctccaggagaaattggtgctgatattgttataggttcatcccaaaggtttggagtcccaatgggatttggagggccacatgctgcatttatggccacacatgagagttttcaaaggtcgatgcctggaagaattataggggcatctaaagatgctagcggtaatctatcctacaggcttgcacttcaaacaagagaacagcacataaggcgagaaaaagccactagcaatatttgtacttctcaagcgctacttgctgtaatggctggcttttttgctatctatcatggtccaaatggtctgataggaattgctaatgatgtccataaaaaaactcgtaaactttttagtgctcttaagtctggcgatcatgaaattctaaataataacttttttgatactctttctattcgtttaaaaggagatatttcggaaataaaaactcgtctactcgatgcaaaaataaatattaattggtttgataataatttagttagtatctcaatagatgaagccacaacctctgaagatattgctgatctagtctttgcgctctcaggaaagcctatattaaatgattccgaagatggtgaagctagtcttaataaagaaatagttagatcctctgattttatgaaacaggagcgttttaataaatatcattccgaaacagaaatgatgagatatattaaaagactatctgataaggatatcgcgctcgatagatcaatgattccacttggctcttgtacaatgaaattaaactcagcttcggaaatggcgccagtaaactggccagaatttgcaaatatgcatccatattgtccgaccgatcaaa

SEQ ID NO: 219949 - DNA, 840 bp, Unknown
  Bacterial polypeptide expressing nucleotide sequence isolated from the Sargasso Sea
aatgattgacgataattcaaaagaatttattaaaagacatattggtccttctgaagaagatcagtccaaaatgttgcaatacgttgggtataaatcattagaggatctaatgagtaatactgtgccagaaaaaatcttgttaaaggatgatcttaaaatcgatcagccaatgtcagaaaacgatgctttaaaaaaattaaaatctatatctaaaaaaaataaaatctttaaaaattttatcggaatgggatactataattctattacacctaatgtaattcttagaaatattttagaaaatccaggatggtatacatcttatacaccttatcagcctgaagtggcgcaaggtcgtctggaaatgcttttaaattttcaacaatcaataattgacttgacgggcatggatatagctaacgcttctttgttagatgaagcaacagcaacagcagaggcagtaggattaagccaaagattagataagactaattcaaaaaaaatatttatttcaagcaattgtaatcctcagacaattgatctcataaagactagaacaaatccttttggtttagaattgatcattggtgacgaaaaaaaagaactttcaaaaattaatgaagatataatttgcggtgttttatcttatcctggaactttaggcgagataaacgatcctagtgaaagcatcagtcaaattcacaaaaaaaatggtaaagctattttggtttgcgacttattggctttagctagattaaaaactccagctgaacttggagctgacattgctgtaggtagtgctcaaagatttggtatcccaatgggttacggtgggcctcatgc

SEQ ID NO: 219950 - DNA, 913 bp, Unknown
  Bacterial polypeptide expressing nucleotide sequence isolated from the Sargasso Sea
aaataaggatttatctctaactcagtctatgatttcacttggatcttgcactatgaagctaaattcagcttcagaaatgatcccgttaagttggacggaatggaatagcatacatccttttgttcctgttgatcaagcaaaaggatatcacgaggtaataaatagattagaagggtacctttcagaaattacaggttttactgcaacttctttacaacccaattctggtgctcaaggagaatacagtggattaatggtaatcaaatcttatttagataaaaaaggtgatagtcacagaaacatatgtttaattccatcttctgcacatggaactaatcctgcatcagcaattatggctggattaaaagtagtagttataaatactgatgagagaggaaatattgatattgaagatcttaaaactaaagtaaacgaacataaagataaccttgctgcattgatgattacttacccatctactcatggagtatttgaatctgagattcaatcaattaatgatttaattcatcaaaatggtggtcaagtatacatggatggtgccaacatgaacgcgcaggttggcttgacaagtccaaaaataattggtgctgatgtttgtcatttaaatctacataaaactttctcaattccacatggaggaggtggtcctggtgttgggccaatttgtgtggcagaacatcttaaagaatttcttccttctaatccattaattaagacaggtggagatgattcacttgagggaatttcatcagctccctgggggtctgcacttgtttgcattatatcatacggatatataaggatgttaggtagagagggtattagaaaatccactgaaatagcgatagtaaatgcaaactatttgaagactaaactcgagaagaattataaa

SEQ ID NO: 219951 - DNA, 955 bp, Unknown
  Bacterial polypeptide expressing nucleotide sequence isolated from the Sargasso Sea
tttcttacacatgaagtgttcaatagccatcattcagaaacacaactcatgagatacattagaaaattaggtgataaggatttagccttagatagatctatgattcctctaggttcttgtaccatgaaactaaatgcaacttctgaaatgatacctgtaggatggaatggttttgcaaatatgcatccacatgctccgagtgatcaaacacagggatatacagaaataatcaataacctcaaagattggctttcacaattaacggggtatgaagcaatttctttacaacccaatgctggttcacaaggtgaatatgcaggtttgctagctattgatggctaccataaagcgaagggagagctgaatcgaaacatctgtttgatacccgagtcagcgcatggtacaaatcctgcgtctgcacaaatggttggttatgaggttgtagttattgattgtgatgaaaatggtgatattgattttgaggatctaaaaaataaagtgagggttcataaagaaaacattgcagcaatgatgattacttatccgtccacgcatggtgtttttgaagaaaaagttcgtgatgtttgcgaattaattcatagctttggtggtttcatatacattgatggcgcaaatttcaatgccatggttggtacttgttacccgggagagtttgggggagatgtttcacatttaaaccttcacaagaccttttgtatacctcatggtggtggaggtcctgggattggacccattggggtagttgacaaacttgtaccttatttaccagcggaccctttaaaacaatctgatcaagaatattctatttctggaacacattttggcagtgctagtattttacccataagctggatgtatattgctatgatgggggaagaatccttacgcaaagccactcaagtagctattttgagtacgaaattatcttgcaaaa

SEQ ID NO: 219952 - DNA, 847 bp, Unknown
  Bacterial polypeptide expressing nucleotide sequence isolated from the Sargasso Sea
aattctgcagcagagttaaatccagtctcttgggctaatttatcttctattcatcctttttctccattagatcaaactaaggggtattcaaaaataatatctgacctagaaaaatggataagtgatattgttggtttaaaatcagtttcctttcaaccaaatgcaggctctcagggagagtttgcaggattattggcaataaattcttattttgaatcaaaaggtgaactttcaagaaaaaaatgtttaattcctaaaagtgctcatggaacaaatcctgctagtgcagttatggcaggatttgatgttttaacggttgcatgtgatgacgaaggaaatattgattttcaagatttgtcgatcaaggtcaagaaatttgataaccaaataggagcccttatgttgacttacccttctactcatggagtttttgaattgcaaatcagagagatatgtgacttaattcactctgttggaggatttgtctatttagatggagcaaatttgaacgcacaggttggattatgcaaaccggggaattatggtattgatgtttgtcatttgaatttacataagacattttgcattccacatggaggtggtggcccaggagttggtccagttgctgcatcagaaactttaagcccatttcttcctactcattctttaatggataataatttatctaatagttccaattacgtatcctctgccaagtatgggagtgcaagtattcttcctataagttggatgtacataaaaatggctggtcttagtggtctaaggaaagcaactgcgcatgcaattttatctgcccaattatattgcgcattctttaaagcataaa

SEQ ID NO: 219953 - DNA, 618 bp, Unknown
  Bacterial polypeptide expressing nucleotide sequence isolated from the Sargasso Sea
cattttacctatttcattggatgtatattaatatgatgggagccataggactaagaaaagcaaccgaagttgctatattaaatgctaattatgtttcacgaaagttagagggttcttataaaactttatataaagggaaaaatgatttagttgcacatgaatgcataattgattttagaccgataaaagcggagtcagggatctcagaagaagatattgcaaaaaggatgattgactatggttttcatgcaccaacaatgtcttggccagttgccggaacacttatgattgaaccaactgaaagtgaaggactagccgaacttgatagattttgcagtgccatgataaatataaagaaagaaataactatggtacaaaataatgtttttgataaagatgataatcctcttaaaaatgcaccacatacaaatcttgaattatcttcagactcgtggacacataaatatactcgtgagcaagcggcatttccgttgaaatatctaaaagctaacaaattttggtctccggttgcacgtgtagataatgtacatggagatagaaacttagtttgctcttgtccatccctagaaagttatagagatgaagaagctgcttaat

SEQ ID NO: 219954 - DNA, 859 bp, Unknown
  Bacterial polypeptide expressing nucleotide sequence isolated from the Sargasso Sea
ttttctgaaatgatacctgtaacctggaaagaattttcacatccacatccttattcccccattgaacaaatggatggttatagagaattattcactgatttaaaaaattggctaagatcaatcacaggtttttctggtgtttctttgcaaccaaatgctggggctcaaggagaatttgctggcttaatggttattaggaagtttcatgaaaaaaacggtcaaaaaaagagaaatgtttgtttaataccgagctctgcgcacggaactaatccggccagcgctcaaatggcaggcatgaaagtagtagttgttaattgtgatgcatttggaaatgtagattatgaggatttaaagaaaaagaccgaaaaatactcagatactttgtctgcactaatggtaacttatccttctacccatggagtctttgaagagaaaataacggatatttgtgaattagttcataaacatggtggtcaagtttatatggatggagcaaatttaaatgcattggttggtattgcaaaaccagggaattttggtcccgatgtttgtcacatcaatttacataaaacattctgcatacctcatggcggaggaggtccaggaatgggtcctattgcctgtaaaaaacatttagagatttatttgccaagccatccagtaattgattccggtcccccttctggaataggggctatttcagcagcaccctgggggagctcaagcattctttcaatatcctggatgtatattaagatgatgggatcagaaggtttgaagcttgcgacacaaaatgcaattcttaatgcaaactacatagcgcataaacttaaaaattattttccctattttatataaa

SEQ ID NO: 219955 - DNA, 922 bp, Unknown
  Bacterial polypeptide expressing nucleotide sequence isolated from the Sargasso Sea
tttttagttggaaaagaagatgaagttttagaccaattaaaagaagatctagtttgtggaattttacaatatcctggaactttaggagatattaaagacccaagtgaagcaattagcaaaattcataaaaaaaacggtaaggctgtaatagcatgtgatttattagctttagcaaaattaaaaacaccaagagaacttggtgctgatatagcagtaggaagctctcagcgatttggaataccaatggggtatggaggtccacatgcagcattttttgcaactaaagacgagtataagagatcgatgcctggtagaattgttggtgtgtcagttgatagacatggtaacaaggcatacagattatctctacaaactagagagcaacacatcagaagagacaaggcgacaagcaacatttgtactgcccaagctttattagcaattgtttcagctgcatatgctatttatcatggtccagatggaattaaaaatatttctgaaagagtttctcaattagcaaaaagttttgctgataaaataaaacagtcaggttatgaaatttattctgattatttttttgatactgttacaattattaccaaagaaaagactgatcaaatttataaaaatgctctaaatcagaaagttaatatacgaaaagtaaattctgaaatgcttgctgtctctttcgatgaaagaaaaaacgtttatagagtaaatcaattattaaaaatttttaatgctgcagaatcaatcaaaaaagaggatccttcagttaaattacctaatttaccaaaaaatttattaagaacctcaaaatatttagagcatccaatttttaacttatatcattcagaaactgaaatgcttagatatcttaaaaagctagaggataaggatatagcattgaatagaactatga

SEQ ID NO: 219956 - DNA, 394 bp, Unknown
  Bacterial polypeptide expressing nucleotide sequence isolated from the Sargasso Sea
atgttacataattctcaaaaagattttattaaaagacatataggcacatcaattagcgaacaagaaaaaatgttgaatgtacttggttataaatctttagaaaacttaattgaaaatacagttcctaaaaaaattcattttaaagatgatttaagtattggagagtccaattctgaatatgaagctttaagaaaattaaaagctgtatctaaaaaaaatgaaatttattcaaattttattggtatgggttattatggaacctacactcccaacgtagttattagaaatattttagaaaaccctggttggtatacctcttatactccttatcagcctgaagttgcccaaggaagattagaaatgttattaaattttcaacaaatggatagttgat

SEQ ID NO: 219957 - DNA, 827 bp, Unknown
  Bacterial polypeptide expressing nucleotide sequence isolated from the Sargasso Sea
aattttactatatctttggatgaaactacaactttagaggatgtggacaatttaattaatttttttaatgaaaaaaatcataaaatagatttaacaaaaattgaaaacacaaaggaagaatcaatttttaaatctgggttaatgagagatgataaaattttaacacatcctattttcaatatttaccattctgaaacagaaatgatgcgctatttaaaaaaattagagaataaggatatagcattaaacagatcaatgattccattgggttcatgtactatgaaattaaatgcagcctcagaaatgttaccagttacttttccaggtttttcagatgcacatccatttttagaatcttttcaaagagagggctataatcaaatgatgaaagaattaatatctatgctcaaagatatctcaggttttgatgaaatttcactacaaccaaatgctggtgcgcaaggtgaatttgcaggattattatctataaaaaagtatcatgaatcaaaaaatgattttaataggaatatttgtttaatacctagtagttcacacggaacaaaccctgctagtgctcaaatgtgtggtatggatgtttcagtagttaaatgcgatgatttaggcaatgttgatttagatcatcttgatcgtaaaataaatgaagctggagatcatttagctgcattaatgataacttatccctctacacacggtgtatttgaagagtcaataactgagatttgtgaaaaaatccataatgctggagctcaaatatatttggatggagcaaattttaattcaatggttgctattgcaaaacctggtaa

SEQ ID NO: 219958 - DNA, 978 bp, Unknown
  Bacterial polypeptide expressing nucleotide sequence isolated from the Sargasso Sea
caacggggatattgatgtcgaagatttcagatcaaaagctgaaatgcataaaaatgacttggcggggtgcatgataacatacccttcaactcacggggtatttgaagaaactgttcatgaagtttgtgaaatcatccacgaatatggaggtcaggtctatattgacggagccaatatgaatgcgatggttggcttaagccgtcccggcgatatcgggggtgatgttagccatctaaatctacataaaacattctgtattcctcacggtggtggtggaccaggaatggggcctattggtgtaaaagcgcatctgacacctcatttgccgggacacccagagcttggaaatgacaaagggccagtatcagccgcaccttttggttcaccctctttactccctatatcctgggcatattgtctaatgatgggtggagaaggacttactcaagccacccgagtggccattctaaatgcaaattacatcgctaaacggttagaggaatcattcgatgttctttatcgtggagcgaatgggagagttgcgcacgagtgtattattgatacacgcccgttcgccgaaacagccggtgtcagtgtggacgatatagcaaagcgtctcattgatagcggttttcatgctccgacaatgagctggccggttgcaggtactttaatgattgagccaacagagtcagagactaaagcagaattagaccgtttctgtgacgctatgctgtcaatccgggaagagattagacttattgaagatggtaaatatcctaaagataataatccgctttgtaatgcaccgcacactgtacaagacctggttggtacttgggagcgaccttattcacgagaacaggggtgttttcctccaggtgcttttaaagttgataaatattggccgccagtgaatagaattgataacgtctatggtgatcgtcatctttgttgcacttgccccaccgatgtcaa

SEQ ID NO: 219959 - DNA, 865 bp, Unknown
  Bacterial polypeptide expressing nucleotide sequence isolated from the Sargasso Sea
gtctatatggatggagcaaatttaaacgccttagttggagttgcaaaacctggaaattttggtccagacgtttgtcatattaatttacataaaacattctgtattcctcatggcgggggaggacctggaatgggacctattgcttgtaaaaaacatttacaagtttatctgcctaatcatccagtaataaaagattgtggaccaacgactggaattggagccgtatcagcagctccttggggtagctcaagtattctttcaatctcttggatgtatattaaaatgatgggatcagcaggattaaagcttgctactcaagttgcaatattaaacgcgaattatattgctcatagactaaaagatcacttcccaattttgtataaaggttcaaatggtaatgttgcacacgaatgtattatagatattagaaatattaaatcagaaacaggagtaacagaagaagatatcgcaaaaagattaattgattttggatttcatgcaccgactatgtcatggcctgtagctggcactatgatgatagagccaactgaaagtgaaggtttgtcggagctcgatagattttgcgacactttaattaagattaaacaagagatagataagattaaatctggtgaatttgataaagttgataatccaataaaaaatgctcctcatacagactctgagcttgcatctgataattgggaacacaaatacactagacaagaagcagcttatccagctaaatttttaaaagctaataaattttggccaccagttgcaagagtagacaacgtatatggtgataaaaatattttttgtacatgcccaagtatggatgaattcaaagaggatgcagcatagc

SEQ ID NO: 219960 - DNA, 835 bp, Unknown
  Bacterial polypeptide expressing nucleotide sequence isolated from the Sargasso Sea
aaaagatttagaaaatatagctggagacatagtgtgtggtataatccagtatccaggtagcttaggggaaattaaagacccaagcgaaatgattagcaagatccacaaaaaaaatggaaaagcaattttaatatgtgatcttttatcattagctttaattaaaacaccagcagaattaggtgcagatattgccgttggaagttcacaaaggtttggtatccctatgggttacggcggccctcatgcagcattttttgcaacaaaagatgaatttaaaagatctatgccaggaagaatagttggagtttctgttgatagacatggcaacaaagcttatagattagcattacaaacaagagagcaacatattagaagagataaagctacaagtaatatttgtacagctcaagctttattagcaatagtttcagctgcgtttgcaatttataatggtccagaaggaataaaaaacatagcagaaagagtttcacaattagcaaataattttgcaaataagctaaaacagtcaggatatgaattatactcacaaagcttttttgatactgtaacaattaaaacaggagaaaaaaccgaaaagatttttcaaaatgctttaaatcaaaaagtaaatatcagaaaagtcaactctgaaatgctagcagtttcatttgatcagaaaaaaaatgtatatagagctaatcaattattaaaaatatttaattcagcagaatctattaaagataatccaacagaaagcttgccaaacttgccaaaaaaacttctaagatcctcaagttatttagatcaccctgtctttaataattatcattcagaa

SEQ ID NO: 219961 - DNA, 892 bp, Unknown
  Bacterial polypeptide expressing nucleotide sequence isolated from the Sargasso Sea
aaaagattttattagaagacacataggtccatctgagaaggaccaagaaaaaatgcttaaagatcttaactttaagtcattagatgaatttattaatagcaccattccagaaaaaattcagtttaagggtgaattaaatatcggtgaaccaaactcagaatatgaagctttaagaaaattaaaagcaatttccaaaaaaaaccaaatttactcaaattttataggtatgggttattatggaacctacacaccatatgtaattttaagaaatatattagaaaatcctggatggtacacatcatacacaccttatcagcctgaagtagcacaaggtagattagagatgttattaaactttcaacaaatgattgttgattttacaggcatggatatagcaaacgcgtctttacttgatgaaggaacagcagctgctgaagctatggggttaagtcatagacttaataaaagtgatagtaatttagtttttgtttcagagaattgccatccacaaacaattgacgttattcaaactagagcagagccaatgggtcttaaagtacttgttggaaacgaggataaagttctagagcagttaaaagaagatattgtttgcggagttttacaatatccaggaactttaggtgatattaaagatcctagtgaggccataagtaaaattcataaaaaaaatggaaaaacaattttagtttgtgatctccttgcactttctatgctaaaaacaccaagagagcttggagcagatattgcagtcggtagttcccaaagatttggtattccaatgggttatggaggacctcatgcagccttttttgcaacaaaagatgaatacaaacgatctatgccaggtaggatcgtcggggtttcggtggat

SEQ ID NO: 219962 - DNA, 508 bp, Unknown
  Bacterial polypeptide expressing nucleotide sequence isolated from the Sargasso Sea
atgttacataattctcaaaaagattttttaaaaaggcacattggaccttcagatgaagatcaaaataaaatgctcaaggaacttaattacaaatcacttgatgatttaatcaaaagtacagttccagaaaagatccaattgaaagatgaattaaatattggtgagtctaattcagaatacgaagcattaagaaaattaaaagcaatttcgaaaaaaaatcaaatttactctaactttatagggatgggttattatggaacttacactccatatgtaattctaagaaatattttagaaaatccaggttggtacacttcttatacaccttatcaacccgaggtagctcaaggaagattagaaatgctgcttaatttccaacaaatgatagttgattttacaggaatggatatcgcaaatgcatctttattagatgaaggaacagcagctgcagaagcaatgggattaagtcatagattaaataaaaaagatagtaatttagtttttgtct

SEQ ID NO: 219963 - DNA, 562 bp, Unknown
  Bacterial polypeptide expressing nucleotide sequence isolated from the Sargasso Sea
atgttacataattctgaaaaagattttatcaaaagacatattggaccatctaagaaagatgaaaaagatatgttaggacagctcggttatcaaaatataaatgaattaattagtcaaactgtaccagaaaaaatattgtttaaaggagaactaaatattggtgaacctaactctgaatatgaggcactaagaatattaaaaggtttatctagaaaaaatcaaatttactcaaattttattggtatgggttattatggaacatataccccaaacgtaattataagaaacatattggaaaatcctggctggtatacttcttacactccttatcagcctgaagtcgctcagggaagattggaaatgttactaaactttcaacaaatgataattgactttactgggatggatatcgcaaatgcgtccttgttagatgaggggacagccgccgctgaagctatgggtctcagtcacagacttaataaaaaagatagtgatcttgtttttatttctaaagattgtcaccctacaaacaatagaggtagaaaaacaagagcagaacctt

SEQ ID NO: 219964 - DNA, 865 bp, Unknown
  Bacterial polypeptide expressing nucleotide sequence isolated from the Sargasso Sea
atacttgaaaatcctggttggtatacacaatatactccctatcaagcagaaattagtcaaggtcgacttgaagcattattgaattttcagactatggttacaagttccactggtttacctctttcaaatgcatcacttctcgatgaaagtactgcggcatcagaagcaatgactatgttttataacacaacaaaagatccaaatagaaagtgtttttttatttcaaaaaattgtcaccctcaaacaattgacgtccttaaaacaagagctgagcccttaggcatagaactgattatacaagatgaacatacgtttgatttaaacaaaaaaatgtttggaatgttattacaatacccaacaacagacgggaatgtcgttgactatactgacctgataaacaaagctaaagattataagatatatacctgcttagccacagatttattagcattaagcatactaaaaacccccggagaaatgggcgcagatgttgctgtgggaaatacacaaaggtttggcgttccaatgggctatgggggaccacacgctgcgtttttcgcgacatcagaatattttaaaagaaaaatacctggaagaataataggcgtttcaaatgatgtacataatgatagtgctttaaggatggctctccaaactagagaacaacatattcgcagagaaaaagcaacatctaatatatgtacgtctcaggttttactcgcaatcatttcatcaatgtatgcagtttatcacggtccaaacaatataatagccatcgcaaacaaaatacaaaatctatcttctcaacttgcaacggcattaaataataacgggatcaagattttatataatcatttttttgata

SEQ ID NO: 219965 - DNA, 831 bp, Unknown
  Bacterial polypeptide expressing nucleotide sequence isolated from the Sargasso Sea
tattggattaggttatcacaacacaatcactccaagcgtggtattgagaaatattcttgaaaatccaggatggtatactgcttatacaccttatcaacctgaagtctcacaaggtcgtttagaaatgttaatgaactttcaacaaatgattattgatcttactggaatggatattgctaatgcctctttattagatgaaagtactgcagccgcggaagcaatgatgatggcttttaagatcaaaaaaaataaacttcatactttttgtatacaaaacttttgccaccctcaaactttatcagttttaaaaacaagagctaatcctcttggaataaaaataattgaaggatcgcctaatgaagatacgttcgcctgtctaatacagaatccagatacatttggagaaattcaaaatttagaaaaacttatttcaattaataaatctagagaagttatcagtattgtagctgcagatattatgagtatggtgattatgaaatctcctggatcatatgatgctgatattgttattggaacttctcaacgttttggagttccaatgggtttaggtggccctcatgctgcattttttgctactaaagatgaatttaaacgtttgatcccaggaagattaataggtgtatcagtagataggaataataaaagatcatatagaatggctcttcaaactcgtgagcaacacatacgaagagaaaaggcaacaagcaatatatgtactgctcaagcattacttgcgatagttgctgcagcttatgcaatttatcatggccctgaaagattgagaaatattgctacaaatataaattataa

SEQ ID NO: 219966 - DNA, 754 bp, Unknown
  Bacterial polypeptide expressing nucleotide sequence isolated from the Sargasso Sea
atgttaaaaaatgctcaaaaagattttattcgaagacacataggtccttctgaaaaagaacagactaagatgcttcaagatcttggttataaaaacttagatgaacttataaaaaaaactgttcctgagaagattcttttaagagatagtttggaaattggagatcctaattctgaatacaaagcgcttagaaaactaaaaaatatttcaaaaaagaataaaattttttcgagttttattggaatgggatattatggaacacatacaccttatgtaattttaaggaatatattagaaaatcctggttggtatacttcgtatacaccctatcagcctgaagtagctcaaggtcgacttgaaatgctattaaactttcaacaaatgattattgattttactggcatggatatagccaatgcatctcttttagatgaaggtacggctgctgcagaagcaatgggattaagttatagagtttcaaaaacagacactaagaaagtatttgtttcaaaaaactgtcatccacaaactatagatgttatcaaaactagagctgaaccgttgggattagaaatagtggttggagatgaagataaagatatcaatgaaaatattatttgtggaattcttcaatatcctggaactttgggagacataaaagatccaagtgaagctattagcaaaattcataaaaataatggtaaagcagttttagcatgtgatttacttgctttagcaaaactcaaaacacctg

SEQ ID NO: 219967 - DNA, 937 bp, Unknown
  Bacterial polypeptide expressing nucleotide sequence isolated from the Sargasso Sea
gaaaaaaacagaaatgtatgtttgatacctggctcagcacatggaactacccctgctagcgcacaaatggtcggtatgaaggtcgttgtagtgaactgtgataaagagggaaatgttgactatgaggatcttaaaaagaaaacagagcttcactcaaaaaatttaggcgcattaatggtaacatatccctctacccatggagtatttgaggaaaaaattacagaaatttgtgacctcatacataaacacggtggccaggtatatatggatggagcaaatcttaatgcactagttgggattgcaagaccaggtaactttggtccagacgtctgccatattaatttacataaaactttttgcatacctcatggtggaggaggaccgggtatgggaccaatagcctgtaaaaaacatttagagaaatatcttccaaatcatccgattatagaagattgtggtccggctagtggaatagggcctgtatctgctgcaccttggggaagttcaagtattctatcaatttcatggatgtacataaaaatgatgggttctgacggtcttaaattagctacacaaaatgcaattttaaacgctaattatttagctaaaaagttaaaagaccactacccaattttatacactggcaaaaatggaaatgttgcacatgaatgcatcattgatattagatcaattaaaaatgaaacaggaatcactgaagaagatattgctaaaagacttattgattttggttttcatgctcccacaatgtcttggccagttgcaggaacaatgatgattgagccaaccgaaagtgaaagcttgtctgagcttaataaatttatagatgcattaataaaaatcaaaattgaaataaacaatattaaagaaggaacattggacaaaactgataacccaataaaaaatgcccctcacacag

SEQ ID NO: 219968 - DNA, 719 bp, Unknown
  Bacterial polypeptide expressing nucleotide sequence isolated from the Sargasso Sea
tgggaacatagatgtgaataacatcagtgaactagcagaaaaacatgctgacaacctagctgcattgatgattacctatccctctacgcatggagtgtttgaggaaagcttaatccatatctgtgaaatcattcatcataaaggaggacaagtttacatggatggtgcaaaccttaacgcactgatgggaatagctcaaccaggtaaactggggcctgatgtgttgcacatgaacctgcacaaaaccttctgcattcctcatggtggcggcggtccaggaatgggtccaataggactgaaatctcatcttgccgaatttgcaccgaatcactgtgtagtgccaattaaagatctttccgcaggaaacacagccgtttctgcagcaccatggggtagtcccggaatcttacctatttcatgggtatacatctgtcttatgggaagccgaggactgaaaaaatcttctcaagttgctatacttaatgcgaattatcttgccatgcgattaaatgaacatttccccatagtctatacaggaaaaaatggactggttgcccatgaatgtattattgacgtcagacaacttaaagctgacactggaatctctgaagaagacgttgccaaaagattgatagactatggtttccatgcgccaacgatgtcatggcctgttgctggtaccttgatgatcgaacctaccgaaagtgaaccgaaggctg

SEQ ID NO: 219969 - DNA, 840 bp, Unknown
  Bacterial polypeptide expressing nucleotide sequence isolated from the Sargasso Sea
tcactaagactagcattgcaaacaagagagcaacatattagaagggaaaaggccactagtaatatttgtactgctcaatctttgttagccataatttcttctttttatgctatttatcatggaccctctggattaacgcaaattgctaagagattagttgagttgagaataaatttagaatcaagtttagctgttttaggttttgaaattcctgatgggattagatttgatagtgttgatgtctattctgagcactcccagaggatccataatgaagctttaaaaaatggctataacttaagaattttgccgctgggatcaactattgaaaattcatctggctttgggatctctttagatgagcttagtaatgaaaaagaaataaaagatattttgactttcatagcaaaccttatagaaaaagaagaagatttagagcatataaaatttgataaagaatttcatcttgaaagtctagctttgagatccagtgcatggatgcagcaagatatatttacaaattaccaaagtgaaactgaattaatgagatatatattccgacttgctgaaaaagatttttctttggtagatgggatgatgccattgggaagctgtaccatgaagttaaattctgcagcagagttaaatccagtctcttgggctaatttatcttccattcatcctttttccccaccagatcaaactaaaggctattcaaaaattatatctgacctagaaaaatggataagtgcgattgttggtttaaaatcagtttcttttcaaccaaatgcaggctctcaaggagagtttgcaggtttattggcaataaattcttatttt

SEQ ID NO: 219970 - DNA, 751 bp, Unknown
  Bacterial polypeptide expressing nucleotide sequence isolated from the Sargasso Sea
tatggatggagcaaatttgaacgccttggttggagttgcaaagcctggaaactttggtccagatgtttgtcatattaatttacataaaacattttgtattcctcatggtgggggaggacctggaatggggcccattgcttgtaaaaaacatttacaagtttatctgcctaatcatccagtaataaaagattgtggaccgacaactggaattggagcggtttcagctgctccttggggcagttcaagtattctatcaatttcttggatgtacattaaaatgatgggatcagcaggattgaaacttgcaacccaagttgcaatattaaacgcaaattatattgctcatagactaaaagatcattttccgattttgtacaaagggtcaaatgggaacgttgcacatgaatgtattattgatattagaaatattaaatcagagacaggtgtaacagaggaagatattgcaaaaagattgatagattttggatttcatgcaccaacaatgtcatggcctgtagcaggtacaatgatgattgagccgactgaaagtgaaggcttgtcggaaattgatagattttgtgacactttaattaagattaaacaagagattgaaaaaattaaatcaggtgaatttgataaaatagacaatcctattaaaaatgctcctcatactgactctgagcttgcttcggataattgggaacataaatatacgagacaagaagcagcttatccatcaaaatttttaaga

SEQ ID NO: 219971 - DNA, 886 bp, Unknown
  Bacterial polypeptide expressing nucleotide sequence isolated from the Sargasso Sea
aaaaaaaatgaagttttccgtaattttatcggtatgggttactataatactgtgaccccaaatgttattttaagaaatatactcgagaatcctggttggtatacttcttacactccataccaacctgaagtagcccagggaagattagaaatgcttattaatttccaacaaatgataatggattttactggcatggatatagcaaatgcttcgttattagatgagggaactgctgctgctgaagcagtgggtttatgtcaaagattagacaaaaataattcaaaaaagatatttgtatcaagctcatgtaaccctcaaacaatagatataattaagacaagggttgagccattcaatatagagctaattattggtgatgagggaaaaattttaaaaggtattaaagataaaattatttgtggtgttttagcttaccctggaactttaggtgaaataaaagaccctagtgagtctataagcttaattcataaaaaagaaggcaaagtaattgttgttagtgatctgttatctttaacaagactcaaaacccctgcagaacttggggctgatattgctgttggaagtgcacaaagatttggaatacctatgggttatggaggtccgcatgcagcgttttttgcaactaaagaagaatttaaaagatctatgccaggtagaatcattggagtatcagttgatagacatgggaagaaagctttcaggttatctcttcaaacaagagaacagcacataagaagagataaggctacaagcaatatttgtactgctcaagcactacttgcaattctttcagccgcttatgcaatttatcatggacctgaaggaattttaaaaatagctaataggacatcaaagttagcaaaaa

SEQ ID NO: 219972 - DNA, 803 bp, Unknown
  Bacterial polypeptide expressing nucleotide sequence isolated from the Sargasso Sea
aatgatcgatataaattcttttgcaagtagacacattggacctagaaatgatgatatagaatcaatgttaaaatttataaaatgtaaaaatcttgatgaactaattcaaaaaactgtccctgatcatattttatttaaagataaattaaaattaaaaccaggaatgtcagaagaatttaacaaagttaatatgcaacttttatccttaaaaaataaatttaaaaaaacatatattggtcttggttatcataatactgtgacaccaagtgttattttgagaaatattcttgaaaatcctggttggtatactgcatatacaccatatcagcctgaagtctctcaaggccgtttagaaatgttaatgaactttcagcaaatgataattgatttaacaggattagatattgctaacgcatctttattagatgaaagtactgcagcagcagaagctatgatgatggcatacaagattaagaaaaataaacaacataccttttgtattcaaaactcttgtcaccctcaaactttatcagttttaagaacaagagcccatcctcttggaataacaattatagaaggtaaaccaaacgaagatacttttggctgcttgatacaaaatcctgatacttacggcgaaattgaagatttagacacacttattaaaagtaataaatctaaggaaatcgtatccattgttgctgcagatattatgagtatggttgttatgaaatctccaggttcttatgatgctgatattgttataggcagttcccaacgttttggagttccgatgggattaggag

SEQ ID NO: 219973 - DNA, 793 bp, Unknown
  Bacterial polypeptide expressing nucleotide sequence isolated from the Sargasso Sea
atgaatactcattcttttgtaaatagacacattggcgttcaagaaaaagatgtcaaatcaatgttagataaaatcaatgcctcttcaattgatgaactaattgaccaaaccattccaaaagctataaggctaaaaaaagaattaaatgtaggaaaccctgtaagtgaatttgattatttaaaaaacttacaatccattgctaaaaaaaataaaaattttgataactacattggacagggttattacggaacaataactccatctgtcattcaaagaaatatactttgtaatccaggttggtatacagcttacactccctaccaggctgaaatagcacaaggtagactagaagccttgttaaacttccagactgttattactgaattaactggaatggagattgccaatgcatctcttttagatgaagcaactgccgctgctgaatctatgttgatgtttttccacatgagatcaagagctcaagttaaaaacaacgccattaaatttttcatttctgaaaaagtattcaaacaaaacttaaatgtaatgatggcaagagcagaacctcttggtattgaaattgtaattggcaaccctcatgaattcgaacttacaaatgaattttttggatctattgtacaatatccaaactcctttggtgaagttgaagattattcatcatggacctctaaatctcatgaaattgacctacctgtatctgttattgcagatataatgagtttagtgcttttaccaagtcctggaagttggggagcagaccgtagttgtaggg

SEQ ID NO: 219974 - DNA, 1004 bp, Unknown
  Bacterial polypeptide expressing nucleotide sequence isolated from the Sargasso Sea
ccgcttcatacacctgtcacatcgtgtccctcagaaaatgagatttatcaaatgcttgatgctctgggaatgtcttcactggatgaattgatagacaaagtagtaccagaatcaattcgtatgcacggggaactggagctaccgaacagtcgtaccgaaacagacgttctgaatcagcttcaaggaatggccggacgcaacaagttggcaaaatcaatgatcggaatgggctatcacaacacaattcttcctggtgtaattcagcgtaacattcttgaaaatccgggctggtatacggcttataccccttatcagccagaggtttctcaaggtcgtcttgaagctctgctgaattttcagcagatgattatcgaccttacaggcatggagatagccaacgcttctcttttggatgaagcaaccgcggcagcggaagctatgactttctgcaaacgtgtttcaagaagcaaaagcatgcgcttttttgcagctgatgactgccatccgcaaaccatagatgtactcaaaacaagagctgaaccaatgggcatcgaactggtagtaggtaatgtggcagaacagcagcaaacgccagacaagtcattattcggtgctcttattcaaaatccgggtacttttggtgacattcatgatattgaagatttaattacaaaatggcatgagttgggaactcttgtaagtgttgcttcagatccgatgagcctagttttaataaagcctcccggagaatcaggagcggatgttgttattgggagtacacaacgatttggagttccaatgggatttggtggtcctcatgctgcctattttgccgcgcgagaaaaaaatatgagaagtgtccccggaagagtaatcggagtctcaattgatcgccgagggaaaaccgcattgagaatggctcttcaaacaagggagcaacatataaggagagaaaaagcccacagcaacatctgcacagcacaagttttactcggagtgattgc

SEQ ID NO: 219975 - DNA, 768 bp, Unknown
  Bacterial polypeptide expressing nucleotide sequence isolated from the Sargasso Sea
tatccgtcgacccatggtgtgtttgaacctgaaattgtatccctatgtaaactggttcatgactttggtgctcaggtgtatatggatggagcaaatttgaatgcccaggtagggttgaccagtcctggattgattggcgctgatgtgtgtcacattaatttgcacaagacctttgctattccgcatggtggtggaggccctggcatgggacccatttgtgtgaaacagcatttaagtgagtttttgccaggatttagtctagatacaaacaacgttgcttatagtgttgcttcagcgccctatagctctgctagtattttgtttatttcatatgcttatattgtgcttatgggaggtgcaggtcttcaagacgcaagtaagcaggcaattttaaaagcgaattatatcaaagcccgtttagacgattattatacgattgtttacaaggggagttcggggcatgttgcacatgaattaattttagattgtcgttcgtttaagaaatcagcaggaataaccgttgaagatgtagccaagcgtttaatggattactcgtttcatgcccctactctttcgtggcctgttcctggaacgttaatgattgagcctacagaaagtgaatcaaaaaaagagctggatcgtttttgtgatgccatgattgctatttatcttgaaattcaagaagttgagacaggtaaggcctctaaagatgataatgtgttggtgaatgcccctcatattcaacaggaagtggttcagatgcatggg

SEQ ID NO: 219976 - DNA, 764 bp, Unknown
  Bacterial polypeptide expressing nucleotide sequence isolated from the Sargasso Sea
aatatctgacctagaaaactggataagtgatattgttggtttaaaatcagtttcttttcagccaaatgcaggctctcagggagagtttgcaggattattggcaataaattcttattttgaatcaaaaggtgaacttacaagaaaaaaatgtttaattcctaaaagtgctcatggaactaatcctgctagtgcagtcatggcaggatttgatgttttaactgtcgaatgtgatgacgaaggaaatattgattttcaagatttgtcgatcaaggttaataaatttgataacaaaataggagcccttatgttgacctacccctctactcatggagtttttgaattacaaatcagaaagatatgtgacttaattcattctgttggaggatttgtttatttagatggagcaaatttgaatgctcaggttggattatgcaaacccggtaactatggtgttgatgtttgtcatttgaatttacataaaacattttgcatcccacatggaggaggaggtccaggagtaggaccagttgctgcatcagaaactttaagccaatttcttcctactcattctttaatggataataatttatcaaatagtgccaattatgtatcttctgccaagcatgggagcgcaagtattcttccaataagttggatgtacataaaaatggctggtcttagtggtttaaggaaagcaacttcgcacgcaattctatctgcaaattatattgcgcattctttaaagcataaattcaagattcttt

SEQ ID NO: 219977 - DNA, 862 bp, Unknown
  Bacterial polypeptide expressing nucleotide sequence isolated from the Sargasso Sea
aatgattgatgataattcaaaagaatttataaaaagacacattggaccttcatatgttgagcagtcaaaaatgcttcaacacgtaggatatagttcgcttgaagatttaatgaaaaatactgttccagaaaaaattttatcaaaagatgatcttaatatagatgagccattgtctgaaaatgatgctttaaaaaaattaaaatctatatcaaaaaaaaataaaatttttaggaactttattggcatgggatattataattctattactccaaatgtaatcttgagaaatatcttagaaaacccaggctggtacacttcctatacaccataccaacctgaagtagctcaaggccgtcttgagatgcttttaaactttcagcaaacaataattgatcttacaggaatggatattgctaacgcttctttacttgacgaagcaactgcaacagcagaagcagtcggcttatctcaaagattagataaaacaaacgcaaaaaaaatatttatttcaagtaattgcaacccacagacgattgatcttattaaaactcgtacaaagccttttggattagaacttattattggtgatgagaaaaaggatttatctaaaattaatcaagatataatttgtggggttttagcttatcctggaactcttggtgaaataatagatccgagcgaaagcataagtcaaattcataaaaaaaatggaaaagcaattttaatatgtgatttattatctttaactaggttaaaaactcctgcagaacttggtgcagatatagctgtaggtagtgctcaaaggtttggtattcctatgggctatggtgggccacatgcagcattttttgcaactaaagaa

SEQ ID NO: 219978 - DNA, 939 bp, Unknown
  Bacterial polypeptide expressing nucleotide sequence isolated from the Sargasso Sea
tcatcagagagaaggctataatcaactaatgattgaattaattgctatgttaaaagatataacgggatttgatggaatttctttacaaccaaatgctggagctcagggtgaattcgccggactattggctataaaaaaatttcatgatcataataatgaaaataatagaaatatttgcataattccaaatagtgctcatggtactaatcctgctagtgcacaaatgtgtggaatggaagtatcaattgttaagtgtgataaatacggaaatgtagatattgatcatttaaaggaaaaaattaatgaagcggggataaatttagcagccttaatgattacttatccttcaactcatggagtttttgaagaaggtatagttgagatatgtaatttaatacatgatgcaggtggccaagtttatatggatggagcaaatttaaatgcattagtaggtatagctaaaccaggattttttggacctgatgtttcacatatgaatttacataaaaccttttgtatacctcatggaggaggagggcctggtatgggtcctataggtgtcaaaaaacatttaataccttttttgcctggacatcctttaatagataatgagattggacttcagcaaaatcaagaagctatttcttctgctccttggggaagtgcttctatattacctatatcgtattcttatatatctatgatgggtgatattggtttaaaaaatgcaactcaagtcgctattttaaatgcaaattatattaaacattctttagagccatattttccaattttatataaaggtaaaaacaatatggttgcccacgagtgtataatagatttaagacctttaaaagaagaactagatataactgaagaagacatagctaaacgtcttattgattatggttttcatgcgccaactatgtcatttccagt

SEQ ID NO: 219979 - DNA, 731 bp, Unknown
  Bacterial polypeptide expressing nucleotide sequence isolated from the Sargasso Sea
aatgggatacggcgggccccatgcagctttctttgcaactaaagatgaatataaaagatctatgccaggaagaattgtgggagtttctgttgatagacatggaaacaaagcatacaggttatcattacaaactagggaacaacatataagaagagataaagctacaagtaatatttgtactgcccaagctttgttagcaattgtgtcagcagcatatgctatttatcatggtccagagggcatccgaactattgctgagagagtttctcaattagctaaaaactttgcagataaattaaaacaatcaggatatgaaatatattcagatcatttttttgatacagttacaattgttaccaaagataaaactgatcaaatttataaaaatgctttagatcaaaaagttaatattagaaaagtaaattctgaaatgctagcagtttctttcgatgaaaagaaaaatgtttatagagtaaatcaattgttaaaaatttttaatgcagcagaatcaattaaaaaagaagatccaacggtaagtttacctaatttaccaaaaaatttgttgagaacttcaaaatatttagagcaccctgtttttaattcatatcattcagaaactgagatgcttagatatttaaaaaaattagaagataaagatatagctcttaacagaactatgatcgcacttgggtcatgtaccatgaaattaaatgctactgcagaaatgatac

SEQ ID NO: 219980 - DNA, 720 bp, Unknown
  Bacterial polypeptide expressing nucleotide sequence isolated from the Sargasso Sea
caatcggcgtgaaagcgcacttagcgccgttcgtcgcgggtcacgtagtggtgaaaccaggccgcgaaagcgataacaacggtgcagtatcggcagcgccatatggcagtgctggcattctgccaatcagctggatgtacattaagctgctcggttcaaacggcctgaaaaagtcgactcaaaccgcgctgttaaacgctaactacgtgatgaagaagctgtctgaacactacccagtactgttccgcggccgtaacgatcgcgtcgcgcacgaatgtattatcgacctgcgtccaatcaaagaagcctctggcgtgaccgaaatggatattgctaagcgtctgaacgactatggtttccacgcgccaaccatgagcttccctgttgcgggcacgctgatgattgagccaaccgaatctgagtctaaggttgaactggatcgctttatcgacgctatggtgtcaatccgcgccgaaatcgcgaaggttgaagcgggtgagtggccagcggacaacaacccgctgcacaacgcgccacacactatggccgatattatggacccagcgttcgattcacgcccatacagccgtgaagtggccgtgttcccaagtgccgcagtgcgtactaacaagttctggccaacggtgaatcgtattgatgatgtttacggcgacaggaatttattctgtgcgtgtgtgccgttatcagactacgagtagg

SEQ ID NO: 219981 - DNA, 856 bp, Unknown
  Bacterial polypeptide expressing nucleotide sequence isolated from the Sargasso Sea
ggaacatataccccaaacgtaattataagaaatattttagaaaatcctggatggtacacttcttacactccttatcaggctgaagtggctcaaggcagattagaaatgctcttaaattttcaacagatgataatagattttaccggaatggacatagctaatgcttcattactagatgaagggaccgctgctgcagaagcaatgggtttaagtcacagattgaataataaagatagcaaaatagtttttgtatcaaatgattgtcaccctcaaacaattgatgttgttaaaacaagagctgaacctttgggtttaaaagtaaaagttggtcagaatactgatttagataaattacaagaagatataatttgtggcatccttcaatatcctggaactctaggagatatacaagacccaagcgaaagtattagtaaaattaaaaaaaaaaatggaaaagcaattttagcttgtgatctactagctttagcaaaactaaaaacacctgcagaattaggagctgatatagctattggtagttctcaaagatttggaattccaatgggttacggaggaccacatgcagcattttttgccactaaagatcaatttaaaagatcaatgcctggtaggattataggtgtttctgttgatagacatggaaacaaagcatatagacttgctcttcaaactagagagcaacacattaggcgagataaagctactagcaacatttgtactgcccaagctttattggcgattgtttcagcagcttatgctatttaccatggaccaaatggtataagaaaaatttcagagagagtttcacagctagctaataattttgcggataaataaa

SEQ ID NO: 219982 - DNA, 867 bp, Unknown
  Bacterial polypeptide expressing nucleotide sequence isolated from the Sargasso Sea
tggaattttacaatatcccggaactttaggagatattaaagacccaagtgaagcaattagcaaaattcataaaaaaaacggtaaggctgtattggcatgtgatttattagctttggcaaaattaaaaacaccaagagaacttggtgctgatatagcagtaggaagctctcagcgatttggaataccaatggggtatggaggcccacatgcagcattttttgcaactaaagacgagtataagagatcgatgcctggtagaattgttggtgtgtcaattgatagacatggtaacaaggcatacagattatctctacaaactagagagcaacacatcagaagagacaaggcgacaagcaacatttgtactgcccaagctttattagcaattgtttcagctgcatatgctatttatcatggtccagatggaattaaaaatatttctgaaagagtttctcaattagcaaaaagttttgctgataaaataaaacagtcaggttatgaaatttattctgattatttttttgatactgttacaattattaccaaagaaaagactgatcaaatttataaaaatgctctaaatcagaaagttaatatacgaaaagtaaattctgaaatgcttgctgtctctttcgatgaaagaaaaaacgtttatagagtaaatcaattattaaaaatttttaatgctgcagaatcaatcaaaaaagaggatccttcagttaaattacctaatttaccaaaaaatttattaagaacctcaaaatatttagagcatccaatttttaacttatatcattcagaaactgaaatgcttagatatcttaaaaagctagaggataaggatatagcattgaatagaactatgat

SEQ ID NO: 219983 - DNA, 745 bp, Unknown
  Bacterial polypeptide expressing nucleotide sequence isolated from the Sargasso Sea
aatgctacataattcacaaaaagattttataaaaaggcatattggacctacaactgaagaacaatcgaaaatgttaaaacagttaggttataactcgcttgatgatttaattcataatactgttcctgaaaaaattcactttaaagataaattaagtattggtgattcaaattctgaatatgaagctttgagaaagctaaaagctatttcaaaaaaaaatcaaatatattcaaattttattggcatgggatattacggtacatacacaccttatgtcattttaagaaatattttagaaaacccaggatggtatacttcttatactccttaccagccagaggtagctcaaggcagacttgaaatgcttttgaattttcaacaaatgattgttgattttactggtatggatattgcaaatgcttctttacttgacgaaggtacagcagccgcagaagcaatgggattaagtcatagactcaataagaaagatagtaatttaatttttgtatctgaggattgtcatccacaaactataaatgtagttcaaaccagagcagaaccaatgggtctaaaagttttaattggtaaagaagatgaagttttagataatttaaaagaagatttggtatgtggcattcttcaataccctggaactttaggtgatattaaagatccaagtgaaagtataagcaaaattcataaactaaacggtaaagcaattatagcatgtgatttgttagcatta

SEQ ID NO: 219984 - DNA, 937 bp, Unknown
  Bacterial polypeptide expressing nucleotide sequence isolated from the Sargasso Sea
tggcattcttcaatatcctggaactttgggtaatataaaagacccaagtgaaagtataagtaaaattcacaaattaaacggtaaagtaattattgcatgtgatttgctagcattggctaaattaaaaacaccaggagaacttggagcagacatagctgtaggtagttcacaaagatttggaatacccatgggatatggtggtccacatgcagcgttttttgctactaaggatgaatataaaagatcaatgcctggaagaattgttggtgtatcagttgatagacacggcaataaagcatacagattgtctcttcaaactagagagcaacacataagaagagacaaggccacaagtaatatttgtactgcacaagcacttttagcaattgtatctgcagcttatgctatttatcatggacctgatggaattaaaaaaatttcagaaagagtatctcaattagcaaaaaattttgcagacaaactaaagcaatctggttacgaattatattctgataatttttttgacacagttacgatattgactagagataaaactaatcaaatatttcagaatgctttagatcaaaaagtaaatattagaaaagttaattcagaaatgttatcagtttcttttgatgaaaagaaaaatgtttatagagcaaatcaactattaaaaatatttaatgcagctgagtctataaaagaaaatccaactgaaagtttgccaaatttaccaaaaaaattattaagaaaatcaaaatttttagaacacccagtatttaatttatatcattcagaaacagaaatgctcagatatttaaaaaaattagaagataaagatattgctctcaacagatcaatgatagctttaggttcttgcactatgaaattaaacgctgttgctgaaatgattccaatttcatggagagaatttgct

SEQ ID NO: 219985 - DNA, 901 bp, Unknown
  Bacterial polypeptide expressing nucleotide sequence isolated from the Sargasso Sea
atttgcaaaggagagtgccacgtaatgttacataattctcaaaaagattttattaaaaggcatattggtcccacagaagaagaacagacaaaaatgataaaagagttaggctataattctgttgatgatttaattcataatactgttcctgaaaaaatctactttaaagataaactaagtattggtgactcaaattctgaatatgaagctttgagaaaattaaaagctatttcaaaaaaaaatcaaatattttcaaattttattggcatggggtattatggaacttatacgccttatgtcattttaagaaatattttagaaaatccaggatggtatacttcttataccccttaccaaccagaagtagcacaaggaagacttgaaatgcttttaaattttcaacaaatgattgttgattttacaggcatggatattgcaaatgcttctttacttgacgaaggtacagcagcagcagaagcaatgggattaagtcacagactaaataagaaagatagtaatttaatttttatatctcaggattgtcatccacaaaccataaatgtagttcaaactagagcagaaccaatgggtctaaaagttttaatcggcaaagaagatgaagttttagataatttaaaagaagacctggtatgtggcattcttcaatatcctggaactttgggtaatattaaagacccaagtgaaagtataagtaaaattcacaaattaaacggtaaagtaattattgcatgtgatttgctagcattggctaaattaaaaacaccaggagaacttggagcagacatagctgtaggtagttcacaaagatttggaatacccatgggatatggtggtccacatgcagcgttttttgctactaaggatgaatataaaagatcaa

SEQ ID NO: 219986 - DNA, 847 bp, Unknown
  Bacterial polypeptide expressing nucleotide sequence isolated from the Sargasso Sea
aaaaataacactgcaattccacaaaaacttgtccgtaattcagattttctaacacaccctgtttttcatctaaatcaatccgaaacagcaatgctccgttacctgcgatacctgcaggataaggatattgcgctcgataaatcaatgattcctctaggttcatgcaccatgaagctcaatgcgacttcggaaatggtaccaatcagttggccagaattttctaacatgcatccttttgcaccagcgaatcagacaaaaggatacatgaaacttatcaacgatctggaaaattttctgataaaaataaccggatttgatgcagtttcgatgcaaccaaattctggagcccaaggagaatatgccggtttactagccatccacaactaccataaatcaagaggcgaaggacaccgcaacgtctgcctgattcctagctcagctcatggtacaaatccggccagtgcaacaatgacaagcatgaaaagcgtgatcgtgaagtgtgatgaaaatgggaacatagatgtgaaaaacctgagtgaactagcagataaacatgctgataacctggcagcattgatgattacctatccttcaacacatggggtgtttgaagacagcttaatccgtatctgtaaaatcattcatgatagagaaggccaggtctatatggatggcgcaaaccttaacgcattgatgggaattgctcagccagggaaacttgggcctgatgtgctgcacatgaacctgcacaaaactttttgtattcctcatgggggtggaggtcctggaatgggtccaataggcctcaagtctcaccttgcagaatttgcacctaaccacagtgtag

SEQ ID NO: 219987 - DNA, 838 bp, Unknown
  Bacterial polypeptide expressing nucleotide sequence isolated from the Sargasso Sea
tcgcttcagccaaatgcaggcgctcaaggtgaatatgcaggattaatggtaatacgtaaatatcacttagagagaggagatcaaaatagaaatatatgtttaatacctagctcagcacatggaactaatccagcaagtgcacaaatggtaggaatgaaagttgtagtagttgattgcgataaagaaggcaatgtagattttgaagatttaaaaaaaaaaacagaaacacactcagaaaatcttggagctttaatggttacatatccttctacacacggtgtttttgaagaaaaaatatctgatatatgcgatttaattcacaagcatggtggtcaagtttatatggatggtgcaaatttaaatgcacttgtaggaattgcaaaacctggaaattttggtccagatgtttgtcacataaacttacataaaacattctgtattccacacggtggaggaggaccgggtatgggtcctattgcttgcaaaagacacttacaagtttttttgcccaatcattctgttgttaaagattgtggtcctgctactggtataggtgcagtctctgcagcaccttgggggagttcaagtattttatctatttcatggatgtatataaaaatgatggggtctcaaggtttaaaattagcatcagaagttgcaatattaaacgctaattatatagctcatagattaaaaaaccattttcctattttgtataaaggtactaatggaaatgttgctcatgaatgtattattgatattagatcaattaaaagtgaaacaggcataacggaagaagatatagcaaaaagattaatagattacgggtttcatgcac

SEQ ID NO: 219988 - DNA, 952 bp, Unknown
  Bacterial polypeptide expressing nucleotide sequence isolated from the Sargasso Sea
aatgtgtggtatggaaatttctatagttaattgtgatgaaaaaggcaatgtagatattgatcatttagataaaaaaatttctgaggctggagataaactttcagcattaatgataacttatccttctactcatggcgtatttgaagaaaacattgttgagatttgtaaaaaaattcatgatgctggaggacaagtatatttagatggtgcaaattataatgcaatggttggtgtagcaaaaccaggtaaatttggccctgatgtatgtcatatgaatcttcataaaacatttactattccacatggtggtggaggcccaggagtaggtgcaataggtttaaaaaaacatcttgaagaatttgcacctggacatccagtttttaaaaatgaaattggtttatctgaacaagaagctgtatctgcagctccttggggtagtgcatcaatactaccaatttcgtattcatatatttctatgatgggtgatgatggtttaaaactagctacacaagttgctatattaaatgcaaattatgtaaaacaacgattaagtgaatattatccaattctttataaaggtaaaaatggaatggtagcacacgaattcattgttgatattagaccttttaaagaagaagttaatatatcagatgaagatatcgctaagagacttattgattatggctttcatgcacctactatgtcttttccagtacctggaactttaatgatagaaccaacagaaagtgaatctaaagaagagcttgatagattctgtgaagcaatgatttcaatatttacggaaattgaaaaaattaaaaatggaacatttaataaagctgataatccaataaaaaatgctcctcataccgtagaagagatatcatcagatgaatggaaacatacttacacaaggttagaggcagcttaccctcatccttatcttttaaat

SEQ ID NO: 219989 - DNA, 796 bp, Unknown
  Bacterial polypeptide expressing nucleotide sequence isolated from the Sargasso Sea
atatctatagatgaactacccacactatctgaactacatgatattcttaaatcattagttaattttagttctcgttcagatacaattgaacatgtttacgaatcacaaaaaaattataagtggataggtattccagaaagaacaaaactttggttgcaacaagaggtatttcataagtatcgtagtgaaacaaatatgatgagatacatttatgaattagtatcaaaagatttttctttagtaaatggtatgatgccacttggtagttgcacgatgaaactaaatgcagcagcagaattgatgccagtatcatggcctgaatttgcaaatattcatccatttgctcctaagattcaaacatatggttatcaaagaattgctgatgatttaaaagaatggttatctgatatcacaggttttgcggatataaacttacaaccaaatgctggttctcaaggtgagtatgctggtcttcttgcaatccaagagtatcataaaagtcgtggtgatgataagagaaatgtatgtctgattccgacaagtgctcatggaacaaatcctgcttcagcagtgatggcaggtatgaaaattgttccagtaaaatgtgatgatgatggaaacattgatatcaaagatttagagaaacaggcaattatgaatacgtttgaactctctgctttgatgattacgtatccatcaactcacggtgtttttgaaactaaaattaaaaacatttgtaaaatcatacatgataacggtggtcaagtttatcttgatggtgaaaatctaaatgcac

SEQ ID NO: 219990 - DNA, 881 bp, Unknown
  Bacterial polypeptide expressing nucleotide sequence isolated from the Sargasso Sea
cattgctgcggtacaagcgaaaaaaggtattgtggcagtagccgctgaccttatgagcttggtaatgcttaagtctcctggcgagctaggtgcagacgttgcacttggtagtgcacagcgctttggtgtacctatgggttatggtggcccacatgcggcattctttgctacacgcgacagctacaagcgttcattacctggccgtattattggtgtaagtaaagacacccgtggtcgcccagcacttcgtatggcgctacaaactcgtgaacaacacattcgccgcgaaaaagcgaactcgaacatttgtacagcgcaggtgctgttagccaacatggcaagcttctacgcggtgtaccacggccctcaaggccttaaaactattgctgagcgcattcaccgcttcgccgacattcttgctactggtttaaaccagaaaggtgcagaaaaaggtgtagctctaaagcacagcacgtacttcgacacgctaaccgtaatggtagacaacaaagaagacgtactagcaaaagcctacgcaaaaggcatgaacctgcgcgcagaccttgaaggtgcggtaggtgtgtcgctagacgaaactaccacacgtgaagacattgttgcgctattcgacgtgttgcttggtgaagagcacggcttaacagtggaaggtctggatgcagaagtaaccacgcaagacgtaaaatctattcctgaaggtttagtacgtactagcgacttcctaacccacgaagtgtttaacaagtatcactctgaaacagagatgcttcgctacatcaagagccttgaaaacaaagacttggcgcttaaccactcaatgatttcattgggttcgtgcaccatgaggctaaacgcaacggctg

SEQ ID NO: 219991 - DNA, 880 bp, Unknown
  Bacterial polypeptide expressing nucleotide sequence isolated from the Sargasso Sea
agacatattggaccgcgtaatgatgaaattaaatcaatgctaaaatctattacctgtaattccctagatgatttaattaaaaaaactgtcccatcgaacattctatttgatacaccattaaatttaaaacctggaatgagtgaagaattcaataaaataaatatgcaattattatctattaaaaataatttttcaaaaacctatattggtcttggttattatggaacaattacccctagtgttatcttaagaaatattttagaaaatcctggttggtatacagcttacacaccttatcagccagaagtatctcaaggaagacttgaaatgttaatgaactttcaacaaatgattattgatttaacaggtatggaaatagccaacgcttctttattagatgaaagtacagcagttgctgaagctatgatgttagcatttaaacaatctggaaaaagcaagaaagaatttttaatacaaaatgcatgtcatcctcaaaatttgtctgttttaagaactagggctgaaccacttggaattactataaaatcctctttagaaacttccaatgaaacatttgcatgtttaattcaaaatcctgatacctatggagagatatcaaatatcaaagatttgatcagaaaaaataattccaaaggtattatttcaattattgctgcagatattatgagcttaataattatgaaatcaccaggtgaattgggagctgatatagttgtaggtagttcgcagagatttggagtcccaatgggattaggcggtccacatgctgctttttttgcaacaaagaatatttttaaaagattaatgcctggaagaattattggtgtttcagttgatagaaataataagagagcttata

SEQ ID NO: 219992 - DNA, 667 bp, Unknown
  Bacterial polypeptide expressing nucleotide sequence isolated from the Sargasso Sea
ggactatctgaacaagaggctgtatccggtgcgccatggggaagtgcatcaatattaccaatatcatattcttatatatctatgatgggtgatgacggattaaaacttgcaacacaagtagctatattaaatgcaaattatattaagcaaagattaagtgcatattatcctattttatataaaggaaaaaacgggatggtagctcacgaatttattattgatattagaccttttaaacaggaaattaatatttcagatgaagatatagcaaagagattaatagattatggttttcatgctccaactatgtcttttcctgtaccaggaactcttatgatagaaccaacagagagtgaatcaaaggaagaactcgatagattttgtgaagcaatgatttctattcatcaagaaattgagaaaattagaagtggaacttttgataaagttgataatccaattaaaaatgcacctcacacagtagaggaaataacttcagatgaatggaaccatgcttatacaaggcaagaagcagcttaccctcattcttatcttttaaataataaatattggagtcctgtgagtcgaattgacaatgtttatggagatagaaatttattttgtgtttgtccaccaattgaagaatatgaggatgctaaaacaggataaa

SEQ ID NO: 219993 - DNA, 598 bp, Unknown
  Bacterial polypeptide expressing nucleotide sequence isolated from the Sargasso Sea
atgttaccaaattcagaaaaagactttttaaaaagacacattggaccttccaaagaagaccaattaaaaatgttaaaagaattaaattataaatcactagatgatttgattgacaatactgtgccagaaaaaataaagtttaaaggtgagcttaatattggtgaatcaaattctgagtacgaagcattaagaaaattaagggcaatttcgaaaaaaaatcaagtttattcaaattttattggcatgggttattatggaacgtatacaccttatgtaattttgagaaatatactagaaaatccaggatggtatacttcatatacaccttatcagccagaggtagctcaaggaagacttgagatgttattgaactttcaacaaatgattgttgactttacaggaatggatattgcaaatgcttctttgttagacgaaggtacagcagcagcagaggctatgggtttaagtcatagattaaataaaaaagatagcaatttagtttttgtttctgaagattgtcatcctcaaacaataaatgtaattcaaacaagagctgagccaatgggtttaaaggttttagtcggtaaagaagagaagt

SEQ ID NO: 219994 - DNA, 483 bp, Unknown
  Bacterial polypeptide expressing nucleotide sequence isolated from the Sargasso Sea
ttcgcggcagcaccgggcgggtggcccatgaatgcatccttgacctgcgcccgctcaagcgggatgcggggatcgatgtggatgacatcgccaagcgtttgatggattacggcttccatgcgcccaccgtcagctggcctgtggcaggcacggtgatggtggagcccaccgaaagcgaaagcctggcggagttggatcgttttgccgatgccctggtggcgatccgcgaggagattcgcgccattgaaaccggcaccagcgaccctcagaacaacccgctcaagcgtgctccccacaccctggcggccgtcacagcagatgactgggatcgtccctacagccgtcagcaggccgctttcccgatggaggggcagcaggagagcaaggtttggcccgcggtgtcccggattgataacgcctttggtgatcgcaacctggtgtgcacttgtccgtcgttggaagcggtggctttggcggcttgaa

SEQ ID NO: 219995 - DNA, 937 bp, Unknown
  Bacterial polypeptide expressing nucleotide sequence isolated from the Sargasso Sea
gcttggtgctcaaggtgaatatgcaggactgatggttatacgcaaatatcatcttgaaaggggagaaactaatagaaatgtttgtttaattccgagctccgctcatgggactaatccagcgagtgcacaaatggttggaatgaaagtagtagtagttaactgtgataaacaaggaaatgtagattttgaagatctaaagaaaaaagtagaagtacattctgagaatttaggtgcattaatggtaacatacccatctacacatggagttttcgaggaaaaaatatcagatatatgtgacttagtacataaacatggtggccaagtttatatggacggagcaaatttgaatgctcttgttgggatagcaaaacctggaaattttggtccagatgtttgtcatataaatctacataaaactttttgtattccacatggaggtggtggaccaggtatgggcccaatagcatgtaagagacatttagaaatatatttgccctcacatcctgttataaaagattgtggccctgcaaccggtataggtcctgtctctgcagcaccatggggaagttcaagtattttatctatatcttggatgtacattaaaatgatgggttctgagggtttaaaattagcaactcagattgcaattttaaatgctaactacgttgcacataaattaaaaaatcattttccaattctttacaaaggaacaaatggaaacgtagctcatgagtgtattatagacattagatcaattaaaaatgatacaggtgtaacagaggaagatattgcaaaaagattaatcgattttggttttcatgctccaactatgtcttggccagtgcctggtacaatgatgattgaacccacagaaagtgaaagtttacaagaacttgatagattttgtgattgcttgataaaattaaagaggaaatag

SEQ ID NO: 219996 - DNA, 421 bp, Unknown
  Bacterial polypeptide expressing nucleotide sequence isolated from the Sargasso Sea
aacaggaataacagaggaggatattgcgaaacgattaattgattatggttttcatgcaccaactatgtcctggcctgtcgctggcactatgatgattgaaccaactgagagtgaaaatttgagagagataaatagattctgtgatacgcttattaaaatcaaatctgaaattgataatataaaatctggtaaatttgataaaatagataatcctataaagaatgcacctcacacagatttagagctttcatctgatgaatggagccataagtacacacgtgaagaggcagcctacccatctaaatatttgaaaagtaataaattttggccaccggttgctagagtagataacgtatatggagataaaaatatattctgtacttgtccaagtatggatgaatttaaagaagacgcagcttaa

SEQ ID NO: 219997 - DNA, 708 bp, Unknown
  Bacterial polypeptide expressing nucleotide sequence isolated from the Sargasso Sea
tatgattgatgatacttcacaggaatttataaataggcacattggtccatcaaaaaaagatcaagaaaaaatattagattatattggcagcaaatctcttgaccaacttatacaaaatacagttcctaaaaatattttgcttaaagatgaattaaaaattggtgacccactttcagagagtgaagctttgaaaaaacttaaaggcatctctcaaaaaaaccaaacttttagaaattttattggtatggggtattataattgttttactcctcatgtagttttgagaaatattttagaaaatccgggctggtatacttcttacacaccttaccagccagaagtagctcaagggagattagaaatgcttttgaattttcaacaattagtaattgacttcactggaatggatattgccaatgcttcattattagatgaagctacagctgctgcagaggcagttggtctcgcacaaagagtttctaaaaataattcaaaaaaagtttatgtgtcagaaacttgtaatcctcaagttattgatttaattaagacaagaattgaaccttttggtctcgaacttttgattggcaatcaaaaagactttctaaaaaatttaaacggagaattattgtgtggagttatagcttaccctgatactttaggtgaaataattgatcctagtgagtctataagtttaattcacaaaaaaag

SEQ ID NO: 219998 - DNA, 639 bp, Unknown
  Bacterial polypeptide expressing nucleotide sequence isolated from the Sargasso Sea
gatgctaaaaaatgctcaaaaagattttatccaaaggcatataggaccttccaaagaagagcaagaggttatgcttaaagagttagggtttaaaaatttggatgaactgattaaaaaaacagttccagaaaaaattcttttaaaggaaaacctaagcattggagattctaattcagaatataaagcactaagaaaattaaaagacatttctcaaaaaaataaagtttattcaagctttataggaatgggttattatggaacctataccccctatgtaatattaagaaatattttagaaaaccctggatggtatacttcttatactccataccaacctgaagtggctcaaggaagacttgagatgttattaaattttcagcaaatgataattgattttacagggatggatattgcaaatgcttctcttttagatgagggcacagctgcagcagaagctatgggtttaagttatagaatttgtaaaagtaaaactaaaaaagtctttgtctcaaaaaactgtcatcctcaaactattgatgtgattaaaacaagagccgaaccattgggtttaaaaataatggtaggagatgaatacgaagatattaatgaggatatagtttgtgggatattacaataccc

SEQ ID NO: 219999 - DNA, 859 bp, Unknown
  Bacterial polypeptide expressing nucleotide sequence isolated from the Sargasso Sea
agcagcgggctatcaagaaatgattgccgagcttagcgagtggctaattaatgtaacgggctacgatgcgctttcaatgcagcctaactcaggtgcacaaggtgaatacgcgggcctattggctattcagcgttaccacgaaagccgtggcgaaggtcacagaaacgtgtgtctaattccaagctctgcccacggtactaaccctgcgtctgcgcaaatggttagccttaaagtggtagtagttgcgtgtgatagcaaaggtaacgtagaccttaacgaccttcgcaagaaagcggaagaagtgggtgataacctgtcgtgcgccatgatcacatacccgtctacccacggtgtatatgaagaaaccgtgcgcgagatttgtgacattgttcaccaatacggcggtcaggtttacatggacggcgcgaacatgaacgcgcaggtgggcattacgtcacctggcttcattggttcagatgtatcgcaccttaacctacacaaaactttctgtattccacatggtggcggtggcccaggtatgggaccaattggtgttaagtcgcaccttgcgccattcctaccaaaccacacggttgttaacgtagaaacggcaggcaaagactgtggtgcggtatcggcagcgccatggggcagtgcatcaattctgcctattagctacatgtacatcaaaatgatgggtagcgatggccttcgccgtgcaaccgaagtcgctattcttaacgctaactatgtggctaagaagctagaagggcacttcccagtgctttacaaaggcaacaatggccgcgtagcgcacgaatgtattattgaccttcgcccggctaagaaagcagcggtg

SEQ ID NO: 220000 - DNA, 831 bp, Unknown
  Bacterial polypeptide expressing nucleotide sequence isolated from the Sargasso Sea
gaaaaagcgttaaaatacaaagatacactagcagggctaatgattacttatccctcaacacatggtgtatttgaagaagctatccaagaaatctgcgaaacaatccatgataatggtggcttagtctatatggatggtgcaaatatgaatgcgcaagtaggactaacaaaccctgctaaaattggcgctgatgtttgccatttaaatttacataaaacatttagcatacctcacggtggcggtggaccaggaatgggtcctatttgtgtaacagaaaaactagccccctatcttccaaaccattccatcatccctataaaagaaaacaaaggaaccgctgtatgcgcaacaccttggggaagtgcaagtatattaattatttcatatgcttatattcgattattaggaaaaaaaggattaacaaaagcaacacaaacagccatattaaatgcaaactatattaaagctaggttagagtcacaatataaagtactatttcaaggaaaaaataaaagagttgcccatgaacttattgttgattttagagaatttaaaaagtctgcaaaaattgaagtagaggatatagcaaagagactaatagattatggctatcatgcccctacaatgtcatggcctgtacctggaacattaatgatagaacctacagaaagtgaagataaagatgaattagatcgattttgtgacgcattactatctatcaaaaaagaaataaaagatattgaaacaggagcagcagatacaacaaataacctcctaaaaaatgcacctcatacagtagagcaagttagtagcgatgatggacaaaccctt

SEQ ID NO: 220001 - DNA, 847 bp, Unknown
  Bacterial polypeptide expressing nucleotide sequence isolated from the Sargasso Sea
aaccttggagcattaatggtaacttatccatctacccacggagtttttgaagaaaaaataagtgatatttgtgagttagttcataaacatggtggccaagtctacatggatggagcaaatttaaatgccttagttggagttgcaaagcctggaaattttggtccagacgtttgtcatattaatttgcataaaacattttgtattcctcatggcgggggaggacctggaatgggacccattgcttgtaaaaaacatttacaagtttatctgccaaatcatccagtaataaaagattgtggaccaacatctggaattggagccgtatcagcagctccttggggtagttcaagtattctatcgatctcttggatgtacattaaaatgatgggatcagcaggattaaagcttgctactcaagttgctatattaaacgcgaattatattgcccatagactaaaagatcactttccgattttgtataaagggtcaaatggcaatgttgcacacgagtgcattatagatattagaaatattaaatcagagacaggagtaacagaagaagatattgcaaaaagattaatagattttggatttcatgcaccaactatgtcatggcctgtagctggtactatgatgatagagccaactgaaagtgaaagtttgtcagaacttgatagattttgtgacactttaattaagattaaacaagagatagataagattaaatcaggtaaatttgataaagttgataatccaattaaaaatgctcctcatacagactctgagcttgcatctgataattgggaacacaaatacacaagacaagaagcagcttatccagctaaat

SEQ ID NO: 220002 - DNA, 709 bp, Unknown
  Bacterial polypeptide expressing nucleotide sequence isolated from the Sargasso Sea
aaaaaatatgaaataaactgggataaatctttcgacagaaaaacagaatatttaaatcatgaagtatttaatagccatcactcagaaacacaaattctaaggtatatcagaagtctatctgataaagatatagcgctggatagatgtatgattccattgggctcctgcacaatgaaattaaatgctacttctgaaatgattccagttggctggaatgggtttgcaaatgttcatccgcatgcaccaactgatcaaactgagggttatcaaaaaataatttttgatttagaggattggctatcacaaattacaggttataaagcaatctccttacagcctaatgctggatcccaaggtgaatatgctggactgcttgctatagacagctttcataaggctaataacgaccatgatagaaatatatgtttaattccagaatcagcacatggtaccaatccagcttcagctcaaatggtgggatatgaggttgtggtaattgattgtgacgagaatggagatattgatttcgatgatcttaaaaataaggttaatacacacaaaaataaaatagcagcaatgatgattacatacccgtcaactcatggtgtttttgaggagagagtgaaggatgtttgtgatttaattcataattttggtggttttatttacatagatggagcaaattttaatgccatggtaggaacatgtt

SEQ ID NO: 220003 - DNA, 807 bp, Unknown
  Bacterial polypeptide expressing nucleotide sequence isolated from the Sargasso Sea
tataaaaatgctttagatcaaaaagtaaatattagaaaagtaaattctgaaatgctagcagtttctttcgacgaaaagaaaaatgtttatagagtaaatcaattattaaaaatttttaatgcagcagaatcaattaaaaaagaggatccaacagtaagtctacctaatttaccaaaaaatttattaagaacttcaaaatatttagaacaccctgtttttaatttgtatcattcagaaactgagatgcttagatatttaaaaaaattagaagataaagatatagctcttaatagaactatgattgcactaggctcatgcactatgaaattaaacgctactgcagaaatgataccaatttcatggagagaattagcagagcctcatccatttgtgccgattgagcagatggaaggatatagagatttattcactgatcttaaaaattggctaagatcaattactggattttctggagtttcactgcaaccaaatgctggcgctcaaggagaatatgcaggattaatggtgattagaaaatatcatttagatagaggtgaagaaaataggaatatatgtctaataccaagctcagcacatggaaccaatcctgctagcgcacaaatggttggaatgaaagttgtcgttgttgattgtgataaagaaggaaatgttgactttgaagatttaaagaaaaaagtagaaatgcattctgaaaatctcggagcattaatggtaacttacccgtctactcacggtgtatttgaagaaaaaattacagatatatgtgagttaattcataaacacggt

SEQ ID NO: 220004 - DNA, 928 bp, Unknown
  Bacterial polypeptide expressing nucleotide sequence isolated from the Sargasso Sea
cgaattcagaaaaagatttttaaaaagacacattggtccttctaaagaagaccaatcaaaaatgttaaaagaattaaattatcaatcactagatgatttgattgacaatactgttccagaaaaaataaagtttaaaggtgaacttaatattggcgactcaaattcagagtatgaggctttaagaaagttacgagcaatttcgaaaaaaaatcaagtttactcaaattttattggaatgggttattatggaacatatacaccctatgtaattttgagaaatatattagaaaatccaggttggtatacttcgtatacaccttatcagcctgaggtagctcaaggaagactcgagatgttattgaactttcaacaaatgattgttgactttacgggaatggatattgccaatgcttctttattagatgaaggcacagcagcagcagaggctatgggtctaagtcatagattgaataaaaaagatagtaatttagtttttgtttctgaagattgtcatcctcaaacaataaatgtaattcagacaagagctgaacccatgggtttaaatgttttagtcggaaaagaagatgaagttttggatcagctaaaagaggatttagtttgtggaattttacaatatcctggaactttaggagacattaaagacccaagtgaagcaattagcaaaattcacaaaaaaaatggtaaggctgtattagcttgtgatctgttagccctagcaaaattaaaaacgccaagagaacttggcgccgacattgcagttggaagctctcaaagatttggtattccaatgggatatggaggtccacacgcagctttttttgctacaaaagatgagtttaaaagatcaatgcccgaaaggattgtcggtgtatcagttgatagacatggtaataaggcatatagatta

SEQ ID NO: 220005 - DNA, 767 bp, Unknown
  Bacterial polypeptide expressing nucleotide sequence isolated from the Sargasso Sea
ttttgaagatttaaagaaaaaagcagaaatgcattttgaaaatcttggagcattaatggttacttatccgtctactcatggagtatttgaggaaaaaattacagatatatgtgaattaattcataaacatggtggtcaagtttatatggatggtgcaaatttaaatgcgcttgttgggatagcaagacctggaaattttggtccagatgtttgccacataaacttacacaaaacattctgtattccacatggtggtggaggaccaggaatgggaccaattgcatgtaaaagacatttacaagtttatttgcctaatcatccagttgttaaggactgtggacctgccacaggaataggagcagtttcagcagcaccttggggaagttcaagtattttatcaatttcctggatgtatattaaaatgatgggttctgaaggtttaaaattagctactcaaattgcaatactaaatgcaaattatatagctcatagacttaaagatcattacccaattctttataaaggttcaaacggaaatgtagctcatgaatgtataattgatattcgatctattaaaactgaaacagggattactgaagaagatatagctaaaagattgatcgattatggttttcatgcaccaacaatgtcatggccagtagcaggtacaatgatgattgaaccaactgaaagtgaaagtttgtctgaactggatagattttgtgatactttgattagcattaaatcagaaatagatatgattaaat

SEQ ID NO: 220006 - DNA, 821 bp, Unknown
  Bacterial polypeptide expressing nucleotide sequence isolated from the Sargasso Sea
attgagaacatctaaatatttaacccatccagtttttaacaagtatcactctgaaacagaaatgatgagatacttaaaaagacttgaggacagcgatattgcattaaataggtcaatgattgcactcggttcctgcacaatgaaattaaactctaccgctgaaatgatacctatttcttggaaagaattttctcaacctcatccttttgtgccggtaaatcaaacgaaagggtatcaaattttatttgaagatttaataaatgacctaaaagaaattactggatttgatgcggtttctttgcaacctaactctggtgctcagggggagtatgcaggtttaatgacaataagaaaatttcataaaaataataatcaacctaatagaaatgtttgtttaatacctaattctgctcacggaaccaatcccgctagtgctcaaatgtcaggaatgaaagtagttgttgttaattgtgatgataacggaaatattgacttgcaagatctgcaaaataaatcagaaaaatattctaaagatttagcagctcttatggttacctatccttcaactcatggggtttttgaagaaaagataactcaaatttgtgatatcgttcatttaaatggtggtcaagtttacatggatggcgcaaatttaaatgctttagtaggaattgcaaaacctggtaaatttggtcctgatgtatgtcatattaatttacataaaactttttgtattcctcatggaggaggtgggccaggtatggggccgatagcttgtgctaaacatttaaaagattttttaccaaatcaccgacatttaa

SEQ ID NO: 220007 - DNA, 898 bp, Unknown
  Bacterial polypeptide expressing nucleotide sequence isolated from the Sargasso Sea
actatgatttctagtgcgactggtttaccacttgctaatgcgtcactcctagatgaatcaacagccgccgctgaggcaatgaccatgttttacggctcaacaaaagatcaaaataaaaattcatttttcatttctaaaaactgtcaccctcaaacaattgatgttttaatgactagggctgaacctttaggtataaaactaattattggtaatgagaattcaatcactttagacaattctatctttggaatgttattacaatatccatcatccgatgggagaatcattgattatactgagttgataaaaaaggctaaacggtcaaaagtatatacttgtttggctacagatttattggcactaagcatattaaaaactcctgctgaaatgggtgccgatgttgctgttggtaatacacaaagatttggtgtcccaatggggtatggagggccacatgctgctttttttgctacttcagaaaattttaaaagaaaaatacccgggagaataatcggcgtatcaaaagacattcatgggtcgagagccttaagaatggctttgcaaaccagagagcaacacatacgtagagaaaaagcaacatctaacatttgtactgcacaagtacttctcgcaatcatgtcatcaatgtatgcagtttatcatgggccaaaaaatataatttctattgccaataaggtgcacagtctatgttcaaatcttgcaacctctcttgatcatgccggtctaaagattttgcaccgccaattttttgacacaattagaatattcccaaataataaatgggaaataaaggcagaaaatgaaaaaatgaattttaggaaattcgaagatggtagtgtagacatttccttagacgaaagtactactgaagaagaca

SEQ ID NO: 220008 - DNA, 651 bp, Unknown
  Bacterial polypeptide expressing nucleotide sequence isolated from the Sargasso Sea
gccccaagatcaaatgaagggatataaagttttatttaatgatttagttaatgatttaaaggaaatcacaggttttgatgcagtttctcttcaaccaaattccggtgcccaaggtgaatattcaggattaatgacaatacgtaagtttcatttaaataataatcaaaaaaatagaaacgtgtgtttaataccagagtcagcacacggtacaaatcctgcaagcgcacaaatgtgcgggatgaaagtagtagttgttaattgtgatgatgaaggaaatgttgatttaatagatttaaaagataaagttaacaagtattcaaaagatctagctgctttgatggtaacttatccatcaacacatggagtttttgaggaaaaaattagtgaaatttgtgactatattcataaagcaggtggtcaagtttacatggatggtgcaaatcttaacgccttaattgggatagcaaaacctgcaaaatttggcccggatgtttgtcatattaacttacataaaactttttgtattccacatggaggaggtggcccagggatgggtccaattgcttgcgccaagcatttaaaagattttttgccaaaccacaatattactaaaaatacaagatctgaaaaaagtttaggttctgtatccgc

SEQ ID NO: 220009 - DNA, 325 bp, Unknown
  Bacterial polypeptide expressing nucleotide sequence isolated from the Sargasso Sea
gatggtggagccgactgagagcgaatcgaaggaggagttggaccggttctgcgaggcgatgatcgccatccgcgcggagattgaatcggtggaaagtggcgcagtggatggggaagataatctgctcaagaatgcgccgcacaccacggacatggtgggcggcaatgcttggccgcacgattacgatcgtgaacgcgcggcctttccggcaccgtggctgcgggattacaaattctggccggcggtcggccgcatcgacaacgtgtggggcgaccgcaatctggtatgcagctgcgcgggtatggaggcatttgccgaagagtaa

SEQ ID NO: 220010 - DNA, 490 bp, Unknown
  Bacterial polypeptide expressing nucleotide sequence isolated from the Sargasso Sea
ttatataaaggcacaaatggaaatgtagcgcatgaatgtattattgatataagaaatattaaaaatgaaacaggaataacagaggaggatattgcaaagaggctaattgattttggttttcatgccccgacaatgtcttggccagtaccaggaactatgatgatcgaacctacagaaagtgaaagtttgactgaaataaatagattttgcgatactttgattaaaattaaaaaagaaattgataaagttaaaaatggggaatttgataaggttgataacccaattaaaaatgctccacatactgatttagaattagcttcaaatgagtggaaacataaatattctagagaagaagctgcatatccatcacaatttttaaaatccaataaattttggccaccagtttcaagagttgataatgtgtacggtgacaaaaatcttttttgtacttgtccaagcatggatgaatttaaagaagacgctgcgtaaa

SEQ ID NO: 220011 - DNA, 877 bp, Unknown
  Bacterial polypeptide expressing nucleotide sequence isolated from the Sargasso Sea
actcctaacgtcattttaagaaatattttggaaaatccaggttggtatacatcttatacaccttaccaagctgaggtagcccaaggacgccttgaaatgcttttaaactttcagcaattaataattgacctaacaggcatggatattgctaatgcttctttattagatgaagcaacagcaacagcagaggcagtgggtttaagtcaaagattagacaaaactaattctaaaaaaatttttatttcaaagaattgcaatccacaaacattagatcttattaaaactagaacgaaaccttttggtttagaattgattattggtgacgagaaaaatgaacttttgcaaattgaggatgatattatttgtggtgttttatcataccctaaaacattaggagaaattatagatcctagcgaaagcatcagccaaattcataaaaaaaatggaaaagcaattttagtatgtgatttgttagcattagctagactaaaaactccagcagaacttggagctgatatcgcagtgggtagcgctcaaagatttggtatacctatgggctacggtggtcctcatgccgctttttttgctactaaagaagaatttaaaagatctatgccaggtagaattataggtgtttcaaaagatcgccacggaaaaaaagcttatagactttctttacaaaccagagaacaacacatcagaagagataaagctacgagcaatatctgtactgcccaagctttattagcaattatttctgctgcttttgcaatttatcatggtccagaaggaatacttaaaattgcgaacagaacatgtaaattagcaaaaatatttgctgatgaaattaaaattggcggttataaaattttgtcag

SEQ ID NO: 220012 - DNA, 961 bp, Unknown
  Bacterial polypeptide expressing nucleotide sequence isolated from the Sargasso Sea
cttggggcactaatggtaacctatccatctactcatggagtatttgaggaaaagatatcagatatttgtgaactagttcataaacatggtggtcaggtctatatggatggagcaaatttaaatgccctagttggagttgcaaagccaggaaattttggcccagatgtttgtcacattaatttacataaaactttttgtattcctcatggcggaggaggacctggtatgggacctattgcatgtaaaaaacatttacaagcttatctgcctaatcatccagtaattaaagattgtggcccaacaactggaattggagcagtatcagcagctccttggggtagttcaagtattctgtcaatttcttggatgtatattaaaatgatgggatcagaaggattaaagctcgcttctcaagttgcaatattaaacgcaaattatattgctaataggctaaaagatcactttccaattttgtataaaggttcaaatgggaacgttgcccatgaatgtattattgatataagaaacattaaatcagagacaggagtaacagaagaagatattgcaaaaagattaatagattttggatttcatgctccaacaatgtcttggcctgtagctggtactatgatgatagagccaactgaaagtgagggtttatcagaacttaatagattttgtgatactttgattatgattaaacaagaaatagaaaaaattaaatcaggtaaatttgataagatagataatccaattaaaaatgctccacacaccgatagtgaacttgcttctgataactggacacataaatattcaaggacagaagcggcttatcctgcaaaatttttacgagctagtaaattctggcccccagtttcaagagtagataatgtttatggcgacaagaatatattttgtacttgtccaagcattgatgaatttaaagaggatgcagcttaac

SEQ ID NO: 220013 - DNA, 658 bp, Unknown
  Bacterial polypeptide expressing nucleotide sequence isolated from the Sargasso Sea
aatgttacataattctgaaaaagattttataaaaagacacattggtccatctgaagatgatcaatctaaaatgttaaaaaaattaaattataaatcattagatgatttaattaacaatactgttccagaaaaaatacagtttaagggtgaacttaatattggagagtctaattcagagtatgaagcattaagaaaattaaaagcaatttctaaaaaaaatgaaatttactcaaattttattggcatgggttattacggaacttatacaccatacgtaattttaagaaatatattagaaaatccaggctggtatacctcatatacaccttatcagccagaggtagcacaaggaagattggaaatgcttttaaatttccaacaaatgattgttgactttacaggaatggatattgcaaatgcatctttacttgatgagggtacagcagcagcagaggctatgggtttaagttatagacttgataaaagtggcagtaatttagtttttgtctcagaaaattgccaccctcaaactgttgaggttataagaactagagcagaacctatgggtctcaaagttcttgttggaaatgaagataaagttttagaacaattaaagaggatattgtttgcggaatattacagtatcctgggactttag

SEQ ID NO: 220014 - DNA, 813 bp, Unknown
  Bacterial polypeptide expressing nucleotide sequence isolated from the Sargasso Sea
gaaatttcggtccagatgtttgccatattaatttgcataaaacattttgtatcccacacggcggtgggggacctggtatggggcctattgcttgtaaaaaacatttacaaatttatctacccaatcacccagtgattaaagattgtggaccaacatctggtatcggagcagtgtcagcagctccttggggtagttcaagtattctatcaatctcttggatgtatattaaaatgatgggatcagcaggattaaagtttgctactcaagttgcaatattaaatgcaaattatatcgctcatagattaaaagatcattttccaatattgtataaaggatcaaacggaaatgttgctcacgaatgtattattgatattagaaatattaaatcagagacaggagtaaccgaagaagatattgcaaaaagattaatagattttggatttcatgcgccaactatgtcatggccagtagctggtacaatgatgattgaacctacagaaagtgaaggcttatcagaacttgatagattttgtgatactttaatcaaaataaaacaagaaatagatttaatcaaatctggcaaatttgataaagttgataatccaattaagaatgctccacatactgatactgaacttgcatctgatgattggaatcacaaatattctagagaacaagcggcttatccagcaaagtttttaaaagtgaataaattttggcctccagttgcaagagtagacaatgtatacggagataaaaatatcttttgtacttgtcctagtatggatgaattcaaagaagatgcagcttaat

SEQ ID NO: 220015 - DNA, 931 bp, Unknown
  Bacterial polypeptide expressing nucleotide sequence isolated from the Sargasso Sea
tcagagccttaggtttaaaagtggttatggaaacgacgaagatttaaacaaaatatcaagtgatatagtttgcggaattttacaatatccaggaactttaggtgacattaaagatccgagtgaaaatattagtaggataaaaaagaaaaatggaaaagcgattttagtatgtgatcttttggctttagctaaacttaaaactcctgctgaactaggagcagatattgctgttggaagttctcaaaggtttggaattccattgggatatggcggccctcatgctgcattctttgcaactagagatgaatttaaaagatctatgcctggaagaattgttggagtatctgttgatagacatggcaataaagcatatcgtttagcactacaaactagagaacaacatataagaagagacaaagcaaccagtaatatatgtaccgctcaagcattgcttgcaatagtatcggctgcttatgcgatctatcatggtccaaaaggaataagaactatttctgaaagagtttcacagttagccaagaatttcgcagataaactaaaacaatcaggatataaattatattcggattatttctttgataccgtaacgataatcacaaaagaaaaaactgatcaaatttataataatgctttatcccaaaaggtaaatataagaaaagtaaattctgaaatgttatctgtgtcatttgatgaaaaaaaaaatgtctatcgggctaatcagcttttaaaaatatttaattgtgcagagtctattaaagaaaatccaactgagaatttgccaaatttaccaaagaatttaattcgtacttctagttatttagatcataaagtttttaatagttaccattcagagacagaaatgttgagatatctaaaaagactagaagataaagatattgcactaaataggtct

SEQ ID NO: 220016 - DNA, 814 bp, Unknown
  Bacterial polypeptide expressing nucleotide sequence isolated from the Sargasso Sea
ttagaagacaaagatattgcgcttaatcgttcaatgattgccctaggatcttgtacaatgaaattaaatgcagtcgcagaaatgattcctgcaagctggagggagttttcagagcctcatccttttgtgccaatagaacaaatggaaggttatagaacgctttttatggacttaaaaaattggttaagatctattactggcttttcaggagtttctcttcaaccaaatgccggagctcagggcgagtatgcgggcttgatggttatcagaaaatatcatttggaaagaggagaaaaaaatagaaatatttgtttaattccaagttcggcacatggaactaatccagctagtgctcaaatggtaggaatgaaaattgtcgttataaattgtgacaaagaaggaaatgtagactttgaagatttaaaaaagaaaacagaacttcattccaaaaatttaggagctcttatgattacatatccatctactcatggagtttttgaagaaaagataacagatatttgtgaattaattcataaacatggtggtcaagtatatatggatggtgcaaatttaaatgcactcgtgggaatcgcaagacctggaaactttggaccagatgtttgtcacattaatttacacaaaacattctgcataccccatggaggaggagggccaggaatgggaccaattgcttgtaaaaaacacttggaaatttatttaccatcacacccagttgttaaggattgcgggcccgcttcgggaattggagctatatctgctgcgccatggggaagttctagtattttacctattt

SEQ ID NO: 220017 - DNA, 502 bp, Unknown
  Bacterial polypeptide expressing nucleotide sequence isolated from the Sargasso Sea
catggtaggaatgtgttatccaggtcaatttggtggagatgtatcgcatctaaatctgcacaaaacattttgtatacctcacggaggaggaggtcctggagtaggtccaattggtgtagtcaaagaattggttccttacttaccagctgatccacttactcaaaaagattcagaatattcaatatctggatctaagttcggtagcgctagtattctgccaataagttggatgtatataagaatgatgggagaagagtcgctgagaagggcaacccaaattgctatcctaaacaccaactacatagccaataaacttaaagatgattatgacgtgctttataaaggtaaaaatggactagttgctcatgaatgtattcttgatgtaagaccatttaaagaatcctgtggaattgaggcagaagatattgcaaaaagacttatagattatggttttcatgctccgacaatgtcaatggccggttgctggaacattaatgattga

SEQ ID NO: 220018 - DNA, 885 bp, Unknown
  Bacterial polypeptide expressing nucleotide sequence isolated from the Sargasso Sea
ttcatgaacatggtggtcaagtttatatggatggagcaaacctaaacgcacttgttggagttgcaaaacctggaaattttggtcctgatgtttgtcatataaatttgcataaaacattttgtattccgcatggtggcggtggacctggaatgggacctattgcatgtaaaagacatttacaagtttatctgcctaatcatccagttgtaaaagattgtggacctgcaagtggaataggtgccgtttcagcagccccatggggaagttcaagtattttatcaatttcttggatgtatattaagatgatgggatctgagggtgtaaaacttgcaacacaaattgcaatcctaaatgcaaattacatagcaaatagattaaaaaaccattatccaattctttataaaggttcaaatggtaatgtagctcatgaatgtattattgatattagatcaattaaaagcgaaacaggtatttcagaagaagatatagctaaaagattaatagattatggatttcatgcaccaacaatgtcatggccagttgctggaacaatgatgattgaaccaacagagagtgagagtttatctgaactggatagattttgtgacactttaattagcattaaaaaggaaatagatatggtcaagtcaggcaagtttgacaaagtagataaccctattaaaaatgcacctcacaccgatattgaattagcttcagatgaatggagtcataaatattcaagagagcaagctgcatatccagcaaaattcttaaaagcaaataaattttggcctccagttgcaagagttgacaatgtatacggagataaaaatattttttgcacttgtccaagtatggatgagtttaaagaagatgcagcataat

SEQ ID NO: 220019 - DNA, 655 bp, Unknown
  Bacterial polypeptide expressing nucleotide sequence isolated from the Sargasso Sea
atggaaaattttgatagttttgcactaagacatattggcttaagtcaaacagatattgacaatctactagatcaacttggttacaaggacttagaagagttctcaaagtctgtactccctgaaaatatctttattgaaaaagagcttggtcttggtgatgccatgtctgaagaagaagccctaaaagtgctcaaagaaatatcgaaagaaaatactgtatatcgctcattcattggtcagggctactttggaacagttacgccaaacgttattttaaggaatgtgtttgaaaatccaggatggtacacatcctataccccctatcaagcagaaatctctcaaggaaggctggaagcgctcatcaatttccaaaccatggttggagatctcacgggatttgaaatagctaatgcatcactgcttgatgaagccacggcagcagcagaatcaatgactcttgctcatagagttggtaaatcaaaatcccatagattttttatagatcaaaactgctttccccaaacagtctctgtggttacagctagagcaaagccgattggtattgaagtaatggtaggtgatccgcagcaattaactaatttaaaagaagagacatattttggagctttgctcccaatatccaaggtaatgatgg

SEQ ID NO: 220020 - DNA, 811 bp, Unknown
  Bacterial polypeptide expressing nucleotide sequence isolated from the Sargasso Sea
ggttacctatccttcaactcatggagtattcgaagaaaaaataactgaaatttgtgatatcgttcattcaaatggtggccaagtttatatggatggagcaaatttaaatgctttggtcggaatagcaaaacccggtaaatttggtccagacgtatgtcatattaatttgcataaaactttttgtattcctcatggaggaggaggcccaggtatgggaccaattgcttgtgctaaacatttaaaagattttttaccaaatcacagacatctaaatgaagtaaaattaaacaagagcatgggctctgtttcagctgctccatggggaagtgctagtattttagttatttcttggatgtatatcaaaatgatggggtcaaaaggtttgaaagctgcatctgaaatatcaattctaaatgctaattatattgcaaaaaaattatcagaaaaatataaaattttatatactgggaaaaacggtaatgtagcacatgagtgcatcattgatataagacctattaaagaaaaatcagggatttcagaagaagatatcgctaagaggctgattgattatggttatcatgcgcctacgatgtcttggccagtttcaggtactattatgattgaacctacagaaagtgagaacttagaagaaattaatagattttgtaatgctttattaggtattaaagatgaaatagataaaatcgattccggcaaatacgataaaaaagataatcctataattaatgctccccatacatatttagaactatcaggagatgaatggaaacattcatacacaagaaaagaa

SEQ ID NO: 220021 - DNA, 899 bp, Unknown
  Bacterial polypeptide expressing nucleotide sequence isolated from the Sargasso Sea
tatggggcaggggtattatccaacgatcacgccacctgtgattcaacggcacatacttgaaagcccaacatggtatacatcctataccccgtatcaatctgaaatagcacaggggcggttagaggccctgttaaactttcagacagtgattacggaattaaccggactaccgatagcgaacgcctctcttctagacgatgctacagcagctgctgaagcaatgatgatgtgtcatagaatacgatctaatacggaaaaagatcggacacagtttggtcttttatcggatgtagatacccatattaaagaagtcgttttagggcgtgcggcgtcattagggattgatgtgattttattagaagaaatctcccaaatcagtgaaacactctttggaatacttgggcaatacccgaatacagagggcacccttggcgatccacatcaatgggcgttgacctgccaagagaagggggtcaagctcgctgttgttgctgatttgatggcctgtacattattccagccaccaggtgaatggggcgcggatatcgtcgttggaagtagtcagcgttttggtgtgccgatggggtatggggggccttatgcgggttactttgcaacaaaagaaatatatcaaaggcaagtccctggccgtattataggcgcatccaaagacaatgcaggtaagacagcctaccgcatggcattacagacaagagaacagcatattcgacgtgaaaaagcgacatcgaatatctgtacagctcaagcgctattggccacaatggcagggatgtatgcggtgtatcatggccctgaaggactcaaagaaatcgcaacgggtatccatcaccttaccaccccattagccaatctgttgaaagcatcgggttttcagttaa

SEQ ID NO: 220022 - DNA, 786 bp, Unknown
  Bacterial polypeptide expressing nucleotide sequence isolated from the Sargasso Sea
agatgaatataaaaggtcaatgcctggaagaattattggggtttcagttgatcggttaggaaaaaaagcgttacgtatggcgctacaaactagagaacagcacataagaagagagaaagccactagcaatatttgtactgcgcaagctttgcttgcaattatttctgcagcatatgcaatttaccatggacctaaaggaattaatgagatagcggaaagaatttctaaattagcaaaaagttttgcagacaaaataaagaagtcaggttatgaactttattcagatagttttttcgacacagttacgattcttacaaaaaataaaacgcaaaatatttttaaaaatgctttaagaaatggagttaatgtaagaatggttggtgatagcatgatatctgttgcctttgatgaaagaaaatcaatagaaaaaactaatatgcttttgaaaatttttaatagcgcagagtcaattaacgaaactggtaaagttacgttaagcaacataccaaaaaatttaacaagaacatcaaaatatcttacgcatcctgtttttaattcttaccattcagaaacagaaatgttgcgttacttaaaaaaattagaagattcagatattgccttaaatagatcaatgatttctttgggatcatgtacaatgaaattaaatgctgtttctgaaatgatcccagttacttggggggagttttatgaacctcatccatttgctccagtagaacaaatggaaggatatagaaatttatttacagatttaaaaaattggttaag

SEQ ID NO: 220023 - DNA, 796 bp, Unknown
  Bacterial polypeptide expressing nucleotide sequence isolated from the Sargasso Sea
caagttcttcgtctctgagctttgtcacccccagacgattgatgtgattaaaacaagagcttggccgttaggtatcgacgtggaggttggtgaccactcgtcgttcgatctgactgaagacgtgtttggcgtgcttctccagtatccggcgacagacggtagcattctcgattatcgggactttgcggccgaggctcacgcggttggctccactgttgtggttgctactgatctaatggcgctgacccttctcacaccacctggtgaatggggtgcggacatcgtggtcggtaactcgcagcgcttcggggttccaatgggttttgggggcccgcacgccgctttcatgtctgcacaagatgcattcaagcgtaagcttccggggcgcattatcggtgtttccgtagatacggatggcaacccggctttgaggatggctttgcagaccagagaacagcacatacgccgggacaaggccacgtcaaacatctgcaccgctcaggtgcttctggcaattatggcaggagcgtacgcggtctatcacgggcccgatggcctgaagcgtatcgcagagcggattcgcgatcaggcgggtgtgctcgctaccgggctcaggatgctcgggcatgaggttctcacgaatgactttttcgacacgattcgggtccgaccatcaggggacgtgagtgaagtcctcggtctggcgctaggaaacgggatcaatctccggagttttggtgacggtacggttggtatcgcactggatgaagtcacacgtccgaacgatctcgacgac

SEQ ID NO: 220024 - DNA, 718 bp, Unknown
  Bacterial polypeptide expressing nucleotide sequence isolated from the Sargasso Sea
atgaaatccaaatattcaaactcagagttttctaagcgccatattggctctaatcaagatcaagtcaaagcaatgctaaaagagattggatgtgattcaatggatgaatttattgaagaaacaattcctaatcagatacgatttaaaggaaatttaaatgttggagatagtgtagacgaatatgaattaatccattcgttaaaaatgatcgcttcaaaaaacaaaccattcaaaagttatattggaacaggttactataacacaatcactccaaacgttattttaagaaatatttttgaaaaccctggttggtataccgcatatacaccctatcaagctgaaatttcacaaggtcgtttagaggctttgctaaactttcaaaccatggtcatggatatgacaggtatggaaattgcaaatgcttctctccttgatgaagcaacagcggctggcgaggcaatggttatgatgtccagagaaaaccctaatagaaatattttttatgcagatcaaaattgtcatcctcaaaccatagaattattaagaactagatcagagcctgttgggataaatttggtagtttgcaaaattgaagattttgactttaatgatgatgttattggcgcgctcattcagtatccatcaagcgatgggaagatcttctcatttgatgatatttgtcaaaatgctcacaacaaaaaatccttaatcgcagtgc

SEQ ID NO: 220025 - DNA, 412 bp, Unknown
  Bacterial polypeptide expressing nucleotide sequence isolated from the Sargasso Sea
aacagaggaggatattgcgaaacgattaattgattatggttttcatgcaccaactatgtcctggcctgtcgctggcactatgatgattgaaccaactgagagtgaaaatttgagagagataaatagattctgtgatacgcttattaaaatcaaatctgaaattgataatataaaatctggtaaatttgataaaatagataatcctataaagaatgcacctcacacagatttagagctttcatctgatgaatggagccataagtacacacgtgaagaggcagcctacccatctaaatatttgaaaagtaataaattttggccaccggttgctagagtagataacgtatatggagataaaaatatattctgtacttgtccaagtatggatgaatttaaagaagacgcagcttaa

SEQ ID NO: 220026 - DNA, 493 bp, Unknown
  Bacterial polypeptide expressing nucleotide sequence isolated from the Sargasso Sea
catcttatacaaaggaatcaatggctatgttgctcatgaattcatcatagatataagaccaataaaagaaatttctggaatcacagaagaagatatcgcaaagagactaatggactatgggttccatgcaccaactatgtcttggcctgtccctggtacaatgatgatcgagccaactgaaagtgaatctaaagacgagcttgatcgtttttgcgaagctatgatatctataagaaatgaaattaatgatgttgtggaaggaaatatcgataaaaacaataatcctttaaaaaatgctcctcatactgcagagtattcattatcagaagaatgggatcatccttattctaggaaagatgcttgttttcctggaaagtggcaaaaagaatataaatattggccatcagttagtagaatcgataacgcatttggagatagaaatcttatttgctcctgcccaccaatcgaagaatatactaacgtcgataattaa

SEQ ID NO: 220027 - DNA, 887 bp, Unknown
  Bacterial polypeptide expressing nucleotide sequence isolated from the Sargasso Sea
catccatcatcatggtggacaggtgtacatggatggtgcaaatctgaatgctctggtcggcatagcccagcccggaaaaatcggtcctgatgttttgcatatgaacctccacaaaaccttctgcattccccatggtggcggaggtccgggaatgggaccgattggatttaaaaaacatctcgcgccttttgctccaagtcatgcggtttgcccggttccaggtgtttctgaagaaaacagcgcggtttctgcggcaccttatggaagtccggggatccttccaatttcctgggtttttatcaaattgatgggaggtccgggtctcttgaaagctaccaaggttgcgattctcaatgcgaattacattgcatcaagagtcgggaaacatttcccggtggtctatactggaaacaacggtcgggttgcccatgaatgcatcatcgacgttcggccttttcgggaaacggccggaattaccgaagaggatgtggccaaaagattgatcgattatgggttccactctccaaccatgtcatggccggtggcagggaccttgatgatcgaacccactgaaagcgagcctttagaggaattggatcgtttctgtgatgcattgatagcgatccgtgcagaaattcagaagcttgaagaaggtgaatggaacgcagacgacaatcccctccataacgctcctcacaccgcagaagatcttgccgatcctgagtggaatcactgctacacccgcgaggaagcggtttatcctcttccgggtttaagggtcaacaaatactggcctccagtcaatcgtatcgataatgtttttggagaccgtaatgttgtttgttcatgtcctccaattgaaagctatcaggaggtcgaggcataga

SEQ ID NO: 220028 - DNA, 951 bp, Unknown
  Bacterial polypeptide expressing nucleotide sequence isolated from the Sargasso Sea
tttgctgacaaattaaagcaatctggctacgaactttactcagattatttttttgatactgttacagtaaaaacattagataaaacagataaaatttataaaaatgcactagatcaacatgtaaacataagaaaaattaactctgagatgctagcagtttcatttgatgaaagaaaaaatctttatagagctaatcaggtgttaaaaatttttaattgttcagaaacaattaaggaaacaactaaagaaacgacaaataaaaatttatcaaatctgccaaaaactttattaagaacctcgacatatttagaccatccagtttttaatagttatcattctgaaactgcaatgcttagatatttaaaaaaattagaagactctgatattgcattaaataggtcaatgatagctttaggttcttgcacgatgaaattaaattcagtttccgaaatgatacccgtaacatggaaagaattttctcatccacatccatattcacctatcgaacaaatggatggttacagagaattatttactgatttaaaaaattggctaagaactataacaggtttttccggtgtttctttgcaacccaacgcaggagctcaaggagaatttgctgggttaatggttattagaaaatttcatgaaaaaaatggtcaaaaaaagagaaatgtttgtttaatacctagctctgctcatggaactaatccagcaagcgctcaaatggctggcatgaaagtagttgttgttaattgtgacgcttatggaaatgtagattatgaagatttaaagaaaaagtctgaagaatattcagatactttgtctacactaatggtaacttatccatcaacgcatggagtttttgaagaaaaaataactgatatttgtgatttaattcataaacatggtggtcaagtttatatggatggggcaaatctaaatgcatta

SEQ ID NO: 220029 - DNA, 796 bp, Unknown
  Bacterial polypeptide expressing nucleotide sequence isolated from the Sargasso Sea
aatgattgatgataattcaaaagaattcataaaaaggcacattggacctacagatgatgagcagtcaaaaatgctaaaatatgtaggatatagttcgcttgaagatttaatgaaaaatactgttccagaaaaaattttattaaaaaatgatcttagtatagatgagccgttgtctgaaaatgatgccttaaaaaaattaaaatctgtatctaaaaaaaataaaatttttagaaattttattggtatggggtactataattccattactccaaatgtaattttaagaaatatcttagaaaatccaggctggtatacttcttatacaccttatcaacccgaagtagctcaaggacgtcttgaaatgcttttaaattttcagcaaacaattattgatcttacaggaatggatattgctaacgcttctttactagacgaagcaactgctacagcagaagcagtcggcttatctcaaagattagataaaacaaatgcaaaaaaaatatttatttcaaataattgcaacccacagacaattgatcttattaaaactcgtgcaaaaccttttggattagaacttatcattggcgatgaaaaaaaggagttatcaaatattaatcaagatattatttgtggagttttagcctatccaggaactctaggtgagataactgatcccagcgaaagcataagtcaaattcataaaagaaatggaaaagcaattttaatatgtgatttattatctttagccaggttaaaaactccagcagaacttggcgctgatatagctgtaggtagt

SEQ ID NO: 220030 - DNA, 835 bp, Unknown
  Bacterial polypeptide expressing nucleotide sequence isolated from the Sargasso Sea
tatgggtctttgtcacagattaaataaaaaagacagtaatttagtttttatatctgaggattgtcatcctcaaacaatagatgtaattcaaacaagagctgaaccaatgggtttaaaagttttggttggtaaagaagatgaagttttagaccagttaaaagaagatttagtttgtggaattttacaatatcctggaactttaggagatattaaagacccaagtgaagcaattagtaaaattcataaaaagaacggaaaggctgtattagcttgtgatctattggcgttagcaaaattaaaaacaccaagagaacttggtgccgatatagcagttggaagctctcaacgatttggtattccgatgggatatggaggtccgcacgcagctttttttgcaacgaaagatgagtataaaagatcaatgccaggaagaattgttggtgtatcagttgatagacatggtaataaggcatatagattatctttacaaactagagagcagcacatcagaagagataaagcgacaagtaatatttgtactgcccaagctttattagcaattgtgtcagcagcatatgccatttatcatggtccagatggaattaaaaatatttctgaaagagtttctcaattagcaaaaagttttgctgataaaataaaacagtctggatatgaactttattctaataatttttttgatactgttacaattattaccaaagaaaagactgatcaaatttataaaaatgcattaaatcaaaaagttaatatacgaaaagtaaattctgaaatgcttgccgtttcttttgatgagagaaaaatgtatatagagtaa

SEQ ID NO: 220031 - DNA, 928 bp, Unknown
  Bacterial polypeptide expressing nucleotide sequence isolated from the Sargasso Sea
ttatcgaatataacagggtattatgatatttcacttcaaccaaatgctggttctcaaggagagtatgcaggtctcctagcaattgatgcatatcataaaaataatggtgatgataataggtcaatttgtcttattccgagatcagcacatggtactaatcctgcctcagcaatgatggttggaatgaaagttgtccctattgaatgtgattcggaagggaatattgatcttaaggacttaaaagaaaaggcatctcttcacaaaagcaatttatcagcaattatgatcacatacccttccactcatggagtctttgaaagtaatgtgagagaagtttgtaaaattgttcatgatcatggagggttagtttacattgatggagctaacttgaatgctcttgttggtattgcaaaacccggagagtttggaggtgatgtttctcatctcaatctgcataaaacattttgcattcctcatggcggaggtggacctggagtcggcccgataggagttgtagaaaaacttaaagattttatgccttcacatcatgaaaatattcaaaatgtaggtcctgtatcctcaacagattttggaagtgccagcattctaccaattagttggatgtatattgcaatgatgggatcaaaaggtttaaaacaggctacgatgactgccattttaagcgcgaattacgttgcaaagcgcctaagcgatcactaccaaatactttataaaggtgagaacaacttaattgctcacgaatgcataatagatgcaagaccttttaaagagtcctcaaatattgatgttgatgatatagctaaaaggcttatggattatggttttcatgctcctactatgtcctggccagttgcaggtactcttatgattgagcctactgaaagtgaatcaagagaagaattagata

SEQ ID NO: 220032 - DNA, 967 bp, Unknown
  Bacterial polypeptide expressing nucleotide sequence isolated from the Sargasso Sea
cggttggtatactgcttatacgccatatcaacctgaagtctctcaaggtcgtttagaaatgctaatgaactttcaacagatgataattgatttaactggattagatattgctaatgcatctttattagatgagagtactgcagcagcagaagctatgatgatggcatacaagattaagaaaaataaacagcagaccttttgtattcaaaactcttgtcaccctcaaactttatcagttttaagaacaagagctcatcctcttggaataacaattatagaaggtaaaccaaatgaagatacttttggctgcttgatacaaaatcctgatacttacggagaaattgaagatttagacacacttattaaaagtaataaatctaaggaaattgtatccattgttgctgcagatattatgagtatggttgttatgaaatctccaggttcctatgatgctgacattgttataggcagttctcaacgttttggagttccgatgggattgggagggcctcatgcagcattttttgcaacaaaagatgaatttaaaagattaatgccgggtaggttaataggtgtgtcagttgatagaaacaataaaagatcttacagaatggctcttcaaactcgtgaacaacacataagaagagaaaaagcaaccagcaatatttgtactgcccaagctttattagcaataattgccgcagcctatgctatttatcatggaccaaaaagattaataaatattgcatctactgtaaatcacaatactagatatcttaaaaaatcattagaaaaattagaatataaaattaaatctaataaatattttgatacaatagtcattgaagacgctaaagctagagactggtttaataaatctgtgaaagagggaattaattttagactaattaacaacacaacattttcaatcacgattgatgaaactacaactttagaagacatcgat

SEQ ID NO: 220033 - DNA, 433 bp, Unknown
  Bacterial polypeptide expressing nucleotide sequence isolated from the Sargasso Sea
aatgttaccaaattcagaaaaagattttttaaagagacacattggaccttctaaagaggaccaatcaaagatgttaaaagaattaaactatcaatcattggatgatttaattgacaatactgttccagaaaaaataaagttcaatggtgaactaaatattggtgagtcgaattcagaatatgaggcattaagaaaattgagagcaatttcaaagaagaatcaagtttactcaaattttattggtatgggttattatggaacttatacaccatatgtaattcttagaaatatattagaaaacccaggttggtatacttcttacacaccttatcagccagaggtagctcaaggaagactcgagatgttgttaaactttcaacaaatgattgttgactttacaggaatggatattgccaatgcctctttattagat

SEQ ID NO: 220034 - DNA, 738 bp, Unknown
  Bacterial polypeptide expressing nucleotide sequence isolated from the Sargasso Sea
aatgagaatattattttgtggaattatacaatacccgggaactttaggagatataaaggaccctagtgaagctattagtaaaatacataaacaaaatgggaaagcagtattggtttgtgatttattagcccttgctaaaattaaaacacctgctgaattaggagctgatatagctgtaggaagcacacaacgttttggaattccaatgggttacggaggtcctcatgctgcgtttttcgcgactaaagatgaatacaaaagatcaatgccaggaagaatagtgggtgtttcggtagataggcacggcaacaaagcttacagattggctctacaaacaagagagcaacatataagaagagataaagctacaagcaatatttgtaccgcccaggctctattagcaatagtttcagctgcctatgctgtatatcatggtccaaaaggaattaaaaaaatagcagataccgtttcacaacttgcaaaaagttttgcagataaaataaaacaatctggctatgaactttactcagattatttttttgatactgttactgtaaaaacactagacaaaacagataaaatttataaaaacgctcttgatcaacaagtaaacataagaaaagttaactctcagatgttagctgtttcatttgatgaaagaaaaaatctttatagagctaatcaggtattaaaaatttttaattgttcagaaacaattaaggaaacgactaaggaaac

SEQ ID NO: 220035 - DNA, 929 bp, Unknown
  Bacterial polypeptide expressing nucleotide sequence isolated from the Sargasso Sea
tatgcaaagatttggtattccaatgggttttggtggcccccatgcagcatattttgcttgtagcgaaaaatataaaaggcttatacccggaaggatagttgggcaaactctatctaaaaatggagaaaagtcactaagactagcattgcaaacaagagagcaacatattagaagggaaaaggccactagtaatatttgtactgctcaatctttgttagccataatttcttctttttatactatttatcatggaccctctggattaacgcaaattgctaagagattagttgagttgagaataaatttagaatcaagtttagctgctttaggttttgatattcctaatgggattagattcgatagtgttgatgtttattctgagcactctccgaggatccataatgaagctttaaaaaatggctataacttaagaattttaccgttgggatcaactattgaaaattcaactggctttgggatctctttagatgaacttagtactgaaaaagaaataaaagatattttgactttcatagcaaagcttatagaaaaagaagaagatttagagcatataaaatttgataaagaatttcatcttgaaagtttagctttgagatccagtgcatggatgcagcaagatatattcacaaattacaaaagtgaaactgaattaatgagatatatattccgacttgcagaaaaagatttttctttagtagatgggatgatgccattgggaagctgtaccatgaagttaaattctgcagcagagttaaatccagtctcttgggctaatttatcttccattcatcctttttccccactagatcaaactagaggctattcaaaaattatatctgacctagaaaaatggataagtgagattgttggtttaaaatcagtttctttttcacaaatgcaggctctca

SEQ ID NO: 220036 - DNA, 884 bp, Unknown
  Bacterial polypeptide expressing nucleotide sequence isolated from the Sargasso Sea
gatgagatacatcaaatcacttgaaagaaaagatttatcactaaatcactccatgattgctctcggatcttgcacgatgaaattaaatgctgcagctgaaatgcttcctctaagctggaagagatggaataatattcatccctttgcgcctgagaatcaaaccaatggatacaaactgatgcttaataagcttgaaaaacaactaaatgaaattactggttttcatgctacctcattacaaccaaactcaggtgctcagggtgaatatgcaggtttgatggttataagatcatatttcaaaagtattaatcagaccaatagaaacatttgcataataccttcatctgcacatggcacaaacccagcctcagcaataatggcaggaatgaaggtggtagttgtaggaacggataaatatgggaacatcaacgaggaagaattaaaacttaaagctgaagaacacagtgaaaatttagctgcactaatgattacttatccatcaacccatggagtttttgaatcttcaattaaaagaattaccgacacaatacataaaaatggtggtcaagtgtatatggatggagcaaacatgaatgcacaagtaggcttgacaaacccaaatgaaatcggagcagatgtttgtcatttaaacttgcataaaacatttgcaattcctcacggaggaggtggtccaggagtagggccaatatgtgtcagggaacatttgagtgattttttacctcaaacagataggtcaaatcacaaagagttttctgttaaagccatttcatctgcgccatggggatccgcaatggcttgtttattttcttatggatacatatgtatgatgggttctaaagggctcaaaagagcaacagaaatcg

SEQ ID NO: 220037 - DNA, 744 bp, Unknown
  Bacterial polypeptide expressing nucleotide sequence isolated from the Sargasso Sea
agtatttgaggaaaagataactgatatttgtgaattagttcacaaacatggcggtcaggtctacatggatggagctaatttaaatgcattagttggaatcgctaagcctggaaattttggtccagatgtttgtcatataaacttacacaaaacattctgtattccacatggtggaggagggcctggaatgggacctattgcatgtaaaagacatctacaagcttatcttcctaatcatccagttattgaagattgtggacctacaactggaattggagcagtttcagcggccccttggggtagttcaagtattctatcaatctcttggatgtatattaaaatgatgggatcagaaggattaaagcttgcttctcaagttgcaattcttaacgcaaattatattgctcatagactaaaagatcattttccaattttatacaaaggatctcaaggaaatgttgctcatgaatgtattattgatattagaatgattaaatcagaaacaggtgtaactgaggaagatatagcaaaaagattaattgattttggatttcatgcaccaacaatgtcatggcctgtagctggcactatgatgatcgagccgacagagagtgaaggcttgtcagaacttgatagattttgtgatacattaattaagattaaacaagaaattgaaaaaattaaatcaggtgaatttgataaaattgataatccaattaaaaatgcacctcatacagactctga

SEQ ID NO: 220038 - DNA, 647 bp, Unknown
  Bacterial polypeptide expressing nucleotide sequence isolated from the Sargasso Sea
agctgaacaacattcggaaaatcttggggcacttatggtaacttatccatctacccatggagtatttgaagaaaaaataactgatatctgtgagttagttcataaacatggtggtcaggtctatatggatggagcaaatttaaacgctttagttggaattgcaaagcctggaaattttggtccagatgtttgtcatattaatttgcataaaacattttgtattccacacggcggaggaggaccaggtatgggaccaattgcttgtaaaaggcatttgcaagtttatctacctaatcatccagtgattaaagattgtggaccaacatctggtattggggcagtgtcggcagctccttggggtagttcaagtattctatcaatctcttggatgtacattaaaatgatgggatctgcaggtttaaaacttgctactcaagttgcaatattgaatgcaaattatattgctcatagactaaaagatcactttccaattttatataaaggatcaaatggaaatgttgctcacgaatgtattattgatattagaaatataaaatcagaaacaggagtgaccgaagaagatattgcaaaaagattaatagattttggatttcacgcaccaacaatgtcatggcctgtcgctggta

SEQ ID NO: 220039 - DNA, 745 bp, Unknown
  Bacterial polypeptide expressing nucleotide sequence isolated from the Sargasso Sea
aacacgcttcttcctggggtaattcagcgtaacattcttgaaaacccgggctggtatacggcttacaccccttatcagccagaggtttctcaaggtcgtctggaagctctgctgaattttcagcagatgattatcgaccttacaggcatggagatcgccaacgcttctcttctggatgaggcaaccgcggcagccgaagctatgactttctgcaaacgtgtttcaaaaagcaaaagcatgcgtttttttgcagctgatgattgccacccacaaaccatagatgtgctcaaaacaagggctgaaccaatggacattgaactggtcgtgggtaatttagctgaacagcagcaaactccagacgagtcattattcggtgctcttattcaaaatccaggtacttttggtgacattcatgatattgaagatttaattacaaaatggcatgagttgggaacacttgtaagtgttgcttcagatccgatgagcctcgttttaataaaacctccgggagaatctggagcggatgtagttattgggagtacccaacgatttggagttccaatgggatttggcggtcctcatgctgcctattttgccgcgcgagaaaaaaatatgagaagtgtccccggaagaataatcggagtttcaattgatcgccgggggaaaaccgcactgcgaatggctcttcaaacaagagaacaacatataaggagagaaaaagccacaagcaacatctgtacagctc

SEQ ID NO: 220040 - DNA, 770 bp, Unknown
  Bacterial polypeptide expressing nucleotide sequence isolated from the Sargasso Sea
atgatcccgatttcatggaaagaatttgcagacttttatccttttgttccagttgaacaaatggaaggttttagagatttgtttactgatttaaaaaattggttgagatctataacaggtttttccggtgtttctctacagcctaatgcaggcgcccaaggagaatatgcaggtctaatggttataagaaagtaccacttagatagagatgaagcttatcgtaatatatgtttaatcccaagttcagcacatggtactaatccagcaagcgcacaaatggttggaatgaaagtagttgttgttaattgtgataaagagggaaatgtagatttcgatgatttaaagaaaaaagtagagcaacattcagaaaatctcgcagctttaatggtaacttacccatctacccatggagtatttgaggaaaaaataactgatatttgtgagttagttcataaacatggtggacaggtctatatggatggagcaaatttaaatgcccttgttggagttgcaaagcctggaaattttggtccagatgtttgtcatattaatctgcataaaacattttgtattccacacggtggcggcggacctggaatgggacctatagcttgtaaaaaacatttacaagtttatctgcctaatcatccagtaataaaagattgcggaccagcaagtggaattggagcagtatcagcagctccttggggtagctcaagtattctatcaatctcttggatgtatattaaaatgatgggatcagaaggatt

SEQ ID NO: 220041 - DNA, 358 bp, Unknown
  Bacterial polypeptide expressing nucleotide sequence isolated from the Sargasso Sea
catgtcgtggccagttgctggtacaatgatgattgaaccgactgaaagtgagagtttatctgaacttgatagattttgtgacactttgattagtattaaagaggaaatagatatggtccagacaggcaagtttgataaagttgataaccctattaaaaatgcacctcacactgacattgaattagcttcagatgaatggaaacataaatattcaagagagcaagctgcatatccagcaaaattcttaaaagcaaataaattttggcctccagttgcaagagttgacaatgtatacggagataaaaatattttttgcacttgtccaagtatggatgagtttaaagaagatgcagcttaa

SEQ ID NO: 220042 - DNA, 874 bp, Unknown
  Bacterial polypeptide expressing nucleotide sequence isolated from the Sargasso Sea
tctactcacggagtatttgagtcttcaataaaaagaattacccaacaaatacatgataatggaggtcaagtttacatggatggagctaatatgaatgctcaagttggtttgactaacccatactcaattggtgctgatgtgtgtcatttaaacttacacaaaactttttctataccccacggaggcggcggcccaggtgttggcccgatatgtgtagctaaacatttagtagactttctaccccaaacagatagaaatattaaaaaagaaaatggagttaaagctatttcagcagccccgtgggggtctgcaatggcatgtcttatatcttacggttacatatccatgatggggccagatgggctaaaaaaagctacggaaatagctattttaaatgctaattacattaaaaaaagaatagaaaaagattttaaaatactatatcagggagaaaatggaagatctgctcatgaattaattattgattgtagagattttaaagaggaatacggaattgatgttatggatattgctaaaagactcatagattatggatttcatgcaccaactgtgtcattccctgttgcaggaacaatgatgattgaaccaacagagagtgaaaatttagaagaaattgatagattttgtaatgctttaatttcgatcaaaagtgagattttaggttgctcaaaagatgatgattctaacttattaaaaaactctccccatactcaaaacacactaacaagtgatatatgggagtttaaatattcaagagaacaagctgcttatccaatttcttatttaaaagaaaataaattttggccagcggttacaagaattgacgaagcttttggagatagaaatctaattt

SEQ ID NO: 220043 - DNA, 745 bp, Unknown
  Bacterial polypeptide expressing nucleotide sequence isolated from the Sargasso Sea
aatgattgatgataattcaaaagaattcataaaaaggcacattggaccttcagatgatgagcagtcaaaaatgcttaaacatgtaggatatagttcgcttgaagatttaatgaaaaatactgttccagaaaaaattttattaaaaaatgatcttaatatagatgagccgttatctgaaaatgatgccttaaaaaaattaaaatctatatctaaaaaaaataaaatttttaaaaattttattggtatggggtactataattccattactccaaatgtaattttaagaaatatcttagaaaatcctggctggtatacttcttatacaccttaccaacccgaagtagctcaaggacgtcttgaaatgcttttaaattttcagcaaacaattattgatcttacaggaatggatattgctaacgcttctttactagacgaagcaactgctacagcagaagcagtcggcttatctcaaagattagataaaacaaatgcaaaaaaaatatttatttcaaataattgcaacccacagacaattgatcttattaaaactcgtacaaagccttttggattagaacttattattggcgatgaaaaaaaggtgttatcaaatattaatcaagatattatttgtggagttttagcctatccaggaaccctaggtgagataattgatcccagcgaaagcataagtcaaattcataaaagaaatggaaaagcaattttaatatgtgatttattatcttta

SEQ ID NO: 220044 - DNA, 480 bp, Unknown
  Bacterial polypeptide expressing nucleotide sequence isolated from the Sargasso Sea
aatgattaataaaaacagcttttcaagcagacatattggtccccgaaatgaagacattgaaacaatgttaagaactgttaattgttcttcattagatgacttaattaaaaaaactgttccaaaaaatattttatttgaatctaatttaaatttaaagcctggaatgagtgaagaatttaataaaattaatttacagctcttatcaataaaaaataatttttctaaaacatacattggtttaggttattatggaactattacacctagtgtattgctaagaaatattttagaaaatcctggttggtatacagcttatactccatatcaacctgaagtatctcaaggtagattagaaatgttaatgaattttcaacaaatgattattgatttaacaggaatggaaatagctaatgcatctttattagatgaaagtacagcagcagctgaagctatgatgctagcttatagacaaactggtaa

SEQ ID NO: 220045 - DNA, 921 bp, Unknown
  Bacterial polypeptide expressing nucleotide sequence isolated from the Sargasso Sea
tgttgtctaattccggactcagctcatggaactaatccagcaagtgcccaaatgtgtgggatgaaagtggttgtggtcaattgtgacgacgatggaaacgtggacatagacgatcttaaaaataaagctgaaaaacactcaaaagatttagctgctttaatggttacttacccctctactcatggagtatttgaagaaaaaatcatggatatttgtgaagttattcataagcatggcggacaagtttatatggatggagccaatctaaacgcacttgtgggtgtcgcaaaaccaggaaaatttggacctgatgtctgtcatattaatttacataaaacattctgcatacctcacggcggaggtggaccaggaatgggaccaatcgcttgcgctaagcatctagcagattttttaccaacacatgaaattattaaagaggcaggtcctaagaatggaatgggagctgtatcagctgcaccctggggtagttcaagcatacttccaatatcctggatgtatataaagatgatgggcgctgaaggattaaaaaaagcctcacaagtttcaattttaaatgcaaattatatttcaaaaaaattatccaaagattacaaagttctttatactggtaaaaatggaaatgttgcacatgagtgcataattgatatccgaccaataaaagcaagttcaggaatctctgaggaggatttagcaaaaagactgattgactttggctatcatgctccaacaatgtcatggcctgttgctggtacaattatgattgagccaactgaaagtgaaaatttggaggagattgataaattttgtaatgcacttataaaaattaaaaaagaaattaatttagtggagtcatcaaagtttgacaaaatagataacccgctaaaaaatgcacctcatact

SEQ ID NO: 220046 - DNA, 550 bp, Unknown
  Bacterial polypeptide expressing nucleotide sequence isolated from the Sargasso Sea
ctcggcggcgatcctgtcggcgaactatatggcggcgcggcttttctcgcattacccggttctctacaccggggccaacggacgggtggcccatgaatgtatcatcgacatccgcggcatccaggagcggtccggcatttccaacgaggatatcgccaagcggctgatcgatttcggcttccacgcgccaaccatgtccttcccggtggccggaacgctgatgatcgagccgacggaatccgaatccatcgccgaggtggaccggttctgcgacgccatgctggccatcgccgaggagatcggcaaggtcgaagcaggcgtctggccggcggatgacaacccgctggtgaacgcgccgcatacagcagccgacctgatgcgcgatgactggacacatccctacagccgcgagcaggcggccaatcccgacggcaaccaacaggccaacaaatactggccgcctgtcagccgtgtcgacaatgcctatggcgaccgcaacctgatctgcagctgccccagcattgatgaatgggaggcggcggccgaatag

SEQ ID NO: 220047 - DNA, 700 bp, Unknown
  Bacterial polypeptide expressing nucleotide sequence isolated from the Sargasso Sea
agctccgtttttagcaaatcattccctgatcaaaataagcggacccgatttgtcaaatagcgcggtctcagcggctccctggggtagtggtgggatactaccaatatcatggatgtacataactatgatgggtagagaaggacttcgtaaagcgacgcaagttgcgatactcagtgctaattatattgctaagaaattagaatcacattacccgattttgtacaaaggtcaaaacgacatggtggctcatgagtgtattattgacatacgtccatttaagcagaattcaggaataagtgaggaagatatagcaaaaagattaatagactatggtttccatgctccgacgatgtcattcccagttcctggtactctgatgatcgagcccacagagagtgaatcacttgaagagcttgatcgatttatagatgcaatggtaaaaataaggggggaaattcagcaaatcgaaactggggcgcttgattcagaaaataatccgcttaaaaatgcaccccacactctaaaagatatagttgatgataactgggatcgaccctattcaatcgccgaagcttgctaccctgcagacaagaacccagccacaaagtattggccgaccgtaaatcgtatcgataatgtttatggagatagaaatttattctgtgcatgccctccaatagagtcatttaaaagcgattag

SEQ ID NO: 220048 - DNA, 901 bp, Unknown
  Bacterial polypeptide expressing nucleotide sequence isolated from the Sargasso Sea
atggaaggagtttcacttccgcatccctttgttcctacaaatcagatggaaggttataagattctttttaaggatttaataaatgatttaaaagaaattaccggatatgacgcagtctctttacaacctaactctggcgcacaaggagagtatgcaggtctaatgactataagaaaatttcataagaataataaacaagaaaatcgtaacgtttgtctaatcccagactcagctcatggaactaatccagctagtgctcaaatgtgtggaatgaaagtggttgtagtcaattgtgacgatgatggaaacgtcgatataaacgatcttaaaaataaagctgaaaaacactcaaaagatttagctgcattaatggttacatatccttctactcacggagtatttgaggaaaaaatcatggaaatttgtgatgttattcataagcacggtggacaagtttatatggatggagctaatctaaatgcacttgtgggtatagcaaaaccagggaaattcggacctgatgtttgtcatattaatttgcataaaacattctgcatacctcacggtggtggcggacctggaatgggaccaatagcttgctctaagcatttagctgattttttaccgacacatgaaattattaaagaagctggtcctaagaatggaatgggatctgtttcagccgcgccttggggtagttcaagtatacttccaatatcttggatgtacataaagatgatgggtgcggaagggttgaaaaaagcttcacaagtttcaatattaaatgcaaattacatttcaaaaaaattatctaaagattataaagttctttatactggcaaaaatggtaatgtcgcgcacgaatgcataattgatattagaccaattaaaagcaagctca

SEQ ID NO: 220049 - DNA, 682 bp, Unknown
  Bacterial polypeptide expressing nucleotide sequence isolated from the Sargasso Sea
aaaacttaaagattttatgccctcccatcatgagaatatcaaaaatgtaggtcctgtatcctcaactgactttggaagtgcaagcattcttccaattagctggatgtatattgtgatgatgggatcaaaaggtttaaaacaagctacaatgactgctattctgagtgcgaattatgttgcaaagcgcctcagtgatcactatcaaatactgtataaaggtgaaaataacttaattgctcacgagtgcataatagatacgcgaccgtttaaagagtcctcaaatattgatgttgatgacatagccaaaaggctgatggattatggctttcatgctcctaccatgtcttggccagttgcaggcactcttatgattgagcctactgaaagtgaatcaagagaagaattagatatattctgtgatgccatgatttctattaggaaagaaatagaagaaattgaaaaaggtaatgaggatccaataaataatattctaaaaaattctccgcatactgtagaagagcttagcagtgataattggcaacataattattctagagaaaaagctgcatatccactggattacttaaaagcaagaaagtattggccgcctgtaaagaggatagacagcgtttacggtgataaaaacctattttgtacctgtccagatatggatgaattttaa

SEQ ID NO: 220050 - DNA, 823 bp, Unknown
  Bacterial polypeptide expressing nucleotide sequence isolated from the Sargasso Sea
cttcagacaagagagcaacacatcagacgtgaaaaagctactagcaatgtttgtacagcacaagctcttttagcagtaatggcctctttttatgctgtaatgcatggtccagatgggttaaaagctattgcacaaaggatccacagaaaaaccgttagattagccaagggattagaagctcatgggttcaatgcggaacaaaaacatttttttgatacgattacaatagacgttggtcctatgcaaaatgtaatccttaaatctgcgattagtgaaggaattaaccttcggaaaataggcaagtccagaattggaatatcattggatgagagaactaggccggctattattgaggcagtatggagatcctttggaataaagcgaaaagataaaaacttaacttcaggctaccgaattccgaatgaattatatagaaataccgatttccttacacatcctatatttcatatgaatagagcggagagtgagatgacaagatacatgcgccgtcttgttgacagagatatagctcttgacagatccatgataccgcttggttcatgtaccatgaaactcaatgcagctgcagaaatgctccctctgtcttggcccgagttttctcaagtccacccatacgctcctaaggaacaaactttaggctatagtacaatgatagataatttgtcaaaaatgttgtgtgacgtgaccggatatgactctatatctatgcagtctaattcaggagcacagggcgagtatgcaggactacttacaattgggcgttaccataaatcacgcggagataacaacagagacatttgtt

SEQ ID NO: 220051 - DNA, 331 bp, Unknown
  Bacterial polypeptide expressing nucleotide sequence isolated from the Sargasso Sea
atgatagagccaacagagagcgagagtttgtctgagcttgatagattttgtgatactttaataaatatcaagtctgaaatagatatgattaagtctggtcagtttgataaagtagacaatcctataaagaatgctcctcatacggatatagaacttgcatcggatgaatgggatcataaatatacaagagagcaagctgcttatcctgctaagttcttaaaaactaataaattttggccaccagttgcaagagtggacaatgtttatggagataagaatatattttgtacttgtccaagtatggatgagtttaaagaagacgcggcataat

SEQ ID NO: 220052 - DNA, 595 bp, Unknown
  Bacterial polypeptide expressing nucleotide sequence isolated from the Sargasso Sea
aatgtcagaatttcagaagaaacatataggtcctcaaaaccatcatattcaagaaatgttatcttttcttgaacaaaaatctcttgaagatttaattaaaaaaattgttccagagactattttagatattgatgaagattctattggtaatgaacaattttctgagaatggtatacttgcacatataaaaaatattggagaaaaaaatcatttatatagatcattaattggacaagggtactatgatacaattactcctaatgtaattttaagaaatatattagaaaatccaggatggtatactcagtacacgccctatcaaccagaaatttcacaaggcaggctcgaagcattattaaactatcaaacgatggtttcagaaatctgtaatcttccaattgcaaatgcatcgttattagatgaaggaactgcagcaagtgaagcaatgttaatgctatacagaaaaaatagaactgaatctaataagtttcttattgatcaagactgttttcaacaaacaattgatgtgattgttgcaagagcagcgcctttagatattgaaattgaaatttgtcattataaagaaatgaatttt

SEQ ID NO: 220053 - DNA, 940 bp, Unknown
  Bacterial polypeptide expressing nucleotide sequence isolated from the Sargasso Sea
aatagaaaaatatgtatcattccaagtagtgctcatgggacaaaccctgctagcgcagttatggctggaatgtctgttgtaattgttaaatgtgatgaaaatggaaacattgatgttgatgacttaaggtctaaagctgaagaacatgcagaaaaccttgcagcattaatgattacatacccttctactcatggagtatttgaagaaagtgtaattgaaattactggaataattcataaaaatggtgggcaagtttacatggacggagcaaatatgaatgctcaagttgggctaacatcacctggaaatattggtgcagatgtatgtcatttaaatttacacaaaacttttgctattcctcacggtggtggtggaccaggaatgggcccaataggagttgctgaacacctagttccttttttacctgggaatccaataataaaaacaggtggagacaaagcaattgaaccaattaatggagctccttgggggagcgccctaattctcataatatcttatggatacaataaattactaggtagcgaaggattaaaaaaatcaacacaatacgctattttaaacgccaactatttaaaagagaaactcgctgaccattatgatgtgttgtatactggaaacaatggcagggtggctcatgaaatgattttagattgtagagattttaaaaaaacagctggagttgaagttgcagatattgctaaaaggctaatcgattatggatttcatgcacctaccgttagtttccctgtagcaggcactttaatgattgaacccactgaaagtgaatcattgaaagagttggaccgttttgctcatgctatgatagccataaaaaatgaaattgatgaaattgcttgtggcgatgctgataaaaacgacaatgttttaaaaaatctccgcatacttcatcgttattaat

SEQ ID NO: 220054 - DNA, 937 bp, Unknown
  Bacterial polypeptide expressing nucleotide sequence isolated from the Sargasso Sea
aggatggcgctgcaaacccgtgagcaacacattagaagagacaaagctacaagtaacatttgcaccgcccaagtgcttcttgccgttatagccggcttttacgctgtatatcatggccctgaaggcttaaaacaaattgccagtaggatacatttttttacgcaaatttttgcaaattaccttacaaagcttaattataaaattgtaaatcatagctatttcgacaccctgaaaatatatactccaggtaaggctaaaaatttagctagaaaagctgaaaagcaccgaattaatattcgtgtatttggagataatcacgtgggaatttcttttgatgaaacaacatcccaagaaatcttattttctttgttaaaaattttcaatgatgagagaagttttaaaattgattttaataaaaaaataaatgaagtaattccgcgagcttgtataagatcaacgcagtatttaggtcacccaatatttaataaattccgttcagagactgaaatgcttcggtacattcgttggctctctactagagatatagcattagatcagagtatgatacctcttggatcctgcacaatgaaacttaactccacctcagaaatgatgccagttagttggaaaacttttagctctatacatcccttcgcccccctgcatcagacgaaaggatatcaaaaattattcagagaactagaaaatatgctaaaagagactaccggatttgcagcaatttcattacaaccaaacgctggatcccaaggggaatttgcaggtttaatgactataagaaagtatcatgataagatcggccaaaatcatcgaaatatatgtttaattccctcaagcgcacatggcactaatccagcgagtgcagttatggctggcatgaacgtaattgttattgactgcgactcaaaccgggaatatc

SEQ ID NO: 220055 - DNA, 883 bp, Unknown
  Bacterial polypeptide expressing nucleotide sequence isolated from the Sargasso Sea
gcttgtggatcaattaatccaaattaccggatttgatgctatatcaatgcagcccaattcgggtgctcaaggggagtacacaggtttgctgttgattcatcggtaccagatccatcgaggcgaaggccaaagaaacatctgcctgataccgagttctgcacacgggactaatcctgccagcgcgatgatggcatccatgaaagtcgtcattgtccaatgtgatgaagagggcaacattgacttggaagatcttgaggcaaaagcacaaaaacattcatcagaactttcagctttgatgattacttatccgtccacccacggtgtttttgaagaaacgctgaccaagatttgcgatatcatccatcatcatggtggccaggtttacatggatggtgcaaatctgaatgcccttgtcggcatagcccagcccggaaaaatcggtcctgatgttttgcacatgaacctccacaaaacattctgcattccccatggtggcggaggtccgggaatggggccgattgggtttaaaaaacatctcgctccttttgctccaagtcatgcggtttgcccggtgccaggtgtccctgaagaaaacagtgcggtttctgcagcaccttatggaagtccggggatccttccaatttcctgggtttatatcaaattgatgggaggtccaggtctcttgaaagctaccaaggttgcgattctgaatgcaaattacattgcatcaagagtcgggaaacatttcccggtggtctatactgggaacaatggtcgggttgcccatgaatgcattatcgacgttcggccttttcgggagacagccggaattaccgaagaggatgtggcaaaaagattgatcgattatggttccactctccaa

SEQ ID NO: 220056 - DNA, 506 bp, Unknown
  Bacterial polypeptide expressing nucleotide sequence isolated from the Sargasso Sea
aggttactaccctgttttgtaccgcggtgatagcgggtatcatgcccatgaattcattattgacataaggcccattaaagatgcttcaggtattaatgaagaggacattgcgaagagactaatggactacggatttcatgctcctactatgtcttggccagtcccagggaccatgatgatcgagccaacagagagtgaatctaaacctgaactagatcgatttattgaggctatgatatcaataaaaaaagaaatagataatgttacttctggtgaatttgaccctactgataatcctttaaaaaatgccccacacacagcagaacatgccctgtcagataattggtcacatccttactcaagacatatcagttgtttccctatgcattggcaaagtgaatataaatattggccttcagttggaagaatagataatgcttatggagatagaaacttagtatgcacttgtccagctactgatgattatagagatagagaactttgat

SEQ ID NO: 220057 - DNA, 950 bp, Unknown
  Bacterial polypeptide expressing nucleotide sequence isolated from the Sargasso Sea
aatgttacataattctcaaaaagattttatcagaagacatataggtccaaagaaaaaagacgagcaaaatatgttgaatcaacttggatacaaatctttaagcgaattaataaataatactgtaccagaaaaaattttattaaaagactcgttaagcattggtgatcctaattcagagtatgaagctttaagaaaactgaaagcaatttctaaaaaaaatcaaatttattcaaattttattggtatgggttattatgggacttatacaccaaacgtaattgtcagaaatattttagaaaatcctgggtggtacacatcttacactccttatcaagctgaagtagcacagggtagattagaaatgcttttaaattttcaacaaatgattattgattttactggcatggatatagctaatgcttcattgttagacgagggcactgccgctgctgaagcaatgggtttaagccatagattaaataaaaaagatagtaaaatagtttttgtatcaagtgattgtcaccctcaaacaatagatgttgttaaaacaagagcagagccaatgggattaaaagtattagtaggtcaagattcagagctagataaattatctgaagatataatttgtgggattttgcaataccctggtaccttaggagatataaaagatccaagtgagagtattagtaaaattaagaaaaaaaatggtaaagcaattttagcttgtgatttattagctttagcaaaacttaaaactcctgcagagttaggagctgatatagctattggtagttctcaaagatttggaattccaatgggttatggtggaccacatgcagctttttttgctactaaagatgaatttaaaagatcaatgccaggaaggataataggtgtttctgttgatagacatggaaataaagcttataggctggctcttcaaaccgaga

SEQ ID NO: 220058 - DNA, 828 bp, Unknown
  Bacterial polypeptide expressing nucleotide sequence isolated from the Sargasso Sea
tttcaatactgaaaacaaaacgttagacgctaaaaatattgaagaaaatcttgatgaaatttttaaagaagatgatttgctaagaaatgataatatcttaacacaccctatttttaatatttatcattcagaaacagaaatgatgagatatttaaaaaaattagaaaataaagatattgcacttaacagatctatgatacctcttgggtcatgcactatgaagctaaatgctgcttcagaaatgctgcccataactcttccaggatttgctaatgctcatccttttttagaaaagcatcaaagagaaggttataatcaaatgttgagagagttaatttcgatgttaaaagacataactggttttgatgctatatcattacagcctaatgctggagcacagggagagtttgcaggtttacttgctattaaaaaatatcatgaagctaataaacaaggtgatagaaatatatgtttgatacctaatagtgctcatggaacaaatccagcaagcgcacaaatgtgtggtatggaagtttcaatagtaaaatgtgataattttgggaatgttgatttaaatcatttagatgaaaaaattaatgaagctggcaatagattagcagctttgatgattacttatccatctactcatggcgtttttgaagagtcaatttcaattatttgcaaaaaaattcataacgcaggtggtcaagtttatatggatggcgcaaatttaaacgcaatggttggtatcgcaaaacctggaaaatttggtcctgatgtatcacatatgaatcttcataaaactttctgcattcctcatggtggtgg

SEQ ID NO: 220059 - DNA, 847 bp, Unknown
  Bacterial polypeptide expressing nucleotide sequence isolated from the Sargasso Sea
aagtattgttggaatttgtataaaaattcatgatgctggcgggcaagtttatctagatggcgctaattataatgcaatggttggtgtggctaaaccaggtaaatttggacctgatgtatgccatatgaatctgcataagacattctgcatacctcatggaggaggtgggcctggagttggggctataggattaaaaaaacatttagcagattttgctcctggacatcccatgtttaaaaatgaaataggtttaactactcaagaggcagtttctgcagctccttggggcagtgcatctattttacctatttcatattcttatatttctatgatgggtgacgatggtttaaaattagcaactcaagtagcaattttaaatgcaaattatattaaagaaagattaaaaaattattaccctattctatatactggtaagaataatatggtagcacacgaatttattattgatatcaggccatttaaacaagaattaaatatttcagacgaagatattgctaaaagactaattgattatggatttcatgcacctacaatgtcttttcctgttcctggtactcttatgattgagcctactgaaagtgaatcaaaagaggagctagataggttttgtgaagcaatgatttctattcataatgaaattactatgattagagatggtaaatttgataaagtagataatcctattaaaaatgccccacatacaatagaagaggtatcttctgacaattgggatcataaatatacccgtaaagaagcagcttaccctcatgcttatttaataaataataaatactggagtccagttagtagaattgataatgtatat

SEQ ID NO: 220060 - DNA, 775 bp, Unknown
  Bacterial polypeptide expressing nucleotide sequence isolated from the Sargasso Sea
cttagagaaacagcgttaaaaaataaaaaaatgatgagcttaatcggtcaagggtatcacggaactataacaccccctgcaattcaaagaaatgttttagagaatcctgcctggtacacttcctataccccttatcagccagagatttcccaaggacgtttagaagctcttcttaattttcaaacaatgatcagtgacctaactggactggaaatagcaaacgcgtctttacttgatgaagccactgcgtgtgcagaggccatgactatggcaaaaaggataactaaaaacaagtctatcaatttctttgttgaccaagaatgtcatccacaaaatatagaagtcctaaaaacaagagcacaaccactcggattaaacataataattggtgatccggataaagacattaattatgaagattgttttggggcaatattccaatatcctggaacttttggtgcacttagagactttacaaatgtgaccgataaactgcacgaaaagggtgctcttgttacgatttcagcggacccgatgtcgttaactttactaaaagaaccaggttccatgggggctgacatcgcagtgggatcaacacaaagatttggtgttccacaaggatttggagggccccatgccgcttatatggctaccaaagagacttacaagcgctttcttcctggtagaattgtaggtgtttccatagatagtaaaggcaataaagcgtatcgattggctctacaaacaagggagcaacatattaggcgtgaaaagg

SEQ ID NO: 220061 - DNA, 804 bp, Unknown
  Bacterial polypeptide expressing nucleotide sequence isolated from the Sargasso Sea
gtattcaaaatacttgtcatcctcaaactttatcagttttaaaaacaagagctaaacctttaggtataaagattatatttaataatccaaatgaagatacttttggttgtttaattcaaaatcctgatacatatggagaaattgcagatttagattcattaatcaaacttaataaagaaaaagatattttatcaatagttgctgctgatatcatgaatttagttgttatgaaatcacctagaatttttggtgctgacatagtggttggtacttcacaacgctttggtgttcctatgggtttaggtggaccacatgctgcattttttgcaactttagatgaatataaaagaatgatgcctggaaggttaataggtgtatctgttgatagaaataataaaagatcttatagaatggcattacaaactagagaacaacatattagaagagaaaaagccacaagcaatatatgtacagctcaagcactccttgcaataatatctgcatcatatgcaatttaccatggccctgaaagattaaaaaatattgctaataacatccatcaccatacaagatatttaaaaaaatcattggaaattttaggtttcaaaataatttcaaaaaattattttgatacattacttataaattcttcagaagctaaatattgggtcgataaatcaattgagcatggtattaattttagattggtaaatgataaaagttttacattatctttagatgaaacaactacacttcaagaaatagataatctattaatttttttcaacgaaaaaaaatattgat

SEQ ID NO: 220062 - DNA, 898 bp, Unknown
  Bacterial polypeptide expressing nucleotide sequence isolated from the Sargasso Sea
aatccagcgagtgcgcaaatgtgtggtatggaagtttctatagtaaaatgtgataatttaggaaatgttgatttaaatcatttagatgaaaaaattaaagaagctggaaataaattagcagctctaatgattacctatccatctacacatggagtttttgaggagtctatctcaattatttgtgaaaaaattcataatgcaggaggccaggtttacatggatggtgctaacttaaacgccatggtaggaatttccaaaccgggaaaatttggacctgatgtatcacatatgaatcttcataaaactttttgcattccccatggtggtggaggtcctggtatggggccaattggtgttaaatcacatctagaaaattttttacctggacatcccattattcaaaatgaactaggactgacaagtttagatgcagtttctgcagctccgtggggaagccctgcaattttaccaatctcatattcttatatttcaatgatgggtgacgaaggtttaaaacttgcaacacaggtagcaatcctaaatgctaattatattaaggaaaaattaaaaaattacttttcgcttttatattctggcaagaatggaatggttgcacatgaatgtataattgatatcaggcctatcaaagaagagttgaatatatcagaagaagatattgccaaaagacttattgattatggttttcatgcaccaactatgtcttttcctgtacctggaactttaatgattgagccaacagaaagtgagtctaaagaagaaatagatagattttgtactgcattgatatctattcatggagaaattgaaaaagttcgtaatggaacatatgactctgaggacaatccaataaaaaactcacctcatacaatagaagaag

SEQ ID NO: 220063 - DNA, 796 bp, Unknown
  Bacterial polypeptide expressing nucleotide sequence isolated from the Sargasso Sea
aatggctttgagacaaaaagttaatatacgaaaagtgaattctgacatgcttgccgtttcgtttgatgagagaaaaaatgtttatagagtaaatcaattattaaaaatatttaatgcagcagaatcaatcaaaaaagaagatccttcagtaagtttacccaatttaccgaaaaatttattaagagcctcaaaatatttagaacatccagttttcaacttatatcattcagaaactgaaatgcttagatatctaaagaggttggaggataaggatatagcgttaaatagaactatgatagcacttggttcatgtacaatgaaattaaatgctgcagctgaaatgataccaatctcttggaaagaattcgcagagcctcatccgtttgttccgattgaacaaatggaaggatttagagatttatttactgatctaaaaaactggttaagatcaataactggtttttcaggtgtttctttacaaccaaatgcaggtgcccagggtgaatatgcaggtttaatggttatcagaaagtatcacctagatagaggtgaggctaaccgtaatatatgtttaattccaagttcagcacatggcactaatccagcaagcgcacaaatggttggaatgaaagttgttgttgttaattgtgataaagagggaaatgttgattttgatgacttaaagaaaaaagtagaccaacattcagaaaaccttggggcattaatggtaacttacccatctacccatggagtatttgaagaaaaaataattgagatttgtgagttagttcataaa

SEQ ID NO: 220064 - DNA, 496 bp, Unknown
  Bacterial polypeptide expressing nucleotide sequence isolated from the Sargasso Sea
tattttgtacaaaggggcaaaatggggattggtagcacacgcatgtatcatcgacataaggccactcaaagatctagctggtatagaagtggaggatgttgcaaaaagattaattgattatggatttcatgctccaacaatgtcatggcctgtagctggtactttgatgatagaaccaactgaatctgaatctcttaaagaaatagatagattttgcgaggctatgatttgcatcagacaagaaatagaggaaatagctactggcaaagtttcaaatgaggataatctgctaaaaaatgcaccacatacagcaaaaaaactaatcacagaagtttgggatcatgaatacagtcgagaaaaggcagcttatccagttgaaggaatgcagcagaataagtactggccacctattggtagagtagataatgtttatggtgatcgtaatctagtctgcagttgcccgtctatggaagattatgaattagaaactatctaa

SEQ ID NO: 220065 - DNA, 478 bp, Unknown
  Bacterial polypeptide expressing nucleotide sequence isolated from the Sargasso Sea
ttttgtcgcacatgaatgtattttagattttagagatttaaaatccaaaactggtttgagtgtaaatgatttagctaaacgattaatagattatagttttcatgcaccaactataagttggcctgttccagagaccataatgatagagcctactgaaagtgaaagtttggttgaattggatagattttgcgaggctatgctattgattggagatgaaatcaccgaaatagaaaaaaatattgaattaaagaataataatgtaataagtaacgctcctcatacgctgaaagagctaattgctgataattggcattatccttattcaaaagaaaaagcttcatctccttataaaactccaacatctattaagttttggtctgcagtttctaggatcaataatgcatatggtgatcgtaatttaatttgctcttgcaatgtaaatcaaggtgagacttttgaagaaaaaaaatgtgcataa

SEQ ID NO: 220066 - DNA, 668 bp, Unknown
  Bacterial polypeptide expressing nucleotide sequence isolated from the Sargasso Sea
taaagatctgcccaagggaaacactgccgtttctgcagctccatggggcagtccggggatactgcccatttcatgggtatatatccagcttatgggagggcatggactaaagaagtcttcccaggttgcaatacttagtgcaaattacctagccaagcgattaaatgaacacttccccatagtatatacaggaaaaaacggtctggtcgctcacgaatgcataattgacatcagaccgcttaaagccaacacgggaatctctgaagaagacattgccaaaagattgatagactatggtttccatgcaccaactatgtcatggcctgtagctgggaccttgatgattgaaccaactgaaagtgagcctaaagttgagcttgatcgcttttgcgaagccatgatttcaattcgcagagaagcagatcgggtatacaaaggtgagtgggacaaagcagacaacccgcttaaaaattccccgcatcctccagaagaccttacagaccctgaatgggaccattgctattcacaggaaattgctttctatccgctggcctcaattcgccaaaataaatactggcctccttcagcacgtgtggataatgtacatggtgatcgaaatatcttttgtgcatgccccccgctggaaagttatgagggcgaagagtagt

SEQ ID NO: 220067 - DNA, 732 bp, Unknown
  Bacterial polypeptide expressing nucleotide sequence isolated from the Sargasso Sea
ttgctgcatcagaaactttaagtccatacctgcctactcattctttaatggataataatttatctaatagttttaatttcgtatcttctgccaagcatgggagtgcaagtattcttccaataagttggatgtatataaaaatggcaggtcttagtgggttaaggaaagcaacttcgcacgcaattttatctgcaaattatattgcgcattctttaaaacataaattcaagattctctataaaggaaaaaataattttgtcgcacatgaatgtattttagattttagagatttaaaatccaaaactggattgagtgttaatgatctagctaaacgattaattgattatagttttcatgctccaactattagttggcctgttccagaaaccataatgatagagcctactgaaagtgaaagtttggttgaattggatagattttgcgaggctatgctattaattggagaagaaatcagcgaaatagaaaaaaatattgaattaaaggacaataatgtaataagtaacgctcctcatacgctgaaagagttgattgatgataattggcattatccttattcaaaagaaaaagcttcttttccttataaaattccaaaatctattaagttttggtcttcagtttctaggatcaataatgcatatggcgatcgcaatttaatttgttcttgtaatgtaaatcaagatgatactttagaagaaaaaaaatgtgcttaaa

SEQ ID NO: 220068 - DNA, 807 bp, Unknown
  Bacterial polypeptide expressing nucleotide sequence isolated from the Sargasso Sea
ttggtttagaacttttaattggcaatcaaaaagattatttgaaaaatttaaatggagacttgatatgtggagtcctagcatatcctgatactttaggtgaaatagtagatccaagtgaatcaataagtctgatacataaaaaaggtggaaaagccattattgtttgtgatcttctatctttagcaaaattaaaaacacctgcagaactaggagcggatattgcagtgggtagcgcgcaaagatttggggttccaatgggatatggtggaccacatgcagctttttttgctacaaaagatgaatttaaaagatcaattccaggaagaattattggagtatccgtagataaatttggcaaaaaagcatacagattatctcttcaaacacgcgaacaacatataagaagagataaagcaaccagcaacatctgtaccgctcaagctcttttagcaatagtatcagcagcatatgcagtttatcatggacctaatggaattttagaaattgcaaacagaacatccaagttggctaaattgtttgcagataacataaaaaattcaggttttgaactccatacgaataatttttttgatactgtaacaattaaaacaaacaacaaaactgaagaaatttataaaaaagccatctcagaaaaagtcaatttaagaaaaataaatgataaaattttatcagttgcatttgatgagtcaaaaagacttgatcatgttaatttgcttttaaagatatttgggataagtaaagatgtaacaaaaacaattgatgtaaatcttgataatcttccataaa

SEQ ID NO: 220069 - DNA, 948 bp, Unknown
  Bacterial polypeptide expressing nucleotide sequence isolated from the Sargasso Sea
tgcattaggttcttgcacaatgaagctaaatgctgttgctgaaatgataccaatttcgtggagagaatttgcagaaccccatccttttgttccaattgaacagatggatggatttagaaatctttttaccgatcttaaaaattggttaagatcaattacaggtttttcaggagtttctcttcaaccaaatgcgggtgctcaaggcgaatatgcaggtttaatggtcataagaaaatatcatatggaaagaggagaaagtaatagaaatatatgtttaattccaagttccgctcatggaacaaacccagcaagtgcacagatggttggcatgaaggttgttgtagtcaattgcgataaagaaggaaacgtagactttgaagatttaagaaaaaaagccgaaattcattctgaaaacctcggtgctttaatggttacttatccctcaacccatggtgtttttgaagaaaaaattatagacatatgtgatttaatacataggcatggtggacaagtttatatggatggtgcaaatttaaatgcacttgttggaatagcaaaaccaggaaactttggacctgatgtttgtcatataaacttacacaaaaccttttgtatccctcatggtggtggcggaccgggcatgggaccaattgcatgtaagagacatttggaaatctatttacccaatcatccagtagtaaaagattgtggtccagcaactggaataggtccagtatcagctgcaccatggggaagctcaagtattttatcaatttcttggatgtacattaaaatgatggggtcggaaggtcttaagcatgcaactcaaattgctattttaaatgcaaattatttagcaaataaattaaaagatcattatccaatattgtataaaggagctaatggcaatgttgctcatgaatgtataattgacataagatctattta

SEQ ID NO: 220070 - DNA, 877 bp, Unknown
  Bacterial polypeptide expressing nucleotide sequence isolated from the Sargasso Sea
atttttcatagcattaattctgagacagaaatgcttaggtatatcaataagttagaaaaaagggatctctccttaaactatagtatgataccgttaggatcttgtactatgaagctgaatgcaactgttgaaatgattccaattagttggccagaatttaattctattcaccctttttctccattaaatcaggctaaaggttataaaaaaatcattaatgaactagaagaaatgttatataaagttactggatttgatgctgtatcatttcaaccaaattctggcgctcaaggagaatatgctggactactaagtattagagaatatcataaagcaaataattcaaaaagagatatttgtttaatacctgaatcagctcatggaacaaatccagctagcgccataatggcaggacttaaagttgtaatagtaaaatgtgatgatcatgggaatatagattatgaagatttaagtaaaaaagttgatgaagctggtgatagactatcatcattaatggtgacttatccatccacacacggtgtatttgaacataacattgatgaaatatgtaatttaattcatgaaaatggtggattggtctacatggatggagccaacttaaacgctatggttggtgtatgtaaaccgggcaagtttggagctgatgttatgcatataaatctccataaaactttttgtataccacacggtggaggtggtccaggtatgggtccaatttgcgtgaatgaaaaattaaagcctcatcttccaaaacatagtttcactgatgaagatttttcctactctgtatcttcatcgccatttggtagtgcaagtattctgttaatttcttatatctatatgaaattgatggcag

SEQ ID NO: 220071 - DNA, 981 bp, Unknown
  Bacterial polypeptide expressing nucleotide sequence isolated from the Sargasso Sea
agaggtgaagaaaatagaaacatatgtttaataccaagttcagctcatggtaccaatcctgctagtgcgcaaatggtaggaatgaaagttgttgttgttgattgtgacaaagaaggaaatgttgattttgaggacttaaagaaaaaagcagaaatgcattctgaaaatcttggagcattaatggttacttatccgtctactcatggagtattcgaagaaaaaattacagatatatgtgagttaattcataaacacggtggccaagtttatatggatggtgcaaatttaaacgcgcttgttggtatagcaagacctggaaattttggtccagatgtttgtcacataaacttacacaaaacattctgtattccacatggtggtggaggaccaggaatgggaccaattgcatgtaaaagacatttacaagtttatttgcctaatcatccagttgttaaggactgtggacctgctacaggaataggagcagtttcagcagcaccttggggaagttcaagtattttatcaatttcctggatgtatattaaaatgatgggttctgaaggtttaaaattagctactcaaattgcaatactaaatgcaaattatatagctcatagacttaaagatcattacccaattctatataaaggttcaaacggtaatgtagctcatgaatgtattattgatattcgatctattaaaactgaaacagggattaccgaagaagatatagctaaaagattgatcgattatggttttcatgcaccaacaatgtcatggccagtagcaggcacaatgatgattgaaccaactgaaagtgaaagcttatccgaactagatagattttgtgatactttgattagcattaaatcagaaatagatatgatcaaatcaggaaaatttgataaagttgataatccaattaaaaatgcacctcatacagatattgaattagcttcagatgaatggagtcataaatat

SEQ ID NO: 220072 - DNA, 801 bp, Unknown
  Bacterial polypeptide expressing nucleotide sequence isolated from the Sargasso Sea
gaaattcggacctgatgtttcgcatatgaatcttcataaaacattttgtattccccatggtggtggaggtcctggtatggggccaattggtgttaaatcacatttagaaaattttttacccggacatcccattgtacaaaatgaactaggactgactagtttagatgcagtttctgcagctccttggggcagtccatcaattttgccaatttcatattcatatatttcaatgatgggtgatgaaggattaaaacttgcaacacaggtagcaatcctaaatgctaattatattaaggaaaaattaaaagaatacttcccacttttgtattctggaaaaaacggaatggttgctcatgaatgtataatagatattaggcctatcaaagaagagttgaatatatcagaagaagatattgccaaaagactgattgattatggttttcatgcaccaacgatgtcttttcctgtacctggtactttaatgattgagccaacagaaagtgagtcgaaagaagaaatagatagattttgtactgcaatgatatctattcacaaggaaattgagaaagttcgtaatggaacctatgactccgaagacaatccaattaaaaactcacctcatacaatagaagaagtatcatctgatgagtgggatcataaatattcaagatcagaagcagtatttcctcactcatatctttataataataagtattggtcaccagttgcaagaattgataatgtttatggtgacagaaatcttttttgtgtatgtccgcctattgaagattatgaagacgt

SEQ ID NO: 220073 - DNA, 535 bp, Unknown
  Bacterial polypeptide expressing nucleotide sequence isolated from the Sargasso Sea
aaatgcaaactacatagcaaatagattaaaagatcattttccaatcctttataaaggttctaacagcaatgtagcacatgaatgcattattgatataagatcaattaaaagcgaaacaggtatttcagaagaagatatagctaaaagattgatagattatggatttcatgcaccaacaatgtcatggccagttgccggtacaatgatgattgaaccgactgaaagtgagagtttatctgaactggatagattttgtgacactttaattagtattaaagaggaaatagatatggtccagacaggcaagtttgataaagttgacaatcctattaaaaatgcacctcacactgacattgaattagcttcagatgaatggagtcataaatattcaagagagcaagccgcatatccagcaaaattcttaaaagcaaataaattttggcctccggttgcaagagttgacaatgtatacggagataaaaatattttttgcacttgtccaagtatggatgagtttaaagaagatgcagcataa

SEQ ID NO: 220074 - DNA, 898 bp, Unknown
  Bacterial polypeptide expressing nucleotide sequence isolated from the Sargasso Sea
aatgttacataattctcaaaaagattttttaaaaagacacattggaccttcagatgaagatcaaaataaaatgcttaagaaacttaattataaatcactagatgatttaataaaaagcacagttccagaaaaaatccaattgaaagatgaattaaatattggtgactcaaattcagaatatgaagcattaagaaagttaaaagcaatttcaaaaaaaaatcaaatttactctaactttatcggaatgggttactacggcacttatactccgtatgtaattctaagaaatattttagaaaatccaggttggtatacttcatacacaccttatcagcctgaggtagctcaaggaagattagaaatgctacttaattttcaacaaatgatagttgattttacaggaatggatatcgcaaatgcatctttattagatgaaggaacagcagctgcagaagctatgggattaagtcatagattaaataaaaaggacagcaatttagtttttgtatcagaaaattgtcatccacaaacaatagatgtaatccaaacaagagcagaaccaatgggattaaaagtacttgttggtgatgaagataaaatattagatcaattaaaagaagatttgatttgtggtatattgcaatatccaggaacactaggaaatataaaaaatccaagtgaagcaataagtaaaattcataaaaaaaatggtaaagcaatattagcttgtgatttattagcacttgctaagttaaaaacaccaagagaactaggagcagatattgctgtaggaagctcccaaagatttggaattccaatgggttacggtggtccacatgcagctttctttgcaactaaagacgaatacaaaagatctatgccaggaagaattgtcggt

SEQ ID NO: 220075 - DNA, 997 bp, Unknown
  Bacterial polypeptide expressing nucleotide sequence isolated from the Sargasso Sea
agcaaagtgaagagtcaggtgtttttcgtatcaagggactgcctgccgcaaactattgatgtaataaagacgcgcgccaagccgataggcgtgaaagttatagtgggagatcatcgcacagatctcgctaagatcaatgcatttggggtgctattacagtatccagatgccggcggcgctattttagactataggcaaagtatcgagcaggttcatagtaatggtggactagtagcgatggcagcggaccttctcgctcttgtcctgcttaaatcaccaggtgaattgggagcagacgtcgctatcggttctagccaacgctttggcgtgccaatgggttttggtggtccacatgccgcatatatggctacaaaagattcttttaaacgcgccttgcccggtcgtatagtaggagtctcaatcgacagtcacggtgccaccgcctaccgtctagcgctgcaaactcgagagcagcatatccgtcgcgataaagcgacgagtaatatatgtacagctcaggtgctattagcggtgatgtccagcatgtatgccgtctaccatggccccaaaggtcttcgtaacatcgccctcagggttaaccacatgacacggatatgcgcgagtggccttgctagacttggttactattgcaacttcgacacatttttcgacacattagtgctttctaccgacgacaaaactgaggctattctctcggccgcaaaagcttgcaaagttaatcttcgtgaaattgatgcttcgcatattggtttatcgctcgacgagacctccggattcgcagaactagagctgctatggaccatcttcgcgcttgggcaaaacatcggatttacggcagcgcaacttgaaagcacgctcaaaccatctattccctctgagctgcttcgtcaagacaagatcctgacacatgaaagtttccaaaaatatcattcagaaaccgagatgatgcgctacctgcgccgtctggctgacaagg

SEQ ID NO: 220076 - DNA, 841 bp, Unknown
  Bacterial polypeptide expressing nucleotide sequence isolated from the Sargasso Sea
atggtaacttacccatcaacccatggcgtatttgaggaaaaaataaaagatatatgtgaagtaattcatgaacatggtggtcaagtttatatggatggagcaaacctaaacgcacttgttggagttgcaaaaccaggaaattttggtcctgatgtttgtcatataaatttgcataaaacattttgtattccacatggtggaggaggacctggaatgggacctatcgcatgtaaaagacatttacaagtttatctgcctaatcatccagtcgtaaaagattgtggacctgcaagtggaataggtgctgtttcagcagctccgtggggaagctcaagtattttatcaatttcttggatgtacattaagatgatgggatccgaaggtgtaaaacttgcaacacaaattgcaatcctaaatgcaaattacatagcaaatagattaaaagaccattacccaattctttataaaggttcaaatggtaatgttgctcatgagtgtattattgatattagatcaattaaaagcgaaacaggtatttcagaagaagatatagctaaaagattaattgattatggatttcatgcgccaacaatgtcatggccagttgctggaacaatgatgattgaaccaacagagagtgagagtttatctgaactggatagattttgtgacacattgattagcattaaagaggaaatagatatggttaagtcaggtaagtttgacaaagtagataaccctattaaaaatgcacctcacaccgatattgaattagcttcagatgaatggaatcataaatattcaagagagcaagctgcatatcctgcaaaattcttaaaag

SEQ ID NO: 220077 - DNA, 818 bp, Unknown
  Bacterial polypeptide expressing nucleotide sequence isolated from the Sargasso Sea
gttgctcaaggaagacttgagatgttattaaactttcaacaaatgattgttgactttactggaatggatattgctaatgcgtctttattagatgagggtacggcagcagcagaggctatgggtctaagtcacagattaaataaaaaagatagcaacctagtatttgtatctgaagattgtcatcctcaaacaataaacgtaattcaaacaagagctgaaccaatgggtttaaaagttttggttggtaaagaagatgaagttttagaccaattaaaagaagatttagtttgtggaattttacaatatcctggaactttaggagatattaaagacccaagtgaagcgattagtaaaattcataaaaagaacgggaaggctgtattagcttgtgatttgttagcgttagcaaaattaaaaacgccaagagaacttggtgccgacatagcagttggaagctcccaacgatttggtattccaatgggatacggaggtccgcatgcagccttttttgcaacaaaagatgagtataaacgatcaatgccaggaaggattgttggtgtatcagttgatagacatggtaataaagcatatagattatccttacaaactagagagcaacacatcagaagagataaagcgacaagtaatatttgtactgcccaagctttactagcaattgtgtcagcagcctatgctatttatcatggtccagatggtattaagaatatttctgaaagagtatctcaattagcaaaaagttttgctgataaaataaaacagtctggatatgaactttattctaattatttttttgacac

SEQ ID NO: 220078 - DNA, 715 bp, Unknown
  Bacterial polypeptide expressing nucleotide sequence isolated from the Sargasso Sea
atgacccagtcactgtttgaactcgagcaaaaaaccgatttcatccgccgtcatatcggcccgggtgaggaagaactgcgggccctgctcgccaccgtgggtgccgagagcctggacgatctgattgagcagacggtccccgccgccatccgtcgtccggggccgcttggtatcggcgcccccatgaccgaagtggaggccctggccaagctcaagggctatgcggccaagaaccagatcgccaagagctacatcggcatgggttaccacgacacccatgtgccccacgtcatcctgcgcaacgtgctggaaaacccgggctggtacaccgcctacaccccctatcagcccgagctggcccagggccgtctcgaagccctgctcaacttccagcagctcaccctggatctcaccggcatggatctggcgagcgcctccctgctcgatgaagccaccgccgccgccgaagccatggcgctggccaagcgcatggccaaatccaaatccaacctcttcttcgtggccgacgatgttcacccccaggtgatcgacgtggtcaaggagcgcgcggtccacttcggtttcgaggtggtggtcggccctgcgggcgaggccgtgagcgaagaggtgttcggtgccatgttccagtacccgggcaccaccggcaatgtggccgatctgcgttccctcattgccgccgtccaggcccagaagg

SEQ ID NO: 220079 - DNA, 640 bp, Unknown
  Bacterial polypeptide expressing nucleotide sequence isolated from the Sargasso Sea
acaccttgaagaatttgcaccaggtcatccagtatttaaaaacgaaataggcttatctgaacaggatgctgtagcagctgccccatggggaagcgcatctatattaccgatatcatattcgtatatatctatgatgggtgatgatggattaaaactagcaacacaagtagcaatattaaatgcaaattatattatgaaaagattgagtgaatattatcccatattatataaaggaaaaaatggaatggtagcgcatgaatttattattgatataagaccatttaaacaagaaattaatatttcagatgaagatattgccaaaagattgattgattatggctttcatgctccaacaatgtcctttcctgtacctggtactcttatgattgagccaacagaaagcgagtctaaagaagagctagatagattttgtgaagcaatgatttctatacatggagaaattgaaaaaatcagaaatggctcttttgataaagttgacaatccaatcaaaaatgctcctcacacagtagaggaaatatcatctgatgaatggaaacattcttatacaaggaaagaggctgcttaccctcattcttatcttttaaacaataaatattggagtcctgtaagtcgaattgat

SEQ ID NO: 220080 - DNA, 931 bp, Unknown
  Bacterial polypeptide expressing nucleotide sequence isolated from the Sargasso Sea
aattcagaatatgaggcgttaagaaaattaagagcaatttcaaaaaaaaatcatgtttactcaaattttattggaatgggttattatggaacttatacaccatatgtaattttaagaaatattttagaaaatccaggctggtatacatcatatacaccttatcagcctgaagtagctcaaggaagacttgagatgttattaaactttcagcaaatgattgttgattttactggaatggatatcgctaatgcttctttattggatgaaggtacagcagcagcagaagccgtgggccttagtcatagattaaataaaaaagatagcaatttagtttttgtatctgaggattgtcatcctcaaactataaatgtaattcaaactagagctgaaccaatggggttaaaagttttagttggaaaagaagatgaagttttagaccaattaaaagaagatcttgtttgtggaattttacaatatcctggaactttaggaaatattaaagacccaagtgaagcaattagcaaaattcataaaaaaaacggtaaggctgtattagcttgtgatttattagctttagcaaaattaaaaactccaagagaacttggtgctgatatagcggtaggaagctctcaacgatttggaatcccaatggggtatggaggtccacatgcagcattttttgcaactaaagacgagtataagagatcgatgcctggtagaatcgttggagtgtcagttgatagacatggtaacaaggcatacagattatctttacaaactagagagcaacacatcagaagagataaggcgacaagcaatatttgtactgcacaagctttattagcaattgtttcagcagcatatgctatttatcatggtccagatggaattaaaaatatttctgaaagagtttctcaattagcaaaaagtt

SEQ ID NO: 220081 - DNA, 865 bp, Unknown
  Bacterial polypeptide expressing nucleotide sequence isolated from the Sargasso Sea
cagttaaaagaggatattgtttgtggaattttacagtaccctggaactttaggtgatattaaagatcctagcgaagcaataagtaaaattcataaaaaaaatggtaaagcaatcttagcatgtgatcttcttgcattagctaagctaaaaacaccaagggagcttggagctgatattgcagttggaagctctcagaggtttggtattccaatgggttatggtggaccgcatgctgcattttttgcaacaaaagatgaatataaaagatctatgccaggaagaattgttggtgtatcagttgatagacatggaaacaaagcttacagattatctttacaaaccagagagcaacacattagaagagataaggcgacaagtaatatttgtaccgcacaagctttattagcaatagtttcagcagcttatgctatttatcatggtcccgatggaattaaaaatatttctgaaagagtttctcaattagcaaaaaattttgctgataaaataaaacaatctggatacgaattatattcagattatttttttgatacagtaacgattgttactaaagaaaagactgatcaaatttttaaaaatgctttggttcaaaaagttaatattagaagagtaaattcagagatgctagctgtttcttttgatgaaaagaaaaatgtttatagagtaaatcaactattaaaaatttttaatgcagcagaatcaattaaaaaagaagatccaacagtaagcttacctaatttgccaaaaaatttgttaagaacttcaaaatatttagaacaccctgtttttaattcttatcactcagaaacagaaatgcttagatatcttaaaaaattagaggacaagg

SEQ ID NO: 220082 - DNA, 752 bp, Unknown
  Bacterial polypeptide expressing nucleotide sequence isolated from the Sargasso Sea
atttaaaaggaagattccaggcagaattattggattaacaaatgactcaaacaacaatcctgctttgaggatggcacttcaaacaagagagcaacatattagaagagaaaaggcaacttcaaatatatgtacagctcaagtattgctcgcaataatttcttcaatgtatgcagtatatcacggccctgaaggattaaaagctatttcaatgagaatttttaaattaacaaatcaacttgcctcatctcttaaggctaaaggatttgatcttacaggtgattgtttttttgacactataaactttaaagcatcgggctgggaaaaaaacgctgaaaaggaaaagtttaattttagaaaatttgcaaataaaagtgtcggaatttctattgatgaaacaaccactaaagctgatattattaaaatattaaaaatatttaaagtaaatgaactaaaatccgataggaagacgaaaatcaacccctctttagaaagaaaatcatcttttttaagtcatcccgtattcaatagataccgatctgaaacggaaatactccgttacatacacaagctagaggcaaaagatttatctttaaatacgagtatgattgcacttggttcatgtaccatgaaactgaatagcaccacagaaatggaaagtataacatggcctgaattttccaatattcatccttatgctccaacaaatcagagagagggatatagaattttgattgaagagcttaatactcatt

SEQ ID NO: 220083 - DNA, 746 bp, Unknown
  Bacterial polypeptide expressing nucleotide sequence isolated from the Sargasso Sea
tatggatttctctaaacgacatattggacccgatgatagcgatataaataaaatgttgtcatatcttggttttgattccatcgaacacttaataaatgctaccattcctgatggtattcaatttaacgacgacctagatattggtaaatcaattagtgaatatgagtttttgaatacaatcaaaaggattggcaaaaaaaatcaaattgttaaatcatatattggtactggttattatggtacggttaccccaccagtaatacttagaaatattttagaaaatccaggctggtatacagcttatactccttatcaagcagaaatttcgcaaggccgtttagaagcattgcttaattttcaaacaatggtaaccgatatgactggtctcgatatttcaaatgcctccttgcttgatgagtcaacagctgccgcagaagcaatggttttgatgtataggtcattgcgaaatagaaacacttttctagtatccgaccaatgccacccgcaaactattgatgttttgaaaactagatctagaccaattggcataaatcttaaagttttagctacagaagagtttgttttcaacgaagaaacctttggttgtttaattcaatgtccaacgactgatggaaaagtttttagctataaagaattagctaaatctgcacatgattctggcgcttatatcgcagtggctaccgacttacttagccttgcaataattgctgaacccggttcatatg

SEQ ID NO: 220084 - DNA, 835 bp, Unknown
  Bacterial polypeptide expressing nucleotide sequence isolated from the Sargasso Sea
tttggtttcaaaaaattgccatccacaaacaattgacgttttaaagacacgctcagaaccattagatattcatttagtcgttcatgatgaaaaagaacttgtttttaatggaacagaatttggtatgttgctacaatatcctcatacggatggtaacctatgtgattacacaaacttaataaatgaggcaaaaaacaaaaatatatacacttgtttagcaacagatcttctggctcttagcatactgaaaacgcccggtgaaatgaatgcagatgcagctgtagggaacgcacaaagatttggagtccctctgggatatggtggcccacatgctgctttttttgcaacaacagatgaatttaagagaaaaatcccaggtagaatcattggagtatctaatgacagccatggcaatagagctttaagaatggctttgcaaaccagagagcaacatattagaagagaaaaagcgacatcaaacatatgtacctctcaagtattattagctataatgtcatcaatgtatgctgtttacaatggtcccgaaaagattaaacacatagcacacagagtcaacaaactgtgtaaccaattagctgaatcacttaaatcttcaggtattgatctttttcacaaaaaattttttgacacaatcaggtttacaccaaaaaatgattgggagccgctagctgaaaacgcaaagtttaactttagaaaatatgatgatggtagcgtcggaatttccattgatgaagaaaccaaggaacatgatatatttaaaatttgtaaaatatttgatttagtaaaaacagatctgcctcaaataattcactag

SEQ ID NO: 220085 - DNA, 485 bp, Unknown
  Bacterial polypeptide expressing nucleotide sequence isolated from the Sargasso Sea
ttatacaggaaaaaatggacttgtcgcccatgaatgtataattgatatcagaccacttaaagccgacactggaatctctgaagaagacattgctaaaagattgatagactatggtttccatgcacccaccatgtcatggcctgtagctgggacattgatgatcgaaccaaccgaaagcgagccaaaagctgagcttgatcgcttttgtgaagccatgatttcaatccgcatggaagcagatagagtttataagggtgagtgggacaaagcagacaatccacttaaaaattccccgcatcctccggatgatctaacagacacagaatgggatcattgctattcacaagaaaatgctttctacccgctggcctcaattcgccggaataaatactggcctccttcagcacgtgtggataatgtgcatggcgatcgaaatgtcttttgttcatgccctccgatagaaaattacgagggcgaggagtgag

SEQ ID NO: 220086 - DNA, 793 bp, Unknown
  Bacterial polypeptide expressing nucleotide sequence isolated from the Sargasso Sea
gcaggagctcaaggtgaatttgctggtttacttgcaataaaaaaatatcatgagtcaaaaaatgaatttagcagaaatatttgtttaattcctaatagtgctcatggaactaatccagcaagtgcacaaatgtgtggaatggaagtttcaattgttaaatgtgatgattttggtaatgttgatttaaatcatttagaaataaaaattcaagaagcgggaaataaactagctgcattgatgattacttacccgtctacgcatggtgtttttgaagaaacaattacagatatatgtgaaaaaattcacaatgcaggagggcaagtttatatggatggagcaaatctaaatgctatggtaggtatagcaaaacctggcaaatttggaccagatgtatcccatattaatcttcataaaactttttgcattcctcatggaggaggtggtccaggcatgggtcctatcggagttaaatctcatttagagttatttttacctggtcatccaattattcataatgaactaggtttaactaaacttgatgctgtgtcagctgccccttggggcagtccttcaattttaccaatatcttactcatatatttcaatgatgggcaatgaaggtctaaaaatagctacacaagtagcaattttaaatgctaattatataaaagaaaaattaagtagttattttcctctcttatattctggtaaaaatggaatggttgctcatgaatgtataattgatattagaccaataaaggaagagctaagtatatcagaggaagatgtgcaaa

SEQ ID NO: 220087 - DNA, 810 bp, Unknown
  Bacterial polypeptide expressing nucleotide sequence isolated from the Sargasso Sea
tatggaatgcggtcattttaaggaagaaaatttttcaaaaagacatattggtcttaacgaagaagataaaagaaaccttttaaaaaaacttggttatgaaacaatggacaagttcattaatgatgttgtgcctcaaaatataaaaagaagtgcacctatgaaaattgaaaaggagctttcagaaaagcaacttctttcaaaaatcaaagagtatgcatcattaaacaaaactatgatctcaatgattgggcaaggtttttatagtacgcatacaccttcagtacttttaaggaatattctagaaaacccatcttggtatactgcttacacaccctatcaacctgaaattagtcaaggcaggctggaagcattattaaattttcaaacaatgatatcagaaattacttcattaccaatcgcaaacgcttctatgttagatgaatcgacggctgctgccgaagcgatgaccatgtcatttaaactttctaacaacaagaatactgtaattttagacaagtatcttcatccacaaactattaacgttattaagactagggcagaaccacttggcataaatttaataatttcagaaaatccagaaaaagagaaaatcgacaattgttcttgtgttatctttcagtatcctaataccgagggaaaaattaaaaacctcgatgatgagattaaaataattcaaaatgctggaagtatggtaattcttgttgcggatttattatctttagcactaataaaatcacctggtgaaatgggagcagatattgctgttggatctacacaaagatttggtgt

SEQ ID NO: 220088 - DNA, 940 bp, Unknown
  Bacterial polypeptide expressing nucleotide sequence isolated from the Sargasso Sea
agattagagatgctattaaactttcaacagatgattgttgattttactggaatggatatagcaaacgcgtctttacttgatgagggaacagcagctgccgaagctatgggtttaagtcatagacttaataaaagtgacagcaatttagtttttgtttcacagaattgccaaccacaaacaattgacgttattcaaactagagcagagccaatgggtcttaaagtacttgttggaaacgaggataaagttttagagcagttaaaagaagatattgtttgtggagttttacaatatccaggaactttaggtgatattaaagatcctagtgaggccataagtaaaattcataaaaaaaatggaaaagcaattttagtttgcgatctccttgcgctttctatgctaaaaacaccaagagaacttggtgctgatattgcagtcggtagctcccaaaggttcggtattccaatgggttatggaggacctcatgcagccttttttgcaacaaaagatgaatataaacgatctatgccaggtaggattgttggggtttctgtggataggcatggaaaccaggcttatagattgtcattacaaactagagagcaacacattagaagagacaaagctacaagtaacatttgtactgctcaagccttgctagcgattgtttcagcagcatatgcaatttatcacggtcctgatggaattaaaagtatttcagaaagagtatctcaactagcaaaaaattttgcagataaaataaaacaatctggatatgaattatactcagattatttttttgatactgtaactattattaccaaagaaaagactgatcagattttcaaaaatgctttagatcaaaaagttaatattagaaaagtaaattcagaaatgttgtcagtttctttcgatgagagaaaaatggttacagagtaaa

SEQ ID NO: 220089 - DNA, 919 bp, Unknown
  Bacterial polypeptide expressing nucleotide sequence isolated from the Sargasso Sea
gctacaagcaatatttgtactgcccaagcactactcgcaattatttcagctgcttatgcaatttaccacggacctgaaggaattttaaaaatagctaacagaacatcaaaacttgcaaaaatatttgctgatggtttgaaatcagctggctaccaactacattcggaaaatttttttgatacagtcactataagaactaatgaaaaaacagacactataaataacaaagccttatctgaaaaaattaatttaagagttgtagataaaaatactttgtcagtagcattcgatgaagtaaaaagagttgatcacgtaaatactttattaaaaatatttggagttaaaaaaatctttaataatagtgatacagttgagttaactaatttacctccaaatcttttaagaacatctaaataccttacccaccctatttttaacaaatatcattcagaaactgaaatgcttcgttatttaaaaaaattagaagattgtgacattgctttaaatagatctatgattgcacttggatcatgcactatgaagttaaatgctactgcggagcttattcctgtgacctggaaagaattctctttaccacatccctttgtaccccaagatcaaatgaagggttataaggttttatttaatgatttagttaatgatttaaaggaaataacaggttttgatgcagtttcccttcaaccaaattctggtgctcaaggcgaatattcaggattaatgacgatacgtaagtttcatttaaataataatcaaaaaaacagaaatgtatgtttaataccagagtcagcacacggtacaaatccagcaagtgcacaaatgtgtgggatgaaagtagtagttattaattgtgatgaggaaggtaatgttgatttagaagatttaaaagataaagttaata

SEQ ID NO: 220090 - DNA, 604 bp, Unknown
  Bacterial polypeptide expressing nucleotide sequence isolated from the Sargasso Sea
gttacatatccatctacccatggtgtatttgaggaaaaaataacagatatctgtgatttaatacacaaacatggaggtcaagtttatatggatggtgcaaacttaaatgcacttgtaggaattgcaaaacctggaaattttggtccagatgtttgtcatataaacttacataaaacattttgtattcctcatggtggaggaggaccaggtatgggaccaattgcttgcaaaaaacacttacaagtttatctgcctaaccatccagtagtaaaagattgtggtcctgcaactggtataggtgcagtttcagcagcaccttgggggagctcaagtattttatctatttcatggatgtatataaaaatgatgggatcacagggtttaaaattagctacaaaagttgcaatattaaacgccaactatatagctcatagactaaaaaaccattttccaatcttgtacaaagggactaatggaaatgttgctcacgaatgcattattgatataagatcaattaaaagtgaaacaggcgtaacggaagaagacatagcgaaaagattaatagactatggatttcatgcgccaacaatgtcatggcctgttg

SEQ ID NO: 220091 - DNA, 844 bp, Unknown
  Bacterial polypeptide expressing nucleotide sequence isolated from the Sargasso Sea
catgcaaaagaactggctgataaaatttcaaaattgggtcacgagattgtaactaatgataattcattttttgatacagtagttataaaattatcaaatatgagtattgatagtttaaaagataaggcattaaagcataattttaatttaatgtatcatgaaaatggacttattggcatctctttagatgaaaagactgattataatgaagttgaggcgcttgcaaatttattcgatgtaagtaatgattctcaaaatacttataatatttttaaaccaaatagaacaggtgatattttgacccaccctatttttcatagcattaattctgaaacagaaatgcttagatatattaacaaattagagaagagagatctttccttaaactatagtatgataccgttaggatcttgtactatgaagctgaatgcaactgttgaaatgattccaattagttggccagaatttaattctattcacccatttgctccattaaatcaggctaaaggttataaaaaaatcattaatgaactggaagaaatgctctataaagttactgggtttgatgctgtatcttttcaaccaaattctggtgctcaaggagagtatgcagggctattaagtattagagaatatcataaagcaaataattcaaatagggatatatgtttaatacctgaatctgcacacggaacaaatccagcaagtgcaattatggcaggacttaaggttgtaatagtacaatgtgatgatcatggtaatatagattttaaagatttaagtaaaaaagttgatgaagctggtgatagactatcatcattgatggttacttatccatcaacac

SEQ ID NO: 220092 - DNA, 990 bp, Unknown
  Bacterial polypeptide expressing nucleotide sequence isolated from the Sargasso Sea
agaacctcaaagtatttagaacatccagttttcaactcatatcattcagaaactgaaatgcttagatatcttaaaagacttgaagataaggatatagcattgaatagaaccatgatagcacttggctcatgtacaatgaagttaaatgctgctgctgaaatgataccaatttcttggaaagaattcgcggaaccacacccatttgtcccaattgaacaaatggagggatttagagatttatttaccgatctaaaaaattggttgagatctataactggtttttcaggtgtttctttacaaccaaacgcaggtgctcaaggcgaatatgcaggtttaatggttatcagaaaatatcacttggatcgcggagaagctaaccgtaatatatgtttaattccaagttcagcacatggaactaatccagcaagcgcgcaaatggttggaatgaaagttgttgttgttaattgtgataaagagggaaatgttgattttgaagatttaaagaaaaaagcagagcaacattcagaaaaccttggggcattaatggtaacatacccttctactcatggagtatttgaggaaaaaataattgatatttgtgagttagttcataaacatggtggacaagtctatatggatggagcaaatttaaacgctttagtaggagttgcaaaacctggaaattttggtccagatgtttgtcatattaatttgcataaaacattttgtattcctcatggtggaggaggacctggaatgggacctattgcttgtaaaaaacatttgcaagtttatttacccaatcatccagtaataaaagattgtggaccaacaactggtattggagcagtatcggcagctccttggggcagctcaagtattctatcaatttcttggatgtatattaagatgatgggatcagcaggtttaaagcttgcttctcaagttgcaattttaaatgcaaattatattgctcatagattgaaagat

SEQ ID NO: 220093 - DNA, 822 bp, Unknown
  Bacterial polypeptide expressing nucleotide sequence isolated from the Sargasso Sea
atcgcactggatgaagtcacacgcccggacgatctcgacgacttgttttcggttttcaataaaggcagtgagccagctttcaatgcgtgctctctagcggagcaggagagtttgccggtgcttcccgcttgggccgaccgagcatcaccgtatctcgagcatgaggtcttcaacaaatatcattccgaaaccgagatgctgcggtatctgcacaagctcgagtccaaggacctctcgctaaatacgagtatgatcccgctcgggtcatgcacgatgaaactaaatgcgacctcacagatggccggggtaacgtctcctgaagcaggtaagcttcatccgtttgctcctgaggatcaggtagaaggatacaaaattattttcagcgagcttgagcagtggctagcagagattacgggattctcagccacgtcacttcagccgaactccggtgctcagggtgaatacgcgggccttctagtcattcgggcctaccacgaggatcgtaaggatcaccaccgaaatgtgtgcctgattccagcttcagcgcacggtactaatccggcgagtgcggtgatggccggaatgaaagttgttgtagttaaaagtaccgacgatggccaaatagaccttgaagacttgagcaagaaggccagtgatcattccgagaacctcgctgcattaatggtcacatatccatcgacccatggtgttttcgaggaggggatcgtggaggtttgctcgattatccatgagcatggtggcctagtctatttagatggagccaacctgaatgctcaggtcgggctggcacgtcccggagac

SEQ ID NO: 220094 - DNA, 967 bp, Unknown
  Bacterial polypeptide expressing nucleotide sequence isolated from the Sargasso Sea
accatgaagttaaatgcaacctctgagatgatacctgtgagttggccagagttttctaatattcatccttttgccccaaaagatcaactttcaggatactcaaagttagtatctgagatggaagaaatgttagctctacttacaggctattctggcatatcgctacaaccaaatgctgggtcccaaggagaatatgcgggacttcttgcaatagatgcatatcatcaaaataataatgaagctcacagagacatttgtttaattcctaaatcagctcacggaacaaacccagcttctgctcagatggtaggcttaaaagtagttcccgttgattgtgatgaagaaggcaatatagatataaatgacctgaaggaaaaagcatcaactcactctgataacctttcatctttaatgattacttacccttctacacatggtgtatttgagacttcggttacagaggtatgtgaaataattcattcgcatggcgctttcgtttatatagacggagccaactttaatgccatggttgggttatgttacccaggttcttttggtggtgatgtttctcacttaaatttacataaaacattttgtatacctcatggtggaggaggcccgggtattgggccaataggagtggttgaaaagcttaaagaatttatgccttctcatcataatgaaaataaagctgttgggcccgtatcaggtactgattggggaagtgcaagtatcctgcctataagttggatgtatatgaaaatgatgggaactcaaggtcttctagaagccactcaaaatgcaatactaaatacaaactatattgccacaaaactcaaaggtcattatgagatactctataaagggaaggatggtcttgttgctcatgaatgtattattgacataagacccctaaaagagactgcaggaattgaagtagaagatgtagccaaaagacttatagact

SEQ ID NO: 220095 - DNA, 861 bp, Unknown
  Bacterial polypeptide expressing nucleotide sequence isolated from the Sargasso Sea
actggtttttctggtgtttctcttcaacctaatgcaggtgctcaaggtgaatatgctggattaatggttattcgaaagtatcatttagatagagatgatgccaatcgaaacatatgtttaattccaagttcagcacatggtactaatccagcaagcgcactaatggctggaatgaaagtggttgttgttaactgtgacaaagaaggaaatgttgatttcgatgacttaaagaaaaaaacagagcaacattctgaaaaccttggggcattaatggtaacttacccgtctactcatggagtatttgaggaaaaaatatcagatatttgtgagttagttcataaacatggtggtcaagtttatatggatggtgcaaatctaaatgcattggtgggtcttgctaaaccaggaaattttggtccagatgtttgtcatattaatttacataaaacgttttgtattcctcatggagggggaggacctggaatgggaccaattgcttgtaaaagacatttacaagtttacttgcccaaccacccagtaataaaagattgtggaccaacatctggaattggagcagtttctgcagctccgtggggaagttcaagcattttatcaatttcctggatgtatataaaaatgatgggatcggaaggattaaagcttgcaactcaagttgctatattaaatgcaaattatatagctaatagattaaaaaatcactttccaattttgtacaaagggtcaaatggtaatgtggcacacgaatgtattattgatattagaaatattaaatcagagacaggaataaccgaggaagatattgcgaaaagattaattgattacggttttcatgcaccaaca

SEQ ID NO: 220096 - DNA, 865 bp, Unknown
  Bacterial polypeptide expressing nucleotide sequence isolated from the Sargasso Sea
agacaagcaaaacccttggcgtggaaaaggccaaagtctgagcgagaagtcttgtatcatttgagacaaacagcttcaaaaaatgaggtttttaactccttgataggtcaaggttatcatgggacagtaaccccaccagctattcaaagaaatattttggagaatcctgcttggtatacggcttataccccttatcaaccagaaatagcacaggggcgcttggaggcgttacttaattatcaaacgatggtttctgatttgaccggcttggatattgccaatgcgtctttgctggatgaagccactgcatgcgcagagtcaatggtaatggcgcaaagagtttcaaaaaatcagcatgtgaagttttttgttgatgagaattgtcaccctcaaaatatagctgttatgaagacgcgtgccgaaccaattgggattgatatcctggtgggagatccaaaaaatattggcgagaacaccgacctttttggaggtattttccaatttccaggaacttatggacacattaatgacttctcaaggcagataaaatttcttcacgagcttaaaggcataggggtcatatgtgcagatcctctttccttgactttgctaaaagagccaggcgcaatgggagcagatattgcggtaggctctacacagaggtttggtgttccagtgggatttggaggccctcatgcggcctacattgcaactagagacgtttacaagagatctatgccaggaaggattgttggggtatcggttgatagtagaggaaaccgagcttatagattagctttgcaaactagagagcagcatataaggagagaaaaagcgacttcaaatgtatgcaccgctcaagcac

SEQ ID NO: 220097 - DNA, 973 bp, Unknown
  Bacterial polypeptide expressing nucleotide sequence isolated from the Sargasso Sea
ttagaagataaggatatagcctttaacagaacaatgattgccctaggttcatgcactatgaaattaaatgctactgcagaaatgatacctatttcgtggagagaattggcagagcctcatccatttgtaccagttgaacagatggagggatatagagaaatgttcacagatcttaaaaattggttaagatctatcactggtttttctggtgtttcacttcagccaaacgcaggagctcaaggcgagtatgcaggcttaatggtaataagaaaatatcatttagatagaggggatgaaaatagaaatatatgtttaataccaagctcagcacatggaaccaatcctgctagcgcacaaatggtaggaatgaaggttgtcgttgttgattgtgacaaagaaggaaatgttgattttgaggatttaaagaaaaaagcagaaatgcattctgaaaatcttggagcattaatggtcacttatccgtctactcacggagtatttgaggaaaaaattaaagatatatgcgaaataattcatcaacatggcggtcaagtttatatggatggagcaaacttaaatgcacttgttggtgtagcaaaaccaggaaattttggtcctgatgtttgtcatataaacttgcataaaacattttgtattccgcatggtggaggaggacctggaatgggacctatcgcatgtaaaagacatctacaagtttatctccctaatcatccggttgtaaaagattgtggaccagcaagtggaataggtgcagtttcagcagctccatggggaagctcaagtattttatctatttcttggatgtatattaagatgatgggatcagagggtgtaaaacttgcaacacaaattgcaatcctaaatgcaaattacattgcaaacagattaaaagaccattatccaattctttacaagggttcaaatggtaatgtagcacacgaaatgtattattgat

SEQ ID NO: 220098 - DNA, 799 bp, Unknown
  Bacterial polypeptide expressing nucleotide sequence isolated from the Sargasso Sea
gatgtttgtcatataaacttacacaaaacattttgcattccacacggaggtggtggtccaggcatgggaccaattgcatgcaagagacatttagaaatttatttacctaatcatccaattgtaaaagactgtggaccagcaactggcattggaccagtatcatctgctccatggggcagctcaagtattttgtcaatttcttggatgtatattaaaatgatgggatccgaaggtcttaaactcgcaactcaaattgccattttaaatgcaaattatttagcgaatagactaaaagatcattacccaatcttatacaaaggaactaatggcaatgtagctcatgaatgcatcattgatataagatctattaaatcagaaacaggtgttaccgaggaagatattgcaaaaagattaattgattttggttttcatgcacccacaatgtcttggcctgtagctggaactatgatgatagagccaacagaaagtgaaagtttagcagagattgatagattttgtgacactttgataaaaattaaatctgaaataaataaaattaaatctggagagtatgataaggttgataaccctttaaaaaatgctccacatactgatctagaattaacttcagatatctgggatcataaatattctagagaagaagcggcatatccagctaaatttttacgttcaaataaattttggccgcctgtagctagagttgacaatgtttacggagataagaatattttttgcacttgtcctagtatggacgaattcgaagaagatgcagcataga

SEQ ID NO: 220099 - DNA, 794 bp, Unknown
  Bacterial polypeptide expressing nucleotide sequence isolated from the Sargasso Sea
cctgcaccccttcgctccggtggctcaggccgccggctaccagcggttggccgagcagctggaggcctggctcgcagcgctcaccggttttgcagcggtgtccctgcagcccaatgccgggtcccagggggagtacgccgggctgctggtgatccgggcctggcatcgctcaagaggcgacgaccatcgcgatgtctgcctgatccccaccagtgcccatggcacgaacccagccagtgccgtgatggcgggtctcaaggtggtggccgtggcttgcgacgccgacggcaacatcgatcagcaggatctggctgcccgggcagcggagcacgccgatcgcctcgcggccctgatggtcacctacccctccacccatggcgtcttcgagaccggcattcgcaggatttgtgagctggtgcatcgccatggtggtcaggtgtatctcgacggcgccaacctcaatgcccaagtgggtttgtgccgtccaggcgccttcggtgccgatgtttgccatctgaacctgcacaagaccttctgcattccccacggcggtggcggacccggtgttggtcctatcggtgtggcggcccatctggctcccttcctccccggtcatcccttgcaggcttcgccagatcaagccattgggccggtgtctgcagcagctttgggcagcgcgagcatcctgccgataagctggatgtacttgcggatgatggggccggaggccctgcgccaggccacagcggtggcgttgctatccgccaactatctggcccttcgcctggacccgc

SEQ ID NO: 220100 - DNA, 910 bp, Unknown
  Bacterial polypeptide expressing nucleotide sequence isolated from the Sargasso Sea
ctaaactttcaacaaatgataattgactttactggaatggatattgcaaatgcgtccttgttagatgaggggacggcagctgctgaagctatgggtctaagtcacagacttaataaaaaagatagtgatcttgtttttatttctaaagattgtcaccctcagacaatagaggtagtaaaaacaagagctgaacctttgggacttaaagttttaattggagatgatgaagagctaaacaatataaaaaatgatattgtatgtggaattcttcaatatcctggaactatgggagatataaaagatccaagtgaaaatattagtaaaattagaaaaaaaaatggaaaagctatacttgcttgtgatttattatctttagcaaaattaaaaacaccagcagaattaggtgcagatattgctataggtagttcacaaagatttggaattcctttaggttatggaggtccacacgcagcattttttgcgactaaagatgaatttaagagatccatgccaggaagaattattggagtttctgtagatagacacggaaataaagcttatagacttgcattacaaactagagaacaacatataagaagagataaggcgacgagtaatatttgtactgctcaagcactgcttgcaattgtttctgcagcatatgcaatttaccatgggcctaaaggaattaggactatatcggaaagagtctctcaacttgctaaaaattttgctgataaactgaaacagtctggttatgaactttattcagactatttctttgatactgtaacagtgttaacaaaagataaaactgaacaaatatttcaaaatgctttatctcaaaaagtaaatattagaaaagtaaattctgaaatgttagcagtgtcttttgatgaaaagaaaaatg

SEQ ID NO: 220101 - DNA, 847 bp, Unknown
  Bacterial polypeptide expressing nucleotide sequence isolated from the Sargasso Sea
aaatctaaacgcacttgtaggtgttgcaaaaccagggaaatttggaccagatgtttgtcatattaatttacataaaacattttgcataccgcacggtggtggcggaccaggaatgggcccaatcgcttgcgctaagcatctagctgattttttaccaacacatgaaattattaaagaggcaggccctgaaaatggaatgggagctgtatcagctgcaccctggggtagctcaagcatacttccaatatcttggatgtatataaagatgatgggtgctgagggattgaaaaaagcctcacaagtttcaattttaaatgcaaattacatttcaaaaaaattatccaaagattacaaagttctttacactggtaaaaatggaaatgttgcacatgaatgtataattgatatccgaccaataaaagcaagttcaggaatctctgaggaggatttagcaaaaagacttattgactttggctatcatgctccaacaatgtcatggcctgttgctggtacaattatgattgagccgactgaaagtgaaaatttgcaggagattgataaattttgtaatgcacttatcaaaattaaaaaagaaattaatttagtggagtcatcaaagtttgacaaaattgataatccgctaaaaaatgcacctcatacttatgtcgaattagcttctagcgagtggaaacatgcttactcaagagaggaagcggcttttcccactgagtatgtaaaaaacaataaatattgggcaccagttgctagagtagataatgtttttggagatagaaatttagtatgttcatgtccttcaatggatgaatataaagatgaagctgcttag

SEQ ID NO: 220102 - DNA, 865 bp, Unknown
  Bacterial polypeptide expressing nucleotide sequence isolated from the Sargasso Sea
ttaaaaaattggttaagaacaataacgggtttttccggcgtttctttgcaaccaaatgccggtgcccaaggagaatttgctggcttaatggtcattagaaagtttcatgaaaaaaatgatcaaaaaaagagaaatgtttgtttaataccgagttctgcgcatggaactaacccagcaagtgctcaaatggccggcatgaaagttgttgttgttaattgtgactcatatggaaatgtagattatgaagacttaaagaaaaaggctgaagaatactcagatactttgtccacactaatggtaacttatccgtcaactcacggagtttttgaagaaaaaataacggatatttgtgatttaattcataaacatggtggtcaagtttatatggatggagcaaatctaaatgcattggttggcattgcaaaaccaggaaattttggtcccgatgtttgtcatatcaatttacacaaaacattctgcatacctcatggcggaggtggtccaggaatgggtcctattgcctgtaaaaaacatttagagatttatttaccaagtcatccagtaattgattgcggcactccttctgggataggggcaatttcagcagctccttggggcagttcaagcattctctctatatcatggatgtatattaaaatgatgggttcagagggattaaagctggctactcaaaatgctattttaaatgctaattatatagcacacaaacttaaagatcattttccaatcttatacaaaggaaaaaatggcaatgttgcccacgagtgcatcatagatattagaaaaattaaaagcgacacaggaataaaagaagaagatatagcaaaaagattaatagatttcg

SEQ ID NO: 220103 - DNA, 826 bp, Unknown
  Bacterial polypeptide expressing nucleotide sequence isolated from the Sargasso Sea
tctaagaaatattttagaaaatccaggttggtacacttcatacacaccttatcaaccagaggtagctcaaggaagattggaaatgctgcttaatttccaacaaatgatagtggatttcacaggtatggatatcgcaaatgcatctttactagatgaaggaacagcagctgcagaagcgatgggattaagtcataggttaaataaaaaggacagcaatttagtttttgtatcagaaaattgtcacccacaaacaatcgatgtaattcaaacaagagcagaaccaatgggattaaaagtacttgttggagatgaagataaagtattagaccaattaaaagaagatttggtttgtggtatattgcaatatccaggaacattaggggatataaaagatcctagtgaagcaattagtaaaattcataaaaaaaatggtaaagcaatattagcttgtgatttattagcacttgctaagttaaaaacaccaagagaactaggagcagatattgctgtaggaagttctcaaagatttggaattccaatgggttacggtggacctcatgcggcattctttgcaactaaagacgaatacaaaagatctatgcccggaagaattgtaggggtctctgttgatagacatggaaacaaagcatatagattatcattacaaactagagaacaacatataagaagagataaagctacaagtaatatttgtactgctcaagctttattagctattgtatcagcggcatatgctatttatcatggtccagagggtattcgaattattgctgagagagtttctcaattagctaaaaacttgcag

SEQ ID NO: 220104 - DNA, 854 bp, Unknown
  Bacterial polypeptide expressing nucleotide sequence isolated from the Sargasso Sea
tttgccaaaaattttattaagaacctcaacatatttagatcatccagtttttaatagttaccactctgaaactgcaatgcttagatatttaaaaaaactagaagactctgatattgctttaaatagatcaatgatagctttgggttcatgtacgatgaaattaaattcagtttccgaaatgatacctgtaacatggaaagaattttcacatccacatccatattctcccatcgaacaaatggatggttacagagaattattcactgatttaaaaaattggttaagaacaattacaggtttttccggcgtttccttgcaaccaaatgctggagcccaaggagaatttgctggcttaatggttattagaaagtttcatgaaaaaaatgatcaaaaaaaaagaaatatttgtttaataccgagctctgcgcatggaactaatccagcaagcgctcaaatggccggcatgaaagttgttgttgttaattgtgactcatatggaaatgtagattatgaagatttaaagaaaaaagtcgaagaacattcagatactttgtccacactaatggtaacttatccgtcaacccacggagtttttgaagaaaaaataacggatatttgcgatttagttcataaacatggtggtcaagtttatatggatggggcaaacctaaatgcattggttggtattgcgaaaccaggaaattttggtcctgatgtttgtcatatcaatttacacaaaacattttgcatacctcatggcggaggaggtccaggaatgggtcctattgcctgtaaaaaacatttagaaatttatttaccaagtcatccagtaattgattgtggtactccttctg

SEQ ID NO: 220105 - DNA, 937 bp, Unknown
  Bacterial polypeptide expressing nucleotide sequence isolated from the Sargasso Sea
atattcaccccctttgctccacttgatcaagctcagggctatatggaattgatctcagatttagaagaatggctgcttgagtgcactggctacgacgcgatatctctccaacccaacgcgggttcacaaggggaatttgctggtctgcttgcaatcaagcgctaccacgaggcgcaaggtgatgagagtcgagatgtatgcctgattccttcatccgcacatgggaccaatgctgcttcggccgtcatggctggcctgagagtggtcgtcgtggattgcgctgaaaatggtgatatatctctgcaagaccttcgagaaaaaatcgctaatcacaaaagtgagctcgcagcgatcatggttacctacccgtcgacacatggagttttcgaagtaggaatcagtgaaatttgtcacctagttcatgaggccggcggtcaggtttacgtcgatggcgccaatctcaatgccttggtaggactcgcggcccctggagcttttggagctgatgtaagtcatctaaacctccacaagaccttttgcatcccccatggcggcggcggccccggcattggacccgtcgcgacgaaagagcatcttgcggcctttttaccaaaccatcctcttatccccgaagctggtccggcctcgggtagcggcgctatagctgcggctccttggggctcagctggaattctccccatcccttggatgtacatagccatgatgggagctgacggcttaagacaggcgacttcggtcgcgatcttgaacgctaattacgttgcctcgcggctccaagacagctacccggtgctgttccgcggccaaaacggtctgatagcccatgaatgcatcctggatttacgtgcccattccgaattcgtgagcgttgatgatgttgctaagagactcattgactacgggtccacgctccgac

SEQ ID NO: 220106 - DNA, 788 bp, Unknown
  Bacterial polypeptide expressing nucleotide sequence isolated from the Sargasso Sea
tatgataaaagattttcccaatcgccatattggcccaagagatgaccaaattcaagaaatgttatctgaattaggattttcatctctggaagacctatcaaataaagtaattcctccaaatatattacttaattcaaagatggaccttccaaataaaatgagcgagcctgaaacaataaataggttgcgtgagcttgctaatgagaactccgtttacaattcattcattggtatgggatactatggaacattccttcctgctgtaattcagcgaaacatactagaaaaccctggttggtatacacaatacactccatatcaggctgagatcagtcagggaagattggaagctcttttgaattttcaaacaatggtctcagatattaccggacttccaatggcgaatgcatcgcttttagatgaagcaactgctgcagccgaggcaatgctaatgttttttaatactacaaaaaacaatgaaaaaggtgtattccttgtttcagaaagttgccatccacaaacaatcgatgtattaaaaacacgagcagaacctttaggtataactttgaaggtcattgacataacaacccaagattttaatcaagatgtttttggtgctataattcaatatccagatactaatggctctatccaagataaaactgaattatgtaaggccgcacaccataatcaagcgcatatatgcatagctactgatctgctcgcactggctctattaaaatctccaggagagatgggtgcagatgttgcagtaggtagtacacaac

SEQ ID NO: 220107 - DNA, 880 bp, Unknown
  Bacterial polypeptide expressing nucleotide sequence isolated from the Sargasso Sea
aatgcttaatattgtaggtagtaaatcattagatgatttaatagaaaaaactgttccagatcatattatttttaaagataaacttaaattaagacctggtatgtcagaagaatttaataaaactaatactcaacttttatctctaaaaaataattttaaaaaaacctatattggaatgggatattacaatacaacaactcctagtgtaattttaagaaatatatttgaaaatcctggatggtatacagcttatactccttaccaaccagaagttagtcaaggcagactggaaatgctaatgaattttcagcaaatgattattgacctaacaggaatggacattgctaatgcttctttattagatgaaagcactgctgccgctgaagcaatgatgatggcatttaaagttaaaaaaagcttaaaatttactttttgtgttcaaaatacttgccatcctcaaactttatcagttttaaaaacaagagctgaacctctcggcataaaaatcatttttgataatcccaatgaagacacatttggttgtttaattcaaaatccagatacatatggtgaaattgcagatttagataaattaattaaattaaataaacaaaagcaaattatatcaataatagcagcagatattatgagtttaatcatcattaaatcaccaagaagttttggggccgatattgttgtcggcagttcacaacgttttggtgttcctatgggtctgggtggtcctcatgcagcattttttgctactttagatgaatataaaagaatgatgccgggaaggttaataggtgtttctgttgataggactaataaaagatcttacagaatggcattacaaacccgtgaacaacatattagaaga

SEQ ID NO: 220108 - DNA, 882 bp, Unknown
  Bacterial polypeptide expressing nucleotide sequence isolated from the Sargasso Sea
ctctccaggttggtcgcggccttggccacggccgctggccagacttctccctccttaccgctggcgcccgttgaggagctgggcggtgtgcccgagcgggttgacccctggctcagccaatcggtgtttcacgatcatcgcagtgagaccgaactgatgcgctacatccagcgcctggtgagtcgagatctttccttggtgcacgggatgatccccctcgggagttgcaccatgaagctcaatgcagccgctgagctgctgcccgtgagctggcccgccttcgctgggctgcatcccttcgctccggtggctcaggccgccggctaccagcggttggctgagcagctggaggcctggctcgcagctctcacgggttttgctgcggtgtccctgcagcccaatgccgggtcccagggggagtacgccgggctgctggtgatccgggcctggcatcgctccaggggcgacgaccatcgcgatgtctgcctgatccccaccagtgcccatggcacgaaccccgccagtgccgtgatggcggggctcaaggtggtggccgtggcttgcgacgccgaaggcaacatcgatcagcaggatctggctgcccgtgcagcagagcacgccgatcgcctggcggccctgatggtcacctatccctccacccatggcgtcttcgagaccggcattcgcgggatttgtgagctggtgcatcgccacggtggtcaggtgtatctcgatggcgccaacctcaatgctcaagttggtttgtgccgtccgggtgccttcggtgccgatgtctgccatctgaacctgcacaagaccttctgcattccccacggcggtggcggacccggtgttggtccgatcggtgtggcggcccatctc

SEQ ID NO: 220109 - DNA, 811 bp, Unknown
  Bacterial polypeptide expressing nucleotide sequence isolated from the Sargasso Sea
tgatattaatgatcttaaagataaagcagaaaaatactctaaagatttagcttcattaatggttacctatccttctacacatggggtgtttgaagaaaagatcatggaaatttgcgatataattcataaacaaggagggcaagtttatatggatggagctaatctaaacgccctagtcggtgttgctaaaccaggaaagtttggtccagatgtttgtcacattaatttacataaaacattttgtataccacatggaggtggaggaccaggaatgggtccgatagcatgtgctaaacacttagcagaatttttacctactcataaaattataaaagagtccggtccaaaaaatggaatgggtgctgtatcagcagccccttggggtagctcaagtattcttcctatatcttggatgtacatcaaaatgatgggtgctgaaggattaaaaaaagcatctcaagtttcaattttaaatgcaaattatatttcaaagaaattatctaatgattacaaagttttatacaccggaaaaaacggtaatgttgctcacgaatgcataattgatattagaccaataaaagctagttcaggaatttctgaagaagacttagctaaaagattgattgattttggttatcatgctccaacaatgtcatggccagttgcgggaacaattatgattgaacccactgaaagtgaaaatcttgaagagattgacaagttttgcaatgcattaataaaaattaaaaaagaaattgatttagttgaaacatcaaaatttgataaaattgacaatccattaaaaaatgct

SEQ ID NO: 220110 - DNA, 868 bp, Unknown
  Bacterial polypeptide expressing nucleotide sequence isolated from the Sargasso Sea
ttgatggtaattagatcatactttaaaagcataaaccaaacaaatagaaatatttgtattattccagcttcagctcatggtactaaccctgcatctgcagtaatggcaggaatgaaagttgttgtagttggtactgacaaatttggaaacattgatgaagatgacctaattaaaaaagctgaagaaaacagtgagaatctagccgctttaatgattacttatccatcaactcatggtgtttttgaatcttcaataaaaagaattacgcaaacaatacatgccaatggaggtcaagtttatatggacggtgctaacatgaatgctcaagttggactaacaaatccatattcaattggtgctgacgtatgtcatttaaatttacataaaactttctccattccgcatggcggtggtggacctggcgtcggacctatttgtgttgcaaaacatttagtagactttcttccccaaactgatagaaatattacaaaaaaacatggagttaaagctatttcggctgccccttggggatccgcaatggcatgtctgatttcttatggatatatatctatgatggggcctgacggtttgaaaaaagctactgagatagctatacttaatgcaaattacattaagaaaaggattgaaaaagactataaaatactctaccaaggtgaaaaaggcagatctgctcatgaattaattattgattgccgagattataaagatgaatttggtattgatattatggatattgccaagaggctaattgattatggtttccatgcccctacagtttcatttccagttccaggcaccatgatgatagaaccaactgaaagtgaaagtcttgaggaaattgatagat

SEQ ID NO: 220111 - DNA, 883 bp, Unknown
  Bacterial polypeptide expressing nucleotide sequence isolated from the Sargasso Sea
tcgtgcacaatgaaattaaatgcaacctctgaaatgattccggttggctgggaagaattctcatccattcatccctatgcacccgagcatcaagttaaaggctatctacagttaatagataatctagaacaaatgcttgaaaaaattactggctacagcgcgatttcattacagcctaatgcgggctctcagggagaatatgctggcttgctagcaattgatgcttttcataaaagcaatggtcaccacaatagaaaagtctgcctaataccagaatctgcacacggtactaatcctgcttctgctcaaatggcaggcatgaaagttgtgcctgttaaatgtgataaatctggcaacattgatcttgatgaccttcaatgtaaggcaaacaataattcagaagaacttgctggaattatgattacttatccctctacgcatggagtgtatgaagaaaccgttacagaagtctgtaatgttattcattcccatggtggcaaggtttatatagatggagctaacctaaatgcaatggtatctctttgcaagcctggcttatttggcggggatgtttctcacttaaatcttcataaaactttttgtataccgcatggcggaggtggtcctggagttgggcctattggagtagtagaagaattatcagactacctgccctctgatcctcttagatattcagatgaaaatacaactggtcctatctcagcttcaaactttggaagtgcttcaattctcccaatcagctggatgtatattcagatgatgggctcacaggctttacgattagctactcagatagccatccttagtgctaactatattgcccataaattaaagggacactacgccattctttacactggtc

SEQ ID NO: 220112 - DNA, 826 bp, Unknown
  Bacterial polypeptide expressing nucleotide sequence isolated from the Sargasso Sea
aataaaattaatactcaacttttatctttaaaaaataatttcaaaaaaacttatattggaatgggttattacaacactattacacctagtgttattttaagaaatattcttgaaaatccaggatggtacactgcttacacaccttatcaaccagaagtaagtcagggcaggttggaaatgttaatgaattttcaacaaatgataattgatttgactggaatggatattgcaaatgcatctttacttgatgaaagtactgcggcagctgaggctatgatgatggcttttaaaattaaaaaaagtgcaaagtttactttttgtgtgcaaaataaatgtcatccacaaacactatctgtcttaaaaacaagagctaaacccttaggtataaaaattatttttgataatccagatgacgatacatttggttgtttaattcaaaatccagatacatacggagaaattgcaaatctcaacgatttaataaatataaataaatctcacgatgcgttatcaatcatagcagctgatataatgagtttggtagttatgaaatcaccaaaagattttggagctgatatagttgttggaagtactcaaaggtttggagttccaatgggtctaggaggtccacacgcagcatattttgcaacattagatgaatataaaagaatgatacctggaaggctaattggtgtatcagttgatcgtactaataaaagatcttacagaatggctcttcaaacgcgtgagcaacacattagaagggaaaaagctacaagtaacatatgtactgcacaggccttattagcaattatatctgcttcat

SEQ ID NO: 220113 - DNA, 820 bp, Unknown
  Bacterial polypeptide expressing nucleotide sequence isolated from the Sargasso Sea
cccagcttccgcgacgatgtgcggcatgaaggtgatagttgtgaattgcgacagttccggaaatattgatatagcggatcttcgcgaaaaaacggataaatacaagaaagcacttgcagcaatcatggtgacttacccatcaactcatggtgtttttgaggacgggataaaagaggtttgtgaaattgttcataatgccggtgggcaggtatacgtagacggggctaatttaaatgcaatggttgggatatgccaacctggtaggttcggggcggatgtaagtcatttaaatttgcataaaactttctgtatcccgcacggaggaggaggtccgggagtagggcctgtagcggtggcggaacatcttgcaccatttctgcctggacatagatttgggcactccgacaattataaagttggtccaataagtgcagctccatggggaagtgccgggatattgcctatttcctgggtttacataacactgatgggagcgcgcggtatgctttctgccagtcagattgctatattgaatgcgaactatattgcaaaaaaaataaaaaagcacttccctgtcctatacacgggtgaaaatggatgcgtggcccatgagtgtattatcgatcttcgtaaaattaaagaaacgaccgggatagatgttgaggatgtagccaaaaggttaattgatttcggttttcatgcgccaacgatgtcttttccagttgcaggcacacttatgatcgagcctaccgagagcgagtcaaaagcagagttagatcgttttttagaagcaatggcgactattcgtaatgagatttaa

SEQ ID NO: 220114 - DNA, 905 bp, Unknown
  Bacterial polypeptide expressing nucleotide sequence isolated from the Sargasso Sea
gtttgttcctattgagcagatggaaggatatagagcaatgttcacagatcttaaaaattggctaagatctattactggtttttctggagtttcacttcagcctaatgcaggtgctcaaggggaatatgcaggattaatggtaattagaaaatatcatttagatagaggcgaagaaaatagaaatatttgtttaataccaagctcagcacacggaactaacccagctagtgctcaaatggttggcatgaaagtggttgtagttgattgtgacaaagaaggaaatgttgattttgaagatttaaagaaaaaagctgaaacacattctgaaaaccttggagcattaatggtcacatacccatctactcatggtgtatttgaggaaaaaataactgatatatgtaaattaattcacgaacatggtggacaagtttacatggatggtgcaaacttaaatgcgcttgttggtatagcaagacctggtaattttggtccagatgtttgtcatataaatttgcataaaacgttctgtataccacatggtggaggaggaccaggaatgggaccgatagcatgtaaaaaacatttacaagtttatctgccaaatcatccagttgttaaagattgtggacctgctacaggaattggatcagtttcagcagcaccatggggaagctcaagtattttatcaatttcttggatgtatataaaaatgatgggatctcaaggtttaaaactagccacacaagttgcaatattgaatgcaaattatatagcccatagacttaaaaaccattatccaattctttataaaggctcaaacggaaatgtggctcatgaatgcataattgacattcgatctattaaaagtgaaacgggtattaccgaggaagatatagctaaaagat

SEQ ID NO: 220115 - DNA, 852 bp, Unknown
  Bacterial polypeptide expressing nucleotide sequence isolated from the Sargasso Sea
gacaccgtcaccgtgcactgtgcttcggcaccggctgtgcaccgcgctgccgcagttgctggtttcaatctgcgggtgctgcccgatggtgcagcgccggcggacgccaccggattcggcatcagcctggatgagctctcggatcaacacgagctgcaagccctgctcgtactgctggcggaggcctgcggtcaggccaccccgcagcttgaggctgagcagcccccgtccctctccctgccgcagcgcagccagccctggctgagccagccagttttttatcagtaccggagcgaatcagagctgttgcgctacatccagcggttggtgagccgtgatctctcgctggtgcacgggatgattccgttgggcagctgcaccatgaagctcaacgccgccgctgagctgcagccggtgagttggcctgcgtttgcggccttgcatccctttgccccagccgatcaggcccggggctatcgccgtctggccgacgatctggagcaatggctggccgccctgacgggctttgccgccgtatcgttgcagcccaatgccggttcccagggggaatacgccggactgctggtgattcgcgcctggcaccgctcccgcggtgaagcccatcgcgacatctgtctgatccccaccagcgcccatggcaccaaccccgccagtgccgtgatggccggcctcaaggtggtggctgtcgcctgtgatgaccagggcaatatcgatcagcaggatctggcggcgaaggcggctgagcatgccgatcggctggcggcgctgatggtcacctacccctccacccacggcgtgtttgaaaccggcatccgtgagatctgctcggtg

SEQ ID NO: 220116 - DNA, 844 bp, Unknown
  Bacterial polypeptide expressing nucleotide sequence isolated from the Sargasso Sea
aaactgataaaaatttataataaagctatatcggaaaaagttaatttgagaaaagtaaacaacaaaacattgtcagtagcttttgatgaggctaaaagactcgatcatgttaacttacttttaaagatatttggcatagataaagatgtaactaaaactacagatgtttctcttgataatcttccaaaaaatttattaagaaaatcaaaatatttaactcatccagtttttaataagtatcattcagaaactgaaatgatgagatatttaaaaagacttgaggatagtgatatagccttaaatagatcaatgattgctttaggatcatgtacaatgaagttaaattctactgcagagatgatacctatttcttggaaagaatttgctctcccacatccatttgttcctgtagatcaaatgagtggttataccatcttattcaatgatttgataaaagacctcaaagagattaccggatttgatgcagtttctttacagcctaattctggggctcaaggggaatatgctggtttgatgacaattagagcgtttcacaaaagcaataatcaagccaatagaaatgtttgtttaatacctagctctgctcatggcactaatccagcaagcgcacagatgtcaggaatgaaagtggttgtagttaattgtgacaataacggaaatattgatttagaggatttaaagaataaatctaaaaaatattctaaagatctagcagctttgatggttacttatccttcaactcatggagtgttcgaggaaaaaataactgaaatttgtgaaattgtacactctaatggtggtcaagtttacatggatggagcaa

SEQ ID NO: 220117 - DNA, 926 bp, Unknown
  Bacterial polypeptide expressing nucleotide sequence isolated from the Sargasso Sea
ttcaacatatttagatcatccggtttttaatagttatcactcagagaccgaaatgcttagatatttaaaaaggttagaagactgtgatattgcattaaacagatcaatgatagctctaggatcatgtacaatgaaattaaattcagtttctgagatgattcctgtaacatggaaagaattttcacaaccgcatccattctctcctattgagcaaatggacggctatagagaactgttcactgatttaaaaaattggttgagaataataactggtttttctggtgtttctttacaaccaaatgctggagctcaaggagagttcgcaggcttaatggttataagaaaatttcatgaaaaaaatggccaaaaaaatagaaatatttgtttaataccaagttccgcacatggaactaacccggctagcgcacagatggttggtatgaaggttattgttgtggattgtgatattcatggaaatgtagattacaatgatttaaagaaaaaatctgagaagtattcagataatttggctgcactaatggtaacctacccatcaactcatggagtttttgaggaaaaaataactgatatttgtgagttaattcataaacatggaggtcaagtttatatggatggggcaaatctaaatgcattagtaggtattgcgaaaccaggaaattttggtcctgacgtttgtcacataaacttacataaaacattctgtattcctcatggaggaggaggaccggggatgggacctatagcatgcaagaaacatttagaggtttatttaccaaatcatcctgtgataaacgattgtggaccagcaactggaataggagcagtttcagcagctccctggggaagctcaagtattctttccatatcgtggatgtatataaaaatgatgggatcagagggctaaa

SEQ ID NO: 220118 - DNA, 770 bp, Unknown
  Bacterial polypeptide expressing nucleotide sequence isolated from the Sargasso Sea
aaaaaattggttaagatctataacaggtttttccggtgtttctctacaacctaatgcaggcgctcaaggagaatatgcaggtctaatggttataagaaagtaccacttagatagagatgatgctcatcgtaatatatgtttaatcccaagttcggcacatggtacaaatccagcaagcgcacaaatggttggaatgaaagtcgttgttgttaattgtgataaagagggaaatgtagatttcgatgatttaaagaaaaaagtagagcaacattcagaaaatcttgcagctttaatggtaacttacccatctacccatggagtatttgaggaaaaaataactgatatttgtgagttagttcataaacatggtggacaggtctatatggatggagcaaatttaaatgcccttgttggagttgcaaagcctggaaattttggtccagatgtttgtcatattaatctgcataaaacattttgtattcctcacggtggtggtggacctggaatgggacctatagcttgtaaaaaacatttacaagtttatctgcctaatcatccagtaataaaagattgcggaccaacaagtggaattggagcagtatcagcagctccttggggtagttcaagtattctatcaatctcttggatgtatattaaaatgatgggatcagaaggattaaagcttgctactcaagttgcaattttaaacgcaaattatattgctcatagacttaaagatcactttcctattttgttcaaaggtgcaaatg

SEQ ID NO: 220119 - DNA, 843 bp, Unknown
  Bacterial polypeptide expressing nucleotide sequence isolated from the Sargasso Sea
gatgttaagatatctaaagaaactagaagattgtgatattgcacttaatagatcaatgattgctttaggatcttgtacaatgaagctcaatgcaacagcagaattaattcctattacttggaaagagttttcacttccacatccttttgttcctacaaatcaaatggaaggttataagattctttttaatgatctaataaacgatctgaaagaaattaccggatatgatgcagtttctttacagcctaactctggggctcaaggagagtatgcaggtttaatgactataagaaaattccataaaaataataaacaagaaaatcgtaacgtttgtctaattccggactcagctcatggaactaatccagcaagtgcccaaatgtgtgggatgaaagttgttgtagtcaattgtgacgaagatggaaacgtggatatagacgaccttaaaaataaagctgaaaaacactcaaaagacttagctgctttaatggttacttacccctctacacacggagtatttgaagaaaaaatcatggaaatttgtgatgttattcataagcatggtggacaagtttatatggatggagcaaatctaaacgcacttgtaggtgttgcaaaaccagggaaatttggaccagatgtttgtcatattaatttacataaaacattttgcataccgcacggtggaggcggaccaggaatgggccctattgcttgtgctaagcatttagctgattttttaccaacacacgaaattattaaagaagctggccctatgaatggaatgggagctgtttcagccgctccttggggaagttcgagtatacttccgatatcatggat

SEQ ID NO: 220120 - DNA, 618 bp, Unknown
  Bacterial polypeptide expressing nucleotide sequence isolated from the Sargasso Sea
aatgaaagttgtcgttgttgattgtgacaaagaaggaaatgttgattttgaggatttaaagaaaaaagcagaattgtattcagacaatcttggtgcattaatggtaacttacccatcaacccatggtgtatttgaggaaaaaattaaagatatatgtaaagtaattcatgaacatggtggtcaagtttatatggatggagcaaacctaaatgcacttgttggagttgcaaaaccaggaaattttggtcctgatgtttgtcatataaatttgcacaaaacattttgtattccacatggtggaggaggacctggaatgggacctatcgcatgtaaaagacatttacaagtttatctgcctaatcatccagtcgtaaaagattgtggacctgcaagtggaataggtgccgtttcagcagctccttggggaagctcaagcattttatcaatttcttggatgtacattaagatgatgggatccgaaggtgtaaaacttgcaacacaaattgcaatcttaaatgcaaattacatagcaaatagattaaaagaccactacccaattctttataaaggttcaaatggtaatgtagctcatgaatgtattattgatattagatcaat

SEQ ID NO: 220121 - DNA, 826 bp, Unknown
  Bacterial polypeptide expressing nucleotide sequence isolated from the Sargasso Sea
gcagcattttttgcaaccaaagatgaatataaaagatctatgccaggtagaatttttggtgtttcagttgatagacatggaaataaggcatacagattgtcacttcagaccagagagcaacacattagaagagacaaagctacaagtaatatttgtacagcccaagctttattagcaattgtgtcagcagcatatgctatttatcatggtccagatggaattaaaaatatttctgaaagagtatctcaattagcaaaaaattttggagataaaataaaacaatctggatatgaactatattcagattgtttttttgatactgtaactattattactaaagataagactgatcaaatttttaaaaatgctttagatcaaaaagtaaatattagaaaagtaaattcagaaatgttgtcagtatcttttgacgagaaaaaaaatgtttatagagtaaatcaactgttaaaaatttttaatgcagcagaatcaatcaaaaaagaagaccctacagtaagtctacccaatctcccaaaaaatttactaagaacttcaaaatatttagaacacccagtttttaatttataccattcagaaactgaaatgcttagatacttaaaaaaattagaggataaagatatcgctctcaatagaacgatgattgcattaggctcatgcaccatgaaattaaatgctactgcagaaatgataccaatttcatggagagaattagctgagcctcatccgtttgtacctgtagaacagatggaaggatatagagaattattcaccgatcttaaaaattggctaagatcaattactggttttt

SEQ ID NO: 220122 - DNA, 909 bp, Unknown
  Bacterial polypeptide expressing nucleotide sequence isolated from the Sargasso Sea
tgagtcaataagtaaaatccataaaaagaatggtaaagcgatacttgcatgcgatttactttcacttgctaagttgaaaacaccaagagaactaggtgctgatatagccgtgggtagctctcaacggtttggaattccgatgggttatggtggacctcacgcagcattttttgcaacaaaagatgaatataaaagatccttacctggtagattagtaggagtttcagtggatagacatggaaataaagcctacagattatcattacaaactagagagcagcacataagaagagataaagctacaagcaacatttgtacagctcaagctttattagcaattgtctcagcagcatatgctatttaccacggtccagagggaattaaaaatatttctgaaagagtatctcaattagcaaaaaattttgctgataaaattaaacaatctggatatgaattatattcagattattttttcgatactgtaactattattaccaaagataagaccgatcaaatttttgaaaatgctttaaatcaaaaagttaatattagaaaagtaaattcagaaatgttatctgtatctttcgatgaaagaaaaaatgtttatagagtaaaccaactactaaaaatttttaatgcagcagaatcaattaaaaaagaagatcctgtagcaaatttagtaaatttaccaaaaaatttaattagaacttctaaatatttagaacaccctgtttttaatttatatcattcagagacagaaatgcttagatatcttaaaaagttagaagataaggatatagctcttaatagaaccatgattgcactaggctcatgtactatgaaattaaatgctactgcgggaatgatacctatttcatggagagaattagctgagcctcatccgtttgt

SEQ ID NO: 220123 - DNA, 481 bp, Unknown
  Bacterial polypeptide expressing nucleotide sequence isolated from the Sargasso Sea
gggtcaaacggtaatgttgcacacgaatgtattattgatattataaatattaaatctgaaacaggagtaacagaagaagatattgcaaaaagattaatagatttcgggtttcatgcaccaacaatgtcatggcctgtggctggtactatgatgatagagccaactgaaagcgaaggtttgtcagaactcgatagattttgtgatacattaattaagataaagcaagaaattgaaaaaattaaatcaggtgaatttgataaaatagataatccaataaaaaatgctccacacaccgatagtgaacttgcttccgataactggacacataattattcaagagaggaagctgcttatccagcaaaattcctacgatctaataaattttggcctccagttgcgagagttgacaacgtatatggagataaaaatattttctgtacttgtcctagtatggatgaatttaaagaagatgcagcataac

SEQ ID NO: 220124 - DNA, 460 bp, Unknown
  Bacterial polypeptide expressing nucleotide sequence isolated from the Sargasso Sea
gcccatgaatgtataattgacatcagatcacttaaagatgaaactggaatctctgaagaagacattgccaaaagattgattgactacggtttccatgccccaactatgtcatggcctgttgccgggaccttgatgatcgaacctaccgaaagtgaaccaaaggctgagctcgatcggttttgcgaagcgatgatttcaatacgcagggaagcagatcgagtttataaaggtgagtgggacaaaacagacaacccgcttaaaaactccccgcatcctgcagaagatctaacagacccccaatggaaccattgttattctcaggaaactgctttctacccactagcatcaattcgccaaaaaaaatactggcctccatcagcacgtgtagataatgttcatggtgatagaaatgttttttgtgcttgccctccactagaaagttatgaggacgaggagtgat

SEQ ID NO: 220125 - DNA, 794 bp, Unknown
  Bacterial polypeptide expressing nucleotide sequence isolated from the Sargasso Sea
tgggaacgcacaacgttttggagtccctatgggaaatggaggacctcatgccgcatttttctcaacaagtgaaacttttaaaagaaaaattcctggtagaatcattggtctgaccaatgactctaatcaaaaaccagctctaagaatggcacttcaaactagagaacaacatataagaagagaaaaagcaacttcaaatatttgtactgctcaagtgcttcttgcgatcatgtctggaatgtttgcagtatatcatggaccagaaggaataaaaaaaatagcaaaaagggtttcatctttaacaaatcaacttggaatttcattaaaaaaagctggaataaaactaaacaataattctttctttgataccataaatttcaatgccaaaggatggcaagataaagccaaaaagaaaaaattaaacttccgtatacattctgataaaactatcggaatctcaattgatgagactacgactgaatcagatattattgaaattttaaatgtctttaacgttaaaacattagaaaaagaaagtaaaagcaatctcccaagttcaatttttagaaaatcttcatttttaacccacccagttttcaattcttatagatctgaaacagagatgctccgctacatacacaaacttgaaacaaaagatctctctttaaatactagcatgatagctttgggttcttgtaccatgaagcttaatagtactaccgaaatggaaggcatcagctggccagaaatttctaatattcacccctttgctcctgaaaatcaaaagtatggtt

SEQ ID NO: 220126 - DNA, 347 bp, Unknown
  Bacterial polypeptide expressing nucleotide sequence isolated from the Sargasso Sea
agtagcaggtacaatgatgattgaaccaacagaaagtgaaagtttgtctgaactggatagattttgtgatactttgattagcattaaatctgaaatagatatgatcaaatcaggaaaatttgataaagttgataatccaattaaaaatgcacctcatacagatattgaattagcttcagatgaatggaatcataaatattcaagagagcaagccgcttatcctgcgaaattcttaaaagcaaataaattttggcctccggttgcgagagttgataacgtatacggagataaaaatattttttgtacttgtccaagcatggatgagtttaaagaagatgcagcataat

SEQ ID NO: 220127 - DNA, 503 bp, Unknown
  Bacterial polypeptide expressing nucleotide sequence isolated from the Sargasso Sea
aatgttaccgaattcagaaaaagattttttaaaaaggcatattggaccctctaaagaagaccagtcaaaaatgttaaaagaattaaattacaagtcactagatgatttaattgacaacactgttccagaaaaaatacagtttaaaggtgagctaaatatcggtgagtcgaattctgaatatgaagcactaagaaaattgagatcaatttcaaagaaaaatcaagtttactcaaatttcattggtatgggttattatggaacttatacaccatacgtaattttaagaaatatattagaaaatccaggctggtatacttcatatacaccttatcagcctgaggtagctcaaggaagacttgagatgttattgaactttcaacaagtgatcgttgactttacaggaatggatattgctaacgcctctttattagatgaaggcacagcagcagcagaggccatgggtttaagtcacagattaaataaaaaagatagtaatttagttt

SEQ ID NO: 220128 - DNA, 838 bp, Unknown
  Bacterial polypeptide expressing nucleotide sequence isolated from the Sargasso Sea
ccattgggaatagacgtaatagttggacctatagaggaggctaaagacgcagactgttacggtgcatttattcaatacccagggtcagatggctcaatccaagatcattctaaaattgttgactcgattcatggaaaaaaaggaattgccgtattcgcttcggacctattagcattatgcctacttaaacctccaggagagatgggagcagatatagttgtaggttcgtctcaaaggtttggtgttcctctgggctgtggtggtccccatgcagcttttatgtcagtaaaagaagatctaaaaaggtctttgcccggaaggatagttggcgcctcggtagatagctctggagatctggcatatagactcgcacttcaaactagagagcagcatataagaagggaaaaagctactagcaacatatgcactgcgcaagctttgcttgctatcatggccggattttattctctttatcatgggaaagaaggactcataaaaatcgcccagaaagtgaacaatcttactgccttgctgaaagaaaacttatctgcaaaaggcttaaattctaagaatgaggatttctttgataccttggtgattgaaacaggttcgcatacagaagcaatttatttaagagcccgagataatggcattaatctaaggttaatagattctacttctataggaatctcattagacgaaactacctccatggatgatctagaggttctgatgaaaatattcactgattctaatgatcagttgagagatattaaaagccaatctatacctaaaaacataatcagaaaatctagctttcttgatcataatatcttca

SEQ ID NO: 220129 - DNA, 931 bp, Unknown
  Bacterial polypeptide expressing nucleotide sequence isolated from the Sargasso Sea
atacttgataaaaaacttaagttattaggattagatcaattaaatgatacttattttgatactttacattttaaatttccaatagaaaaagttagagaagcagctcttcaaaataaagtaaatttcaatttcataaatgataatgagttctccatatctctaaatgaagctacagaaattgaagatgtgaataaaataattgatattttgtcatcgataaatagaaaagaaatagattttgatatttcaaaaatcaattttaattctatacctcaatcgcttaatcgaaaatctagttttcttgatgaaaaagtctttaattcataccattctgaaacttcaatgatgagatacattaaatcattggaaagaaaagatcttgcattaaatcactctatgattgcgcttggttcttgtacaatgaaattaaatgctgctgctgaaatgttaccattaagctcagctcgttggaacaatattcatccttttgccccaaataatcaagttgatggatataatataatgttgaataaacttgaactacaacttaatgaaataactggctttagcggtacatcattacaaccaaattctggtgctcaaggtgaatatgcaggattaatggtaattagatcatactttaaaagcataagccaaacaaatagaaatatttgtattattccatcctcagctcatggcactaacccagcatctgcagtaatggctggaatgaaagttgtcgttgttggtactgataaatttggaaatattgatgaagatgacctagttaaaaaagctgaagaacacagtgagaatctagctgctttaatgattacctacccatcaactcatggcgtttttgaatcttcaataaaaagaattacgcaaacaatacatgataatggcggtcaagtatacatggacggtgcta

SEQ ID NO: 220130 - DNA, 777 bp, Unknown
  Bacterial polypeptide expressing nucleotide sequence isolated from the Sargasso Sea
tacacaaaacattctgcatacctcatggcggaggaggtccaggaatgggtcctattgcctgtaaaaaacatttagaaatttatttaccaagccatccagtaattgattgtggccctccctcaggaataggggcagtttcttcggctccctggggaagctcaagcattctctcgatatcttggatgtatattaaaatgatgggatctgaaggtttgaaattggctacgcaaaatgcaattttaaatgctaattatatagcttacaaactcaaagatcatttcccaatcttatataaaggaaaaaatggaaacgtagctcacgaatgtattatagatattagaaaaattaaaagcgaaacaggaattacagaagaagacatagctaaaagattaattgattttggttttcatgcaccaactatgtcttggcctgttccaggtacaatgatgatagaaccaactgaaagtgaaagtctttctgaaattaatagattctgtgcttcattaattaaaataaaagaagaaattaataaagttaaaaatgggaaatttgacaaagatgataatcctttaaaaaacgcaccacatactcacgttgagcttactgctaatgaatggaaacataaatatgatagagaaagtgcagcatatccttctgcgactttaaaatcttacaagtactggccaccagttgctagagtagacaatgtttatggagataaaaatcttttctgctcttgtccatcaatggatgaatataaagaatctgctgcttaaa

SEQ ID NO: 220131 - DNA, 634 bp, Unknown
  Bacterial polypeptide expressing nucleotide sequence isolated from the Sargasso Sea
catgggagaagttcaagtattctctctatatcctgtatgtatattaaaatgatgggatctgagggtttaaaactggctacgcaaaatgcaattttaaatgctaattatataacacacaaactaaaagatcattttccaattttatataaaggaaaaaacggaaatgtagctcacgaatgtattatagatattagaaaaattaaaagtgaaacaggaattacagaggaagacattgctaaaagattaatcgattttggttttcatgcacctactatgtcttggcctgtcccaggtacaatgatgatagaaccaactgaaagtgaaagtctttctgaaattaatagattctgcgattcattaattaaaataaaagaagaaattaataaagttaaaaatggaaaattcgacaaagttgataatcctttaaaaaatgcaccacatacccacgttgagttagttgccaatgaatggaaacataaatatgacagagaaagcgccgcatacccttctgcgactttaaaatcttacaagtactggcctccagttgctagagtagataatgtttatggagataaaaatcttttttgctcttgtccatcaatggatgaatataaaaaagaatctgcagcgtaaa

SEQ ID NO: 220132 - DNA, 579 bp, Unknown
  Bacterial polypeptide expressing nucleotide sequence isolated from the Sargasso Sea
tgggatctgaaggattaaaattagcaacacaaattgcaatattaaatgcaaattatattgcgcatagattaaaaaatcattttccaattttatacaaaggaagcaaaggtaatgtagctcatgaatgtattatagatattagaacgattaagaacgaaactggaattacagaagaagatattgcaaaaagattaattgattttggatttcatgctcccacaatgtcctggccagttcccggcactatgatgatagaaccaactgagagcgaaagtttaaaagaactagatagattttgtgatactttaataaagattaagtctgaaattgacaacatcaaatcaggaaagtttgataaagttgataatcctatcaagaatgcaccacatactgatctggagttagcttcaaatgaatggaatcataaatacaccagagaagaggcagcttatccttctgagtttttaaaatctaataaattttggccaccagttgctagagtcgataatgtgtatggtgacaaaaatcttttttgtacatgtccaagcatggatgaatttaaagaagatgcagcttaat

SEQ ID NO: 220133 - DNA, 643 bp, Unknown
  Bacterial polypeptide expressing nucleotide sequence isolated from the Sargasso Sea
aatgttacataattctgaaaaagattttataaaaagacacattggtccatctgaagatgatcaatctaaaatgttaaaaaaattaaattataaatcattagatgatttaattaataatactgttccagaaaaaatacagtttaagggagaacttaatattggtgagtctaattcagaatacgaagcattaagaaaattaaaagcaatttctaaaaaaaatgaaatttactcaaattttattggcatgggctattatggtacatacacaccttacgtaattttaagaaatatattggaaaatccaggctggtacacatcatatacgccttatcaaccagaagtggctcaaggaagactggagatgcttttaaactttcaacaaatgattgttgattttacaggaatggatattgcaaatgcatctttattggatgagggtacagctgcagcagaagctatgggtttaagttatagacttgataaaagtgatagtaatttagtttttgtctctgaaaattgccaccctcaaactattgaagttattagaactagagcagagcctatgggtcttaaagttcttgttggaaatgaagataaagttttagaacaattaaaagaggatattgtttgtggaatattacaa

SEQ ID NO: 220134 - DNA, 850 bp, Unknown
  Bacterial polypeptide expressing nucleotide sequence isolated from the Sargasso Sea
aatcaagttattcctgaagatattcagcttaaagataaatcttcagaaatattgccccaaggttgttcagaaattgaggctttaaaagaattagaagagattgcgaataaaaatacaaaaatgagatcacttataggccttggttattatgacaatcatatgcctaaagtaatccaaagacatgttcttgaaaatccaaggtggtatacgtcttatactccatatcaagcagaaattgcacaaggaagattagaagctctatttaattttcagactattgtttgtgaactaacaggatttcctgtcgccaatgcatctttgttggatgagggtactgctgcagcagaagctatggccatgagtttttctgcaagaaaaaataaatcttcaaaagtgtacttagtggagtcaaatgtttttgatcatacttttaatgttctacaaaccagagcaaaacctttgggaatatccttaaaacgctttactctaagcaaccttcctagtcatgatgatgtttttggaatgttgttgcaattacctggtaaaaatggacaattatatgatcctacattcttaatatcccaagcacatagatcagaaattattgttacggcatgtattgatccactagcacaagttttgattaaaccaatttccgaatttggtgttgatgtagcagtgggtagtatgcaaagatttggtgttccaatgggttttggtggcccccatgcagcatattttgcttgtagcgaaaaatacaaaaggctgatacccggaagaatagttgggcaaactctatctaaaaatggagaaaagtctctaagactagcattgcaaacaagagagcaac

SEQ ID NO: 220135 - DNA, 722 bp, Unknown
  Bacterial polypeptide expressing nucleotide sequence isolated from the Sargasso Sea
gggtcctatttgcgtgaagaaacaacttgctccgtttatgccaaaccacgcagtcgtcaaaattgaaggcactggcgcaaacaacggtgcagtatctgcagcaccatttggtagcgcaggcattctgccaatcagctggatgtacatcaaaatgatgggcggtgacggtttacgtcaagccactgaaatggcgattttaagcgctaactacatggcgaaaaaactgggcgacctgttccctgtgctgtacgtaggtagcaacggccgcgtagcgcacgaatgtattatcgacatgcgtccattaaaagaaaaaaccggcgtgaccgaaatggacatcgccaaacgtttaatggactacggcttccacgccccaactatgtcattcccggtagccggcacgctgatgatcgagcctactgagtctgaaagcaaagtggaactggacaaatttatcaccgccatgacttctatccgcaatgaaattgccaaggtagaagcaggggagtggactgcagacaacaacccactgcacttcgcacctcacactatggaagatattttcgacccaagctgggaccgcccatacgagcgtcagtacgctgcattccctgcacagtacgtggcagaaaacaaattctggccaacagtcacccgtatcgacgacgtatacggcgaccgcaacctgatgtgtgcttgccctagtccggaagattatcggtaat

SEQ ID NO: 220136 - DNA, 385 bp, Unknown
  Bacterial polypeptide expressing nucleotide sequence isolated from the Sargasso Sea
gtggtcgtcgcggccgacctgctcgcgttgaccgtgctcacgccgccgggcgactggggtgcggacgtcgcgatcggcaacacgcagcgcttcggcgtgccgatgggcttcggcggcccgcacgcagcgtatctcgcggtgcgtgacgaattcaagcgccagatgccgggccgcctcgtcggcgtgacggtcgacgcgcagggcaagcccgcgctgcgcctcgcgctgcagacgcgcgaacagcacatccgccgcgagaaggccacgtcgaacgtgtgtaccgcgcaggcgctgctcgcgatcatggccagcatgtacgcggtctaccacggcccgcacggcctgaaaacgatcgcgctgcgcgtgaaccgcatcgcggcgctgc

SEQ ID NO: 220137 - DNA, 417 bp, Unknown
  Bacterial polypeptide expressing nucleotide sequence isolated from the Sargasso Sea
gaataaccgaagaagatatagcgaagagattgattgattttggctttcatgcaccaactatgtcgtggcctgtaccaggtactatgatgatagagcccacagaaagtgaaagcttaaatgaaatcaatcgattttgtgatactttaataaaaataaaaaaagaaattgataaaattaaaaatggagagtttgataaactagataacccaattaaaaatgctcctcatacagatctggagttagcatcaaacgaatggaagcataaatattcaagagaagaggcagcttatccatcacaatttttaaaatctaacaagttttggccacccgtatctagagtagataatgtttacggtgacaaaaatcttttctgcacatgtccaagcatggatgaatttaaagaagatgctgcctaaa

SEQ ID NO: 220138 - DNA, 759 bp, Unknown
  Bacterial polypeptide expressing nucleotide sequence isolated from the Sargasso Sea
aatgttacctaattcagaaaaagattttttaaaaagacacattggaccttctaaagaggatcaatcaaaaatgttaaatgaattaaattatcactcactaaatgatttaatcgataatactgttccagaaaaaataaagttcaagggtgaattaaatataggagaatcaaattcagaatacgaagcattaagaaaattgagaacaatttcaaaaaaaaatcaagtttactcgaattttattggtatgggttattatggaacttatacaccatatgtaattttaagaaatatactagaaaatccaggttggtacacttcatatacaccttatcagcctgaagtagctcaaggaagactggagatgttattaaactttcagcaaatgattgttgattttacaggaatggatattgctaatgcttctttattagatgagggtacagctgctgcagaggctatgggtcttagtcatagattgaataaaaaagatagtaatttagtttttgtatctgagaattgtcatcctcaaacaataaatgtaattcaaacaagagctgaaccaatgggtttaaaagttttggttggtaaagaagatgaagttttagaccaattaaaagaagatttagtttgtggaattttaccatatcctggaactttaggagatattaaagacccaagtgaagcgattagtagaattcataaaatgaacgggaaggctgtgttagcttgtgatttggtagcgttagcaaaattaaaaaa

SEQ ID NO: 220139 - DNA, 758 bp, Unknown
  Bacterial polypeptide expressing nucleotide sequence isolated from the Sargasso Sea
attaaaaacaatcattggtaaggatagtgatttagaaaacatatcagaagacttggcgtgtggtattttacaatatcctggaaccctaggagatattaaagatccaagcgaaagtataagcagaattcacaaaagaaatggtaaagctattttagcctgtgatcttttagctttagcaaaacttaaaactccaggagaattgggtgcggatattgcgataggcagttcccaaagatttgggataccaatgggatatggtgggcctcacgctgcattttttgcaacaaaagatgagtataaaagatcaatgcctggaagaatagttggagtttcagttgatagaaatggaaacaaagcttacagattgtctttgcagactagagaacaacacatcagaagagacaaagcaacaagcaatatttgcaccgcacaagcgttattggcaatagtatcagctgcttatgcaatctatcatggtccaaaaggaattaaaacaatttctgaaagagtgtctcaattagcaaaaaattttgccgacaaattaaaacaatctgggtatgaattatattcagattatttttttgacacagtaactattaaaacaaatgaaaaaacagatcaaatatttaacaatgccttatctcaaaaagttaacatcagaaaagtaaattccaaaatgttagcagtttcatttgatgagaaaaaaaatgtatatagggcaaatcaattattaaaaatatttaattgcgcagaatcca

SEQ ID NO: 220140 - DNA, 763 bp, Unknown
  Bacterial polypeptide expressing nucleotide sequence isolated from the Sargasso Sea
atgcttaaagaattgggttgtaataacttagatgagttgattgaaaaaacagtcccaaaaaaaattctattaaaagaaaatttaagtattggcgaacctaattcagagtataaagcacttagaaaattaagagatatctctcaaaagaataaaatttattcaagttttatgggaatgggatattacggaaattatactccatatgtaatactaagaaatattttagaaaatccaggatggtatacttcttatactccatatcaaccagaagtggctcagggaagactagagatgcttttaaattttcagcagatggtaattgattttacagggatggatattgcaaatgcatctcttttagatgagggtacagcagcagccgaagcaatgggcttaagttatagaatttgtaaaaaagataccaaaaaagtctttgtctcgaaaaactgccaccctcaaaccattgatgttattaaaacaagagccgaaccattaggtttagaaataattgtaggggatgaagataaagatattaatgagaatattgtttgtggaattatacaatatccaggaactttaggagatataaaggatcctagtgaagctatcagcaaaatacataaacaaaatggaaaagcagtattggcttgtgatttattagctctcgctaaaattaaaacacctgccgaattaggagccgatatagctgtggggagcactcaacgatttggaattccaatgggttatggaggtcctcatgccg

SEQ ID NO: 220141 - DNA, 775 bp, Unknown
  Bacterial polypeptide expressing nucleotide sequence isolated from the Sargasso Sea
gtccttgttggaaatgaggataaagttttagagcagttaaaagaagatattgtttgtggagttttacaatatccaggaactttaggtgatattaaagatcctagtgaggccataagtaaaattcataaaaaaaatggaaaagcaattttagtttgtgatctccttgcgctttctatgttaaaaacaccaagagagcttggtgctgatattgctgttggtagctcccaaaggttcggtataccaatgggttatggaggacctcatgcagcattttttgcaacaaaagatgaatacaaacgatctatgccaggtaggattgttggggtttcagttgataggcatggaaaccaggcctatagattgtcattacaaactagagagcaacacattagaagagacaaagctaccagtaatatttgtactgctcaagccttactggcgattgtttcagcagcttatgccatttatcacggtccagatggaattaaaagtatttccgaaagagtatctcaattagcaaaaaattttgctgataaaataaaacaatctggatatgaattatactcagattatttttttgatactgtaacaatcatcaccaaagaaaagactgatcaaattttcaaaaattcactagatcaaaaagttaacattagaaaagttaattcagaaatgctttctgtttctttcgatgaaagaaaaaatgtttatagagtaaatcaattactaaaaatttttaatgctgcagagtctatcaaaaaagaggatcctactg

SEQ ID NO: 220142 - DNA, 867 bp, Unknown
  Bacterial polypeptide expressing nucleotide sequence isolated from the Sargasso Sea
actaatctgataaagaaagctaaacagtcaaaaatatatacttgtttagctacagatttattggctttaagcatattaaaaactcctgctgaaatgggagccgatgctgctgtcggaaatacacaaaggtttggcgtgcccatgggatatggaggcccacatgctgctttttttgctacttcagaaaattttaaaagaaaaatacctgggagaataataggcgtatcaaaagacagtcatggagcaaaagccttgagaatggctttacagactagagagcaacatatacgtagagaaaaagccacatctaacatctgcactgcacaggtgcttctcgcaatcatgtcatcaatgtatgcagtttatcatggcccgaaaaacataatttccattgccaatagggtccagagcctatgttctaatcttgcaacttctctaaatcatgctggtataaaaattttgcataaccaattttttgacacaattaggatattccccactgaaaattgggaaatagaagcagaaaatgaaaagttcaattttaggaaatttgaagatggcagtgttggaatttccttagatgaaagtactactgaagaaaatatcttaaagatttgtaaaatttttagtgcgagttatttatctgggaaaagtgtttttagtttggcggaagaaatgaaaaggggaacagcatttttagatcatgaagttttcaataaatatcattctgaaaccgagatgctacggtatattcataaactagaggtaaaggacctttcattaaacaatagtatgattcctcttgggtcatgtacgatgaaattaaatgcaaccacagaaatggtccctgtaacttggcaaaacttt

SEQ ID NO: 220143 - DNA, 799 bp, Unknown
  Bacterial polypeptide expressing nucleotide sequence isolated from the Sargasso Sea
ttgttaagaaattctaagtatttagaacatcctgtttttaattcatatcattcagagacagaaatgctcagatatctaaaaaagttagaagataaggatattgctctcaatagaactatgattgctctaggttcatgtacgatgaaattaaatgctaccgcagaaatgatacctatttcatggagagaattagcagaacctcatccatttgtgcctattgaacagatggaaggatatagaacaatgttcacagatcttaaaaattggttaagatcaatcactggtttctcaggagtttcacttcaacctaatgcaggtgcccaaggtgaatatgcaggtttaatggtaataagaaaatatcatttagatagaggtgatgataatagaaatatatgtttaataccgagttcagcacatgggaccaatccagcaagcgcccaaatggttggaatgaaagttgttgtagttaattgtgataaagagggaaatgttgattttgaggatttaaagaaaaaaactgaattacattctgaaaaccttggcgcattaatggtaacttacccctctacacatggagttttcgaggaaaaaatatcagacatctgtgatttaattcataaacatggaggtcaagtttatatggatggggcaaatttaaatgctctagtaggaatcgcaaaaccaggaaattttggtccagatgtttgtcatattaatttacacaaaactttttgtattccacatggtggaggaggacctggaatgggacctattgcatgtaaaagacattgcaagttta

SEQ ID NO: 220144 - DNA, 588 bp, Unknown
  Bacterial polypeptide expressing nucleotide sequence isolated from the Sargasso Sea
ggtcaatttggaggagatgtatcacatttaaacctccacaaaaccttctgtattcctcatggtggcgggggtccaggtgttggtccaattggtgtggtagaaaagttaaagccttttttaccgaaggatccgttagatggtgaatccgatggttatgctatctctgggacaaaatttggaagtgctagtattttacctattagttggatgtatattgcaatgatgggtcaggaatctctaagaaaggctactcaagcagcaattctaagtacaaactacttggcgaagagacttggggaacactacaaaattttatataccggtaaaaataaccttgttgctcatgaatgcataattgatgtcagaccatttaaagaatcttgtggtattgaagcagaagacatagcaaaaagacttatagattatggtttccatgcacctacaatgtcatggcctgtagctggtactcttatgatcgaacctactgaaagtgaatcactcgaagagctcaataggttttgtgagggtatgattggtatcagagaggaaattagagcaattgaagaaggcaaatcttctgaagataat

SEQ ID NO: 220145 - DNA, 580 bp, Unknown
  Bacterial polypeptide expressing nucleotide sequence isolated from the Sargasso Sea
gaggatcaattaatccaaatcaccggatttgatgctatatcaatgcagccgaattcaggtgctcaaggggaatacacaggtttgctgttgattcatcggtaccagatccatcgaggcgaaggccaaagaaacatctgcctgatcccgagttccgcacacgggaccaatcctgccagcgcgatgatggcatccatgaaagttgtcattgttcaatgtgatgaagagggcaacattgacctggaagatcttgaggtaaaagctcaaaaacattcatctgaactttcagctttgatgattacttatccgtccacccacggtgtttttgaagaaacgctgaccaagatttgcgacatcatccatcatcatggtggccaggtttacatggatggagcaaatctgaatgccctggtcggcatagcgcagcccggaaaaatcggtcctgacgttttgcacatgaaccttcataaaaccttctgcattcctcatggtggcggaggtccgggaatggggccgattggatttaaaaaacatctcgcgccttttgctccaagtcattcggtttgcccggttccaggtgttc

SEQ ID NO: 220146 - DNA, 898 bp, Unknown
  Bacterial polypeptide expressing nucleotide sequence isolated from the Sargasso Sea
gcagaatctatgattatgttttacaacagtagaaaaagaaaagaaattattgctggtaaaaataagtttttcgtagcagataatttgtttcctcaaactatagaagttgttaaggggagagctaaaaatttggatattgagttaattataggagattacaattcaatagaacttgatgatcaatattttggatcgattattccttatacagatgttactggtagccttattgaaattgagccttttatcagtaaatcacatgaggtgaatagctctgttgctgtttctgctgatattttaagtttggttttactcaagtctccaggctctatgggagctgatgttgtatttggtactacacaaagatttggagttcctatgggatatggaggtccacatgctgcttactttgcagccaaagagagctttaaaagaaacatgcctggcagaattattggagtatctattgatgctgatgaaaataaagcacttagaatggctttacagacaagagagcagcatattaaaagagataaagctacttcaaatatctgtactgctcaagcgttacttgctgttattgcaagtatgtacgctgtttatcatggtccaaaaggattaaaagaaattgctgaaaatgttaactctttagctaaaagaatggccttgggcttattaaagtcaaatgttactttaggaagccatcgttttttcgatacggttcatgttaaaaatattgatgcacataaagttaagcaactttgtgaagaaaacagttgtaatatattttgtattaataagaatgagatttcaatttcttttgcagaaactcataataacagtgatgttgatttattgttggaattaattaaaagtactctttctggaaatgataatg

SEQ ID NO: 220147 - DNA, 621 bp, Unknown
  Bacterial polypeptide expressing nucleotide sequence isolated from the Sargasso Sea
gttcaagtattttatctatatcttggatgtacataaaaatgatgggttctgagggtttaaaattggcaacacagattgcaattttaaacgctaactatattgcacataaattaaaaaatcattttccaattctttataaaggaacaaatggaaacgtagctcatgagtgtattatagacattagatcaattaaaaatgatactggcgtgacagaagaagatattgctaaaagattaatcgattttggttttcatgctcctactatgtcttggccagtgccaggtaccatgatgattgaacctacagaaagtgaaagtttacaagaactagatagattttgtgattgtttaataaaaattaaagaagaaattgacaaaattaaaaaaggtgattttgataaaaatgacaatcctatcaaaaatgctccccatacagatttagagcttgcctcaaataattgggaacataaatattcgcgagaggaagctgcttacccttcaaattttttgaaatcttgcaaattttggccacctgttgcaagagttgataatgtgtatggagataaaaatctattttgtacatgtccatcaatggatgaatttaaagaagacgcagcataat

SEQ ID NO: 220148 - DNA, 475 bp, Unknown
  Bacterial polypeptide expressing nucleotide sequence isolated from the Sargasso Sea
aatggcctttagcagaaggatctcacggagcaaaagcatgaagttttttgcgtccgaagattgtcatccccaaaccctagatgtcctgaaaacccgtgcagaaccgatgggaatcgaactggttttgggaacaccagaagataacctggaaactggattttttggggttttgcttcagtacccttctaccacaggcgtcatttatgatattggaaagtggattgagcaatggcatcaaaacgacaccatggtttctgttgcaaccgatctgttaagtttggttttactcaaaccaccaggggagttgggtgttgatgtcgtcatcgggaactcccaaagattcggggtgccaatgggattcggaggacctcatgccgctttttttgcaacccatgaccgccacaaacgttccatgccgggcaggctgattggagtttcggtggatgggcgtggaagacgggccttgagaatggcc

SEQ ID NO: 220149 - DNA, 881 bp, Unknown
  Bacterial polypeptide expressing nucleotide sequence isolated from the Sargasso Sea
catgaaagttgttgttgttaattgtgactcacatggaaatgtagactatgaagatttaaagaaaaaagcagaagaatattcagatactttgtcagcactaatggtaacttatccatcaactcacggagtttttgaggaaaaaataacggatatttgcgacttaattcataaacatggaggtcaagtttatatggatggggcaaatctaaatgcattggttggtattgcaaaaccaggaaaatttggtcccgatgtttgtcatatcaatttacacaaaacattctgtatacctcatggtggaggaggaccaggaatgggaccaattgcgtgcaaaaaacatttagaagtttacttaccaaatcatccgataataagtgactgtgggccagcaactgggataggagcaatctcagcagcaccttggggaagttcaagtattctttctatatcgtggatgtatattaaaatgatgggttccgaaggtttaaaacttgctactcaaaatgcaattttgaatgccaattatatagcaaataaacttaaagatcattttcccattttatataaaggcaaaaatggaaatgtagctcacgaatgtattatagatattagaaaaattaaaaacgaaacaggaataacggaagaagatattgcaaaaagattaatagattttggttttcacgcacctacaatgtcttggcctgttccaggaacaatgatgatagaaccaacagaaagtgaaagtttatctgaaatcaatcggttttgtgaagctttgataaaaattaaagaagaaattaataaagtaaaaaatggagaatttgataaaattgacaatcctttaaagaacgcacctcatacccatgtggaacttgttgcaa

SEQ ID NO: 220150 - DNA, 714 bp, Unknown
  Bacterial polypeptide expressing nucleotide sequence isolated from the Sargasso Sea
aatgctaaaaaacgcccagaaagattttatccaaaggcatataggagcttctaaagaagaacagaaagttatgctcaaagaattgggttacaacaacttagatgagctgattgctaaaacagtgccagaaaaaattctattaaaagaaaatctaagtattggtgaacctaattcagagtacaaagcacttagaaaattaaaggatatctctcaaaagaataaaattttttcaaattttattggaatgggatactacggaaattataccccatatgtaatactaagaaatattttggaaaacccaggatggtatacttcttataccccatatcaaccagaagtagctcagggaagactcgagatgcttttaaattttcaacagatgataattgattttacagggatggatattgcgaatgcatctcttttagatgagggtacagccgcagctgaagctatgggtttaagttatagaatttgcaaaaaagatatcaaaaaagtctttgtctctaaaaattgccaccctcaaacaattgatgtaattaaaacaagagctgaaccattgggtttaaaaataatagtaggggatgaagacacagatattaatgagaatattgtttgtgggattttacaatatccaggaactttaggagatattaaggatcctagtgaagctattagtaaaatacatagacaaaatggaaaagcagtatt

SEQ ID NO: 220151 - DNA, 666 bp, Unknown
  Bacterial polypeptide expressing nucleotide sequence isolated from the Sargasso Sea
gaacaccttctggaataggggctatttcagcagccccttggggaagttcaagcattctttccatatcatggatgtatattaaaatgatgggtgcagaaggattaaaacttgctactcaaaatgcaattttaaatgctaattatatagcacacaaacttaaagatcattttccaattttatataaaggaaaaaatggaaatgtagctcatgaatgcattatagatattagaaaaattaaaagcgaaataggaatcacagaagaagatatagcaaaaagattaattgattttggttttcatgcaccaacaatgtcttggcctgtcccaggtacaatgatgatagagcccacggaaagcgaaagtttgtccgaaattaatagattttgtgatgcgctaatcaaaataagagatgaaattaataaagttaagaatggagaatttgataaaattgataatcctttaaaaaatgcgccgcatacgcatatagaacttactgccaatgaatggaaacataaatatgatagagaaagtgcagcttacccttctgcgactttaaaatcttataagtactggcctccagttgctagggtagacaatgtttatggagataaaaatcttttctgttcatgccctacaatggatgaatataaagaatccgctgcataaa

SEQ ID NO: 220152 - DNA, 885 bp, Unknown
  Bacterial polypeptide expressing nucleotide sequence isolated from the Sargasso Sea
ttttgtaccaatcgaacaaatggatggttttagaaccctttttaccgatcttaaaaactggttgcgatcgatcactggtttttcaggtgtttcattgcaaccgaatgctggcgcacagggagaatatgccggattgatggttataagaaaatatcatttagagagaggtgaaggaaatagaaatgtctgtttaataccaagctcagcccacggaactaatcctgcaagtgctcaaatggtaggaatgaaggtcgtagttgtaaattgcgataagcaaggaaacgtagattacgaagatttaaagaaaaaagttgaacagcattcagcaaacttaggagctttaatggtaacttatccatcaacacatggagtatttgaagaaagaatttcagaaatatgtgatctagttcacaaacacgggggacaagtttatatggatggagcaaatttgaatgcattagttggaattgctaaaccagggaattttggcccagatgtatgtcatattaatttacacaaaactttttgcattcctcatggaggaggaggtccaggaatgggtccaatagcatgtaagagacatttggaaatttacttaccttcacaccctataataaaagattgtggtcctgctacaggaataggtgcaatatcagctgctccttggggtagttcaagtattttatcgatatcgtggatgtatattaaaatgatgggctcggagggtcttaagttagcaacacaaattgcaattttgaatgcaaattatatagcgcataaattaaaagatcactttcctatactttataagggcatcaaaggcaatgtagctcatgaatgtataattgacataagatctataaaatctgagacaggaataacaga

SEQ ID NO: 220153 - DNA, 652 bp, Unknown
  Bacterial polypeptide expressing nucleotide sequence isolated from the Sargasso Sea
aattggtgctatttcagcagctccatggggaagctctagtattttatctatctcatggatgtatattaaaatgatgggatctgaaggtttaaaaaaagcttctcaagttgcaattttaaatgctaactatattgctcataagttaaaaaattcattcccaattttatataaaggaaaaaacggcaatgttgcacatgagtgtattattgatattagaaaaattaaaactgatactggaattacagaagaagatatagctaaaagactcattgattttgggtatcatgctcctacaatgtcttggccagtagctggtacgatgatgattgaacctacagagagtgaaagtttgagcgaaatcaatagattttgttcagcattacaaaagattaagcaagaaatagataaaattcaatcaggtcattatgataaaattgataatccacttaaaaatgcgccacatactcacgttgaattaagctcaaacaaatgggaacataagtacgaaagggaagaagcagcttatccatctgaaattttaaaaacagttaaatattggcctcctgttgctagagtagataatgtttatggagataaaaatttattttgtacctgcccatcaatggatgaatacgaggattctgcagcataa

SEQ ID NO: 220154 - DNA, 877 bp, Unknown
  Bacterial polypeptide expressing nucleotide sequence isolated from the Sargasso Sea
acatggcggtcaagtatatatggatggtgcaaatcttaatgcacttgttggaattgcaaaaccaggtaatttcggaccagatgtttgccatataaacttacataagactttttgtattccacatggaggtggtggaccgggaatgggtcctattgcttgcaaaagacatttggaaacttatttacccaatcatccagtagttaaagattgtgggccagctacaggaataggcgcagtatcagcagctccatggggaagttcaagtatcttatcaatttcttggatgtatattaaaatgatgggatctgaaggtcttaaacttgcaacagagacagcaattttaaatgcaaattatattgcaaatagactgaaggatcattatccaattttatacaaaggaacaaacggaaatgttgcacatgagtgtataattgatattagatcaataaaatctgaaacagggattactgaagaagatattgcaaaaagattgattgattatggttttcatgcaccaacaatgtcatggcctgttgcaggaaccatgatgattgagcccacagaaagtgagagtttatctgagttagacaggttttgtgatactttaataaaaattaagttggaaatcgataaaattaaatctggcgaatatgataaaattgacaaccctataaagaatgctcctcatactgatttagagttagcatctgataattggcaacataagtattcgagagaagatgctgcataccctgcaaaatttttaagagtaaataaattttggcctcccgttgctagagttgataatgtatatggagataaaaacattttctgtacatgtcctagtatggatgaattcaacgaagacgctgcataa

SEQ ID NO: 220155 - DNA, 835 bp, Unknown
  Bacterial polypeptide expressing nucleotide sequence isolated from the Sargasso Sea
cttgagatgttattaaactttcaacaaatgattgttgactttacaggaatggacattgctaatgcatctttattagatgagggcacagcagcagcagaggctatgggtcttagtcatagattaaataaaaaagatagtaatttagtttttgtatctgaggattgtcatcctcaaactatagatgtaattcaaacaagagccgaaccaatgggtttaaaagttttagttggtaaagaagatgaagttttagataaattaaaagaggatttagtttgtggaattttacaatatcctggaactttaggaaatattaaagacccgagcgaagcaattagcaaaattcataaaaagaatggtaaggctgtattagcttgtgatttattagctttagcaaaattaaaaacgccaagagaacttggtgctgatatagcagttggaagctctcaaagatttggtattcctatgggatatggaggtccacatgcagccttttttgcaactaaagatgagtataaaagatcaatgccaggaagaattgttggggtgtctgttgatagacatggtaataaagcatatagattatctttacaaactagagagcaacatatcagaagagataaggcgacaagtaatatttgtacagctcaagctttattagcaattgtctcagcagcatacgctatttatcatggtccagatggaattagaaatatttctgaacgagtttctcaattagcaaaaagttttgctgataaaataaaacagtctggatatgaactctattctaattatttttttgatactgttacaattattaccaaagaaaaaactgatc

SEQ ID NO: 220156 - DNA, 802 bp, Unknown
  Bacterial polypeptide expressing nucleotide sequence isolated from the Sargasso Sea
tatccttcaactcatggtgtatttgaggaatccattgttgaaatttgtgaaaaaattcataatgcaggtggacaagtttatatggatggagcaaatttaaatgcgatggtaggtattgcaaaaccaggcaaatttggtccagatgtttctcatatgaatttacataaaactttttgtattcctcatggtggtggcggtcctggtatgggtccaataggtgtaaaaagtcatttagaaaaatttttacctggtcacccggtttttcaaaatgaattaggattaactaaccaagaagctgtatcggcagcaccttggggtagtgcttctattttaccaatttcttattcttatatttctatgatgggtgatgaaggtttaaaacttgcgactcaagtcgctattttaagtgctaattacattaaaacaagattgaataaatattttccaattttatacaaaggaaaaaatgaaatggtagctcatgaatgtataatcgatattaggccttttaaaaacgaattaaaaatttctgaagaagatatagccaaaagattaattgattatggttttcatgctccaaccatgtcatttcctgttcctggaacattaatgattgagccaacagaaagtgagcctaaagaagaattagatcgtttttgtgaagctatgatttctatatatgaagaaatcaataaagtacgcaatggtgaatttgatttaattgataatcctttaaaaaatgcaccacatactatacatgaaatctcagctgaaaattgggaacataggtattcaagacagg

SEQ ID NO: 220157 - DNA, 709 bp, Unknown
  Bacterial polypeptide expressing nucleotide sequence isolated from the Sargasso Sea
gataagcttagtataggcgaaccaaattcggaatatgaggctcttagaaaattaagaattatttcaaaaaaaaatcaaatctactctaattttattggcatgggctattatggaacttatactccttatgtaatactaagaaatatcttagaaaatcctggctggtacacatcttataccccttatcaagcagaagtggctcaagggagattagaaatgttacttaattttcaacaaatgatcattgattttactggaatggatattgcaaatgcatctttattagatgaaggaactgcagctgcagaggcaatgagtttaagttacagaataaataaaaaaaatagtaaaatagtttttgtttcaaaagattgccatccacaaactatcgaattaattaaaactagagctgagcctttagagttaaaaatcatagttggaaatgaaaatactgatctagaaaaaattaatgaagatatagtatgtggaataattcaatatcctggaacgctgggagacataaaagacccaagcgaaactattagcaaaattcataaaaaaaatggaaaggcggtattagcttgtgacttattagctttagctaaattaaaaacgcctggggaacttggagctgatatagcagttggaaattcacaaagatttggaatcccaatgggctacggtggcccacatgctgcattttttgcaa

SEQ ID NO: 220158 - DNA, 805 bp, Unknown
  Bacterial polypeptide expressing nucleotide sequence isolated from the Sargasso Sea
tggttgggctttgctttcaggttcttttggaggagatgtttctcacttaaatctccacaaaacgttttgtattcctcatggtgggggcggcccgggcattgggccaataggtgtagtagaagcactgaaagactttatgccatcaactcacgaagaagcaaaagctgtgggaccagtatcaggaacggattggggcagtgccagcatacttccaataagctggatgtacataaaaatgatgggaacaaacggccttgttcaggccactcaaaatgccatccttaatacaaattatattgcatctaaactaaaggatcattatgagatcttatataagggagaaaacggacttgtggcccatgaatgcataattgacattaggccgttaaaagaaactgcaggagtagaagtagaagatgttgcaaaaaggttaattgattacggttttcatgcccctactatgtcttggcctgtagctggaacgttaatgatagagcctactgaatcagaatctttaaaggaacttgatagattctgcgaagcaatgatttctattagaaaagaaatatcagaaattgaaaataatgaagtcccaagagaagacaacctcttaaaaaattctccacacacagctaaaaaactaatttcagactcttgggaacatccatacgacagagttaaagcaggttatcccgtagaaggtttatatgaaagcaaatactggccacctgtaggcagagtggataacgtctatggagacagaaacttagtttgcagttgtccttctatggaagactacgaataa

SEQ ID NO: 220159 - DNA, 674 bp, Unknown
  Bacterial polypeptide expressing nucleotide sequence isolated from the Sargasso Sea
tatgacagaaaaaaataaatctgaatttataaatcgacatgttggacttaacgactctgatataaaaaaaatgcttaagcatctaagcattaaatcattggatgaacttattgaaaaagtaatcccagaaaatatactatctccaattactgaaaatttattaaaaaaagacctgtctgagacagaaacgcttgcccggttaaaagaatattctaaggaaaataaactatacaaatcatttatcggtatgggatactacgggacgttagtccccaacgtaattaagagaaatatacttgaaaatcctggatggtacacacaatataccccttaccaagcagaaatcagtcaaggaaggcttgaagcccttttaaattttcaaactatgatttccagtgcaactggcttaccacttgctaatgcatcacttttagatgaatcaacagctgcagctgaggcaatgaccatgttttacggctcaacaaaagatcaagataaaaactcgttttttatttcccaaaattgccaccctcaaacaattgatgttataaaaactagagccgaaccgttggggataaagctaattattggtaatgaagattcaattattttggataattctatctttggaatgttattacaatatccaacatctgatggtagaatcgttgatt

SEQ ID NO: 220160 - DNA, 835 bp, Unknown
  Bacterial polypeptide expressing nucleotide sequence isolated from the Sargasso Sea
ttagttggaattgctaaacctggtaaatttggtccagacgtctgtcacataaaccttcataaaacattttgtatacctcacggtggcggtggaccgggtatgggtcctatagcttgtgcaaaacatttagaagattttttaccaaatcattcagttataaaaagtattggcactgataaaagccttggttcagtatctgctgctccttggggaagctcgagtattttagttatatcatggatgtatattaaaatgatgggagctgaaggtttaaaaaaggcatctcaagtagcgattttaaatgcaaactatatttcaaaaaaattatcaaaattttataaggttttatacactggaaaaaatggaaacgtcgctcatgaatgcataattgatttaagacctattaaagctaaatcaggaatttcagaagaagatatagcaaaaagactgatcgactacggttaccacgctccaacaatgtcttggcctgttgcaggaacattaatgatagagccaactgaaagcgaaggattagacgaaatgaaccgtttttgtaacgcattaatatcaatcaaagaggaaattgataaagttgataaaggaaattttgataaaaaagacaatcctcttaaaaatgctcctcatacttatttagagttaagttctaatgaatggaaacattcatacacccgtgaagatgctgcgtttccaaaagaatatttaaaagataataaattctggccaccagtagcaagagttgacaatgtatatggagacagaaatttagtttgtacttgtccaagtctcgatgaatacaaggatgaggctgcataaa

SEQ ID NO: 220161 - DNA, 826 bp, Unknown
  Bacterial polypeptide expressing nucleotide sequence isolated from the Sargasso Sea
gcgaaacattttggaaaatcctgcatggtatactgcttatacaccatatcagccagaaatatcacaaggtagacttgaggcgttgcttaatttccaaacgatggtttgtgatttaacggggatggaaatagccaacgcctcacttctagatgaggctactgctgctgcggaggcgatggttttctgtcataagatcactaaatccaagagtgatgtaatttttgtttctaattcgtgccacccgcaaattattgacgttattcagacaagagctgaaccaattgggatccgggtagtaattggcgatgaacatgaaaatctttcaagtcaggcttttgccgtgctgctacaatatccttctaccaatggggaaatccatgattattcaaagttaacaaaggatataaagtctaatggtggcatgactattgtagctgcggacctattgtcactttcgcttcttaagcctccaggggaatggggggctgatgttgttgttggttctagtcaacgatttggagttcctcttggttttggtggaccgcatgcggccttttttgccacacgggaggagtataagcggtctatccctggtcgcatcgttggaatttcgcaagatgctaacggtgatgttgccttaagattggctctccagacgagggagcaacatatccgaagagagaaagcgacaagcaatatttgtacggcgcaagttttacttgcagttattgcttcaatgtatgcggtttaccatggcccggatggcattcggcaaattgctacaagaataaacattcttgcaaaggtcctagccgagggaattaag

SEQ ID NO: 220162 - DNA, 833 bp, Unknown
  Bacterial polypeptide expressing nucleotide sequence isolated from the Sargasso Sea
taccatagttccaccagtgatagctcgaaatgttttggagaatcctggttggtataccgcttatacaccttatcaagcagaaatttcacaagggcgtctggaagcactattaaattttcaaacaatggtgatcgatctgactgggctagaaatagccaacgcgtcacttctggatgaaggcactgctgcggctgaggccatgacgatgcttcagggcgacgctgggagtgacggaaggaattcattttttgtttcgaacaattgtcaccctcagactattggagtcgttagaggtcgtgccgaaccattaggcattgagatagtagtaggaacggattcagacttccttgaggaaaagagtaaagaaacttttttcggtgccttggttcagtatcccggcactgatggactgataactgactatagccacttttgcgatacggcccacagtaatggaattcctgtcgtgatggctgccgatatcctggcacttacgctgttaactcccccgggtgaaatgggggcagatgtagctgtcggaagtacacagcgatttggagttcccatgggatatgggggtccacatgcggcctacttcgcaacaaaggagaaattcaagagaaaaataccaggtcggattattggtgtctctaaggatgaggaaggcgagccagctctccgaatggctttgcagacgagagagcaacacattagacgtggcaaggccacctcaaatatttgtactgctcaggttcttctggctgtgatggcaggaatgtatggcgtataccatggacctgagggtttactcaaaattgccaaacgtatccata

SEQ ID NO: 220163 - DNA, 880 bp, Unknown
  Bacterial polypeptide expressing nucleotide sequence isolated from the Sargasso Sea
tgaatttggtgttgatgtagcagtgggtagtatgcaaagatttggggtaccaatgggttttggtggcccccatgcagcatattttgcttgtagcgaaaaatataaaaggctgatacccggaagaattgttgggcaaactctctctaaaaatggagaaaagtctctaagactagcattgcaaacaagagagcaacatattagaagggaaaaggccactagtaatatttgtactgctcaatctttattagccataatttcttctttttatgctatttatcatggaccctctggattaacgcaaattgctaagagattagttgagttgagaataaatttagaatcaagtttagctgctttaggttttgatattcctgatgggattagatttgatagtgttgatgtttattctgaacactcccagaggatccataatgaagctttaaaaaatggctataacttaagaattttgccgttgggatcaactattgaaaattcaactggctttgggatctctttagatgagcttagtaatgaaaaagaaataaaagatattttgactttcatagcaaaccttctagaaaaagaagaagatttagagcatataatatttgataaagaatttcatcttgaaagtttagctttgagatccagtgcatggatgcagcaagatatattcacaaattaccaaagtgaaactgaattaatgagatatatattcagacttgcagaaaaagatttttctttggtagatgggatgatgccattgggaagctgtaccatgaagttaaattctgcagcagagttaaatccagtctcttgggctaatttatcttcccatgcatccttttgccccaccagatcaaatcaagggctatcaaaa

SEQ ID NO: 220164 - DNA, 253 bp, Unknown
  Bacterial polypeptide expressing nucleotide sequence isolated from the Sargasso Sea
ctttccagatgtggttcacgcgcagggcaagcccgcgctgcgcctcgcgctgcagacgcgcgaacagcacatccgccgcgagaaggccacgtcgaacgtgtgtaccgcgcaggcgctgctcgcgatcatggccagcatgtacgcggtctaccacggcccgcacggcctgaaaacgatcgcgctgcgcgtgaaccgcatcgcggcgctgctcgccgccggcgtgaagcagctcggcttcgcgaccgtcaacgac

SEQ ID NO: 220165 - DNA, 850 bp, Unknown
  Bacterial polypeptide expressing nucleotide sequence isolated from the Sargasso Sea
catgggttatggaggacctcacgcagcattttttgcaactaaagatgaatataaaagatctatgccaggtagaattattggtgtttcagttgatagacatggaaataaggcatacagattgtcacttcagaccagagagcaacacattagaagagacaaagctacaagtaatatttgtacagcccaagctttattagcaattgtgtcagcagcatatgccatttatcatggaccagacggaattaaaaatatttctgaaagagtatctcaattagcaaaaaattttggagataaaataaaacaatctggatatgaactgtattcagattatttttttgataccgtaactattattactaaagataagactgatcaaatttttaaaaatgctttagatcaaaaagtaaatattagaaaagttaattcagaaatgttgtcagtatcttttgatgagaaaaaaaatgtttatagagtaaatcaactgttaaaaatttttaatgcagcagaatcaattaaaaaagaagaccctacagtcagtctacccaatcttccaaaaaatttactaagaacttcaaaatatttagaacacccagtttttaattcataccattcagaaactgatatgcttagatacttaaaaaaattagaggataaagatatcgctcttaatagaacgatgattgcattaggctcatgcactatgaaattaaatgctactgcagaaatgatacctatttcatggagagaattagctgagcctcatccgttcgtacctgtagagcagatggaaggatatagagaattattcaccgatcttaaaaattggctaagatcaattactggtttttct

SEQ ID NO: 220166 - DNA, 781 bp, Unknown
  Bacterial polypeptide expressing nucleotide sequence isolated from the Sargasso Sea
tcagatgaagatcaaaataaaatgcttaaagaacttaattacaaatcactagatgatttaatcaaaagtacagttccagaaaagatccaattgaaagatgaattaaatattggtgagtcaaattcagaatatgaagcattaagaaaattaaaagcaatttcgaaaaaaaatcaaatttactctaactttatagggatgggttattatgccacttatacgccatatgtaattctaagaaatattttagaaaatccaggttggtacacttcttatacaccttatcaacccgaggtagctcaaggaagattggaaatgctgcttaatttccaacaaatgatagttgatttcacagggatggatatcgcaaatgcatctttattggatgaaggaacagcagccgcagaagcaatgggattaagtaatagattaaataaaaaggacagcaatttagtttttgtctcagaaaattgtcacccacaaacaattgatgtaatccaaacaagagcagaaccattgggattaaaagtacttgttggtaatgaagataaagtattagatcaattaaaagaagatttagtgtgtggcatattgcaatatccgggaacattaggagatataaaagatcctagcgaagcaataagtaaaattcataaaaaaaacggtaaatcaattttagcttgtgatttattagcacttgctaagttaaaaacaccaagagaactaggagcagatattgctgtaggaagctctcaaagatttggaataccgatgggctacggtg

SEQ ID NO: 220167 - DNA, 961 bp, Unknown
  Bacterial polypeptide expressing nucleotide sequence isolated from the Sargasso Sea
ccagtatcccggcacctatggccatgtgcgtgacttcaccgatcacatcgccaagctgcatgagcacaagggcatcgccgttgtttcggccgacccgatgtcgctgaccctgttgaaagagccgggcgcgatgggtgcggacatcgcagttggctccacccaacgctttggcgtgccggtgggcgcaggggggccacatgcggcctatatggcgaccaaggacgcctataaacgtaacatgccgggccgcatcgtcggcgtgtctgtcgacgcacatggcaacaaagcctatcgcctgtcgctgcagacccgcgaacagcacattcgccgcgaaaaagcgacctccaacgtctgcaccgcgcaggcgctgctggcggtgatggcgtcgatgtatgcggtcttccacggccccaaagggttgcaggcaatcgcgcagcgtattcatcgcaaggccgtgcgtctggccaaaggtcttgaggaagcaggctttaaagtcgacccacaggcgttctttgacacaatcaccgtggatgtcggcccgttgcaggcagcggtgatgaaatccgccgttgatgagggcatcaacctgcgtcgcgtgggcgaaacccgtgttgggatctccgtcgatgaaaccacgcgccccgagaccatcgaggcggtctggcgtgcctttggcatcgtgcgtgcggatgacaatttcagccccgagtaccgggtgcctgagaacatgcaccgcaagacggaatatctgacgcatccgatcttccacatgaaccgggccgagaccgagatgatgcgctatatgcgtcgcctcgcggaccgcgatctggcgctggaccgtgcgatgatcccgcttgggtcctgcaccatgaagctcaatgccgctgcggaaatgatgccgctgagctggccggagttttcgaccatccaccccttcgcacctgccgatcagcaggaaggc

SEQ ID NO: 220168 - DNA, 893 bp, Unknown
  Bacterial polypeptide expressing nucleotide sequence isolated from the Sargasso Sea
gatgggttatggtggtcctcacgcagcattttttgcaacaaaagatgaatataaaagatctttaccaggtagattagtaggagtttcagtggatagacacggaaataaagcctatagattatcattacaaactagagagcagcacataagaagagataaagctacaagcaacatttgtacagctcaagccttattagcaattgtgtcagcagcatatgctatttatcacggtccagagggaattaaaaatatttctgaaagagtgtctcaattagcaaaaaattttgctgataaaataaaacaatctggatatgaattatattcagattatttttttgatactgtaactattatcactaaagataagactgatcagattttcgaaaatgctttaaatcaaaaagttaatattagaaaagtaaattcggaaatgttatcagtgtctttcgatgaaagaaaaaatgtttatagagtaaaccaactactaaaaatttttaatgcagcagagtcaattaaaaaagaagatcctgtagcaaatttagtaaatttaccaaaaaatttaattagatcttctaaatatttagaacaccctgtttttaattcatatcattcagagacagaaatgcttagatatcttaaaaagttagaagataaagatatagctcttaacagaaccatgattgcactaggctcatgtactatgaaattaaatgctactgcagaaatgatacctatttcatggagagaattagctgagcctcatccgtttgtgcctgttgaacagatggagggttatcgagaattgttcactgatcttaaaaattggctaagatcaatcactggtttttctggagtttcgcttcagccgaatgcaggtgctcaaggtgaatatg

SEQ ID NO: 220169 - DNA, 810 bp, Unknown
  Bacterial polypeptide expressing nucleotide sequence isolated from the Sargasso Sea
actaaatgctacgacagaaatggtacctgtaacctggccagagtttagtaatatccacccatttgcaccagttgagcaggtcaagggatacatgaaaatttttgatgatttgaaatcttggctttcaatattaacaggattcgacgactgctccttgcaaccaaattcaggagcacagggagagtatacaggattactagtaataagagcttaccacattagccgaaatgaaaggcatcgtaatatttgcttagtcccagaatctgcgcacgggacaaatcctgcaagcgcgataatggctggtatgtcagttgagataatctcatgcgatcaaaatgggaacattgatattcaagatttaaaagcaaaagcagagttacactcagaaaatttatctgctataatgctaacctatccctctacacatggaatttttgaaaatgaaattcaagaagcctgtgatatagtacacgatcatggcgggcaagtatatattgatggagcaaatttaaatgctatggttggactctgtaagccgggagagtttggtggagatgttatgcatattaatcttcataaaacattttgtatacctcacggtggtggcgggcctggtatgggaccaattgtctgcaaaaaacatctttcgaagtttttgccttcgcattcatacaatactccgaacgaggatgaaaatgccattaatcctgtatcagcggcaccctatggaagcagcagtatacttattatctcatgggtttacatatcattactaaatagtgaagggttaacagaagcaacaaaaatagc

SEQ ID NO: 220170 - DNA, 778 bp, Unknown
  Bacterial polypeptide expressing nucleotide sequence isolated from the Sargasso Sea
aagcaaaattttaatttgatgtatcatgataatggatttattggtatctctttagatgagaaaacagattttagtgaagttgaggcacttgcaaagttatttgatataaaaagtgattctaagaactcttataatatttttaagccgaatagaacaggaaatattttaactcactctatctttcatagcattaattctgaaacagaaatgcttagatatattaacaaattagagaaaagagatctttctttaaactatagcatgataccacttgggtcatgcactatgaagcttaacgcaactgttgaaatgattccgattagttggccagagtttaattcaattcatccttttgctccattaagtcaggctaaaggttataaaaaaatcattaatgaactggaagaaatgctctataaagtaactgggtttgatgctgtatcttttcaaccaaattctggtgctcaaggagaatatgctggattattaagcattagagaatatcataaagcaaataattcaacaagagatatttgtctaatacctgaatcagctcatggaacaaatccagctagtgcaataatggcaggacttaaagttgtaatagtaaaatgtgacgatcatggaaatatagattatgaagatttaagtaaaaaagttgacgaagcaggtgatagactatcatcattaatggttacttacccttctacgcacggtgtatttgaacataacattgatgaaatatgtaatttaattcatgataatggtggcttagtct

SEQ ID NO: 220171 - DNA, 912 bp, Unknown
  Bacterial polypeptide expressing nucleotide sequence isolated from the Sargasso Sea
cctgctagtgcacaaatggttggaatgaaagttgttgttgttgattgtgataaagaaggaaatgttgattttgaggatttaaagaaaaaagcagaaatgcattctgaaaatcttggagcattaatggtcacttatccgtctactcacggagtatttgaggaaaaaattacagatatatgtgagttaattcataaacacggtggccaagtttatatggatggtgcaaatttaaacgcgcttgttggtatagcaagacctggaaattttggtccagatgtttgtcacataaacttacacaaaacattctgcattccacatggtggtggaggaccaggaatgggaccaattgcatgtaaaagacatttacaagtttatttgcctaatcatccagttgttaaagactgtggacccgcaacaggaataggagcagtttcagcagcaccttggggaagttcaagtattttatcaatttcctggatgtatattaaaatgatgggttctgagggtttaaaattggctactcaaattgcaatactaaatgcaaattatatagctcatagacttaaagatcattacccaattctttataaaggttcaaacggtaatgtagctcatgaatgtattattgatattcgatctattaaaactgaaacagggattactgaagaagatatagctaaaagattgatcgattatggttttcatgcaccaacaatgtcatggccagtagcaggtacaatgatgattgaaccaactgaaagtgaaagtttgtctgaactggatagattttgtgatactttgattagcattaaatctgaaatagatatgatcaaatcaggaaaatttgataaagttgataatccaattaaaaatgcgcctcatacagatattgaattagcttcagatgaatgg

SEQ ID NO: 220172 - DNA, 566 bp, Unknown
  Bacterial polypeptide expressing nucleotide sequence isolated from the Sargasso Sea
aatgaataaagaatttatcaataataatacctttgctagcaggcatataggtccaagaaatgatgaaattcatttaatgctaaataagattgattgcatatctttagatgatttaatcaacaaagctgtacctgaaaatattttatttgatcatccactaaatttaaaaccaggaatgagtgaagattttaataaaattaacttacaattattatctataaaaaataattttaaaaaaacttatattggactaggatattatggaacagttacccccagtgtaattttgagaaatattcttgaaaatcctggatggtatactgcatatacaccatatcagccagaagttagtcaaggtcgtttagaaatgttaatgaatttccaacaaatgataatcgatctaacaggaatggaaatcgcaaatgcttctttattagatgaaagtacagctgccgcagaagcaatgatgttagcatacaaatatacaaacaaaaaaaagaaaactttttgtattcaaaatgaatgtcatccgcagactatttctgtattaaagacaagagctaagc

SEQ ID NO: 220173 - DNA, 807 bp, Unknown
  Bacterial polypeptide expressing nucleotide sequence isolated from the Sargasso Sea
tttggcaggtaacctaaaaagggtagcggcatttttagaccatgaagtattcaataaatatcattctgagactgagatgcttcgctacattcataagctggaaataaaagacctttcattaaataatagcatgattccacttgggtcatgtacaatgaaattaaatgccactacagaaatgattcctgtaacatggcaaaacttttgcgacattcatccgttctctcctttagaacaaacgaaaggatattctagattaatagatgaacttagcagctggttatcaagattaactggttttgattcatgctcaatgcagcccaattctggtgcacagggtgaatatgcaggattgcttgtcattagagcatatcatctaaaaaatggagatggccaccgtaatatatgtcttgtccctgaatcagcccatggtacgaatccagctagtgcaattatggcaggaatgaaagttgagatagtctcttgtgattctaatggtaatatcaatttaaatgaattaaaagaaaagtctgaaaaacattcaaataatctttctgctattatgttaacctatccttcaactcatggggtttttgaaaacgatattgaagaagcatgtgaaattgttcatagaaatggaggtcaggtatatattgatggcgcaaacctaaatgcaatggttgggttatgtaagcccggtgaatttggtggtgatgttatgcatatcaatctacacaaaacgttttgtatccctcatggaggaggcggcccaggaatgggtccaattgtttgtaaaaaccatttaaa

SEQ ID NO: 220174 - DNA, 877 bp, Unknown
  Bacterial polypeptide expressing nucleotide sequence isolated from the Sargasso Sea
gttaaatgctgctgctgaaatgatcccgatttcttggaaagaatttgcagaacctcatccttttgttccagttgaacaaatggaaggttttagagatttgtttactgatttaaaaaattggttgagatctataacaggtttttccggtgtttctctacaacctaatgcaggcgcccaaggagaatatgcaggtctaatggttataagaaagtaccacttagatagagatgaagcttatcgtaatatatgtttaatcccaagttcggcacatggtacaaatccagcaagcgcacagatggttggaatgaaagtggttgtcgttaattgtgataaagagggaaatgtagatttcgatgatttaaagaaaaaagtagaacaacattcagaaaatctcgcagctttaatggtaacttacccatctacccatggagtatttgaggaaaaaataaaagatatttgtgagttagttcataaacatggtggacaggtctatatggatggagcaaatttaaatgcccttgttggagttgcaaagcctggaaattttggtccagatgtttgtcatattaatctgcataaaacattttgtattcctcacggtggtggtggacctggaatgggacctatagcttgtaaaaaacatttacaagtttatctgcctaatcatccagtaataaaagattgcggaccaacaagtggaattggagcagtatcagcagctccttggggtagctcaagtattctatcaatctcttggatgtatattaaaatgatgggatcagcaggattaaagcttgctactcaagttgcaattttaaacgcaaattatattgctcacagactaaaagatcacttttccgattttgtacaaaggtgc

SEQ ID NO: 220175 - DNA, 813 bp, Unknown
  Bacterial polypeptide expressing nucleotide sequence isolated from the Sargasso Sea
gattactgcaaaaagaataagtccttgcttgtttgtgctactgatcttcttgccttaactcttttgagacctccaggagaaattggtgctgatattgttataggttcatcccaaaggtttggagtcccaatgggatttggagggccacatgctgcatttatggctacatatgaaagttttcaaaggtcgatgcctggaaggattataggggcatcaaaagatgctggcggaaatctatcctacaggcttgcacttcaaacaagagaacagcacataaggcgagaaaaagccactagcaatatttgtacttctcaagcgctacttgctgtgatggctggcttttttgctatctatcatggtcccaatggtctgataggaattgctaatgatgtccataaaaaaacttgtaaactttttaatgctcttaagtctggcgatcatgaaattctaaataaaaacttttttgatactctttctattcacttaaaaggagatatttcggaaataaaaactcgtctactcgatgcaaaaataaatattaattggtttgataataatttagttagtatctcaatagatgaagccacgacctctgacgatattgctgatctagtctttgcgctcacaggaaagcctatatcaaatgatcccgaagatggtgaagctagtcttaataaagaaatagtcagatcctctgattttatgaaacaggagcgttttaataaatatcattccgaaacagagatgatgagatatattaaaagactatctgataaggatatcgcgctcgataggtcaatgattccacttggc

SEQ ID NO: 220176 - DNA, 879 bp, Unknown
  Bacterial polypeptide expressing nucleotide sequence isolated from the Sargasso Sea
gagtatgaaggtctaagaaaattaaaatcgatatcaaaaaaaaaccaaatttactcaaattttattgggatgggttactatggaacttacacccctaacgtaattgtaagaaatatattagagaatccaggatggtatacttcatataccccttatcaaccagaggtggctcaaggaagattagagatgttattaaattttcaacaaatgataatagattttacaggaatggatattgcaaatgcatcattacttgatgaaggaactgctgctgctgaagctatggggttaagtcatagattagataaaaaagataacaaaattgtgtttatatcaaatgattgtcatccacaaactatagaagttgttaaaaccagatcggagcctttaggccttaaggttgttattggtaatgacgaagaattatcaaatatttcagaagatataatatgtggaataattcaatatcctggaacacttggagatattaaggaccctagcgaaaatataagtaaaattaaaaaaagaaatggtaaatcaattttagtatgtgatttattatcattagcgaaattaaaaacaccagcagagttaggagctgatatagctgtaggaagttctcaaagatttggaattcctatgggttatggtggtccacatgcagctttctttgctacaaaggatgaattcaagagatcaatgcctggaagaattgtaggcgtttctgtcgatagacacggtaacaaagcttatagattagctttacaaacaagagaacaacacattagaagagataaggcgacaagtaatatttgtacagcacaagctcttttggcaattgtatcggcagcatatgcaatttatcacggacctaaaggt

SEQ ID NO: 220177 - DNA, 844 bp, Unknown
  Bacterial polypeptide expressing nucleotide sequence isolated from the Sargasso Sea
ttaaacgccctagtaggagttgcaaaacctggaaattttggtccagacgtttgccatattaatttgcataaaacattttgtattcctcatggtggaggtgggcctggaatgggacccattgcctgtaaaagacatttacaaatttatctacctaatcatccagtaataaaagattgtggaccaacaacaggaattggagcagtttcagcagctccttggggcagttcaagtattctatcaatctcttggatgtacattaaaatgatgggatccgcaggattaaagcttgcttctcaagttgcaatattaaacgctaattatatagctcatagactaaaagatcactttcctattttgtataaagggtcaaacggtaatgttgcacacgaatgtattattgacattagaagtattaaatcagaaacaggagtaacggaggaagatatcgcaaaaagattaatagattttggatttcatgcaccaacaatgtcatggcctgtggcaggtactatgatgatagagccaactgaaagtgaaggcttgtcagaacttgatagattttgcgatacattaattaagattaaacaagaaattgaaaaaattaaatcaggtgaatttgacaaaatagataatccaataaaaaatgcacctcatactgatactgaactttcatctgatgattggcatcataaatattctagagagcaagctgcttacccagcaaaattcttgaaagcaaataaattttggcctccagtagcaagagttgacaatgtatatggagacaaaaatatcttttgtacttgtcctagtatggacgagtttaaagaagatgcagcataat

SEQ ID NO: 220178 - DNA, 904 bp, Unknown
  Bacterial polypeptide expressing nucleotide sequence isolated from the Sargasso Sea
gcacccacaaactattgacgtagtgcgtacccgtgcggaaatgtttggttttgacgtaatcattggcaaagccactgacgcagtgaaccacgaagtcttcggtgctttattacagtacccatcgactacgggtgaagtgcgtgacgacagcggcctgattgcagcgctacaggcgaaaaaagccgtagttgcagtagcagccgacatgatgagcttactgttattaaaatcgccaggcgaattaggcgcagacgtagttttaggttctgcccagcgttttggtgtacctatggcttttggtggcccacactcagccttcttcgctacccgtgacgattacaaacgttctatgccaggccgtatcattggtgtgtcaaaagaccgccgtggtaatcaggcactgcgtatggcgatgcaaacccgtgaacagcatatccgtcgtgaaaaagccaactccaacatctgtactgcacaggtattactggcgaacatggcgtctttcttcgctgtgtaccacggccctgaaggcctgaaaaacatcgctgaacgtattcaccgttctgctgatgtattcgcagctggcttacaagccaaaggcgtttcattagtacacaacacctggttcgatactgtgaccttcaaagtggctgaccgtgctgcagttatcgctcgtgctatcgctgctgaagtgaacttacgtactgatatcgccgatagcttaagcgtaagcttccacgaaatgacctctgctgctgatatagctcagctgtttgacatagttctgggcgctggccatggcttagacgtgactaagctagatgctgagatcgtagctaaaggctcaaactctattcctgctgatttggttcgtacttccaagtactttaacgcacccggtatttaa

SEQ ID NO: 220179 - DNA, 891 bp, Unknown
  Bacterial polypeptide expressing nucleotide sequence isolated from the Sargasso Sea
atatcagaaatttgtggattaatccataaacatggcggacaagtttacatggacggtgcaaatttaaatgcactagttggaatagcgaaaccaggaaattttggaccagatgtttgtcatataaatttgcataagacattttgtatacctcatggaggaggtggaccaggaatgggaccaatagcatgtaaaaaacatttagaaatttatttaccaacacatccagtggtaaaagattgtggacccacatcaggaataggcgctgtttctgctgcaccatggggaagttctagtattttatcaatttcttggatgtatattaaaatgatgggatctgaaggattaaagttagcaacacagatagcaatattaaatgctaattatgttgcacacagattaaaaaatcattttccaatactttataaaggaagcaagggaaatgtggctcatgaatgcatcatagatattagagaaattaaaaaagaaactgcaattacagaagaggatattgcaaagagactaattgattttggttttcatgccccaaccatgtcttggccagttccaggcactatgatgatagagccaactgaaagtgagagtttgaaagagatagacagattttgtgatactttaataaagattaaattagaaattgataaaattaaatcaggtaaatttcataaagatgataacccaattaaaaatgctccacacacagatctagaactgtcttcaaatgaatgggttcataaatactcaagagaagaggcggcatatccatctgagtttttaaaatttaataagttttggccccctgttgctagagtagataacgtttatggtgataaaaatcttttttgcacatgcccaagtatggatgagtttaaa

SEQ ID NO: 220180 - DNA, 436 bp, Unknown
  Bacterial polypeptide expressing nucleotide sequence isolated from the Sargasso Sea
aagatgatgggatccgaaggtgtaaaacttgcaacacaaattgcaatcctaaatgcaaattacatagcaaatagattaaaagaccattacccaattctttataaaggttcaaatggcaatgttgctcatgagtgtattattgatattagatcaattaaaagcgaaacaggtatttcagaagaagatatagctaaaagattaattgattatggatttcatgcgccaacaatgtcatggccagttgctggaacaatgatgattgaaccaacagagagtgagagtttatctgaactggatagattttgtgacacattgattagcattaaagaggaaatagatatggttaagtcaggtaagtttgaaaaagtagataaccctattaaaaatgcacctcacaccgatattgaattagcttcagatgaatggaatcataaat

SEQ ID NO: 220181 - DNA, 906 bp, Unknown
  Bacterial polypeptide expressing nucleotide sequence isolated from the Sargasso Sea
ccaaataggagcccttatgttgacctatccctctactcatggagtttttgaattgcaaatcagaaagatatgtgacttaattcactctgttggaggatttgtctatttagatggagcaaatctgaatgctcaggttggattatgtaaacccgggaattatggtgttgatgtttgtcatttgaatttacataaaacattctgcattccacatggaggtggtggtccaggagttggtccagttgctgcatcagaaactttaagcccatttcttcctactcattctttaatggataataatttatccaatagattaaattacgtatcttctgccaagcatgggagtgcaagtattcttccaataagctggatgtacataaaaatggctggtcttagtggtttaaggaaagcaactgcgaatgcaattttatctgcaaattatattgcgcattctttaaagcataaattcaagattctttataaaggaaaaaataattttgtcgcacatgaatgtattttagattttagagatttaaaatccaaaactggtttgagtgtaaatgatttagctaaacgattaatagattatagttttcatgctccaactataagttggcctgttccagagaccataatgatagagcctactgaaagtgaaagtttggcagaattagatagattttgtgaggctatgctattaattggggaagaaattagtgaaatagaaaataatattgaattaaataataataatgtaataagaaatgctccccatacgctgaaagagttgattgctgataattggcattatccttattcaaaagaaaaagcttcttttccttataaaactacaacagctattaaattttggtcttcagtttctaggattaataatgcatatggtgatcg

SEQ ID NO: 220182 - DNA, 853 bp, Unknown
  Bacterial polypeptide expressing nucleotide sequence isolated from the Sargasso Sea
gaaaaatattgaaaatcggtcgctgattgggctgggttatcattccactgttatacctccggttgtacaaagaaatgttctagaaaatcccaattggtatacagcatatactccttatcaagcagaaatatctcaaggcagattagaagcattatttaactttcagactttaatcagtgaattaacaggtttgcccatatcaaatgcgtctttacttgatgaagccactgcagcagctgaggcaataagtttgagcttggctgttcgaaaaaataaaaatgctaaaagatttttagtagataaagaaatcttgcctcaaacatttgatgttttaaaaactagatgtgaaccattaggcattgtacttgagatatttgataataataattttgaaattgataataatgtttttggaatcctgattcagctacctggaaaaaatggacgtatttgggatccaacctcaataattaatcaggtacataaatgtgatgcaattgtcactattgcaatcgatcctctagctcaagttttgattagacctatgggtgaattcggtgcagatattgttgtcggaagtgcgcaaagatttggagtccctatcgcttttggggggccacatgcagctttttttgcgactaaagaaatatataaaaggcaaataccaggtaggatagttggtcaatcagtcgacgtagatggcaatccagctttgaggcttgcacttcaaacaagagagcaacatattcgtagagacaaagcaacaagtaatatttgcactgctcaagttttactagctgttctttcttctttttatgcagtacatcatggtccaaatggtcttaaaaaatag

SEQ ID NO: 220183 - DNA, 791 bp, Unknown
  Bacterial polypeptide expressing nucleotide sequence isolated from the Sargasso Sea
tcatataaatttacacaaaacattttgtattccacacggaggtggaggaccaggtatgggaccaattgcatgtaagagacatttagaaatttatctacccaatcatccaatcgtaaaagactgtggacctgcaactggaataggaccggtatcatctgcgccatggggtagttcaagtattttgtcaatttcttggatgtatattaaaatgatggggtcagaaggtcttaaactcgcaactcaaattgcaattttaaatgcaaattatttggcaaatagattaaaagatcattacccaattttatacaaaggaactaatggcaatgtagctcatgaatgtattatagacataagatctattaaagcagaaacaggtgttactgaggaggatattgcaaaaagattaattgattttggttttcacgcacccacaatgtcttggcctgtagctggaactatgatgattgagccaacagagagtgaaagcctggtagagcttgatagattcagtgacactttgataaaaatcaaatctgaaatagataaaattaaatctggacagtttgataaggttgataaccctttaaaaaatgctccacatactgatttggaattaacttcaaataattgggatcataaatactctagagaagaagcagcatatcctgctaagtttttacgagtaagtaaattttggccaccagtagctagagttgacaatgtgtatggagataaaaatatattttgcacttgtcctagtatggaagattttgaagaagatgctgcataag

SEQ ID NO: 220184 - DNA, 796 bp, Unknown
  Bacterial polypeptide expressing nucleotide sequence isolated from the Sargasso Sea
tgtttctcatatgaacctacataaaactttttgtatacctcatggtggtggtggcccaggagttgggccaataggagtaaaaagtcatttagagaaatttttacctggtcatccgatttttaacaatgaacttggtttgtcaaatcaagaggctgtttcagcagctccttggggtagcgcatcaattttacctatttcatattcatatatttctatgatgggagatgaaggattaaaattggctacacaagtagcaatactaagtgcaaattatattaaagaaagattaaaagaatattacccaattttatataaaggaaaaaatgacatggtagcacatgaatgcatcattgatattagacctttaaaacaagaattagatatatctgaagaagatatagcaaaaagattaatagattatggatttcatgctcctactatgtcttttccagttcctggtactttaatgattgaaccaactgagagtgaatctaaagaggaattagaccgtttttgcgaagctatgatatcaatttctgatgaaatagataaaataaaaaaaggtaaatttgatcctattgataatccaataaaaaatgcccctcatacaatttatgaaatttcttctgatgtttgggaacataaatactctagacaagaagctgtttttccacatctatatttattaaataataaatattggcctccagtcagtagaattgataatgtttacggagataggaatctattttgtgtttgtcctccaatagaagattatgaagaggtttcttctgga

SEQ ID NO: 220185 - DNA, 640 bp, Unknown
  Bacterial polypeptide expressing nucleotide sequence isolated from the Sargasso Sea
gcagtctctgcggctccctggggtagtggtgggatactaccaatatcatggatgtacataactatgatgggtagagaaggactcctcaaagcgacgcaagttgcaatacttagtgctaattatattgctaagaaattagcatcacattatccgattttgtataaaggccaaaacgacatggtcgctcatgagtgtattattgacatacgtccgtttaaacagagctcaggaataagtgaggaagatatagcaaaaagattaatggactatggcttccatgctccaacgatgtcattccctgttcctggaactctaatgatcgagcccacagagagtgagtcacttgaagagctcgatcgatttatagatgcaatggtaaaaatacggggggaaattcagcgaatcgaaaccggggcgtttgattcagaaaataatccgctaaaaaacgcgccccacactataaatgatatagttaatgataactgggatcgaccctattcaatcgccgaagcttgctatcctgcagacaaaaaccctgccacaaagtattggcctgctgtaaatcgtatcgataatgtatatggggatagaaacttattctgtgcgtgccctccaatagaatcatttgaaagcgattagc

SEQ ID NO: 220186 - DNA, 607 bp, Unknown
  Bacterial polypeptide expressing nucleotide sequence isolated from the Sargasso Sea
tacctatctcacttatttatatcaaacttattgggagagcatgggcttaaaaaaatcatctcaagtagcaatcctgaatgcaaactatttggcagaaaaattgagaaaatttttcccaattgtttttactggtaaaaatggactaatcgcacatgaatgtataattgacatcagacaattaaaggaaacttcaggaattactgaagaagatattgcaaaacgtttgatcgattatggttttcacgcaccaactatgtcatggcctgttccaggaactctaatgattgaaccgacggaaagtgaaccgaaggatgaaattgaccgcttctgtcaagcaatgatttctatacgtaaagaaataaaaaaaattgaaagtggagattgggataaggaagataaccctctaaaaaatgcccctcatacatccgaagatttaataaacgaaaagtggggacatttatattcaaaagaaactgccttttatcctttacccacactacgtcaaaaaaaatactggcctcctataggaagaattgacaatgtgcacggagatagaaacgttatatgttcgtgtccacctatggaaatatttgaggaagaggagtga

SEQ ID NO: 220187 - DNA, 615 bp, Unknown
  Bacterial polypeptide expressing nucleotide sequence isolated from the Sargasso Sea
cctgaacgaattatgggacgatttccgaaaacgtcacattggccctgatgacgaccaaacttcggaaatgcttaattttcttggccttaagtcgcttaatcaactgatagatctaacaatcccaaaaaatatcagaacaaaaacaaaattgaatattggacacccaaaaactgaaaatgaagcacttttataccttgaagacatggctaataaaaatcaagttcttacatcaatgattggtatgggatattatggaacaataaccccgggtgtcattttgcgaaacgttcttgaaaaccctggatggtacaccgcgtacactccatatcaagcagaagtaagtcagggccgccttgaggcattaataaattttcaacaaatggtcatagatctgacttctatggaaattgcaaatgcatctttgttggatgaagcgacagcagcagccgagggaatgtcaatggcacgaagagtgagtgcctcggatagcaacatattttttgtcgactccgatgctcaccctcaaactatcgccgtcgttttaactagagccaaacctcttggtatagagatcaaaatagatgatcccaaaaattttaactttaaccattgctt

SEQ ID NO: 220188 - DNA, 908 bp, Unknown
  Bacterial polypeptide expressing nucleotide sequence isolated from the Sargasso Sea
aatggtgatggacctcaccgggatggatatcgccaatgcatccctgcttgatgaagcaacggctgcagcggaagcaatggcctttagcagaaggatttcacggagcaaaagcatgaagttttttgcgtccaaagattgtcatccccaaaccctagatgtcctgaaaacccgtgcagaaccgatgggaatcgaactggttttgggaacaccagaagaaaacctggaaaccgaattttttggggttttgcttcagtacccctctaccacaggggtcatttatgatattggaaagtggattgagcaatggcatcaaaatgacaccatggtttctgtggcaaccgatctgttaagtttggttttactcaaaccaccgggggagttgggggctgatgtcgtcattgggaactcccaaagatttggggtgccaatgggattcgggggacctcatgccgctttttttgcaacccatgaccgccacaaacgttccatgccgggcaggctgattggagtttcggtggatgggcgcggaagacgagccttgagaatggcccttcaaaccagagaacagcacatccgccgggaaaaagcgaccagcaacatttgtactgctcaggtgctacttgcagtcattgcaggatgctatgcggtttatcatggaccagatggactcaaatcgattgccggaagagttcacaggatgacgatgttgtttgcaaaatcgttgaacaaaatcggaattcgttgcagtgaacatttttttgatacaatccatattgatgcgggaaatgatagggatcaaatctacgagagtgcactacagcaggggttgaactttcgaaagatcggtttccaccatttgggtgtttcgctggatgagaccacaactcttgatgatttggagcagttgg

SEQ ID NO: 220189 - DNA, 223 bp, Unknown
  Bacterial polypeptide expressing nucleotide sequence isolated from the Sargasso Sea
ccaatttgggctttcttaaagcctttcctgcccgggcaccatagccttaagaaagcccaaattgggagcgatcagaattcagtctcggccgctgcatggggcagcgccagtattctcccaattagctggatgtacatacggatgatgggacgaaatgggctcaagaaagcgagcgaatctgcaatccttaatgccaactatattgctgaaagacttaaaccac

SEQ ID NO: 220190 - DNA, 574 bp, Unknown
  Bacterial polypeptide expressing nucleotide sequence isolated from the Sargasso Sea
ttgaccaccataaaaaaaaataatcttttttctaagaggcacataggagttaactctcaagatagggattttatgctgcaatccatagggtatgattctatggatagttttattgatgcggtcgtaccagaaaatatacttgagaagggaaaaattgatcttggagaagaaaaaaccgaagaagaagctctcgatgagctaaagctcattgcacaagaaaataaggttttcaaaagctttataggccaaggtcattacaatacatacactcctaaagtaattcttagaaacgtatttgaaaaccctggctggtatacatcctacacaccttaccaacctgaaatatctcaaggcagattagaagctctcattaattttcaaaccatggtaagcgatcttacaggcatggatattgctaatgcatctctgctagatgaagctactgccgctgcagaagcaatgacgcttgctaaaagagtttccaagtctaagtcagatatcttctatgttgatgaaaatagttttgaaaataccataaatgttttaaaaactagagccaagccattgggaatag

SEQ ID NO: 220191 - DNA, 844 bp, Unknown
  Bacterial polypeptide expressing nucleotide sequence isolated from the Sargasso Sea
gagatgttagcagtttcatttgatgaaagaaaaaatctttatagggctaatcaggtattaaaaatttttaattgttcagaaacaattaaggagacgactaaagaaatgacaaacaaaagcttatctaatctaccaaaaactttattaagaacttcaacatatttagatcatccggtttttaacagttaccattctgaaaccgcaatgcttagatatctaaaaaaattagaagactctgatattgcattgaacagatcaatgatagctttaggttcatgcacgatgaaattaaattcagtttctgaaatgatacctgtaacatggaaagaattttcacatccacatccatattcccctattgaacaaatggatggttacagagaattattcactgatttaaaaaattggctaagaacaatcacaggtttttctggtgtttctttgcaaccaaatgctggagcacagggagaatttgctggcttaatggttattagaaagtttcatgaaaaaaatggtcaaaaaaagagaaatgtttgtttaataccgagctctgcgcatggaactaatccagcaagcgctcaaatggctggcatgaaagttgttgttgttaattgtgacgcatttggaaatgtagattatgaagatttaaagaaaaagacagaaaaatactcagatactttgtccgcactaatggtaacttatccatcaacccatggagtttttgaagaaaaaataacagatatttgtgatttagttcataaacatggcggtcaagtttatatggatggagcaaatctaaatgcattggttggtattgcaaaacccaggaaattttggtcctgac

SEQ ID NO: 220192 - DNA, 925 bp, Unknown
  Bacterial polypeptide expressing nucleotide sequence isolated from the Sargasso Sea
agtcatagattgaataaaaaagatagtaatttagtttttgtatctgaggattgtcatcctcaaacaatagatgtaattcaaacaagagctgagccaatgggtttaaaagttttagttggtaaagaagatgaagttttagataaattaaaagaggatttagtttgtggaattttacaatatcctggaactttaggagacattaaagacccgagtgaagcaattagcaaaattcataaaaagaacggaaaggctgtattagcatgtgatctattagccttagcaaaattaaaaacaccaagagaacttggtgccgatatagcagttggaagctctcaaagatttggtattcctatgggatatggaggtccacacgcagccttttttgcaactaaggacgagtataagaggtcaatgccaggaagaattgtcggcgtgtcagttgatagacatggtaataaagcatacagattatctttacaaactagagagcaacatatcagaagagataaggcgactagtaatatttgtacagctcaagctttattagcaattgtctcagcagcatatgctatttatcatggtccagatggaattagaaatatttctgaaagagtttctcaattagcaaaaagttttgctgataagataaaacagtctggatatgaactttattctaattatttttttgatactgttacaattataaccaaagaaaagactgatcaaatctacaagaatgctttaaatcaaaaagttaatataagaaaagttaattcagaaatgcttgccgtttcttttgatgagagaaaaaatgtttatagagtaaatcaattattaaaaatttttaatgcagcagaatcaattaaaaaagaagatccatcagtaagtttacctaatcttccaaaaaaatttttaagaacctcaa

SEQ ID NO: 220193 - DNA, 793 bp, Unknown
  Bacterial polypeptide expressing nucleotide sequence isolated from the Sargasso Sea
atgctgaggtatttaaaaaaacttgaagattgtgacattgcactcaatagatccatgattgctttaggctcttgtacaatgaagcttaatgcgacagctgagcttatgcctataacttggaaagaattttcattaccacatccttttgtgccaacaaaccagatggaaggctacaaaattctctttaacgatttaataaatgatttaaaggaaattacgggatatgatgcagtatctttacaaccaaattctggagctcagggtgagtatgctggattaatgacgataagaaaatttcatgaaagcaacggacaaggtgatcgagatgtatgcttaataccaaactctgctcacgggaccaatcctgcaagcgctcaaatgagcggaatgaaagtggtagttattaattgtgacgaagacggtaacgtggacctaagtgatttaaaaaataaagcagaaaaatattcaaaaaatttagctgctttgatggttacttacccatctactcatggagtatttgaggaaaaaataactgaaatttgtgatgttattcataaacatggcgggcaagtatatatggatggagcaaatttaaatgccctagtaggtattgcaaagccaggaaaatttggaccagatgtctgtcatattaatttacacaaaacattttgcattccacatggcggtggaggaccgggaatgggaccaatagcttgcgcaaaacatttatctgattttcttccgacacatgaaataattaaagatgctggaccaaaaaatggaatgggagctg

SEQ ID NO: 220194 - DNA, 424 bp, Unknown
  Bacterial polypeptide expressing nucleotide sequence isolated from the Sargasso Sea
tgaaacagggattactgaagaagatatagctaaaagattaatcgattatggttttcatgcaccaacaatgtcatggccagtagcaggtacaatgatgattgaaccaactgaaagtgaaagtttgtctgaactagatagattttgtgatactttaattagcattaaatctgaaatagatatgatcaagtcaggaaaatttgataaagttgataatccaattaaaaatgcacctcatacagatattgaattagcttcagatgaatggaatcataaatattcaagagagcaagccgcatatccagcaaaatttttaaaaacaaataaattttggcctccagtagctagagtggataatgtatacggagataaaaatttattttgttcttgcccatcaatggatgaatataaaaatactgcagcttaa

SEQ ID NO: 220195 - DNA, 468 bp, Unknown
  Bacterial polypeptide expressing nucleotide sequence isolated from the Sargasso Sea
tcgatgtgcgccccttaaaagactcagcaaatgtagaagttgatgatatagcaaaacgattaatggattacggctttcatgctccaactatgtcttggccagtggcaggaactctaatgattgagcccacagaaagtgagtccaaaaaagaaattgatagattttgtgatgctatgatttcaatacgtaaagaaattacaaatatagagtcaggaaatgcagactcgacaaacaatttccttaaaaacgcaccccatacagtggaggaagcctgcgcagataactgggcatatccatactccaggagtgatgctgtatacccaaataatgtgaaggcatcagaaaaatattggcccccagttaagagagttgataatgtttatggtgataagaatttgcaatgcagttgcccttctatggatgagtttgatgcaccggtagttctaaaatctgccaatcttgcttaaa

SEQ ID NO: 220196 - DNA, 640 bp, Unknown
  Bacterial polypeptide expressing nucleotide sequence isolated from the Sargasso Sea
ggtgggggaggacctggaatgggtcctattgcttgtaaaaaacatctacaagtttatctgcctaaccatccagtaataaaagattgtggaccgacaactggaattggagcagtgtcagcagccccttggggtagttcaagcattctatcaatctcttggatgtatattaaaatgatgggatcagcaggattaaagcttgctactcaagttgcaatattaaacgcaaattatattgctcatagactaaaagatcactttccaattttgtacaagggatcaaatggcaatgttgcgcacgaatgtattattgatattagaaatattaaatcagaaacaggtgtaacagaggaggacatagcaaaaagattaatagattttggatttcatgcaccaactatgtcatggccagtagccggcacaatgatgatagaaccgactgaaagtgaaggcttgtctgaaattgatagattttgtgactctttaattaagattaaacaagaaattgaaaaaattaaatcaggtgaatttgataaaatagacaatccaattaaaaatgcccctcatacggacgctgagcttgcttcagataattgggaacataaatatacgagacaagaagcggcatatccatcaaaatttt

SEQ ID NO: 220197 - DNA, 671 bp, Unknown
  Bacterial polypeptide expressing nucleotide sequence isolated from the Sargasso Sea
ggagcgaacatgaacgcccaagttggactaactaacccatatattatcggagccgacgtatgccatttaaatcttcataaaacattcgctattcctcatggtggaggtggtccgggaatgggaccaatttgcgttgctgctcatttagcagattttttacctacatttgatctaagcaaccctttctcaacaatgaccatagctgctgcgccttatagctctgcaagtattttattaatatcttatagctacattaaattactaggtggggatgggttaacaatgtctacaaaaattgccattaataacgcaaattatattaaaaataaattagaagacgacttttcaattttatttacaaataaaaaaggtcatgttgctcatgaactcattatagattgtagaccgtttaaaaaagatgcaaatatagatgttgaagatattgcgaaacgcttaattgattattcttttcatgcacctacaatgtcttggcctgtagcaggcactttgatgatagagccaactgaaagtgaatccattgatgaacttgatcgtttttgcgatgccatgatcagcatcaaaaaagagattaatgaaattatcaataatcaagctgataaagttgataacgtgttaaaacaagcacctcacacgatagcagaaacaacctc

SEQ ID NO: 220198 - DNA, 781 bp, Unknown
  Bacterial polypeptide expressing nucleotide sequence isolated from the Sargasso Sea
gagtttaataaaattaatactcaacttttatctttaaaaaataatttcaaaaaaacttatattggaatgggttattataatactattacacctagtgttattttaagaaatattcttgaaaacccaggatggtacactgcttacacaccttaccaaccagaagtaagtcagggcaggttggaaatgttaatgaattttcaacagatgataattgatttgactggaatggatattgcaaatgcatctttacttgacgaaagtactgctgcagctgaagctatgataatggcttttaaaattaaaaaaagtgcaaagtttactttttgtgttcagaataaatgccattcgcaaacactatctgtcttaaaaacaagagctaagcctctaggtataaaaattatatttgataatccagataacgatacatttggttgtttaattcaaaatccagatacatacggagaaattgcaaatctcaacgaattaataaatataaataaatctcacgatgcgttatcaattatagcagctgatataatgagtttggtagttatgaaatcaccaaaagattttggagctgatatagttgttgggagtacacaaaggtttggtgttccaatgggtttaggaggccctcacgcagcatactttgcaacactaaatgaatacaaaagaatgatacctggaagactaattggcgtttcagttgatcgtaataataaaagatcttacagaatggcacttcaaacacgtgaacaacatattagaagggaaaaagcta

SEQ ID NO: 220199 - DNA, 574 bp, Unknown
  Bacterial polypeptide expressing nucleotide sequence isolated from the Sargasso Sea
tatgaagcattaagaaaactaagagcaatttcaaaaaaaaatcaaatatactcaaattttattggtatgggatactatggcacttacactccatacataattttaagaaatattttggaaaatccaggttggtacacttcatatacaccttaccagcctgaagttgctcaaggtaggcttgaaatgcttttaaattttcaacaaatgatagttgattttactggaatggatatagctaatgcatcattactagatgaaggcacagcagcagcagaggcaatgggattaagtcatagattgaataagaaagatagtaatttagtttttgtttcagaagattgtcatcctcaaacaataaatgttgttcaaactagagctgaacccatgggactaaaagtgttaattggaaaagaagaagaaatcttagataaattaaaggaggatttggtttgtggaattatacagtaccccggtactcttggtgatattaaggacccaagtgaaagtataagcaaaatacataaattaaatggcaaagctattttagcatgtgatttattggtgttagctaaac

SEQ ID NO: 220200 - DNA, 850 bp, Unknown
  Bacterial polypeptide expressing nucleotide sequence isolated from the Sargasso Sea
tgccaatttaaatgccttagtaggaattgcaaaacctggtaagtttggaccagatgtctgtcatataaatcttcataaaacattttgtatacctcatggtggtggtggtccaggaatgggacctatagcatgtaaaaaacatttagaaagttttttacctaagcattcggtaattaaagactgtggaccagctacaggtattggagctgtatctgcagcaccatggggtagcgcaagtattttatcaatttcttggatgtacattaaaatgatgggatctgaaggtttaaaaaaagcctcgcaagtagctatattgaatgcaaattatatagcacataaattaaaagactcatttccaatcttatacaaaggaaaaagcggaaacgtagctcatgagtgcattatagatattaggaaaatcaaagcagaaacaggcataacagaggaagatatagcaaaaagactaatagattttggatatcacgcaccaactatgtcttggccagttgcaggaacaatgatgattgagcccacagaaagtgagagtttaagtgaaataaagagattttgctctacacttgaaaaaattaaaacagaaatcgataaaattaaggctgataaatatgataaaattgacaatccacttaagaatgcgccacatactcatcttgaattaacatcagacaaatgggatcataaatatgaaagagaagaagcagcgtatccatctgaatttttaagaacagccaaatattggcctccagttggaagagtagacaatgtttatggtgataaaaatttattttgcacatgtccatccattgatgagtacgaagatactgcagcttaa

SEQ ID NO: 220201 - DNA, 769 bp, Unknown
  Bacterial polypeptide expressing nucleotide sequence isolated from the Sargasso Sea
tttggaatgttattacaataccctacttctgatgggaacataaatgattataccaaattaataaaaaatgctaaaagtttaaaaatttttacatgcctggctacagatttgctcgctctaagcatcttaaaaacaccagcagaaatgggtgcagatactgcagttggaaacacacaaaggtttggtgtgcctatgggttacggaggtcctcatgcagcattttttgcaactacagaaaaattcaaaagaaaaatacctggaagaataataggtgtctcaaatgatgcttatggcaaaacagctttgaggatggctttacaaactagggaacaacatattcgtagagaaaaagcaacatcaaatatatgcacagcacaagtattgctagctattatttcatcaatgtatgccgtttaccatggcccaaaaaaaattatactcattgcaaaaaaaatacaaaaattatcttctaaattagcctctatgatggatcaagctggattaaaggtcttttataatcaattttttgatacaattagaatacacccaaataataaatgggaagtaaatgcaatgaataatcaaatgaattttagaaaatttgatgatggaagcattggaatttctttagatgaaacaaccactcaagatgatataaaaaaaatatgtgatgttttttgcatacaatattcaaacatagataacctctacaaaataccagataaattaaaaagaacggctccatttttagattacgaaatttttaata

SEQ ID NO: 220202 - DNA, 875 bp, Unknown
  Bacterial polypeptide expressing nucleotide sequence isolated from the Sargasso Sea
attgatgaaacccttcctaatgatataaaattaaaccagcccttaaatttagaaaaacctctaagtgaatcagaatatttaatgcatttgaaaaaaatatctgcattaaataaagtttataaaacatacattggtcttggatataatcgatcctatctccctgctgtaattcaaagaaatattctggagaatccggggtggtatacagcatacactccatatcaggctgaaatatctcaaggtagaatggaagcattactaaatttccaaacaatgattactgacttaacaggaatggaaatatctaacgcatccttattagatgaaagtactgctgctgctgaggcaatgacccttttatatgctgttagagacagagaacaaaagaaaaataatatttgcaagttttttgtttcagaagatattttccctcaaactctttccgtattaaaaacaaggtcagaaccaattggtattgatttagtgataggaaatattgaagattttgattttgactcaaacttttttggagctttgattcaatatcctggtgcatctggtgagattaaggacattaaatcatttatttctagatgtatatctaataatataaaaactgctgttgcttcagatattctgagtttagttcttttagaatctccaggtaaaataggagcagatgttgtagttggaactactcaaagatttggaataccacttggatatgggggacctcatgcaggatattttgcaactaaagaggagtataaaagaaatattcctggcagaattattggtgtttcaattgatgctgacggaaataaagctttacgaatggctctacaaactagagaacagcatataaaaagagataa

SEQ ID NO: 220203 - DNA, 901 bp, Unknown
  Bacterial polypeptide expressing nucleotide sequence isolated from the Sargasso Sea
ctgaagctattgggtttaagtcatagactaaataaaagtgatagtaatttagtttttgtttcagagaattgccatccacaaacaattgatgttattcaaactagagcagaaccaatgggtctcaaagtacttgttggaaatgaggataaagttctagagcagctaaaagaagatattgtttgtggagttttacaatatccaggaactttaggtgatatcaaagatcctagtgaggctataagtaaaattcataaaaaaaatggaaaagcaattttagtttgtgatctccttgccttgtctatgttaaaaacaccaagagaacttggagctgatattgcagtcggtagctcccaaagatttggtattccaatgggttatggaggacctcatgctgccttttttgcaacaaaagatgaatataaacgatctatgccaggtagaattgttggggtttcagtggacaggcatggaaaccaggcctatagattgtcattacaaactagagagcaacatattagaagagacaaagctacaagtaatatttgtactgctcaagccttactagcgattgtttcagcagcatatgccatttatcacggccctgatggaattaaaagtatttccgaaagagtatctcaactagcaaaaaattttgcagataaaataaaacaatctggatatgaattatactcagattatttttttgatactgtaactattataaccaaagaaaagacagatcagattttcaaaaatgctttagaccaaaaagttaatattagaaaagtaaattcagagatgctggctgtttctttcgacgaaagaaaaaatgtttatagagtaaaccaactactaaaaatatttaatgctgcagagtcaattaaaaaagaggatccaactg

SEQ ID NO: 220204 - DNA, 400 bp, Unknown
  Bacterial polypeptide expressing nucleotide sequence isolated from the Sargasso Sea
atagctaaaagattaattgattatggatttcatgcgccaacaatgtcatggccagttgctggaacaatgatgattgaaccaacagagagtgagagtttatctgaactggatagattttgtgacacattgattagcattaaagaggaaatagatatggttaagtcaggtaagtttgacaaagtagataaccctattaaaaatgcacctcacaccgatattgaattagcttcagatgaatggaatcataaatattcaagagagcaagctgcatatcctgcaaaattcttaaaagcaaataaattttggcctccggttgcaagagttgataacgtgtatggagataaaaatattttttgtacttgtccaagtatggatgagtttaaagaagatgcagcataat

SEQ ID NO: 220205 - DNA, 652 bp, Unknown
  Bacterial polypeptide expressing nucleotide sequence isolated from the Sargasso Sea
aaacgctttattcaaagcaaccttcccaatcatgatgatgtttttggaatgttgttgcaattacctggtaaaaatggacaattatatgatcccacattcttaatatcccaagcacatagatcagaaattatagttacggcatgtattgatccactagcacaagttttgattaaaccaatttctgaatttggtgttgatgtagcagtgggtagtatgcaaagatttggggtaccaatgggttttggtggcccccatgcagcatattttgcttgtagcgaaaaatataaaaggctgatacccggaagaattgttgggcaaactctttctaaaaatggagaaaagtctctaagactagcattgcaaacaagagagcaacatatcagaagggaaaaggccacaagtaatatttgtactgctcaatctttattagccataatctcttctttttatgctatttatcatggaccctctggattaacgcaaattgctaagagattagttgagttgagaataaatttagaatcaagtttagctgctttaggttttgatattcctgatgggattagatttgatagtgttgatgtttattctgagcactcccagaggatccatgatgaagctttaaaaaatggctataacttaagaattttgc

SEQ ID NO: 220206 - DNA, 571 bp, Unknown
  Bacterial polypeptide expressing nucleotide sequence isolated from the Sargasso Sea
atgttacataattcagagaaagattttattaaaagacacattggtttgtcaaaaaaagatgaaaaaactatgttatctgatcttggctataaatctttaaatgaactagtcgaagatactgtgccgaataaaattttgtttaaagatttattaagcataggggatccaaattcagagtatgaaggtttaagaaaattaaaatctatatcaaaaaaaaatcaaatttattcaaattttattggcatgggttactacgggacttatactccaaacgtaattgtaagaaatatactagagaatccaggctggtatacttcctacactccttaccaaccagaggtggctcaaggaagattagaaatgttactaaattttcaacaaatgataatagactttactggaatggatattgcaaatgcttcactgcttgatgagggaagtgcagctgctgaagctatgggattaagtcacagattagataaaaaagacaacaaaattgtatttatatcaaatgattgtcatccacaaactatcgaagttgttaaaactagatcggagcctttaggtctta

SEQ ID NO: 220207 - DNA, 760 bp, Unknown
  Bacterial polypeptide expressing nucleotide sequence isolated from the Sargasso Sea
ccacatcctttttctccagtagagcaaatggatggttatagagaattatttacagatttaaaaaattggcttagatcaattacaggtttttcaggtgtatcattacaaccaaatgctggagctcaaggagagtttgctggtttaatggttattcgtaaatttcatgaaaaaaatcgtgaagacaatcgaaatgtttgtttaataccaagttcagctcatggcacaaatcctgcaagtgcacaaatggtaggaatgaaagttgttgttgttaaatgtgatcaacatggaaatgtggactttgaagatttaaaaaataaagccgaagaacactcaaataatcttgctgcattaatggttacttatccttcaacacatggtgtttttgaagaaaagataactgatatttgtgaacttgttcataatcatggtggccaagtttatatggatggtgcaaatttaaatgcattagtaggaattgcaaaacctggtaaatttggaccagacgtttgtcatataaatcttcataaaacattttgtatacctcacggaggtggtggtccaggcatgggaccaatagcatgcaaaaaacatttagaaggttttttacctacacattctgtaattaaagattgcggacctgccaccgggattggagctgtttctgctgcaccttggggaagtgcgagtattttatcaatttcgtggatgtatattaaaatgatgggatccgaaggtttaaaaaaggcttcacaagttgcaa

SEQ ID NO: 220208 - DNA, 805 bp, Unknown
  Bacterial polypeptide expressing nucleotide sequence isolated from the Sargasso Sea
cagaccgtcggctaccgcgagatgatcgaccagctcgagcagatgctgtgcgccgccaccggctacgccgccgtgagcctgcagccgaatgccggctcgcagggcgaatacgccggtctgctgatcattcacgcctaccacgccagccgtggcgaagcgcaccgcaatgtgtgcctgatcccgtcgtcggcgcacggcacgaacccggcatcggcgcagatggccggcatgcaggtcgttgtcgtggcgtgcgatgagcgcggcaacgtcgatctgcccgatctggagaagaaagccgccgagcacagcaagaacctcgcggcgatcatgatcacctacccgtccacgcacggcgtgttcgaggaaggcgtgaagcgcgtctgcgagatcgtgcacagccacggcggtcaggtctacgtggacggcgcgaacatgaacgccatggtcggcacggccgcgccgggccacttcggcggcgacgtctcgcacctgaacctgcacaagacgttctgcattccgcatggcggcggcggcccgggcgtcggtccggtggccgtgggcgcgcacctcgcgccgttccttccggggcgcgcagcttcgggggaagacgcgagccagaacatcggcaacgtgtcggccgcagccttcggctcggcgtcgatcctgccgatctcgtggatgtacatcgcgatgatgggcgcggcgggcctgacggccgccaccgagacggccatcctgtcggccaactacgtggccaggcgtctcgcgccgtactacccggtgctctacacgggcgcgcacggcc

SEQ ID NO: 220209 - DNA, 943 bp, Unknown
  Bacterial polypeptide expressing nucleotide sequence isolated from the Sargasso Sea
gagtttgcaaatatgcatccgtttgttccagatgatcaaactcttggatatcaaagaattatattgattttaaaggaatggttgtgtgatataacaggattcgctgacatttcattacaaccaaatgcgggttcacagggtgagtatgctggtcttcttgctattcaaaaatttcatcagagtcgtggtgattttaagagaaatgtttgtttgattcctacaagtgctcacggaacaaatcctgcatcagcagtgatggcaggtatgaaaatagttcctgtaaaatgtgatgatgaaggtaatattgatttaaaagatttagcagtaaaggcaataatgaatacatttgagttgtcttgtattatgattacatatccatcaactcatggtgtatttgaaacaagtatcaaagaaatttgtagaattgttcatgagaatggtgggcaggtatatcttgatggagcaaatatgaatgcacaggtaggacttgcaaaacctggtaattatggtgctgatgtatgtcatcttaatttacataagacattctgcattcctcatggtggtggaggtcctggtgtaggaccgattggagtcgcagcacatcttacaccatttatgaatcaaagagtatcagcaacagaatatggaagtgcatctatattaccaattagttggatgtatattcgtatgatgggtggtgatggattaagaaaggcaagtgaagtttctttattatctgcaaactggttagcatgtaaaattgatccatattttaaagtattatataaaggtaataatgaaagaattgctcatgaatgtatatttgattgtcgtaatttaccagtaacagcagaagatgttgcgaagagattaatggattatggatttcatgcacctacattatcatggccagttttaaatacaatgatggtgaaccaactga

SEQ ID NO: 220210 - DNA, 793 bp, Unknown
  Bacterial polypeptide expressing nucleotide sequence isolated from the Sargasso Sea
gatgttgttgttggttctagtcagcggtttggtgttcctttaggttttggtggcccgcatgccgctttttttgctacgcgggaggaatataagcgttctatacctggtcgtattgtcggggtttcgcaagatgcgaacggcgatattgccctacgattagctcttcagacgagggagcaacatattcgcagagaaaaagcaacaagcaatatttgtacagcccaagttctacttgcagttttagcttctatgtacgcggtttatcatggtccagatggtataagggctattgccaaaagagtacatatactaacaaaaattcttgcagagggtcttaagcaactaggttattctctggaaacagatgcattttttgatactattattgtaaagacggaggactggacacattcggttttagaagcagcacgagttgaagaaatcaatctgcgggcattcgatgataaggttggtatttcattagacgaaacgtgtgatagggagctaatagaacgtctttggtctttaatgtcctttgaaagtgcaatccagccttcttttgattcaatacaggctgccgggattggagatgcactgccatcgggtctagaacgcaccactaaatttttgacccatccggttttcaacagctatcactctgaaaccgaaatgttacgatatataagaaggctgtcggataaggacattgctcttgatagatcaatgattccactaggttcctgcactatgaaattaaatgctactacggaaatgatcccggtaacatggccag

SEQ ID NO: 220211 - DNA, 238 bp, Unknown
  Bacterial polypeptide expressing nucleotide sequence isolated from the Sargasso Sea
gcggcagcttcgataagaaagaacaatcctttgaaaaatgctccgcatactcatattgaattaagtggaaacgaatggaaacacatatacaaaagagaagaagcggcatttcctaatgagtatttgaaagataacaagtattggccaccagttggaagagttgataatgtttatggcgacagaaacttggtttgctcatgccctagtctccaagagtacaaagaagaggcagcttaaa

SEQ ID NO: 220212 - DNA, 959 bp, Unknown
  Bacterial polypeptide expressing nucleotide sequence isolated from the Sargasso Sea
agatgaagcatctgcagcagcagaagcaatgattatgttttttaatagccgaaaaagaaaagagataaaagaaggaaagaacaaatttttcatttctgatcgttgttatcctcaaactattgaagtagttaaaggtagagcgaataacttggatattgatcttgtcattggaaatcatgaggagtttaatactgatgcctcatattttggagcagttattccttacacagatgctaatggagttattggagatttatcttcttttattgaagctgcacatacgaacaatatttctgtcgctgtttcaacagacatattgagtcttgttttactaaattctccaggagctatggatgcagatgtggtgtttggttcttctcaacgttttggtgttccaatgggctatgggggtcctcatgcagcatattttgccgcaaaagaaagtttcaaaagaaatatgcctggtagaattattggtgtttcaaaagatacagatgaaaaccttgctttaaggatggcgcttcaaactagagaacaacacataaaaagagacaaagcaacttctaatatttgtacagcccaagctttgctagccgtaatggcaggtatgtatgccgtttatcatggaccaaatggattaaaagagatagcaatgcatgtgcataatttggctaaagaatttgccaaaggtgcttctaaaaatggaatacaagttggaagcgattctttttttgataccgtttggttaaaaggggtagatgctaaaaaaattcaacaagattgtgagcaaaaaaagtgtaatgttagagtggttaatgaaaaagaaatatcggtttcttttgcagaaccgcacacttcggaggatgtttctcttttgttatccgttatttctgaaaacatacatcagacacagaaaatacttcagaaccatcttttgaaattttctttagaaaagattt

SEQ ID NO: 220213 - DNA, 893 bp, Unknown
  Bacterial polypeptide expressing nucleotide sequence isolated from the Sargasso Sea
aaatttgtgaaaaaatccataatttttggaggtcaagtctatatggatggtgcgattttaaacgcaatggtaggcattgcaaagcctggaaaattcggtcctgatgtatcacatatgaatcttcataaaaccttttgtattcctcatgggggtggaggtcctggtatgggtccaataggtgtaaaatcacatttggagaaatttttacctggtcatccaattgtgcaaaatgagctaggtttaactgagttagatgctgtttctgcagcaccatgggggagtccatcaattttacctatttcttattcatatatttcaatgatgggggatgaaggattaaaattagcaactcaagtagcaatattaaacgccaattatataaaagaaaaattaaaagatttttttcctctattatattcaggtaaaaatgacatggttgcccatgaatgtataattgatatcaggccaataaaagatgaattaaatatttctgaagaagatatcgcaaagagactaattgattatggcttccatgcaccaactatgtcttttccagttccaggtactttaatgattgaaccaactgaaagtgagtcgaaagaggagattgatagattttgtactgcgatgattactattcatagtgaaattcaaaaaataagagaaggcatttatgaccttgaagataatccaattaaaaattcaccacatactatcgaagaagtttcttcagatgaatggcatcataaatattctagaaaagaggctgtttttcctcattcatacttatataacaacaaatattggccacctgtagctagaattgataatgtttatggtgatagaaatttattttgtgtttgtccaccaattgaagaatacgaagaagtatc

SEQ ID NO: 220214 - DNA, 952 bp, Unknown
  Bacterial polypeptide expressing nucleotide sequence isolated from the Sargasso Sea
aataattccaaaaaatattttattgatttcacttattgacctccctgacaaaatgagtgaatcggaaactatagaaaggttaagtgaattggcaaatatgaattgtgttttcaaatcattcgtaggaatggggtattatgggaccctcttgcctcctgtaattcagcgcaacattttagaaaatccaggttggtatacacaatacaccccttatcaggcagaaatcagccaaggaagattagaggctttattgaattttcaaacgatggtatcagatattacaggcctgcccatggcaaatgcatcattacttgatgaagcaacagctgcagctgaggcaatgttaatgttttacaatattacaaaagaaccttctaagcaagtattcctcgtatctgaaaattgccatcctcaaactatagatgttttaaaaacacgatctgaaccactcggcataattttgaagatctgcaatataacgactcaaggttttaatgatgatatttttggtgctattgttcaatatccagatacaagtggatcaatacatgatctgactgaattatctgaaacggcacatcaacacggggcatatttatgcgtagcaaccgatttacttgcgctaactcttttaaagcctcctggtgaaatgggtgctgatgttgctgtaggaaatgctcagcgctttggtgtcccaatgggctatggcggacctcatgcagcatttttcgcgactactgaaaaatttaaaaggaaaatcccaggtagaattatagggctgtcgaaagactctcatggtaaacctgctcttcgtatggcattgcaaacaagagagcaacatattcgaagggagaaagcaacttcaaacatatgcacagctcaggttttactggcaattatatctggcatgtacgctgtttatcatggcccaagtggcataaaaaaacatgcc

SEQ ID NO: 220215 - DNA, 915 bp, Unknown
  Bacterial polypeptide expressing nucleotide sequence isolated from the Sargasso Sea
agctataagcaaaatccataaaaataatggtaaagctgttttagcatgtgatttacttgctttagctaaacttaaaacaccagccgaattaggagctgatattgcagtcggtagttctcaaagatttggaattccaatgggttatggtggtccacatgcagcattttttgcaacaaaagatgaattcaaaagatcaatgcctggaaggatagtaggtgtttctgttgatagacatggaaaaaaagcatttagattagctcttcagactagagagcaacacattagaagagataaggctacaagcaatatatgtacagctcaagctttattagccatagtttcagctgcttatgcagtttatcatggaccaaaaggtattaaaaaaattgcagaaactgtttcacaactcactaaaaattttgcagataaattaaaacattcaggttacgaactttattctgatcaattctttgataccgtaacagtaaaaactttagataagacagataaaatatataaaaatgctttagatcaaggagtaaatattagaaaagttaattctgaattattagctgtatcttttgatgaaagaaaaaacctatttagggcaaatcaattattaaaaatatttaattgttcagaaactataaaagagtcgatgaatgaaagtttatcaaatttaccaaaaaaattattgagaacatctacatatttagaccatcctgtttttaatagttatcactcagaaacagaaatgcttagatatttaaaaagattagaagattctgatattgcattaaatagaacaatgatagctctaggctcatgcactatgaaattaaatgcagtttctgaaatgattcctgtaacatggaaagaattttcacaacctcatccattttctccaatagaaca

SEQ ID NO: 220216 - DNA, 882 bp, Unknown
  Bacterial polypeptide expressing nucleotide sequence isolated from the Sargasso Sea
aatgggccctaaaaaaattaaacatattgctcgaaccgtaaacagactatgtaaccaattagccaattcacttttagcatcaggtattgatctttttcacaaaaaattttttgatacaattcgatttacaccaaaaaataattgggaacccttagctgaaaaggaaaagtttaactttagaaaatatgatgatgatagtatagggatcaccgttgatgaggaaaccaaggaagatgatatcttaaaaatttgtaaaatatttgaaatagaaaaaactgatctatctcaaagtaacttcctggatgatgagttcataagaaaaacggactatctaaaacacgacgtctttaattccttccactcggaaaccgaaatgcttagatacatacacaagctcgaaacaaaagatctatcattaaatacaagtatgatccctctgggatcttgcacaatgaaattaaatgctaccacagaaatggtgcctgtgacatggccagagtttagtaatatccatccatttgtaccaactgagcaagtcaagggatatatgaaaatttttgatgatttaaaatcttggctttcaatattaacaggattcgacgactgttctttacaaccaaattcaggagcacagggagagtatacaggactgctagtaataagagcttaccacattagtcgaaatgaaaaacatcgtaatatttgtttagttccagaatctgcccatggaacaaatcctgcaagcgctataatggctggtatgttagtagagataatctcatgcgatcaaaatggcaatattgatcttcaagatctaaaagcaaaagcagagttgcattcaaaaaatttatctgccataatgctgacttatccctctacaca

SEQ ID NO: 220217 - DNA, 814 bp, Unknown
  Bacterial polypeptide expressing nucleotide sequence isolated from the Sargasso Sea
ggagtgcccatgggctttggcggcccgcatgcgggctacatggcaacccgggatgcttacaaacgctccatgccgggtcggcttgtgggggtttccatcgattcgcaaggcaaccgagcattgcgcatggcgctgcaaacccgcgagcaacacatccgccgggaaaaggcaacatcaaacatctgcacggcgcaggtccttttggcaaatattgccagcatgtatgccgtttaccacggccccgaaggtctcaaacgcatcgccgaacgggtccatcgtttgacagggatcctggcagctggtctcgcacgcttgtgcattgcagtggaaaacagtgcattttttgacacactgacgatctccccagaagacactcagggcgtccacgagcgcgcggttgcagcgggcatgaatctgcgtccagttgatggcaaccgggttggagtttccttggatgagacaaccaccgccgccgatgtcgaagtcttatggtcggttctatccggtgaagcaaacgtcggtttcaccgccgctgaattggatgcggatgccgtcgagggtatcccatttgaacacaggcggatatcggccatcctgggtcatccaattttcaacacacatcattcagaaaccgccatgatgcgctacatgcgtgaattagaagacaaggatttagccctcaaccgggctatgattcccctaggctcatgcaccatgaagctcaacgcggccgcagagatgattccaatcacctggccagagtttggtaacctccacccctttgcgcctgccaaccaggtggcgggttcgttag

SEQ ID NO: 220218 - DNA, 924 bp, Unknown
  Bacterial polypeptide expressing nucleotide sequence isolated from the Sargasso Sea
ggtaatacgaaaatatcacttagacagaggtgatgaaaatagaaatatatgtttaatacctagctcagcacatggaacaaatccagcaagtgcacaaatggttggaatgaaagttgtagtagttgattgtgataaagaagggaatgtagattttgaagatttaaagaaaaaagcggaaacacattcagaaaatcttggagctttgatggttacatatccatcaacacatggtgtttttgaagaaaaaatatcagatatctgtgatttagttcataaacatggtggtcaagtttatatggatggtgcaaacctaaatgcgctcgtaggtattgcaaaacctggaaattttggtccagatgtttgtcatataaacttacacaaaactttctgtattccacatggtggtggaggaccaggtatgggtccaattgcttgcaaaagacacttacaagtttatttgcccaatcatccagtggttaaagattgtggtcctgcaacaggtataggcgcagtttctgcagcaccatggggtagttcaagtattttatctatttcatggatgtatataaaaatgatgggttctcaaggtttaaaattagcaacagaagttgccatcttaaacgccaattatatagctcatagattaaaaaaccattttccaattttatacaaaggtactaacgggaatgttgcgcatgaatgtataattgatattagatcaattaaaagtgaaacgggtgtgagcgaggaagacattgcaaaaagattaatagactatgggttccatgcaccaacaatgtcttggccagttgctggcacaatgatgatagagcctaccgagagtgaaagtttaacagaaatggatagattttgtgatactttaataaatattaaaacggaaatagaaatgatcaagtcgggtaa

SEQ ID NO: 220219 - DNA, 423 bp, Unknown
  Bacterial polypeptide expressing nucleotide sequence isolated from the Sargasso Sea
aaacaggtattacagaagaggatattgcaaaaagattaatagactttggttttcatgcacccacaatgtcttggcctgtagcaggaactatgatgattgaaccaactgaaagcgaaagcttggcagagctagatcgattttgtgacactttgataaaaatcaaatctgagattaataaaattaaatctggtgattttgataaagttgataatcctataaaaaatgctccacataccgatttagagttaacatcagatgtttgggatcataaatattccagagaagaagcggcatatccagctaaatttttgcgtaaaaataaattttggccaccagtagctagagttgacaacgtttatggagataagaatatattttgtacatgccctagcatggatgactttaaagaagatgctgcataga

SEQ ID NO: 220220 - DNA, 754 bp, Unknown
  Bacterial polypeptide expressing nucleotide sequence isolated from the Sargasso Sea
cagccttggctggagcaagaggtctttgagcgttaccgcagtgagaccgagctattgcgctacatccagcgcctggtggccaaggatttctctttggtccacggcatgattccgttgggcagctgcaccatgaagctcaatgcagcctccgagctgcagccggtgagctgggcagcgttcagtcgtttacacccctttgtccctccttcccagcgcctgggttacgaccagctgattgccgagcttgaagcctggctggccactattactggatttgctgcggtgtcactgcagcccaatgctggttcccagggcgagtacgccggcctgttggtgatccgcgccttccaccgtcagcgcggggaagctcaccgcaatatctgtttgattcctacaagtgcccacggcaccaatccggccagcgccgtgatggctgggatgcaggtggtggcgattcaatgcgacagcgacggcaatatcgatcaggctgatcttgctgccaaagctgagcagcacagtcaaaacttggccgcgctgatggtcacttacccctccacccatggggtttttgaacagggcatcagtgatatctgtgccgtggtccaccgccacggcggtcaggtctacctcgatggtgccaatctcaatgcccaggttggggtctgccagcccggtcgctttggagctgatgtttgccacctcaacctccataagactttttgcatcccccatggcggcggcggccccggggtag

SEQ ID NO: 220221 - DNA, 514 bp, Unknown
  Bacterial polypeptide expressing nucleotide sequence isolated from the Sargasso Sea
agattaaaagatcattatccaattttatacaaaggttcaaatggtaatgttgctcatgaatgtattatagatattagatcaatcaaagcagaaacaggtattacggaagaagatattgcaaaaagattaattgatttcggttttcatgcaccgacaatgtcttggcctgtagctggaacaatgatgattgagcctacagaaagtgaaaacttgtcagagcttgataggttttgtgatactttaattaagattaaacaagagatagatttaatcaaaactggtaaatttgataaaattgataatccaattaaaaatgctcctcacaccgacactgagttagcttctgataattggactcataaatactctagagaagaggcagcttatccagctaaatttttaaaaataaataagttttggccaccagtagctcgagtagacaatgtctatggtgataaaaatattttctgtacctgtccaagtatggatgaattcaaagaagatgcagcataat

SEQ ID NO: 220222 - DNA, 754 bp, Unknown
  Bacterial polypeptide expressing nucleotide sequence isolated from the Sargasso Sea
tatgacatccaaatttgggtctgatttgtttatagataggcatcttgggttgggagataatgatgaaaaaattatgctgaacaagcttggttttaataatattgatcaatttataaatcaagttattcctgaagatattcagcttaaagataaatcttcagaaatattgccccaaggttgttcagaaattgaggctttaaacgaattagaagagattgcgaataaaaatactaaaatgagatcacttataggccttggttattatgacaatcatatgcctaaagtaatccaaagacacgttcttgaaaaccctaggtggtacacgtcttatactccatatcaagcagaaattgcacaaggaagattagaagctctatttaattttcaaactgttatttgtgaactaacaggattccctgtcgccaatgcatctttgttagatgagggtactgctgctgcagaagctatggcaatgagtttttccgcaagaaaaaataaatcttcaaaagtgtacttagtggaatcaaatgtttttgatcatacttttaatgttcttcaaaccagagcaaaacctttgggaatatccttaaaacgctttactcaaagcaacttttcaaatcatgacgatgtttttggaatgttgttgcaattacctggtaaaaatggggaattatatgatcccacattcttaatatcccaagcacatagatcagaaattactgttacggcatgtgttgatccactggcacaagtt

SEQ ID NO: 220223 - DNA, 769 bp, Unknown
  Bacterial polypeptide expressing nucleotide sequence isolated from the Sargasso Sea
ctgttatctttaacaagacttaaaaccccagcagaacttggggcagatattgctgttggaagtgcgcaaagatttggaatacctatgggttatggaggtccacatgcagcgttttttgcaaccaaagaagaatttaaaagatctatgccaggtagaattattggagtatcagttgatagacatgggaaaaaagcgtttagattatctcttcaaacaagagaacagcacataagaagagacaaggctacaagcaatatttgtactgctcaagcactacttgcaattctttcagctgcttatgcaatttatcatggacctgaaggaattttaaaaatagctaataggacatcaaagttagcaaaaatttttgctgacggactgaaatcaggtggttaccaactacactctgaaaatttttttgatacagttactgtcaaaacaaatgagaaaacagacactataaataacaaggctttatcagaaaaaattaatttgagggtagtagataaaaatacattatctgtagcttttgatgaggttaagagagttgatcatgtaaatactctactaaaaatattcggaataaaaaaaacatttagtaatactgataaagttgatttaactaatttaccaaaaaatcttttaagaacatctaaataccttactcatcctatttttcataaatatcattcagaaactgagatgcttcgttatttaaaaagattagaggattgtgatattgctttaaatagatctatgattgcacttg

SEQ ID NO: 220224 - DNA, 958 bp, Unknown
  Bacterial polypeptide expressing nucleotide sequence isolated from the Sargasso Sea
aatgcaatttttagttgataaagagtgttttaagcaaactatagatgtcattatttcaagagctgaaccattagatattgaaataattgtaacagacattaagaattttgattttaccaatgcctttggttgtattttacaatatccaaataaatatgggcatatttcatcaaatgatgattataaaaaccttgtctctgatgcacacaactcaaactgtaaagtaatttttgctagcgatctaatgtgtttacagctttttgaagcaccaggtaatttaggagcagatattgctgttggtaatagtcaacgttttggtgtcccacttggatatggaggccctcatgctgcatttatgtcaactagtgaagaatttaaaagagatatccctggaagaattgtaggtgtatcacaagaccgtagaggtaatcaagcttatagactaacactccaaaccagagaacaacacattagaagagaaaaagcaacatcaaatatttgtacagcgcaagttttgcttgctatcatatcaggaatgtatgcattatttcatggtccagatgatttgaaaaatattgccaaaagaatacatagtcatacaaaagaactggccgataaaatttcaaaattaggtcacgaaatagtaactaacgataattcattttttgatacaatagtaataaagttatcaaatattagtattgaaagtttaaaagataaggctttagagcataattttaatttaatgtatcatgataatgggctcattggcatctctttagatgaaaaaactgattataatgaagttgaggcacttgcaaatttattcgatgtaagtaatgattctcgaaatacttataatatttttaaaccgaatagagcaggcgatattttgacccaccctatttttcatactattaattctgaaacagaaatgcttaggtatatcaacaagtta

SEQ ID NO: 220225 - DNA, 841 bp, Unknown
  Bacterial polypeptide expressing nucleotide sequence isolated from the Sargasso Sea
caaggagagtatgcaggtctcctagcaattgatgcatatcataaaaataatggtgatgataataggtcaatctgtcttattccgagatcagcacatggcactaatcctgcctcagcaatgatggttggaatgaaagttgtccctgttgaatgtgattcggaagggaatattgatcttaaggacttaaaagaaaagtcatctcttcacaaaagcaatttatcggcaattatgatcacatatccttccactcatggagtctttgaaagtaatgtgaaagaagtttgtaaaattgttcatgatcatggagggttagtttatattgatggagctaacttgaatgctcttgttggtattgcaaaacctggtgagtttggtggtgatgtttctcatctcaatctgcataaaacattctgcattcctcatggaggaggtggacccggagtcggcccgataggagttgtagaaaaacttaaagattttatgccttcacatcatgaaaatattcaaaatgtaggtcctgtatcctcaacagattttggaagtgccagcattctaccaattagttggatgtatattgcaatgatgggatcaaagggtttaaaacaagctacgatgactgccattttaagcgcgaattatgttgcaaagcgcctaagcgatcactacaagatactttataaaggtgagaacaacctaattgctcacgaatgcataatagatgcaagacctttcaaagagtcctcaaatattgatgttgatgatatagctaaaaggcttatggattatggttttcatgctcctactatgtcctggccagttgcaggcactcttatgattgagc

SEQ ID NO: 220226 - DNA, 745 bp, Unknown
  Bacterial polypeptide expressing nucleotide sequence isolated from the Sargasso Sea
ttgcaatataattcacaaaaaaggtggtcaagtttatatggatggagctaatttgaatgcgctggttggagttgctaaaccgggaaaatttggtccagatgtttgtcacataaatttacataaaacattttgtatcccacatggaggtggaggaccaggaatgggtccgatagcatgtgctaaacatttagcagaatttttacctactcatgaaattataaaagagtctggtccaaaaaacggaatgggcgctgtatctgcagctccttggggtagctcaagtattcttcctatatcttggatgtatataaaaatgatgggtgctgaaggattaaaaaaagcatctcaagtttccattttaaatgcaaattatatttcaaagaaactatctaatgattacaaagttttatacactggcaaaaatggtaatgtcgctcacgaatgtataattgatatcagaccaataaaagctagttcaggaatttctgaagaagacttagctaaaagacttatagactttggttatcacgctccaacaatgtcatggccagttgcgggaacaattatgattgagcctactgaaagtgaaaatcttgaagaaattgataagttttgtaatgccttaataaagattaaaaaagaaattaatttagttgaaacttcaaaatttgataaaattgacaatccattaaaaaatgctccccacacatacgttgagttatcctctaacgaaatggagtcataa

SEQ ID NO: 220227 - DNA, 886 bp, Unknown
  Bacterial polypeptide expressing nucleotide sequence isolated from the Sargasso Sea
atggaacaattacaccccagtgttattttaagaaacatactagaaaatcccggctggtatacagcctataccccatatcaaccggaggtgtcacaaggtagattagaaatgttaatgaattttcagcagatgattatagacttaacaggtatggaaatatcgaatgcttctttattagatgaaagcaccgcagctgctgaagcaatgatgctggcttacaggaatcaaaataaagtaaaaaaaactttttgtatacaaaatgattgtcatcctcaaactttatcagttttaaaaacgcgttctagtccagtgggaataaaaatattagtatcaaatgaacccaatgaagatacttttgcttgtttgattcaaaatccagatacttttggagaaatacatgacattaaacaaatgatagatcaaaataaaaaaaataatattctttcaattgttgcagctgacataatgagtttaatattaattaaatctcctggtgagctaggagcagatatagttattggaagtagtcaaaggtttggagtgccaattggttttggtggaccacatgctgcattttttgcaacaaaaaatgaatacaaaagattaattccagggagaattataggtgtatcagtagatcggtataaaaaaagatcttatagaatggcccttcaaacacgtgagcaacatataagaagggaaaaagcaaccagtaatatttgcacagctcaagctttactggctataatttctgctgcatatgctatatatcatggaccagaaagacttaaaaaaatagctttaacaatccacaataatactatctttttaaaaaaatctttagaatatcttggattcaattgccaatccccaaaatttttttgat

SEQ ID NO: 220228 - DNA, 741 bp, Unknown
  Bacterial polypeptide expressing nucleotide sequence isolated from the Sargasso Sea
gcagcagaggctatgggtttaagtcacagattgaataaaaaagataataatttagtttttgtctctgaggattgtcatcctcaaacaataaatgtaatacaaactagagctgaaccaataggtttaaaagtattagtaggtaaagaagatgaagttttagatcagttaaaggaagatttagtttgcggaatactgcaatatcccggaactttgggtgatataaaggacccaagtgaatcaattagcaaaattcacaaaaagaatggtaaggccatattagcctgcgatctgttggcattagcaaaattaaaaaccccaagagaacttggtgcagatatagcagtcggaagttcccaaagatttggtattccaatgggatacggaggtccacacgcagctttttttgcaacaaaagatgagtacaaaagatcaatgcctgggagaattgttggtgtttccgttgatagacacggtaataaggcgtatagattatccttacaaactagagaacaacacataagaagagataaggcgacaagtaatatttgtactgctcaagctctattagcaattgtgtcagcagctttctctatttatcatggacccgacggaattaggaatatttctgagagagtatctcaattagcaaaaagttttgctgataaaataaaacagtctggatatgaactttattctaattatttttttgatactgtcacaattattactaaagaaaaaact

SEQ ID NO: 220229 - DNA, 811 bp, Unknown
  Bacterial polypeptide expressing nucleotide sequence isolated from the Sargasso Sea
ccgcggtctaggggcagatgtctgtcacctgaatcttcataaaacgtttgcaattccccacgggggaggcggcccaggtatggggccgatcgcggtggcagaacatctttcaccgtatctacctggacattcaatggtcaagactggtggggacgaagcaatccgatccattgctgcggctccctggggcagcgccagtgttctgctgatttctcacgcttatgtctgcttattgggctggagagggatgaccagggctacgcaagtagcgatgctcaatgcgaattacataaaatcaaggctaagcgctcattttgaggtgttgtatgccggagagaatggtcgagtggcgcacgaattgatatttgatctccgaccgtttcgagaaagtgcaggtgtaaccgaacaggacgttgcgaaacgattgatggattttggctttcatgctccgaccgtatcatttcctgtgcaaggcactttaatggtggagccgactgagagtgaaccgaaagaagagttggaccgtttttgtaacgccatgatgaaaattcgggaggagatacaggcgattgttgatggggaagctgaccgtaacgacaacgtgctcttgaacgcgccacacacagcggaagaactcacggcgtccgattggacccatccgtattccagacaacaggcggctttcccgctctccagtgtgagagctcgaaaatattggccacccattagtcgaattgatgacgcctatggcgatcgtaatctgatgtgtagttgcccacctgttgactcatatgacgagggttcggagtag

SEQ ID NO: 220230 - DNA, 530 bp, Unknown
  Bacterial polypeptide expressing nucleotide sequence isolated from the Sargasso Sea
aatgttacataattctcaaaaagattttattagaagacacataggtccatcagaaaaagaccaagaaaaaatgcttaaagatcttaactttaagtcattagatgagtttattaatagcactataccagaaaaaattcagttcaaaggtgaattaaatattggggaaccaaattcagaatatgaagctttaagaaaattaaaagcaatttcaaaaaaaaataaaatttactcgaattttataggaatgggttattatggaacctacacaccatatgtaattttaagaaatatattagaaaatccaggttggtatacatcatatacaccatatcagcctgaagtagcacaaggtagattagagatgctattaaattttcaacaaatgattgttgattttacaggaatggatatagcgaatgcgtctctacttgatgaaggaactgcagctgcagaagctatggggttaagtcatagacttaataaaagtgatagtaattttagtttttgtttcagagaattgtcatccacaa

SEQ ID NO: 220231 - DNA, 901 bp, Unknown
  Bacterial polypeptide expressing nucleotide sequence isolated from the Sargasso Sea
tttctttgtcgataaaaactgttttaggcagactatttccgttcttaaaacaagggctaagccatttggtattgagcttgaaattggagatcctcaagattttaatgaaaaagatttttttggaatgttaatacaatatccaaataagtttggagaaatagaggatttttcaaggctatcagattactgtaaaagaaataaatccttgctagtttgtgctactgatcttcttgccttgactcttttgaggcctccaggagaaattggtgctgatattgttataggttcatcccaaaggtttggagtcccaatgggatttggagggccacatgctgcatttatggctacacatgaaagttttcaaaggtcgatgcctggaagaattattggggcatctaaagatgctagcggaaatctatcctataggcttgcacttcaaacaagagaacaacacataaggcgagaaaaagccactagcaatatttgcacttctcaagctcttctagctgtaatggctggtttttttgcaatctatcatggtcccaatgggttgataggaattgctaatgatatccataaaaaaactcgtaaactttttaatgctcttaagtctggtgatcatgaaattcttaataataacttttttgatactctttctattcgcttaaaaggaaatgtttcggaaataaaaactcgtctactcgatgcaaaaataaatattaattggtttgataataatttggttagtatctcaatagatgaagccacaacctctgatgacattgctgatctagtctttgcgctctcaggaaagtctatatcaaatgattccgaagatgttgaagctagtcttaataaagaaatagttagatcctctgattttatgaaacaagagcgttta

SEQ ID NO: 220232 - DNA, 900 bp, Unknown
  Bacterial polypeptide expressing nucleotide sequence isolated from the Sargasso Sea
gaaagaattttcacatccacatccatattctcctattgaacaaatggatggttacagagaattattcactgatttaaaaaattggctaagaacaatcacaggtttttctggtgtttctttgcaaccaaatgctggagcacaaggagaatttgctggcttaatggttattagaaagtttcatgaaaaaaatggtcaaaaaaagagaaatgtttgtttaataccgagctcagcacatggaactaatccagcaagcgcccaaatggctggcatgaaagttgttgttgttaattgtgacgtatttggaaatgtagattatgaagatttaaagaaaaaggcagaagaacactcagatactttgtccacgctaatggtgacttatccgtcaacccatggagtttttgaagaaaaaataacagatatttgtgatttagttcataaacatggaggtcaagtttatatggatggggcaaatttaaatgcgttggttggtattgcaaaaccaggaaattttggtcctgatgtgtgccatattaatttacacaaaacattctgtatacctcatggtggaggcggtccaggaatgggtcctattgcctgcaaaaaacatttggaaatttatttaccaagtcatcctgtaattgattgtggccctccttcaggaataggagcaatctcagcggctccttggggaagttcaagcattctttctatatcttggatgtatattaaaatgatgggatctgagggtttaaaattggctacgcaaaatgcaattttaaatgctaattatatagctcacaaacttaaagatcatttcccaattttatataaaggaaaaaacggaaatgtagctcacgaatgtattatagatattagaaaaattaaaagtgaaacaggaat

SEQ ID NO: 220233 - DNA, 882 bp, Unknown
  Bacterial polypeptide expressing nucleotide sequence isolated from the Sargasso Sea
cgcctggtacaccgcctacacgccctaccaggccgaaatctcacaaggccgcatggaggccctggtcaacttccagaccatggtgtgcgacctcactggcatgccgattgccaatgcgtccatgctggacgaagccaccgccgccgccgaagcgatgacactggccaagcgctcagtcaagagcaagagcaacgtgtttgtggtggcgggcgatgcccacccacagaccattgaggtcatccagacccgcgccaagcccctgggcctggaagtgcgcctggccaattcggccgaagaatggaacacactgctggacggcgactactttgccgtgctggcccaataccccgccaccagcggccgcattgacgacctgcgcgccgacgtggaaaaggcccatgccaagcaagctgccttcatcgtggcggccgacctgctggcgctcaccctcatcacgccgcccggcgaacaaggtgccgacattgtggtgggcaccacccagcgctttggcatgcccatgggcgccggtggcccccacgctgcctacatggcctgccgcgatgaattcaagcgctccatgcctggccgcctggtgggcgtgagcgtggacgtgcatggcaaacctgcctaccgcctggcgctgcaaacgcgcgaacagcacatccgccgcgaaaaggccacctccaacatctgcacggcccaggtactgcccgccgtgattgctagcatgtacgccgtgtaccacgggcccgaaggcctcaagcgcattgcacagcgcgtggctgcctataccgccgtcctggcccagggcctgaagcagctgggcgccccagtgcgtgagcaggcgaccttcgacacgctgagtctgcacaccggcgccgc

SEQ ID NO: 220234 - DNA, 898 bp, Unknown
  Bacterial polypeptide expressing nucleotide sequence isolated from the Sargasso Sea
gtaaattctatcgaccaattaattgagcaaacagttccggcagccattaggttaaagcaaggtttaaatttgcccgaagctaaatctgaggtcgattatcttaaagccttaaaacaaacggcttctttaaacaaagttttcaaatcttatatcggacaaggatattatgacaacatcacccctggtgtaattttgcgtaatgtatttgaaaacccaggatggtacacgcaatacacgccttaccaagcagaaattgcgcaaggtcgtttacaggctttgttaaatttccaaaccatggtaattgacctaacgggaatggagattgccaacgcatctttattagacgaaggtacagcagctgccgaagccatgtttatgcaatacagtttgcgcaaaaaagagcaaggcaataaatacttcgtttctgaagccatcttcgctcaaactattgatattttaaaaactagagctaatcctttcggtattgaattggtaattggcaaccacgagaactttgagcctacagccgaattttttggtgccattgtacaatatccggcaggtaatggcgaagtttacaactatagccagctggctaatactttgcacgagcaaaatgttaaactaacggttattgccgatttattaagcttaaccttgttaacccctcctggcgaatggggagctgacgtagtagttggtactacgcagcgtttcggtatcccgatgggatttggtggtccacacgctgctttttttgccactaaagacgagtacaaacgctccattcctggtcgtatcatcggtgtaactatcgatagcaacgataactacgctttacgtatggctttgcaaacacgtgagcaacacatccgtagagataaagcgacttcaaaca

SEQ ID NO: 220235 - DNA, 796 bp, Unknown
  Bacterial polypeptide expressing nucleotide sequence isolated from the Sargasso Sea
aagagagggttataataaacttatgagtgaattaatcgctatgttaaaagatataacaggctttgatggtatttctttacagccaaattcaggagcacaaggagagtttagtggtttgttagcaattaaaaaatatcatgaatctaaaaataactttaacaaaaatatatgcttaatacctagtagtgctcatggtactaatccagctagcgcaaatatgtgcaatatggatgtttccattgttaattgtgattctaagggaaatattgacttagttgatttagataaaaaaattgatgatgctggagaaaaattagcagcaattatgataacttatccgtccacacatggtgtttttgaagaatctatagttactatatgtgaaaaaattcacaatgcaggtggtcaagtttatatggatggagccaatttaaatgctcttgttggtatttcaaaacctggtatttttggaccagatgtatctcatataaatcttcataaaacgttttgtattccacatggaggaggtgggccaggcatgggtcctattggagtaaaaaaacatctcattccatttttaccaggtcatcctgttataaaaaaaggtattggattacaagaaaacgatgccgtttctgctgctccttggggtagcccttcgatattaccaatttcttattcatatatttctatgatgggtgatgaaggtttaaaaaatgcaactcaaatagctatattaaatgcaaattacattaaatctagattagagtcattttatgacattctctacaaaggt

SEQ ID NO: 220236 - DNA, 853 bp, Unknown
  Bacterial polypeptide expressing nucleotide sequence isolated from the Sargasso Sea
aatgattagcaagatccataaaaaaaatggaaaagcaattttaatttgtgatcttttatctttagcactaattaagacacctgccgaacttggagctgacattgcagtaggtagctcacaaagatttggtattccaatgggatatggcggtcctcacgctgcattttttgctacaagagacgagtacaagagatcaatgccaggaagaatagtaggtgtatctgttgatagacatggaaataaagcttacaggttagcattacaaactagagaacaacatataagaagagataaagctacaagcaatatttgtacagcacaggcgcttctcgcaattgttgcagctgcctttgcaatttatcatggaccagaaggaatcaaaaacattgcagaaagagtttctcaattaacaaataactttgcaaataaattaaaacagtcaggctatgaattatattctgaaagcttttttgatacggtaactataaaaacaggtgataaaactgataaaatttttcaaaatgctttagatcaaaaagtaaatatcagaaaagtgaattcaaatatgttagcagtatcatttgaccagaagaaaaatgtttatagagctaaccaactattaaaaatattcaattcagctgagtccattaaagaaaatccaacagagagtttgccaaatttaccaaaaaaaatgcttagaacttcaaggtatctaaaccatccagtgtttaacaattatcattcagaaactgaaatgctgagatatttgaaaaaattagaagacaaagatattgcacttaatagatcaatgatagctctaggatcatgtacaatgaaattaaatgcggtgcag

SEQ ID NO: 220237 - DNA, 877 bp, Unknown
  Bacterial polypeptide expressing nucleotide sequence isolated from the Sargasso Sea
tttagtgctattaaatctagtgatcatgaagttcttaataataacttttttgatactctttctattcgcctaaatggagatatttcaaaaataaaaactcgtcttctcgatgcaaaaataaatattaattggtttgataataatttggttagtatctcaatagatgaagccacaacctctgatgacattgctgatctggtctttgcgctctcaggcaagtctttaccaattgattccgaagttggtgaagctagtcttaaaaaggaaatagtcagatcctctaattttatgaaacaagaacgttttaataaatatcattccgaaacagagatgatgagatatattaaaagactatctgacaaagatatagcactcgacagatcaatgattccacttggctcttgcactatgaaattaaatgcagcttcagaaatggctccagtaagctggccagaatttgcaaatatgcatccatattgtccgattgatcaaacaaaaggttatcaagttcttattaaagacttgagagaaatgttatcaggtattacaggatattatgatatttcacttcaaccaaatgctggttctcaaggagagtatgctggtctactagcaattgatgcatatcataaaaataatggtgataataataggtcaatctgtcttattccaagatcagcacacggtactaatcctgcctcagcaatgatggttggaatgaaagttatccctgttgagtgtgattcggaagggaatattgatcttaaagacttaaaagaaaagtcatctcttcataaaagtaatttatcagcaattatgatcacatatccttcaactcatggagtctttgaaagtaatgtcagagaagtttgtaaaa

SEQ ID NO: 220238 - DNA, 769 bp, Unknown
  Bacterial polypeptide expressing nucleotide sequence isolated from the Sargasso Sea
atgaaagttgttgttgtcgattgcgataaagagggaaatgttgattttgaggatttaaagaaaaaagcagaaatacattctgaaaatcttggagcattaatggttacttacccgtctactcatggtgtatttgaggaaaaaattatggaaatatgtgagttaattcacaatcatggtggtcaagtttatatggatggtgcaaatctaaatgcacttgttggtatagcaagacctggaaattttggtccggatgtttgtcatattaatttacataaaacattatgcattccacatggtggtggagggcctggaatggggccaattgcatgtaaaagacatttacaagtttatctgcccaatcatccagttgttaaagactgtggacctgcaacgggaattggagcagtttcagcagcaccttggggaagttcaagtattttatcaatttcttggatgtatattaaaatgatgggtgccgaaggtttaaaattagctacccaagttgcaatacttaatgcaaattatatagctcacagactcaaagatcattatccaattctttataaaggctcaaatggaaatgtagcacacgaatgtataattgatataagatctattaaaagtgaaacagggattaccgaagaagatatagctaaaagattgattgattatggttttcatgcaccaacaatgtcatggcctgtagcaggtacaatgatgattgaaccaaatgaaagtgagagtttgtctgaacttgatagattttgta

SEQ ID NO: 220239 - DNA, 881 bp, Unknown
  Bacterial polypeptide expressing nucleotide sequence isolated from the Sargasso Sea
ccctgcatctgcagctatgtctggatttgacgtcatatctattccctcagacgaagcaggaaatatagacatcgactttttaaaatcaatcgcagggcccgacttagctggcgcaatgataacattgcccagcacactgggtatttttgacactaatatcaccgaagtatgcaaaattgttcatgaggctggcggactagtatatggagacggagctaacatgaacgctctgttaggccgagcgaaactaggccatctaggctttgatgttattcatctgaatttacacaaaacatttagtacccctcacgggggagggggacctggagcaggtcctgtctgtgctaagtcaatcttgtacgattttttaccagccccggttgttgaaaaatccccatcagcctttgaactcatcactcctgcatcttcaattggaagaatcagcggatttcaaggcaattttgctgttttagttagggcatacacatatataaaaactctaggagcagcaggaattaaatcaataagcggaaatgctgtattaaatgctaattatataatggaatccttaaaagacatctacgatatcccctacaacagaacctgcatgcatgaagttgtattttctgcctcatccaagaaagatcaggaagttaatggcctagccatagccaaacgactcctagattatggcttccatgcaccaaccatgtactttccacttatagtagaagaagccttaatggtagagccaactgaatcagaaacactagaaacactagatgctttcattgatgcaatgaaagcaatcaatgaagaaatctcaacccaacctgaacttgtaacagaagctccccacaccacacctgtatccaagtaga

SEQ ID NO: 220240 - DNA, 853 bp, Unknown
  Bacterial polypeptide expressing nucleotide sequence isolated from the Sargasso Sea
gaaaaatcaattttttcttgtgtttgtactgatcttatgagcttagttctttttcagccacccgggaaatatggtgcgtctgcagtggtgggtaattcacaaagatttggagttccgatgggctatggtggtcctcatgctgctttttttgctaccagagaagaatataaaaggtttattcctggaagaataattggagttagcattgataaatttggaaatcctgcttatagaatggctcttcaaactagagaacagcatataaaaagagatagggcgacatctaatatatgtacagctcaagtattattagctgttatggctggcatgtatgctgtctatcatggcaaagaagggattaaaaaaattgctaaaaagattaattacttaacaaggctactttcaaatggattaactcatttagattttcaacaagaaaatgaaatattttttgatactttaaaaattaaagttgataaagaaataaagaaaaaaattagaaagtcagccgaagaaaaaaaaataaacttgagatattttgaatcaaatcatgttggtatttctatagatgaaacaaaatcaacaaatgatatttttgatcttattaatattttttcagagttttctaataaaaatctggaaatagatcttgatgctttaggaaaatttgattcaaacaaaaaaattaaggagctcaggactacagactttttatctcatgaaatatttaataaatattatacagaacatgaaatacttaggtacatgaagagattagaaaataaagatttatcattagttcattcaatgatttctttaggatcttgcacaatgaaagttaactcaactacag

SEQ ID NO: 220241 - DNA, 595 bp, Unknown
  Bacterial polypeptide expressing nucleotide sequence isolated from the Sargasso Sea
atgtatataaagatgatgggatctgaaggattaaaattagcaacacaaattgcaatattaaatgcaaattatattgcatatagattaaaaaatcattttccaattttatacaaaggaagtaaaggcaatgtagcccacgagtgtattatagatattagaacgattaagagcgaaactggaattacagaagaagatattgcaaaaagattaattgatttcggatttcatgctcccacaatgtcttggccagttccaggaactatgatgatagagccaactgaaagtgaaagtttaaaagaattagatagattttgtgatactttaataaagattaagtctgaaattgataacattaaatcaggaaagtttgataaaattgataatcctataaagaatgcaccacatactgatttagagttagcctcaaatgaatggatgcataaatacactagagaagaagcggcttatccttctgagtttttaaaatctaataaattttggccaccagttgccagagtcgataatgtgtatggtgacaaaaatcttttttgtacttgcccaagtatggatgaatttaaagaagatgcagcttaat

SEQ ID NO: 220242 - DNA, 717 bp, Unknown
  Bacterial polypeptide expressing nucleotide sequence isolated from the Sargasso Sea
aggtttggtgtgccgatgggttttggtggacctcatgcaggctttatagcagtaaaagatagtcataaaagatcacttccgggaaggttaattggtttaagtaaagatcagcaagatagaccttgttatagattagctctacagacaagagaacaacatataagaagagagaaggctacgagcaatatatgcacagcacaggcattgctggctattatgtcgggcttctatgctatatatcatgggcctgaagggctaaaagagattgcaactagaataaatggtttaactaaagacctagccaacaaactaattgataaaggtttagaaattaaatctgaaactttctttgatactttggtagttaaagttaaggacgctaaaaaaatacatgaaaaagccaatgcaaatggcatgaatcttcgtgatatttctaatgactctgttggggttagcttagatgaaactagcactcaagatgatgtcaaagccatcattgaaatatttgatgatgaacagaacaagaacagcaagatcgatcagagttggagtaaagaacttaatagagcaacagcttttttaactcatgaagtatttaattctcatcattctgagactcaaatattgcgctacatcagaagtctggctgacaaggatatagctttagatagatctatgattcctcttggatcatgcactatgaaattaaatgcaaca

SEQ ID NO: 220243 - DNA, 941 bp, Unknown
  Bacterial polypeptide expressing nucleotide sequence isolated from the Sargasso Sea
ccttcttgccctgactcttttgaacctccaggagaaattggtgctgatattgttataggatcatctcaaaggtttggagtcccaatgggatttggaggtccgcatgctgcatttatggctacacatgagagtttccaaagatcgatgcctggaagaattattggagcatctaaagatgctagcgggaatctatcctataggcttgcacttcaaacaagagaacagcacataaggcgagaaaaagccactagcaatatttgcacttctcaagcgctactagctgtgatggctggtttttttgcaatttatcatggtccaaatgggttgataggaattgcaaatgatgtccataaaaaaactcgtcaactttttaatgctcttaaggcaggtgatcacgaaattcttaataataacttttttgatactctttcaattcgcttaaaaggagatattccggaaataaaaactcgtctactcgatgcaaaaataaatattaattggtttgataacaatttggttagtatttcaatagatgaggccacaacctcagatgacattattgatctagtctttgcgctctcaggtaagtctatatcaaatatttctgaagatggcgaagctagtcttaataaagaaatagttagatcctctgattttatgaaacaagagcgttttaataaatatcattctgaaacagagatgatgagatacattaaaagattatctgataaggatatcgcactcgatagatcaatgatcccacttggctcttgcacaatgaaattaaactcagcttcggaaatggcaccagtaagctggccagaatttgcaaatatgcatccatattgtccgattgatcaaacagaaggttatcaaattcttattaaagacttaagagaaatgttatcaggtattacgggatattatgatatttcacttca

SEQ ID NO: 220244 - DNA, 898 bp, Unknown
  Bacterial polypeptide expressing nucleotide sequence isolated from the Sargasso Sea
ctgaaaaagcttaaaattatctctcaaaaaaatcagacttttagaaattttatcggcatgggttattacaattgttttactcccaatgtagttttgagaaatattttagaaaatccaggctggtatacttcgtatactccttatcagccagaggtagctcaaggaagattagaaatgcttttgaattttcaacaattaataattgattttactggaatggatattgctaatgcttcattgttagatgaagctacagctgctgcggaagcagttggtctggcacaaagagtttccaaaaataattcaaaaaaagtctatgtttcagatacttgcaaccctcaagttattgatttaattaagacaagaattgaacctttcggtctggagctcttaattggcaatcaaaaagattttttgaaaaatttaaatggagatttgttgtgtggagttatagcataccctgatactttaggtgaaataattgatcctagtgagtctataagtttaatacgtaaaaaagggggtaaagctatagtagtttgtgatcttctttctttagcaaaactaaaaacaccatctgaacttggggcagacattgcagtgggaaacgctcaaagatttggagttccaatgggttatggcggtcctcacgctgctttttttgctacaaaagaggaatttaaaagatcgatgccaggaagaattattggtgtatcggtagatagatttggtaaaaaagcttacaggttgtcccttcaaacgcgcgagcaacacatcagaagagataaagcgactagcaatatttgtactgcacaagctcttctagcaatcgtatccgcagcatatgctatttatcatggaccaaatggaattttagatattgcaaatagaacatcta

SEQ ID NO: 220245 - DNA, 850 bp, Unknown
  Bacterial polypeptide expressing nucleotide sequence isolated from the Sargasso Sea
gtttttaatatctatcattcggaaactgaaatgatgagatatttaaaaaaactgaaaaataaagatgtggcactgaatagatcaatgataccacttggatcatgtacaatgaaactaaacgctgcatctgaaatgttaccaataactttgccaggttttgctaatgcccatcctttcttagaaccacatcaaagagatggatacaatcaaatgatgaaagaattaatatctatgttaaaagatatcacaggttttgatgcaatttcacttcagcctaatgctggagcacaaggagaatttgctggattattagcaattcaaaaatttcataaaaaaaattctgatactaaaagaaatatctgtattattccaaaaagtgcgcatggaacaaacccagcaagcgcgcaaatgtgtggtatggaaatttcaatagttaattgtgatgaaaaaggtaatgttgatattgatgatttagataaaaaaatagctgaagctggaattaaattatccgctctaatgattacttatccatccactcatggtgtatttgaagaaagtattgttgaaatttgtaaaaaaattcatgatgctggaggtcaggtttatttggatggtgctaattataatgcaatggtaggtatagcaaaacctggaaaatttggtcctgatgtctgtcatatgaaccttcacaaaacattcacaattcctcatggcggtggcggtcctggggtaggtgcaattggcttaaaaaaacatttagaagagttcgctcctggacatccagtttttaaaaacgaaataggtttaactgaacaagaagctgtatctgctgctccttggggaagtgcat

SEQ ID NO: 220246 - DNA, 928 bp, Unknown
  Bacterial polypeptide expressing nucleotide sequence isolated from the Sargasso Sea
aataaattttttgtagataagtttactcatccacaaaatattgccgttatgaaaacacgtgcggaaccacttcatataaatatagtgattggtcatccagacgaaattttagaagataatcaatattttggtgcaatatttcaatatcctggtacttttggagatatcagagacttttcaaatcatatttcttcacttcacagaaataatgcaattgcaattatgtcagcagatccacttgcccttacaattcttaaggatcctggctcaatggatgctgatattgcagttggttcaacccaaagatttggtgttccagttggttttggagggccacatgcagcctatattgcaacaaaagatctttataaaagaaatcttcctgggagaatagtaggagtatcaattgatagcagaggtaataaagctcttagattagctcttcaaacaagggaacaacatattaggagagaaaaagcaacctcaaatgtatgtacagcacaagcacttttagcagtaatggcatcaatgtatgccgttttccatggacctgatggattaaaggcaatagcacaaagaattcatagaaaaacagtccgattagccattggtttagaagaattaggttataaaattgagcctaatagtttctttgatacgattacaatagatgttggaaatgctcaaactgttattttaaaaagtggaattaatgaaggtattaattttcgtaaaatcgatgaaaataaaataggtattactttagatgaaagaactagaccagaaatcattgaatccgtgtggaaagcttttggcctagataaaaaagacacagattttacacctaattatagaatccctgacagattaataagaacaactccatacttagagcaccctatttttcatatgaatagagcagaacaag

SEQ ID NO: 220247 - DNA, 859 bp, Unknown
  Bacterial polypeptide expressing nucleotide sequence isolated from the Sargasso Sea
tcgtgcgccatgatcacgtatccgtctacccacggtgtatatgaagaaaccgtgcgcgagatttgtgacattgttcaccaatacggcggtcaggtttatatggacggcgcgaacatgaacgcgcaggtgggcattacgtcgcctggcttcattggttcagatgtgtcgcaccttaacctacacaaaaccttctgtattccacacggtggcggtggcccaggtatgggaccaattggtgttaagtcgcaccttgcgcctttcctcccaaaccacacggttgttaacgtagaaacagcaggcaaagactgtggtgcagtatcggccgcgccatggggcagtgcatcaattctgcctattagctacatgtacatcaaaatgatgggtagcgctggccttcgccgtgcaaccgaagtcgctattcttaacgctaactatgtggctaagaagctagaagggcacttcccagtgctttacaaaggcaacaatggccgcgtagcgcacgagtgtattattgaccttcgcccgcttaaagaagcaagtggtgttaccgagttagacattgctaagcgcctaaacgactacggtttccatgcgccgaccatgagcttcccagtagcgggtacgcttatgattgagccaaccgagtcggaagctaagtacgaactagaccgtttcattaacgcgatggttagcattcgccaagaaattgcgaaagtagaaagcggtgagtgggatgccactgacaacccgctacacaatgcaccgcacacactagcggatatctgtgatagcgactggaaccgcagctacgaccgcatgctagcggcgtacccagctccagaagtacacagaaacaagt

SEQ ID NO: 220248 - DNA, 878 bp, Unknown
  Bacterial polypeptide expressing nucleotide sequence isolated from the Sargasso Sea
cggagtttcagtagataggcatggaaacaaagcttatagattatcattacaaactagagagcaacacattagacgagacaaagctacaagtaatatttgtactgctcaagccttactagcgattgtttcagcagcatatgccatttatcacggtccagatggaattaaaagtatatccgaaagggtatctcaactagcaaaaaattttgctgataaaataaaacaatctggatatgaattatactcagattatttttttgatactgtaactattattaccaaagataagactgatcaaatatttaaaaatgctttagaccaaaaagttaacataagaaaagttaattcagaaatgctgtcggtttctttcgatgaaagaaaaaatgtttacagagtaaatcaactattaaaaatttttaatgcagcggagtctattaaaaaagaggatcctactgttgctttaccaaatttaccaaaaaatttattaagaacttcaaaatatttagaacaccctgtttttaattcatatcactcagagacggagatgcttagatatcttaaaaaattagaggataaggatatagctcttaatagaacaatgatcgctctgggttcatgtactatgaaattaaatgctactgcagaaatgatacctatttcttggagagaattggcagaacctcatccatttgtacctgtcgaacaaatggagggatatagagagatgttcacagatcttaaaaattggttaagatctatcactggtttttccggtgtttcacttcagccaaatgcaggagcccaaggtgagtacgctggattaatggtaataagaaaatatcatttagatagaggagatgaaaatagaaacatatgtt

SEQ ID NO: 220249 - DNA, 727 bp, Unknown
  Bacterial polypeptide expressing nucleotide sequence isolated from the Sargasso Sea
atgttaaaagaattaaattatcaatcattagatgatttaattgacaatactgttccagaaaaaataaagtttaaaggcgaactaaatattggagagtcgaattcagaatatgaagcgttaagaaaattaagagcaatttcaaaaaaaaatcaagtttattcaaattttattggcatgggatattatggaacctatacgccgtatgtaattttaagaaatatattagaaaatccaggttggtatacttcatatactccttatcagccagaggtagctcaaggaagacttgagatgttattaaactttcaacagatgatcgttgactttacaggaatggatattgctaatgcttctttattagatgagggtacagcagcagcggaggctatgggtctcagtaacagattaaataaaaaagatagtaatttagtttttgtatccgaggattgtcatcctcaaactatagatgtaattcaaacaagagcagaaccaatgggtttgaaagttttagttggtaaagaagacgaagttttagaccaattaaaagaagatttagtttgtggaattttacaatatcctggaactttaggagatattaaaaacccaagtgaagcaattagtaaaattcacaaaaagaacggtaaggctgtgttggcttgtgatctattagcgctagctaaattaaaaacaccaagagaacttggtgctgatgtagcagttggaagct

SEQ ID NO: 220250 - DNA, 884 bp, Unknown
  Bacterial polypeptide expressing nucleotide sequence isolated from the Sargasso Sea
aatggaaggttttagagatttgtttactgatttaaaatattggttaagatctataacaggtttttccggtgtttctctacaacctaatgcaggcgctcaaggagaatatgcaggtctaatggttataagaaagtaccacttagatagagatgatgctcatcgtaatatatgtttaatcccaagttcggcacatggtacaaatccagcaagcgcacaaatggttggaatgaaagtcgttgttgttaattgtgataaagagggaaatgtagatttcgatgatttaaagaaaaaagtagagcaacattcagaaaatcttgcagctttaatggtaacttacccatctacccatggagtatttgaggaaaaaataactgatatttgtgagatagttcataaacatggtggacaggtctatatggatggagcaaatttaaatgcccttgttggagttgcaaagcctggaaattttggtccagatgtttgtcatattaatctgcataaaacattttgtattcctcacggtggtggcggacctggaatgggacctatagcttgtaaaaaacatttacaagtttatctgcctaatcatccagtaataaaagattgcggaccaacaagtggaattggagcagtatcagcagctccttggggtagttcaagtattctatcaatctcttggatgtatattaaaatgatgggatcagaaggattaaagcttgctactcaagttgcaattttaaacgcaaattatattgctcatagacttaaagatcactttcctattttgtacaaaggtgcaaatggcaatgttgcacacgagtgcataattgatattagaaatattaaatctgaaacaggggtaactgaagaagatattgcaaaaa

SEQ ID NO: 220251 - DNA, 906 bp, Unknown
  Bacterial polypeptide expressing nucleotide sequence isolated from the Sargasso Sea
aatgcttgctgtttcatttgatgaaagaaaaaatgtatatagagtaaatcaactattaaaaatttttaatgctgcagaatcaattaaaaaagaagatccgtcaataagtttacctaatcttccaaaaaacttattaagaacttcaaaatatttagaacatccagtttttaattcatatcattccgaaactgaaatgcttagatatttaaaaagattagaagataaagatatagcattgaatagaactatgattgcacttggttcttgtacaatgaaattaaatgctgctgccgaaatgatcccaatatcatggaaagaatttgcagaacctcatccgtttgttccaattgaacaaatggaaggttttagagatttatttactgatctaaaaaattggttgcgttctataactggtttctcaggtgtttccttgcaacctaatgcaggtgctcaaggtgagtatgcgggcttgatggttatcagaaagtatcatttagatagaggtgaggctaatcgtaatatatgtttaattccaagttcagcacatggtactaacccagcaagtgcacaaatggttggaatgaaggtggtagttgttaattgtgataaagagggaaatgttgattttgatgatttaaagaaaaaagctgaacaacattcggaaaatctcggggcactaatggtaacttatccatctacacatggagtatttgaagaaaaaataactgatatatgtgagttagttcacaaacatggtggacaagtctatatggatggagcaaatttaaatgccttagttggaattgcaaagcctggaaattttggtccagacgtctgtcatattaatttacataaaacattttgtattccacacggtggggggagggacaggtatgggaccgattg

SEQ ID NO: 220252 - DNA, 832 bp, Unknown
  Bacterial polypeptide expressing nucleotide sequence isolated from the Sargasso Sea
cgacgagaactgccacccgcagaccatcggcgtgatccagacccgcgccgagccgctcgggatcgaagtgatcgtgggcgcgcccgagacgctggaggccgagaaggtcttcggcgcgatcttccaatatccgggcacctatggccacgtgcgcgactttaccgccgaatgcgaggcgcttcatgccgcgaaagccgtggccgtggttgcgaccgatctgctggcgctgtgcctgctcaaagagccgggcgcgatgggcgcggatatcgccgtgggctccgcgcagcggtttggcgtgccgatgggctatggcggcccgcatgcggccttcatgtcctccaccgacaagatgaagcgcgcgatgccgggccggatcgtcggcgtgtcgatcgacagccatggcaaccgcgcctatcgcctgagcctgcagacccgcgagcagcatatccgccgcgagaaggcgacctcgaatgtctgcaccgcgcaggcgcttctggccgtcatggcgagcttctacgcggtcttccacggccccgtcggtctgcgcgcaatctcggaacgcgtgcacctgctgaccgtccaactggccgatgcgttgaaagcggcaggcgccttggtggagcctgcgaatttctacgacacgatcaccgtcgaggtgggcgtgggccagcagggcatcctcgccgctgcgcgccatcgcgggatcaacctgcgcaaagtgggccgcgaccgggttgggatttcgctcgatgagaccagcgatccgggcgtggtggccaaggtgctcgacgcgttcgggatcaccgaagccgcgcccgaggcgaagcagccg

SEQ ID NO: 220253 - DNA, 992 bp, Unknown
  Bacterial polypeptide expressing nucleotide sequence isolated from the Sargasso Sea
caatatttgtacttctcaagcgctacttgctgtgatggctggcttttttgctatctatcatggtccaaatggtctgataggaattgctaatgatattcataaaaaaactcgtatactttttaatgcccttaagtctggtgatcatgaaattcttaataataacttttttgatactctttcaattcgcttaaaaggagatattcaggaaataaaaactcgtctactcgatgcaaaaataaatattaattggtttgataacaatttggttagtatttcaatagatgaggccacaacctcagatgacattattgatctagtctttgcgctctcaggtaagtctatatcaaatatttctgaagatggcgaagctagtcttaataaagaaatagttagatcctctgattttatgaaacaggagcgttttaataaatatcattccgaaacagagatgatgagatatattaaaagactatctgataaggatatcgcgctcgatagatcaatgattccacttggctcttgtacaatgaaattaaactcagcttctgaaatggcgccagtaagctggccagaatttgcaaacatgcatccatattgtccgaccgatcaaacaaaaggttatcaagttcttattaaggacttaagagaaatgttatcaagtattacaggatattatgatatttcacttcaaccaaatgctggatctcaaggagagtatgcaggtctcctagcaattgatgcatatcataaaaataatggcgatgataatagatcaatatgccttattccaagatcagcacatggtactaatcctgcctcagcaatgatggttggaatgaaagttgtccctgttgagtgtgattcggaagggaatattgatcttaaagacttaaaagaaaagtcatctcttcacaaaagcaatttatcagcaattatgatcacatacccttccactcatggtgtctttgaaagtaaatgtgaagaggtttgta

SEQ ID NO: 220254 - DNA, 763 bp, Unknown
  Bacterial polypeptide expressing nucleotide sequence isolated from the Sargasso Sea
agaggctctgatgaactaccaaactatggttgctgatttaacaggcatggatatttcaaatgcctccttgctggatgaaccaaccgctgccgctgaagcaatgatgttggcaaacagagtggctaaatctaaatcgaatgtgtttttcattcacaagaatagctttcctcaatcgattgccattatgaagtctcgagcaaaacctctaggcattgaaattgaagttggtaaagaaatggattctaaaaaagaatattttggttgttacgttcaatatcctggcgatgatggatcaataatagatttctctgctgtttcagaatcagttcatgcacaaggtggtttacttatagttggttctgatttattagccttaactcttttaaaacctccgagtgagtttggcgctgacatagtggttggctcttcgcaaaggtttggtgtgccgatgggttttggtggacctcacgcaggctttatagcagtaaaagatagtcataaaagatcacttccgggaaggctaattggtttaagtaaagatcagcaagatagaccttgttatagattagctctgcaaacaagagaacaacatataagaagagagaaggctacgagcaatatatgcacagcacaggcattgctggctattatgtcgggcttctatgctatatatcatggacctgaagggctaaaagagattgcaattagaataaatggtttaactaaagacctagccaacaaactaattgataaaggtttagaa

SEQ ID NO: 220255 - DNA, 763 bp, Unknown
  Bacterial polypeptide expressing nucleotide sequence isolated from the Sargasso Sea
tggtgttggccctatcggtgttggcgcccacttaaagcctttcctgcccgggcaccatagccttaagaaagcccaacttggcagcgatcagaattcagtctcggccgctgcatggggcagcgccagtattctcccaattagctggatgtacataaggatgatgggacgaaatgggctcaagaaagcgagcgaatctgcaatccttaatgccaactatattgctgaacgacttaaaccacattacccagtcctttacacgggtgtaaatggccgcgtagcacatgagtgcataatcgacctccgaccaatcaaagaagccaccgggataacagtcgatgatgtagctaaaaggctaatcgatttcggctttcacgcaccgactatgtcgttcccagtttcaggtacatttatgatcgaacctaccgaaagcgaatcgctcaaggaactagatagattttgcgaagcgatgataataattagagatgagataaaagagatcgaatctggaatatcggatccagaggataaccctttaaagtttgcccctcacaccgcagaggctctgcttaccgaaaattggacacatagttatacgcgagagaaagctgcatatccagtcgctgcgctgcgcgaaggaaagcactggcctccggttggtcgaatagataatgtatttggtgatcgtaatttaatctgtacttgcccatcacttgatgattatgaagaggattcaggcaaatccaagtctagcttagctgcatga

SEQ ID NO: 220256 - DNA, 972 bp, Unknown
  Bacterial polypeptide expressing nucleotide sequence isolated from the Sargasso Sea
ggccgcacttatgattacatatccctcaacgcacggtgtgtttgaggacagtttaatccacatatgtgaaattattcataacaaagggggtcaagtttacatggatggagccaaccttaacgccctaatgggcatagctcaacctggaaaacttggacccgatgtcctgcacatgaacctgcataaaactttctgtattcctcatggagggggggggccaggaatgggaccaattggtctcaagtctcacctttctgaatttgcaccgaatcactgtgtaattcagattaaagatcttcacgagggaaacactgccgtttctgcagcaccattcggcagcccgggaatacttcctatttcatgggtctatatccaacttatgggagggtatgggttgaagaaatcttcgcaggttgcaatacttaatgcaaattacctagcaaagcgattaaatgaacattttccaatagtatataaagggaaaaacggccttgtcgctcatgaatgtataatagacgtaagaccgcttaaagcagatacaggaatctctgaagaagacatagctaaaagattgatagactatggtttccatgccccaactatgtcatggcctgttgcagggaccttgatgatcgaacctaccgaaagcgaaccgaaggctgagcttgatcgcttttgcgaagccatgatttcaatccgcagggaagtgacacgcgttgacagtggtgagtgggataaaattgataacccacttaaaaattcaccgcatcctgcagatgatctcacagaccccgaatggaaccattgctattcaaaggaaactgctttctacccgttggcctcaattcgccgaaataaatactggccgccttcagcacgtgtggacaacgtgcatggtgatagaaatgtcttttgtgcttgccctccgctggaagatatgagggcgagtagtgagtatatcagtcaatgtgg

SEQ ID NO: 220257 - DNA, 926 bp, Unknown
  Bacterial polypeptide expressing nucleotide sequence isolated from the Sargasso Sea
cggattattggtacaaaaatctgtagatagaggcaataattttagatttgtagataaaaatttatttactatttctttagatgaaactaccactttagaagatgtagataatttaattaatttttttaatgagaataataaatctcttattcatgaagatcttgaaaaggaaattaattctattgaaatatttacagataaattaaaaagagatgaagaaattctatctcatccaatttttaatatttatcattctgaaacagatatgatgagatatttaaaaaaactagaaaacaaagatattgcactaaaccgctcaatgattcctttaggttcatgtactatgaaattaaatgcggcttctgaaatgctacctataacattaaatggtttttctaatgctcatccatttttagaatctcatcagagagaaggctataatcaactaatgattgaattaattgctatgttaaaagatataacgggatttgatggcatttctttacaacctaatgctggagctcagggtgaattcgctggactattggctataaaaaaatttcatgatcataataatgaaaataatagaaatatttgcataattccaaatagtgctcatggcactaatcctgctagtgcacaaatgtgtggaatggaagtgtcaattgttaagtgtgataaatatggcaatgtagatattgatcatttaaagcaaaaaattaatgaagctggtttaaatttagcagctttaatgattacttatccttctactcatggagtttttgaagaaggtatagtcgagatatgtaatttaatacatgatgcaggtggtcaggtttatatggatggggcaaatttaaatgcattagtaggtatagctaaaccaggattttttggacctgatgtttcacatatgaatttacata

SEQ ID NO: 220258 - DNA, 763 bp, Unknown
  Bacterial polypeptide expressing nucleotide sequence isolated from the Sargasso Sea
atatgtgaattaatccataaacatggtggccaagtttatatggatggagcaaatttgaatgcacttgttggcattgctaagcccggaaattttggaccagacgtttgtcatattaatttgcacaaaacattttgtattccacatgggggaggtggtccaggtatgggacctattgcttgcaaaaaacacttagagtctttcttaccaagtcatcctattataaaagattgtggaccagcaacaggcataggcccagtttcagctgcaccctggggaagttctagtattttatcaatttcatggatgtatatgaaaatgatggggtccgagggattgaaacttgcaacccaaatagcaattttaaatgcaaattatgttgcacacaaattaaaaaaccattacccaattttatataaaggaacaaaaggtaatgttgcacatgaatgcatcatagatatcagaaacataaaaaaggaaacaggaattacagaggaagacatagctaaaagattaattgattttggtttccatgcaccaactatgtcttggccagtaccaggaaccatgatgatagaaccaaccgaaagtgaaagtttagtagaaatagatagattttgcgaaacattgattaaaataaaaatcgagatagataaaattggagcaggaaaattcgataaagttgataatccaattaaaaatgctccacacacagatttagaactagcatcaaatgattggaatcataagtacaaaagagaggaag

SEQ ID NO: 220259 - DNA, 882 bp, Unknown
  Bacterial polypeptide expressing nucleotide sequence isolated from the Sargasso Sea
tttataagaaagtaccacttagatagagatgatgctcatcgtaatatatgtttaatcccaagttcggcacatggtacaaatccagcaagcgcacaaatggttggaatgaaagtctttgttattaattgtgataaagagggaaatgtagatttcgatgatttaaagaaaaaagtagagcaacattcagaaaatcttgcagctttaatggtaacttacccatctacccatggagtatttgaggaaaaaataactgatatttgtgagttagttcataaacatggtggacaggtctatatggatggagcaaatttaaatgcccttgttggagttgcaaagcctggaaattttggtccagatgtttgtcatattaatctgcataaaacattttgtattcctcacggtggtggtggacctggaatgggacctatagcttgtaaaaaacatttacaagtttatctgcctaatcatccagtaataaaagattgcggaccaacaagtggaattggagcagtatcagcagctccttggggtagttcaagtattctatcaatctcttggatgtatattaaaatgatgggatcagaaggattaaagcttgctactcaagttgcaattttaaacgcaaattatattgctcatagacttaaagatcactttccaattttgtacaaaggtgcaaatggcaatgttgcacacgagtgcataattgatattagaaatattaaatctgaaacaggggtaactgaagaagatattgcaaaaagaatgatagattttggatttcacgcaccaactatgtcatggcctgtagctggcactatgatgatagagccaactgaaagcgaaggtttatcagaaatagacagattttgtgacacttta

SEQ ID NO: 220260 - DNA, 898 bp, Unknown
  Bacterial polypeptide expressing nucleotide sequence isolated from the Sargasso Sea
ggaatgaaagttgtccctattgaatgtgattcggaagggaatattgatcttaaggacttaaaagaaaaggcatcttttcacaaaagtaatttatcagcaattatgatcacatacccttccactcatggagtctttgaaagtaatgtgagagaagtttgtaaaattgttcatgatcatggagggttagtttacattgatggagctaacttgaatgctcttgttggtattgcaaaacccggagagtttggaggtgatgtttctcatctcaatctgcataaaacattttgcattcctcatggcggaggtggacctggagtcggcccgataggagttgtagaaaaacttaaaaattttatgccttcgcatcatgaaaatattcaaaatgtaggtcctgtatcctcaacagattttggaagtgccagcattctaccaattagttggatgtatattgcaatgatgggatcaaaaggtttaaaacaagctacgatgactgccattttaagcgcgaattacgttgcaaagcgcctaagcgatcactaccaaatactttataaaggtgagaacaacttaattgctcacgaatgcataatagatgcaagaccttttaaagagtcctcaaatattgatgttgatgatatagctaaaagacttatggattatggttttcatgctcctacaatgtcctggccagttgcaggtactcttatgattgagcctactgaaagtgaatcaagagaagaattagatatattctgtgatgctatgatttctattaggaaagaaatagaggaaattgaaaagggcaatgaggattctgaaaataatattctaaaaaattcacctcacactgtagaagagcttagcaatgataattgggaacataattattctagagaaa

SEQ ID NO: 220261 - DNA, 822 bp, Unknown
  Bacterial polypeptide expressing nucleotide sequence isolated from the Sargasso Sea
tctgccgaaaaatttattaagaacttcaaaatatttggaacatccagtttttaattcatatcattcagaaactgaaatgcttagatatctaaaaaggttagaggataaagatatagcattgaatagagctatgatagcacttggctcatgtacgatgaagttaaattctgctgctgaaatgattccaatttcttggaaagagttcgcagagcctcatccgtttgttccaattgaacaaatggaagggtttagagatttatttactgatcttaaaaattggttgcgatctattacaggtttttcaggtgtttctcttcaacctaacgcaggtgctcaaggtgaatatgcaggtttgatggttataagaaagtatcacttagatagaggtgagtctaatcgtaatatatgtttaattccaagttcagcacatggcactaatccagcaagtgcacaaatggttggaatgaaagtggttgttgttaattgtgataaagagggaaatgttgattttgatgatttaaagaaaaaagtagagcaacattctgaaaaccttggagcattaatggtaacttatccatctacccatggagtattcgaggaaaaaataatagatatttgtgagttaattcataaacatggtggtcaggtctacatggatggagcaaatttaaacgccttagtcggagttgcaaagcctggaaatttcggtccagatgtttgccatattaatttacataaaacattttgtatccctcacggtggtggaggacctggaatgggacctattgcttgcaaaaaacatttacaagtttacctgcctaa

SEQ ID NO: 220262 - DNA, 748 bp, Unknown
  Bacterial polypeptide expressing nucleotide sequence isolated from the Sargasso Sea
gtaacttggaaagaattctctttacctcacccctttgtaccccaagatcaaatgaaggggtataaggttttatttaatgatttggtcaatgatttaaaggaaataacaggttttgatgcagtttccctccagccaaattccggtgctcaaggcgaatattcaggattaatgacaattcgtaagtttcatttaaacaataatcaaaaaaatagaaacgtatgtttaataccagagtcagcacacggaacaaatcctgcaagtgctcaaatgtgtggaatgaaagttgtagttattaattgtgatgatgaaggcaatgttgatttaatagatttaaaagacaaggttaataagtattcaaaagatcttgctgctttaatggtaacttacccatcaacacatggagtttttgaggaaaaaattagtgaaatttgcgattacgttcataaagcaggtggtcaagtctatatggatggtgcaaatcttaacgccttagttgggattgcaaaacctggaaaatttggaccagatgtttgtcatattaatttgcataaaactttttgtattcctcatggtggaggaggaccaggcatgggtccaattgcttgtgccaaacatctaaaagattttttaccaaatcattatattactaaaaaaactagatctgaaaaaagcttgggttctgtatctgctgctccatggggtagcgcaagtatattacccatttcctggatgtatattaagatgatgg

SEQ ID NO: 220263 - DNA, 718 bp, Unknown
  Bacterial polypeptide expressing nucleotide sequence isolated from the Sargasso Sea
tgcaaacatttagaagattttttaccaaatcattcagttataaaaagtattggcactgataaaagccttggttcagtatccgctgcaccttggggaagctcaagtatcttggttatatcatggatgtatattaaaatgatgggagctgaaggtttaaaaaaggcatctcaagtagcgattttaaacgcaaactatatttcaaaaagattatcaaaattttataaagttttatacactggaaaaaatggaaacgtcgctcacgagtgcataattgatttaagacctattaaggcaaaatcaggaatttcagaagaagatatagcaaaaagactgatcgactacggttaccacgctccaacaatgtcttggccagttgcaggaacattgatgatagagccaactgaaagcgagggattagacgaaatgaatcgattttgtaacgcactaatatcaatcaaagaggagattgataaagttgataaaggaaattttgataaaaaagacaatcctctaaaaaatgctcctcatacttatttagagttaagctctaatgaatggaaacattcttacactagagaagaagctgcgtttccaaaagaatacttaaaagataataaattctggccaccagtagcaagagttgacaatgtatatggggacagaaatttagtttgtacttgtccaagtctcgacgaatacaaggatgaggctgcataaa

SEQ ID NO: 220264 - DNA, 780 bp, Unknown
  Bacterial polypeptide expressing nucleotide sequence isolated from the Sargasso Sea
cagtttctttacaaccaaattctggtgctcagggtgaatatgccggcttaatgacaataaggaaatttcatgaaagtaatggacaaggcggtcgagatgtatgtttaattccaaactcagcacacggaacaaatccagcaagtgctcaaatgagcggaatgaaagtggttgttgtaaactgtgatgaggatggtaatgtggacctaggtgatttaaaaaataaagcagaaaaatattccaaaaatttagccgctttaatggtcacttacccttcaactcatggagttttcgaagaaaaaattatcgaaatctgcgatgttattcataattatggcggtcaggtatatatggatggagcaaatttgaatgctctagtcggcattgcaaaaccaggaaaattcggaccagatgtctgtcatattaatttgcacaaaacattttgcataccacatggtggtggaggaccaggaatggggccaattgcgtgcgcaaaacatttagctaattttcttccaactcatgagataattaaagacgcaggaccaaaaaacggaatgggggctgtttctgctgcaccatggggaagctcaagtattttacctatatcttggatgtatataaagatgatgggggcggagggtttgaaaaaagcttcacaaatttcaattttaaacgcaaattatatttcgaagaaattatctaaagactataaagttttatatactggtaaaaatggaaatgtagcccatgaatgcataatagatattagacccaattaaa

SEQ ID NO: 220265 - DNA, 163 bp, Unknown
  Bacterial polypeptide expressing nucleotide sequence isolated from the Sargasso Sea
gaaaggtaccagcccgaaatttcccagggtcgcctcgaggcgctcctgaacttccagcagatggtcgccgacctcaccggcctcgcgatctcgaacgcgtcgctgctggacgaagccaccgccgccgccgaagcgatgacgctgctgcagcgcaccggcaagc

SEQ ID NO: 220266 - DNA, 954 bp, Unknown
  Bacterial polypeptide expressing nucleotide sequence isolated from the Sargasso Sea
tcttcgataccttaataatttagatctgggccaacaaacaaaagagatacataaacgctccttaaacaaaaatataaatcttagaagaatagatgaagaacatataggtatctcattagatgagaccacttctatgaaggatttagaagatgtcatagaaatattcacaaatcaaaaaatagatttaaatttaaattttgaatcttcaatcccagagaatctaaaaagaacttcttccttcttagatcatgaggtttttaaaaagtataggacagaaacagaacttgtaagatacatcagaaaattaagcgacaaagacatagcactcgatcgagctatgattcctcttgggtcttgtactatgaaactaaatgctacttctgaaatgattccagtaagctggccagagttttcaaaaattcatccattcgctcctaaagatcaactccatgggtatacagagttaatagaggatatggaaaagatgcttgttgaccttactggatattctaaaatttctttgcaacctaatgcgggatcacaaggagagtatgccggtcttttagctatagatgcatttcataaaaaaaataatgaatctcatagaaatatatgcttgatacctaagtctgcacatggtaccaaccctgcatcagctcaaatggtaggccttgaagtcataccggttgagtgcgatgaagaaggaaatattgatattgatgatttaaaacaaaaagcagagattcatgaaaaaaatctttcgtctcttatgataacttatccttcaacacatggcgtttttgaaacaaatgttagtgaggtttgtgatgtcattcattcaaaaggtgcctttgtctatattgatggagcaaactttaatgcaatggttggaatttgttatccggggtcctttggtggagatgtttctcacctgaatcttcataaaaccttttg

SEQ ID NO: 220267 - DNA, 360 bp, Unknown
  Bacterial polypeptide expressing nucleotide sequence isolated from the Sargasso Sea
aatgataaactccttcctaaaatcacatcttggaaatataaatcaagatgatattaatttcatgttagataaaattggtgttgaaagtttagaggaattattgaatcaaactatccctaatgatatctttttagatcataaattaaacttacctcaaggtattaatgaaaatgaatatcttaaaaacttagaaaaaatttctgaaaaaaatattttgtttcaaaattatattggactaggttacaataaatctattactccaagtgtaataaaaagaaatattttagaaaaccctggatggtatactgcatataccccatatcaagctgaaattgctcaaggtaggcttgaagccttatt

SEQ ID NO: 220268 - DNA, 814 bp, Unknown
  Bacterial polypeptide expressing nucleotide sequence isolated from the Sargasso Sea
atgattgacgataattcaaaagaatttattaaaagacatattggcccttctgatgaggatcagtccaaaatgttacaatacgttggatataaatcattagaggatctaatgagcaatactgtgccagaaaaaatcttgttaaaagatgatcttaaaattgatcaaccaatgtcagaaaacgatgctttaaaaaaattgaaatctatatctaaaaaaaataaaatctttaaaaattttattgggatggggtactataattctatcacacctaatgtaattcttagaaatattttagaaaatccaggatggtacacatcctatacaccttatcagcctgaagtggcgcaaggtcgtcttgaaatgttattaaatttccaacaatcaataatcgacttaacaggtatggatatagctaatgcttctttattagatgaagctacagcaacagcagaagctgttggtttaagtcagagattagacaagacaaattcaaaaaaaatatttatttcaagcaattgcaacccacagacaattgatcttataaagacaagaacaaatccttttggtttagaattgatcattggtgaagaagcaactgaattagcaaaaattaatgaagatattatttgtggagttttatcttatccaggaactttaggtgagattaatgatcctagtgaaagcattagccagatacacaaaaaaaatggaaaagctattttggtttgtgatttattagctttagctagattaaaaactccagctgaacttggagctgatatcgctgttggtagcgctcaaaggtttggtatcc

SEQ ID NO: 220269 - DNA, 382 bp, Unknown
  Bacterial polypeptide expressing nucleotide sequence isolated from the Sargasso Sea
cgattatggttttcatgcaccaacaatgtcatggccagtagcaggtacaatgatgattgaaccaactgaaagtgaaagtttgtctgaactagatagattttgtgatactttaattagcattaaatctgaaatagatatgatcaagtcaggaaaatttgataaagttgataatccaattaaaaatgcacctcatacagatattgaattagcttcagatgaatggaatcataaatattcaagagagcaagccgcatatccagcaaaattcttaaaagaaaataaattttggcctccagtagctagagtggataatgtatacggagataaaaatttattttgttcttgtccatcaatggatgaatttaaaaatactgccgcttaa

SEQ ID NO: 220270 - DNA, 775 bp, Unknown
  Bacterial polypeptide expressing nucleotide sequence isolated from the Sargasso Sea
atgagaacggaaatgtttttaaacagacatttaggtccaaatgaaggagaaattaaagtaatgttgaaaaaaattggtgttgactctttatgtcagttaatagaggaaactattccacaatctattcgcctaaataaaacgttagacctcccagagggtattagtgaagatgcctttacaaaacatgtaaattcccttggaaacgaaaatcaactatttaatacatacattggtctagggtataatcaaacaataactccagcggtaattcaaagaaacatattagaaaatccaagctggtatacagcatatactccataccaagcagaaattgctcaaggcaggttagaagcattattcaattttcaaactgttatctgtgacctgacaggaatggaattatccaatgcttccctactagacgaaagcactgcagcagcagaagctatgacaatgctttttggatctagaactaaagaacaaaaaaaacacaatgcctttcagttttttgtggatgaaaatatttttccccaaacattttcattgcttaagactcgagctaaccctcttggaatagatcttgtaattggagatcctaaccaatttgaatataattttaatttttttggggcaatctttcaatatccaggaagaaaaggtaatgtccctcatctgaaatcctggattgaaaaggcaataaataaaggagtatgtacggtagttgcggctgatattatgagtttggtgcttttagaaagcccaggaaaattcggtg

SEQ ID NO: 220271 - DNA, 888 bp, Unknown
  Bacterial polypeptide expressing nucleotide sequence isolated from the Sargasso Sea
agagattgttttactgatttaaaaaattggttgagatctataacagttttttctggtgtctctctacaacctaatgcaggcgctcaaggagaatatgcaggtctaatggttataagaaagtaccacttagatagagatgaagttcatcgtaatatatgtttaatcccaagttcagcacatggtacaaatccagcaagcgcacaaatggttggaatgaaagtggttgttgttaattgtgataaagagggaaatgtagatttcgatgatttaaagaaaaaagttgagcaacattcagaaaatctcgcagctttaatggtaacttacccatctacccatggagtatttgaggaaaaaataactgatatttgtgagttagttcataaacatggtggacaggtctatatggatggagcaaatttaaatgcccttgttggagttgcaaagcccggaaattttggtccagatgtttgtcatattaatctgcataaaacattttgtattcctcacggtggtggtggacctggaatgggacctatagcttgtaaaaaacatttacaagtttatctgcctaaccatccagtaataaaagattgcggaccagcaagtggaattggagcggtatcagcagctccttggggtagttcaagtattctatcaatctcttggatgtatattaaaatgatgggatcagaaggattaaagcttgctactcaagttgcaattttaaacgcaaattatattgctcacagactaaaagatcactttcctattttgtacaaaggtgcaaatggcaatgttgcacacgagtgcataattgatattagaaatattaaatctgaaacaggggtaactgaagaagatattgctaaaagaatgatagattttgga

SEQ ID NO: 220272 - DNA, 205 bp, Unknown
  Bacterial polypeptide expressing nucleotide sequence isolated from the Sargasso Sea
cgctgcatggggcagcgccagtattctcccaattagctggatgtacatacggatgatgggacgaaatgggctcaagaaagcgagcgaatctgcaatccttaatgccaactatattgctgaaagacttaaaccacattacccagtcctttacacgggtgtaaatggccgagtagcacatgagtgcataatcgacctccgaccaatc

SEQ ID NO: 220273 - DNA, 904 bp, Unknown
  Bacterial polypeptide expressing nucleotide sequence isolated from the Sargasso Sea
agaatatgcaggccttttagctatagatgcatttcataaaaagaatggaaatgaaaatagaaatatttgcctaattcctaaatcagctcatgggacaaatcctgcttcagctcaaatggtgggtctaaaagttgttccaatcgagtgtgatctggagggaaatatagacatagaagatttaaaagagaaggcttcaaagcactcagagaacctttcgtctttaatgataacttatccctctacgcatggtgtctttgaaacgtccgtaacagaagtttgtgagatcatacattctcacgggggttttgtttatattgatggagctaactttaacgctatggttggactttgttttccaggtgcttttggaggagatgtatcgcacttaaatctccacaaaacattttgtattccccatggagggggcggccctggcattgggccaataggagtagtagaagcattgaaagactttatgccatctactcacaaagaaacaaaagctgtgggaccagtatcaggaacggattggggaagtgccagcatacttccaataagctggatgtacattaaaatgatgggaacaaatggcctaattcaagcaactcaaaatgccattcttaacactaactacattgcatctaaacttaaggatcattacgacatcttgtacaagggagaaaacggacttgtagcccatgaatgcataattgacattagaccattaaaagaatcttcaggagtagaagtagaagatgttgcaaaaagactaattgattacggttttcatgcacctactatgtcttggcctgtagctgggacattgatgatagagcctactgaatctgagtctttgaaggagcttgatagattctgtgaagcaatgatatctattagaaaagaa

SEQ ID NO: 220274 - DNA, 910 bp, Unknown
  Bacterial polypeptide expressing nucleotide sequence isolated from the Sargasso Sea
ttaaaaacacctgcagaacttggagctgacatagcagtaggtagcgctcaaaggtttggagttccaatgggttatggtggacctcacgccgctttctttgctacaaaagaaaatttgaaaagatcaatgccaggaagaattataggcgtgtctgtagataaatttggaaaaaaagcttatagactttcacttcaaactagggaacaacacatcagaagagataaggcaacgagcaatatctgcactgctcaagctttattagctatagtatctgctgcatatgctatttatcacggcccaaatggaatcttaaatattgctaacagaacttctaaactggcaaaactatttgctaacaatttaaaggaaggaggttttgatctccattcagataatttttttgatacagtaacgatcaaaaccaatgagaaaaccgaagaaatttataaaaaggcaattacagaaaaagttaatttaagaaaagtaaataataaaactttatctgtagcttttgatgaagcaaaaagattcgaccacgtaaacttacttttaaaaatttttggaattaacaaagttttaaaagatatagaagatgtaaagctggacaatcttccaaaaaacctactaagaacatcaaaatatttatctcacccagtttttaacaagtatcattctgaaactgaaatgatgagatacttaaaaagattggaagacagtgatatagcgctaaatagatcaatgattcctctcggatcgtgtacgatgaaattaaattctacggctgaaatgatcccaatatcatggaaagaattttctcttcctcacccgtatgttcctgtagaacaaatgaaaggatatacatcattgtttaatgacttagaaaaagatctaaaagaaatcaccggatcga

SEQ ID NO: 220275 - DNA, 739 bp, Unknown
  Bacterial polypeptide expressing nucleotide sequence isolated from the Sargasso Sea
cgtcttgagcgcaaggacatcgggcttgatacgtcgatgattccactcggctcgtgcactatgaagttgaacgccgctgtggaaatggaggccgtgacatggccggagttttcgacactgcatccctatgttccggtgtcccaggcagcgggctatcagacgatcattcgcgaacttgagactgcgctatgtcagatcaccgggtttgcggcggtttcgctccagccgaattcaggtgcgcagggcgagtacgccggactcttggccattcgtgcctaccatcaggccaacggagagaccgctcgggacgtggtcttgattccctcgtcggcgcacgggacaaaccctgcgagtgccgtcatggccggcatgaaggtcattgtcgtggcgtgtgatgacgatggcaatgtcgatgtgctggacctacaaaagcacgcggatgcccactcggaatcgttggccgcgctgatggtgacgtatccctcaacgcatggcgtgttcgaagaatcgattcaggatatctgtgccatcgtccatgcacacggtggtcaggtgtatatggacggggcgaacatgaacgcccaggtgggcattaccagtccggcgaggattggcgcggatgtctgccatctcaatctccataaaacttttgcgattccacatggtggaggagggcctggtatggggcccattgcagtggctgcccatctttcgccgcaccttccaggtcgtccgcacg

SEQ ID NO: 220276 - DNA, 883 bp, Unknown
  Bacterial polypeptide expressing nucleotide sequence isolated from the Sargasso Sea
gcaatttccaaaaaaaatcaaatttactctaactttataggaatgggttattacggaacatacacaccttatgtaattttaagaaatattttagaaaatccaggttggtacactgcttatacaccttatcagcccgaagtagctcaaggtagattagaaatgctacttaattttcaacaaatgattgttgatttcacaggtatggatattgcaaatgcatctttgttagacgaaggaacagcagctgcagaggctatgggtttaagtcatagattaaataaaaaagatagtaatatagtttttgtctcagaaaattgtcatcctcaaacaatagacgtaattcaaacaagagcagaaccaatgggtttaaaagtactagttggcgatgaagataaagtattggatcaattaaaagaagatttggtttgcggaatattacaatatccaggaactttgggagatattaaagatcctagtgaagcaataagtaaaatccataaaaaaaatggtaaggcggtcgtagtttctgatttattagctttagcactactaaaaactcctagagaactaggtgcagatattgctgtaggtagttctcaaagatttggaattccaatgggttatggtggaccgcatgcagcattctttgcgactaaagatgaatttaaaagatcgatgccaggaagaattattggagtatcagttgatcgacatggaaataaagcttatcgattgtcacttcaaactagagagcaacatattagaagggataaagctacaagtaatatttgtactgcacaagcattgctagcaattgtttcagcagcatatgctatatatcatggtccagaaggcattcgtactattgctgagcgagtttctc

SEQ ID NO: 220277 - DNA, 886 bp, Unknown
  Bacterial polypeptide expressing nucleotide sequence isolated from the Sargasso Sea
tgaattgcctgactcaataactgaacatgagtttcttaaagaaataaagtcattatcctctatgaataagaaattcaaaacctacataggattgggttattatgatacctttacaccatctgtaattcaaagaaatattttagaaaatcctggatggtatactgcatatactccatatcaagcagaaattgctcaaggtagacttgaagcattattgaattttcaaacaatggtttgcgatctgacaaagatggaaattgcaaatgcttccctacttgatgaaagcacatctgcagctgaagcaatgactcttctttttaataatagaactgctgaacaaaaaaaggataaaatagtcagcttttttatagatgataatattttaccacaaacaaaatcagttcttgagacaagagcagaacctattggaattaaattagaatttggtgatatatctaaaatacaaactaagaaatactatggagctatagttcagtttccaggaaagcatggtgatttaaaaaactataaccctattttagagagacttcaaaaaaatgatattaaggttgttatcgctgctgatttaatgagtctagttattgtagaacccccaaaagaaaatcttgtagatattgttgttggaactactcaaagattcggaataccattaggatatggaggaccacatgctgctttttttgcaactaaggagaaatacaaaagaagtttgccagggagaattattggattaactaaagatgtgaatggagatagagcattaagaatggcattacaaacaagagagcaacatatcaaaagagatagagctacatccaacatctgtactgctcaagttcttcttgcagtaatggcaggtatgtat

SEQ ID NO: 220278 - DNA, 899 bp, Unknown
  Bacterial polypeptide expressing nucleotide sequence isolated from the Sargasso Sea
tcatggagtcttgaaaagtaatgtgagagaagtttgtaaaattgttcatgatcatggagggttagtttacattgatggagctaacttgaatgctcttgttggtattgcaaaacccggtgagtttggtggtgatgtttctcatctcaacctccataaaacattctgtattcctcatggcggaggtggacctggagtcggcccaataggagttgtagaaaaacttaaagattttatgccttcacatcatgaaaatattcaaaatgtaggccctgtatcctcaacagattttggaagtgccagcattctaccaattagttggatgtatattgcaatgatgggatcaaagggtttaaaacaagccacgatgactgccattttaagcgcgaattatgttgcaaagcgcctaagcgatcactaccaaatactttataaaggtgagaacaacctaattgctcatgaatgcataatagatgcaagacctttcaaagagtcctcaaatattgatgttgatgatatagctaaaaggcttatggattacggttttcatgctcctactatgtcctggccagttgcaggtactcttatgattgagcctactgaaagtgaatcgagagaagaactagatatattctgtgatgctatgatttctattaggaaagaaatagaggaaattgaaaaggggaatgaggattctgaaaataatattctaaaaaattcacctcacactgttgaagagcttagtagtgataattgggaacataattattctagagaaaaagctgcatatccactggattacttaaaagcaagaaagtattggccgcctgtaaagaggatagataacgtttatggtgataaaaacctattttgtacctgcccagatatggacgagttataga

SEQ ID NO: 220279 - DNA, 613 bp, Unknown
  Bacterial polypeptide expressing nucleotide sequence isolated from the Sargasso Sea
aatgattgacgataattcaaaagaatttattaaaagacatattggtccttctgaggaagatcagtccaaaatgttgcagcacgttgggtacaaatcattagaggatttaatgatcaatactgtgccagaaaaaatcttattaaaaggtgatcttaaaatcgatcaaccaatgtcagaaaacgatgctttaaaaaaattaaaatctatatctaaaaaaaataaaatctttaaaaattttattggaatgggatactataattctattacacctaatgtaattctaagaaatattttagaaaatccaggatggtatacatcttatacaccttaccaacctgaagtggcgcaaggtcgtcttgaaatgcttttaaattttcaacaatcaataattgacttaacgggcatggatatagctaatgcttctttgttagatgaagcaacagcaacagcagaagcagtaggtttaagccagagattagataagactaattcaaaaaaaatatttatttcaagcaattgtaatcctcagacgattgatcttataaagaccagaacaaatccttttggtttagaattgatcattggtgatgaaaaaaaagaacttacaaaaatt

SEQ ID NO: 220280 - DNA, 808 bp, Unknown
  Bacterial polypeptide expressing nucleotide sequence isolated from the Sargasso Sea
aatgaaacttaatgccgcttctgagatgattcctcttttctggagtgagtggaatagtattcacccatttgttcctatagatcaggctcaagggtatcatcaagtaataaataagctagaaaattatttaagtgaaataactggattttcagctacatcacttcaaccaaattctggagctcaaggagaatatagtggtttaatggtaataaaatcatacttaaacaaaatgggagaagaacacagaaatatatgtttaattccttcttctgcgcatggaacgaatcctgcctcagcaattatggctggattaaaagttgttgtaataggaactgatgaaagaggtaatattgatattgatgatttaaaattaaaaattgaagagcacaaagataatttggctgctcttatgattacttatccttcaactcatggagtatttgaatcagaaattcagcttattaatgaacttattcatcaaaacggtggacaagtatatatggatggagcaaacatgaatgctcaagttggactgacaagtccaaaattaattggagctgatgtttgccacttaaatctgcacaagacattctcaattcctcatgggggaggaggccctggcgtgggaccaatctgcgttgctgaacatcttaaagattttcttccatcaaatccaataatctcctcaggaggaaaatatcatattgatgcaatttcctcagctccatgggggtcagctttagtttgtttaatctcctacgggtacattagaatgcttggtaaaagtaggaataaagaactcaactga

SEQ ID NO: 220281 - DNA, 528 bp, Unknown
  Bacterial polypeptide expressing nucleotide sequence isolated from the Sargasso Sea
atataaaagaaaaacttaaaaaatattttcctcttctttattcaggtaaaaatggaatggttgcccatgaatgcattattgatattaggccaataaaagaagaattaaatatttctgaagaagatattgcaaaaagattaattgattatggttttcatgctccaacaatgtcctttcccgttcctggtactttaatgattgagccaactgaaagtgaatctaaagaagaaatagatagatttgtaacagctatgatatcaattcatgaggaaatagaaaaagtccgtaatggaaaatatgatattattgataatcctattaaaaacgctcctcatactattgaagaagtttcgagtgataactggacccattcttatacaagaggtgatggtgcatttcctcattcatatttatataataataaatattggccaccagttgcaagaattgataatgtttatggtgatagaaatttattttgcgtttgtcctccgattgaagaatacgaagaagtctcaaacgcttaaa

SEQ ID NO: 220282 - DNA, 894 bp, Unknown
  Bacterial polypeptide expressing nucleotide sequence isolated from the Sargasso Sea
aatgattgacgataattcaaaagaatttattaaaagacacattggtccatcagatgaggatcaatcaaaaatgttgaagtatgtaggatataattcactaaatgatttaataattaacactgttcctgaaaagattttattaaaaaatgatctaaaaatagaagaaccattatccgaaaatgatgctttaaaaaaattaaaatcgatttctaaaaaaaataaaatttttaaaaactttattggcatgggatactacaattccattacgcctaacgtagttttaagaaatattttggaaaatccaggatggtatacttcttacaccccttatcaaccagaggtagctcaaggccgtcttgaaatgcttttaaattttcaacaatcaattattgatcttactggtatggatattgctaatgcttcattgcttgatgaagccactgcaacagcagaagcagttggtttgtctcaaaggttagataaaacaaattcaaaaaaaatattcatttcaagcaattgcaatccacaaacaatagatcttattaaaactagaacaggaccttttggtttagaattaataattggagatgaaaaaaaagacctaataaagattaatgaagacattatctgcggagttttgtcttacccagggactctaggtgaaattgtggatcccagtgaaagcataagtcaaatacataaaaagaagggaaaagctattttagtttgtgatctactcgcattggctaaattgaaaacgcctgctgaacttggagcagatattgcagtaggtagtgctcaaagatttggtattccaatgggatatggaggtcctcatgcagcgttttttgcaactaaagaagaatttaaaagatcaatgcctgggaagaatta

SEQ ID NO: 220283 - DNA, 905 bp, Unknown
  Bacterial polypeptide expressing nucleotide sequence isolated from the Sargasso Sea
agccgatccactttcacttactttattaaaagagccaggtgctatgggggctgatatagccattggtagcacacaaagatttggcgttcctgtgggttatggtgggcctcatgcagcttatatggcaacaaaggatgcttacaaaagatctatgcctgggcggctggttggggtttctgttgatactcaaaataaagctgcctacaggctgtccctacaaacacgggaacagcatattagacgtgaaaaagcgacttctaatgtttgtactgcgcaagcacttttagcagttatggcctctttctatgccgtatttcatggtccagaaggcctgaaagccatagcacaaaggatccatagaaaaacagtaagactagcgaaaggcttagagtccgccggatttaaagttgagccagacgcattttttgacacgattactgtcgaagttggtctaatgcagaagacagttatggatgccgctgtgcgtgaaggcattaatcttcgtgctgttggcaaaacaaaaatcggcatcaatttggatgagcgctcacgacgaaaagttacagaagcagtttggcgcgcatttggaataactcgcagtgacgatgatctctcccacgattaccgggtgcctgatagcctacatcgtaaatcgaaatatcttgaacatgacgtatttcatatgaatcgagctgaaaccgaaatgatgcgctatatgcgcagattagcagatcgagatttagcgttagatcgagcaatgatcccgcttggctcatgtactatgaagttaaactctgctgctgaaatgatgcccgtgagctggcgtgaattttcacttcttcatccttttgcaccaaaagatcaagctctagggtatgaggaaatgatttcagatctttcatcaa

SEQ ID NO: 220284 - DNA, 844 bp, Unknown
  Bacterial polypeptide expressing nucleotide sequence isolated from the Sargasso Sea
gatagggacctcgctctcgatcgttcgatgattcctcttggaagttgcacgatgaagctcaatgcaacaactgagatgatcccagtcagttggccggagtttgctgatattcatcccttcgcaccgaaagagcaacaggcaggcttcacgcaactgacagagcaacttaagaactggttgtgtgaggcaactgggtatggcggtatcagtctccagcccaatgcgggaagtcagggtgagtatgcggggcttcttgccattcgttcctggcagcgatcacgaggacaggggcatcgcgacgtgtgtctgatcccggcttccgctcatggtaccaatcctgccagtgcgcagatggctggcatgcgtgttgttgtcactggttgcgatgcccagggaaatattgacttggacgaattcaagtcaaagtgtgatgagtacagcaatgacttagctgctgtgatgatcacctatccaagtacccatggagttttcgagtcacacgttaaagaactctgtgacattgtgcatcatcatggtggacgcgtgtatgtggatggagccaacatgaatgctcttgttggaacggcagcgccaggtgattttggtggtgatgtcagccatttgaatcttcataaaacattttgtattcctcatggtggaggtgggcctggagtcggtccagtgtgtgttgtcgatgatcttgttgattttttaccgggccatgcgaccggtggagttgcaacaagtggtggggtcggtgctgtatcagcaaccccacttgggaatgcgctggtgcttccaattagctggatgtatatccggatgatgggggcggaaagcttgc

SEQ ID NO: 220285 - DNA, 799 bp, Unknown
  Bacterial polypeptide expressing nucleotide sequence isolated from the Sargasso Sea
tatggaggacctcacgcagcattttttgcaactaaagatgaatataaaagatctatgccaggtagaattattggtgtttcagttgatagacatggaaataaggcatacagattgtcacttcagaccagagagcaacacattagaagagacaaagctacaagtaatatttgtacagcccaagctttattagcaattgtgtcagcagcatatgctatttatcatggtccagatggaattaaaaatatttctgaaagagtatctcaattagcaaaaaattttggagataaaataaaacaatctggatatgaactatattcggattatttttttgatactgtaactattattactaaagataagactgatcagatttttaaaaatgctttagatcaaaaagtaaatattagaaaagtaaattcagaaatgttgtcagtctcttttgatgagaaaaaaaatgtttatagagtaaatcaactgttaaaaatttttaatgcagcagaatcaattaaaaaagaagaccctacagtaagtctacccaatctcccaaaaaatttactaagaacttcaaaatatttagaacatccagtttttaattcataccattcagaaactgaaatgcttagatacttaaaaaaattagaggataaagacattgctcttaatagaacgatgattgcattaggctcatgcaccatgaaattaaatgctactgcagaaatgatacctatttcatggagagaattagctgagcctcatccgttcgtacctgtagagcagatggaaggatatagagaattat

SEQ ID NO: 220286 - DNA, 851 bp, Unknown
  Bacterial polypeptide expressing nucleotide sequence isolated from the Sargasso Sea
gttccggacaaaataaggttcaaagataaactaagtattggtgaaccaaattctgagtatgaagctttaagaaaattaaaagttatatcaaaaaaaaatcaagttttttcaaattttataggaatgggttattacggaacttatacaccaaacgttatagtaagaaatatacttgaaaatccaggttggtatactgcttatacaccttatcaaccagaagtagctcaaggtcgactagagatgttattaaattttcaacagttaatagttgattttacaggaatggatattgcaaatgcatcattattagacgaaggtacagctgcggctgaggcaataggtttaagttataggttgtctaaaaatgattctaaaaaagtttttgtctcttccgattgccatcctcaaactatagccgtgattaaaactagagcagaacctctaggattggaagtaattttaggaaatgacagcgagatcgataatattaaagatttagtatgtggtattttacaatatcctggaactctaggagatgtaaaagatccaagtgagagtattagcaaaattcataaaaaaaatggtaaagcgattttagcatgtgatttgttagctttatcattattaaaaacaccagctgaattaggagcagatattgcaatcggtagctcacaaagatttggaattccaatgggttatggaggtcctcatgctgctttcttcgcgaccaaagatgaatttaaaagatcaatgccaggaagaataataggtgtgtcagtcgacagacatggaaataaagcatacaggttatccctccaaacgcgcgaacaacatattagaagggataaagc

SEQ ID NO: 220287 - DNA, 871 bp, Unknown
  Bacterial polypeptide expressing nucleotide sequence isolated from the Sargasso Sea
cagcgcctttcccgagatcttgaggcgtggttgtcggctctgactgggttcgctgcagtgtcactgcagcccaacgccggatcccagggggaatacaccggccttctggtgatacgggcctggcacctgtcccgaggtgatgcgaaccgcgatgtgtgcctgatcccgacaagtgcccacggcaccaatccggccagtgcggtgatggctggcctgcgggtggttccagtggcttgcgatgccgacggcaacatcgatcagcaggatctcgctgcccgtgttgccgaacatgccgaccggctcgcagcactcatggtcacctatccatccacccatggagtttttgaaccgggcatccgcaggatctgtgatttggtccatgccaacggagggcaggtgtacctcgatggcgccaatctcaacgctcaggtgggtctctgtcgtcctggcgcctatggagccgatgtttgtcacctcaacctgcacaagacgttctgcatcccccacggtggtggtggacccggagttggtccgatcggtgtggccgatcacctcgccccgttcctgcctggccaccccttggcgacatcaccctcaaattctgcgattggccccgtgtccgcagccgccctggggagtgccggaattcttccaatcagttggatgtatctccggatgatgggggcagcggctctccgccaggccagtgctgtggcgcttctgtccgccaattacctggcccatcgcctcgatgagcactacccggtgttgtttcgtggtcccaccggtcgtgttgcccacgaatgcatcctcgacctgcgtcctctcaaacgcagcgcatccattgatgtggatgacattgccaagcgtc

SEQ ID NO: 220288 - DNA, 712 bp, Unknown
  Bacterial polypeptide expressing nucleotide sequence isolated from the Sargasso Sea
ggtgctcaaggtgagtatgcaggattaatggtaattagaaaatatcatttagatagaggtgataaaaatagaaatatatgtctaataccaagctcagcacatggaactaatccagcaagtgcccagatggttggaatgaaagttgttgtggttaattgtgataaagaaggaaacgttgattttgaggatttaaaaaaaaaagtagaatctcattctgaaaatcttggagcattgatggtaacttatccatcaactcatggagtttttgaagaaaaaatatcagatatctgtgatttaattcataaacatggaggtcaagtttatatggatggagcaaatttaaatgccctagttggcattgcaaaacctggaaattttggtccagacgtttgtcatataaacttacacaaaacattctgtattccacatggtggtggaggacctggaatgggacctattgcatgtaaaagacatttacaagtttatctgcccaatcatccagttgttaaagactgtggcccttcaacaggaattggtgctgtttcagcagctccgtggggcagttcaagtattttatcaatttcttggatgtatattaaaatgatggggtctgaaggattaaaattggctactcaagttgcaatcttaaacgctaattatattgcaaatagacttaaagatcattttccaattttatacaaaggttctaaag

SEQ ID NO: 220289 - DNA, 901 bp, Unknown
  Bacterial polypeptide expressing nucleotide sequence isolated from the Sargasso Sea
atatgaagaaaccgtgcgcgagatttgtgacattgttcaccaatacggcggtcaggtttacatggacggcgcgaacatgaacgcgcaggtgggcattacgtcacctggcttcattggttcagatgtatcgcaccttaacctacacaaaactttctgtattccacatggtggcggtggcccaggtatgggaccaattggtgttaagtcgcaccttgcgccattcctaccaaaccacacggttgttaacgtagaaacggcaggcaaagactgtggtgcggtatcggcagcgccatggggcagtgcatcaattctgcctattagctacatgtacatcaaaatgatgggtagcgatggccttcgccgtgcaaccgaagtcgctattcttaacgctaactatgtggctaagaagctagaagggcacttcccagtgctttacaaaggcaacaatggccgcgtagcgcacgaatgtattattgaccttcgcccgcttaaagaagcaagcggtgtaaccgagctagatatcgcgaagcgcttaaacgactacggtttccacgcgccaaccatgagcttcccagtagcgggtacgcttatgattgagccaaccgagtcggaagcgaagtacgaactagaccgtttcattaacgccatggttagcattcgccaagaaattgcgaaagtagaaagcggtgagtgggatgccactgacaacccgctacacaatgcaccgcacacattggctgacatctgtgacagtgactggaaccgcagctacgaccgcacgctagcggcgtacccagctccagaagtacacagaaacaagttctggccaacggttaaccgtattgatgacgtttacggcgatcgtaaccctatttgttcttgccctagtattgagagctat

SEQ ID NO: 220290 - DNA, 877 bp, Unknown
  Bacterial polypeptide expressing nucleotide sequence isolated from the Sargasso Sea
aataaaggaggtcaggtttacatggatggtgcaaacctaaacgctctgatggggatcgctcagccaggaaaactgggaccagacgtactgcatatgaatctgcacaaaacattttgtattccccatggaggaggaggccccggaatggggccaataggtatgaagtctcatctttctaaatttgcaccaaatcactgtgttgttcaaattaaagatctgcctgagggaaacacagccgtttctgctgcaccatggggcagtcctggaatcttacctatttcatgggtctatatccagcttatgggaggctgtgggctgaagaaatcttctcaggttgctatacttaatgcgaattaccttgccatgagattaaatgaacatttccccatagtctatacaggaaaaaacggtctggtcgctcatgaatgcataattgacatcagaccgctaaaggcagatacaggaatatctgaagaagacattgccaaaagattgatagactatggttttcatgctccgactatgtcatggcctgttgctggtactttgatgattgaacctacagaaagtgagccaaaatctgaacttgatcgcttttgtgaggctatgatttcaatcagtatagaagcagatcgagttcttaaaggggagtgggataaaacagataacccgctcaaaaactcccctcatcctgcagatgatctcacagattctaaatggaaccactgctattctcaagaaactgccttcttcccaatagcctcaattcgccaaaataaatattggcctccttcagcacgcgtggataatgtgcatggtgatagaaatatcttttgttcttgcccaccgttggaaagttatgaggacgaggagtgag

SEQ ID NO: 220291 - DNA, 734 bp, Unknown
  Bacterial polypeptide expressing nucleotide sequence isolated from the Sargasso Sea
tcgttgattggtcttggttatcattcgacagttataccttttgttgtacagagaaatgttttagaaaatccaaattggtatacagcctatactccttatcaagcagaaatatcccaaggcagattagaagccttatttaattttcagactttaattagtgaattaacaggtttgccgatatcaaatgcttctttacttgatgaagcaactgctgcagctgaggcaataagtttaagtttggctgttagaaaaaataaaaatgctaataaatttttagtagatcaagaaattttgcctcaaacatatgacgtattaaaaactcgttgtgatccactgggaattgtacttgagttctttgataatgataattttgaaattgataataatgtcttcggaatacttattcagttacctggaaaaaatgggcgtatttgggacccaacctcaataattgatcaggtacataaatttgatgcaattgttactatttcaattgatcccttggctcaagttttgattaaaccaatgggagaatttggtgcggatattgttgttggaagtgcgcaaagattcggtgtacctattgcatttggtggaccacatgcagctttttttgcaactaaagaaatatataaaagacaaataccaggtagaatagttggtcagtcagttgacgtggagggtaatcaagctttgaggcttgcccttcaaacaagagagcaacatattcgaag

SEQ ID NO: 220292 - DNA, 806 bp, Unknown
  Bacterial polypeptide expressing nucleotide sequence isolated from the Sargasso Sea
aaaaaattggttgagatcaattactggtttttcaggagtttcacttcaaccaaatgccggtgctcaaggtgaatatgcaggattgatggtaattagaaaatatcatttagataggggtgatgaaaatagaaatatatgtttaataccaagttcagcacatggaacaaatcctgcaagtgcacaaatggttggaatgaaagtagttgtagttaattgtgataaagaaggtaacgtagattttgatgatttaaagaaaaaaactgagcttcactctgaaaatttaggagctttaatggtcacatacccatctactcatggagtatttgaggaaaagattatggatatatgcgaactgattcataaacatggtgggcaggtttatatggatggagcaaatttgaatgcattagttggtattgctaaaccaggaaactttggtcctgatgtttgtcatataaatttacataaaacattttgtataccccacgggggaggtggaccaggcatgggccccattgcatgcaaaaaacatcttcaagtttatctgcctaatcatccagttgtaaaggattgtggtcccgcaacaggaattggagctgtgtccgctgctccatgggggagctcaagtattttgtcaatttcctggatgtacattaaaatgatgggatctgagggattaaaacttgcatcaaaagttgcaatactaaatgcaaattatattgctgaaagacttaaagatcattatccaatcttgtataaaggttttaatggtaatgttgcacatgaatgcataattgatattagat

SEQ ID NO: 220293 - DNA, 694 bp, Unknown
  Bacterial polypeptide expressing nucleotide sequence isolated from the Sargasso Sea
aaaatatccgatatttgtaaacttattcatgatcatggaggacaagtttatatggatggtgcaaatttaaacgcgcttgtaggaatagcaaaacctggaaattttggcccagatgtttgccacataaacttacataaaactttttgtattccacatggtggtggaggaccaggaatgggaccaattgcatgtaagaaacatttagaaatttatttaccaagccatccagttataaaagattgtggaccagctactggaattggacccgtttcggccgctccatggggaagttcaagtattttatcaatttcatggatgtatataaaaatgatgggatcagaaggtttaaaattagctactcaaattgcaatattaaatgcaaactatattgcaaataaattaaaaaatcattttccaatattgtacaaaggaaataaaggcaatgtagcacacgagtgtataatagatattagaaatattaaaaatgaaacaggaattacagaagaagatattgcaaaaagattaattgattttggatttcatgcaccaactatgtcttggcctgttccaggaacgatgatgatagaaccaactgaaagtgaaagtttgtcagaacttgatagattttgcgatacattgataaaaagaaaattagaaattgaaaatattaaatccggcaaaaatttgataaaat

SEQ ID NO: 220294 - DNA, 728 bp, Unknown
  Bacterial polypeptide expressing nucleotide sequence isolated from the Sargasso Sea
aattgcatgtaaaagacatttacaagtttatttgcctaatcatccagttgttaaagactgtggacctgccacgggaataggggcagtttcagcagcaccttggggaagttcaagtattttatcaatttcttggatgtatatcaaaatgatgggttctgaaggtttaaaattagctactcaaattgcaatacttaatgcaaattatatagctcatagacttaaagatcattacccaattctttataaaggttcaaacggaaatgtagctcatgaatgtataattgatattcgatctattaaaactgaaacagggattactgaagaagatatagctaaaagattaatcgattatggttttcatgcaccaacaatgtcatggccagtagcaggtacaatgatgattgaaccaactgaaagtgaaagcttgcccgaactagatagattttgtgatactttgattagcattaaatctgaaatagatatgatcaagtcaggaaaatttgataaagttgacaatccaattaaaaatgcacctcatactgatattgaattagcttcagatgaatggaatcataaatattcaagagagcaagccgcataccctgcaaaattcttaaaagcaaataaattttggcctccagttgcaagagttgataatgtatatggagataaaaatattttttgtacttgtccaagtatggatgagtttaaagaagatgcagcataat

SEQ ID NO: 220295 - DNA, 429 bp, Unknown
  Bacterial polypeptide expressing nucleotide sequence isolated from the Sargasso Sea
aagaaaaaacaggaattacagaagaggacattgctaaaagattagtagactacggataccatgctccaacaatgtcttggccagtttcaggaactattatgatagaaccaacagagagtgaaaatttagaagaaattgacagattttgtaaagctttattaagtattaaagatgaaatagataaaattgagactgggcaatttgaaaaaaaagataatccaataattaatgcacctcatacatatttagaattatcttcagatgaatggagacattcatattcaagagccgaagcagcttttcctaaaacttatttaaaagagtataaatattgggcccctgtggctagagtggacaatgtttatggagatagaaatcttgtatgttcttgtccatctatggatgagtataaagatgcagctgcttaaa

SEQ ID NO: 220296 - DNA, 852 bp, Unknown
  Bacterial polypeptide expressing nucleotide sequence isolated from the Sargasso Sea
ttcaacaaatgattgttgattttactggaatggatatagcaaacgcgtctttacttgatgagggaacagcagccgctgaagctatgggtttaagtcatagacttaataaaagtgatagtaatttagtttttgtttcagagaactgccacccacaaacaattgacgttattcaaactagagcagagccaatgggccttaaagtacttgttggaaacgaggataaagttctagagcaattaaaagaagatattgtttgcggagttttacaatatccaggaactttaggtgatattaaagaccctagtgaggccataagcaaaattcataaaaaaaatggaaaagcaattttagtttgtgatcttcttgcgctttctatgctaaaaacacctagagagcttggagcagatattgcagtcggtagttcccaaagatttggtattccaatgggttatggaggacctcatgcagccttttttgcaacaaaagatgaatacaaacgatctatgccaggtagaattgttggggtttcagtggacaggcatggaaacaaggcttatagattgtcattacaaactagagagcaacatattagaagagacaaagctacaagtaatatttgtactgctcaagcgttgctagcgattgtttcagcagcatatgccatttatcacggccctgatggaattaaaagtatttctgaaagagtatctcaactagcaaaaaattttgcagataaaataaaacaatctggatatgaattatactcagattatttttttgatactgtaactattataaccaaagaaaagacagatcagattttcaaaaatgctttagaccaaaaaagttaat

SEQ ID NO: 220297 - DNA, 910 bp, Unknown
  Bacterial polypeptide expressing nucleotide sequence isolated from the Sargasso Sea
tttaagaaaattaaaaaaaatttctaaaaaaaataaaattttttctaactttattggaatgggctattatggaacttatactccaaatgttgttgttagaaatatattggagaatcctggttggtatacttcctacaccccatatcaagctgaagttgcccaaggaaggttagaaatgcttcttaattttcaacaaatgataattgattttaccggtatggatattgctaatgcttctttattggacgaaggtacggccgctgcagaagcaatggggctttgtcatagattagataaaaaaaatagtaatttagtttttgtatcaaacaactgtcatcctcaaacaatagatgtaattaaaactagagctgaaccgattggtctaagagttttagtttccgatgataaagaactagataaaatttcagaagatttagtatgtggaattattcagtatcccggaactcttggagatattatagatcctagtgaaagtattagcaaaattcatagaaaaaatggaaaagttattttagcatgcgatcttttggcgttagctcaacttaaaacaccagcagagcttggagccgacatagcaatcggaagctctcaaagatttggaattccaatgggatatggagggccacacgctgctttttttgctacaaaagatgagtataaaagatcaatgccaggacgtataattggagtttcgttagatagacttggaaataaagcttataggctatctcttcaaacaagagaacagcatataagaagagataaagctacaagcaatatttgtaccgcacaggctttacttgctattgtttctgcagcatatgcaatttatcatggaccaataggaattaaaaaaatttcagagagagtttcacaattaacaaaaaac

SEQ ID NO: 220298 - DNA, 700 bp, Unknown
  Bacterial polypeptide expressing nucleotide sequence isolated from the Sargasso Sea
tatgctaaaaacgcctagagaacttggagctgatattgcagtgggaagctcccaaaggttcggtattccaatgggttatggaggacctcatgcagccttttttgcaacaaaagatgaatacaaacgatctatgccaggtaggattgttggggtttcagtggataggcatggaaacaaagcttatagattgtcattacaaactagagagcaacacattagaagagacaaagctacaagtaatatttgtactgctcaagccttactagcgattgtttcagctgcatatgctatttatcacggtccagatggaatcaaaagtatatctgaaagagtatctcaattagcaaaaaattttgctgataaaataaaacaatctggatatgaattatactcagattatttttttgacacagtaactattattactaaagaaaagactgatcagattttcaaaaatgctctagatcaaaaagtaaatattagaaaagtaaattcagaaatgttgtcagtttctttcgatgaaagaaaaaatgtttatagagtaaatcaactattaaaaatttttaatgcagcggaatcaattaaaaaagaggatcctactgtaagtttaccaaatttacctaagaatttattaaggacttcaaaatttttagaacatcctgtttttaattcatatcactcagagaccgagatgcttaga

SEQ ID NO: 220299 - DNA, 879 bp, Unknown
  Bacterial polypeptide expressing nucleotide sequence isolated from the Sargasso Sea
agttaaatccagtctcttgggctaatttatcttccatgcatcctttttctccactagatcaaactaaaggctattcaaaaattatatctgacttagaaaaatggataagtgagattgttggtttaaaatcagtttcttttcaaccaaatgcaggctctcaaggagagtttgcaggtttattggcaataaattcttattttgaatcaaaaggtgaactgttaagaaaaaaatgtttaattccaaaaagtgctcatggaacaaatcctgctagtgcagttatggcaggttttgaagtgttaactgttgaatgtgatgacgaaggaaatattgattttcaagatttgtcgatgaaggtcaagaaatttgatgaccaaataggggcacttatgttgacttacccctctactcatggagtttttgaattacaaatcagaaagatatgtgatttaattcactctgtgggaggatttgtctatttagatggagcaaatttgaacgctcaagttggattatgcaagccaggtaactatggtgttgatgtttgccatttgaatttacataaaacattttgcattccacatggaggtggtggtccaggagtaggtccagttgctgcatcggaaactttaagcccatttcttcctactcattctttaatggataataatttatctattagttccaattacgtatcttctgccaagcatgggagtgcaagtattcttccaataagttggatgtacataaaaatggctggtttttgtggtttaaggaaagcaactgcgcatgcaattttatctgcaaactatattgcgcattctttaaagcataaattcaagattctttataaaggaaaaaataattttgtagcgccatgaa

SEQ ID NO: 220300 - DNA, 899 bp, Unknown
  Bacterial polypeptide expressing nucleotide sequence isolated from the Sargasso Sea
ggtcgtctggaggctctgctcactttcaaccctgatcagtgagctcacgggtttgccgatcgccaacgcgtcgctgcttgatgaagccaccgctgccgccgaggcgatgagcctcagcttcggggtgtgccgtcgccctgaagcgacgcggttcctggtggacgccaatgtgctgcctcagacctgggcggtgctgcagacccgcgccgaaccgctcggcatcagccttgagcggatcgatccggccacagcgccgatcgatgcctcggtgtttggtgttctgctgcagttgcccggcgccgatggatgcctctgggatccaaccgccgtgatcgaagcggcccatgccgccggtgccttggtcaccgtggcgatcgaccccctggcgcagacccttatggcgcccgtgggatccctcggggccgacattgccgtgggcagcgcccaacgcctgggggtgccgatgggatttggtggtcctcacgccgccttcttctccaccgttgaggcctacaagcgccagatcccgggccgtcttgtggggcagtccaaggatgcggaaggccgttcggccctgcgcttggcgctgcaaacccgtgagcagcacatccgtcgcgacaaggccaccagcaacatctgcacggcacaggtgctgctggccgtgatggcctcgttttatgcggtgcaccatggccctgatggactgcaggccatcgcccagcgcatcgctggcctgcgcagccagttggagcagggcctgcgggtccttggttatccgctggagctggctgaccgcttcgacaccgtcaccgtgcactgttcgtcggcaccggttgtgcaccgcgctgccgccgttgctggtttcaatctacgggtgctgcctgatggtgcagcaccgg

SEQ ID NO: 220301 - DNA, 635 bp, Unknown
  Bacterial polypeptide expressing nucleotide sequence isolated from the Sargasso Sea
agccccttggggtagctcaagtattttatcgatctcttggatgtatattaaaatgatgggatctgaaggattaaagcttgcttctcaagttgcaatacttaacgcaaattatattgcgcatagactaaaagatcattttccaattttatataaaggatcacaaggaaatgttgctcatgaatgtattattgatattagaaatattaaatcagaaacaggtgtaactgaggaagatatagcaaaaagattaattgattttggatttcatgcaccaacaatgtcatggcctgtagctggcactatgatgattgagccaacagagagtgaaagtttatcagaattagatagattttgtgacactttgattaaaattaagcaagagatagataagattaaatcaggtaaatttgataaaattgataatccaattaaaaatgcacctcatacagactctgagcttgcttcagataattgggaacacaaatacacaagacaagaagcagcttacccagctaaatttttaagagctaataaattttggccaccagtagcaagagtggacaatgtttacggtgataagaatattttttgtacttgtccgagtatggatgaatttaaagaagatgcagcataac

SEQ ID NO: 220302 - DNA, 978 bp, Unknown
  Bacterial polypeptide expressing nucleotide sequence isolated from the Sargasso Sea
tgcagtatatcacggcccgaaaaatataatttccattgccaatagggtccagaacctatgctctgaccttgcaacctctttagatcatgccggcataaaaattttgcataaccaattttttgacacattaaggatattccctaataataaatgggaaatagcagcagaaaatgaaaaaatgaactttagaaaattcaaagatggtagcgttggaatttccatagatgaaagtactactgaaaaagatgttttaaaaatatgtaagatttttaatgcggattatttacctgcaaaacatatttataatttgccagatagcctaaaaagggtagcggcatttttagaccatgaagtttttaataaatatcattctgagactgagatgcttcgctacattcataagctggaaataaaagacctttcattaaataatagcatgatccctcttgggtcatgtacaatgaaattaaatgctactacagaaatgattcctgtaacatggcaaaacttttgtgacattcatccgttctctcctttagaacaaacggaaggatattctagattaatagatgaacttagcagctggttatcaacattaactggttttgattcatgctcaatgcagcccaattctggtgcacagggtgaatatgcaggattgcttgttattagagcatatcatataaaaaatggaaatggccaccgtaatatatgtcttgtgcctgaatcagcccatggtacgaatccagctagtgcaattatggcgggaatgaaagttgagatagtctcttgtgattttaatggtaatatcaatttaaatgaattaaaggaaaagtctaaaaaacattcaaataatctttctgctattatgttaacctacccttcaacgcatggggtttttgaaaacgatattgaagaggcatgtgaaattgttcatagaaatggaggtcaggtatatattgatggtgcaaaccctaa

SEQ ID NO: 220303 - DNA, 830 bp, Unknown
  Bacterial polypeptide expressing nucleotide sequence isolated from the Sargasso Sea
aatgtcagaattcattcaaaggcacataggtcctacactcgtagaacaatctaaaatgttagatgatttaggtgtatctactattgatgaacttgtaagacaaatcgtaccagattcaatattacttcgtggtgatgatgatttaccagaaccatgtagtgaacaacaggcacttgaagaattaaaggaaatagcagaacataatattgttaaaagaagtttgattggtcaaggatattatggaacaaccacaccaccagtaattcaaagaaatgtatttgaaaatcctgcatggtatacatcttatacaccatatcaggcagagatatcacaaggtagattagaagcattatttaattaccaaacattaattacagaactgactggattaccagttgcaaatgcatctttattagatgaaggaactgctgctgcggaggcaatgttacttgctcatagtacatctaagaaaaatatatttttagttgatagtgaagtatttccacaaacacttgcggtcttacaaacaagagcagaaccactcggaattaaaataaaattacttgattggcatactgtagcatcattagaggactttgaagatgcttttggattgttggttcaattaccaaataatataggaagacttcgtgatccaagttcacttcttcgtattgcagatgtgcataattgtatgaagattgcgattgtagatccaatgtgtcaggtattgatgaaacctgttggtgaaataggatttgatgtcgcagttggtagtatgcagaggtttggtattcctatgggttttggaggacctcatgcagcatttt

SEQ ID NO: 220304 - DNA, 904 bp, Unknown
  Bacterial polypeptide expressing nucleotide sequence isolated from the Sargasso Sea
aaatattagtagattttttgttgattctaacatacttcctcaaactctttcagtgttaaaaacaagagcttatccattatgtatagaaattgtagttgatgaaatagataatataagttctgaggattgttttggatgtattattcagtatcctggtaaaaaaggaaacttaccaaatattaataaatttttatcaagtattaaaaatgaagattttaaaacaatcttggctgttgatattatgtcattagtgattatagagcctccaaatcctgaaaaaattgatgttgtagttggtactactcaaagatttggaattcctctcggttatggtggacctcatgcagctttttttgcgacaaaagagaaatacaagagaaatattcctggtagaattattggagtaacgaaagacgtggatagtgactatgctcttaggatggctttacagactagagaacaacatattaaaagagatagggcaacatcaaatatttgtacagcccaagtccttcttgctgttatggctggtatgtatgctgtttaccacggacccaatggacttaaaaggatatcatccacaatacatctgaaagctgtctatttatttaataaaatttcttctttaggcatagaaattaaatattcagaattctttgatacaattacaattatctcagattcaaaatctattgagaaaattgcactttcaaaagaagttaatctttgttttcatgcagaaaatgaaatatcaatatcggtaaatgagaaaacagatttaaaagacttagacttaattatatcaatctttgaggaaaatagcggtcaaaactcggctgaaatggattttcctgataattatgcaataaaaaataaaagagaatctgaaattttgactcatcct

SEQ ID NO: 220305 - DNA, 808 bp, Unknown
  Bacterial polypeptide expressing nucleotide sequence isolated from the Sargasso Sea
gtctgtgcccgaactcctcgacgaggtcatccccaccaatatccgccgcagcgaccagatgaagatcggcgcgccactgtccgaggccgaggtgctagacgaaatgcgcgccattgccggacggaaccggatcgtcacctcgatgatcggcatgggatattatgattgccacaccccgccggtgatcctgcgcaacgtgctggaaaacccggcctggtataccgcctatacgccctaccagccggaaatctcacaaggccggctcgaagccatcctgaatttccagacgatggtgcttgaactgaccggcatggacatcgcgaatggctctctgctcgacgaggcgacagccgccgccgaaggtatgacgatggcgttccgcgcgaaccgggccaaggccagcatcttccgggtcgatcccgacacgcatccgcagaccatcgccgtactacgcacgcgggccgagccgatcggcatcgagctggagatccgcccgacatccgagccctatggcgagggatgttttggcgccttgatcagctatccagccagcggcggcgaggtgcgcgacatcaagcccgagatcgaggcggtgcaggcctccggcggccttgctatcgtggcaagcgacctgctggcgctgacgatgatcgaatcccctggcgcgctgggggcagacatggttctcggctcggcgcagagatttggcgtgcccttcggctatggcgggccgcatgccgccttctttgcctgccgcacggcgcatcagcgctcgatcccgggacggcttgttggcgtcagccaggac

SEQ ID NO: 220306 - DNA, 835 bp, Unknown
  Bacterial polypeptide expressing nucleotide sequence isolated from the Sargasso Sea
tgggggaccccatgcagcttttatatcatgtaaagatgaatttaaaagacttttacctggaagaataatagggatttcaattgataaaaattctgatgttgcatatagaatggctcttcaaactagagagcagcatatcagaagggaaaaggctaccagtaatatttgtactgctcagtctttattggcaatagtcgctgcgtcatatgcaatctatcatggccctgaaggattaaagaaaatatcacttaaaatacatagaactgcaaaattaatagcaagacaactacaaaataataactacaaaattttgtataataacttttttgatacaatctgcataaaaacaacaaaagccaagcaatctttaatcaaaaagagagctttaaaaaagaaaattaattttagatattattcaaaagaaataattactatatctattgatgaaaaaacaacaatcgatgatatccatgaaatacttttttgttttggtttaaaaatagaatctatcacttcattagattctgaattaaataataacataatagctttgccaaaaagcattctaagaaaaactaaatatttagatcatgaagtttttaactcttataggtctgagacagattttttaagatatattaagaggttggaagataaggatattgcattaaacaagtccatgataccactaggttcttgcacgatgaaacttaatgctacttcagaaatgattcctataagctggcctgcaataaattccattcatccttttgcgccaaaatctcaaacatcagggtataaatttttaattgatgacctaaagaagatgctttgt

SEQ ID NO: 220307 - DNA, 733 bp, Unknown
  Bacterial polypeptide expressing nucleotide sequence isolated from the Sargasso Sea
ccctattgcagttgctaaacatttagctccttttcttccaggaaatcctataattaaaactggtggtcaaaatggaattaaagcaataaatagtgctccttggggaagtgcattaattttaattatttcatatggatatattaaacttcttgggggaaaaggtttaaaaaaatcaactgaaattgcaattttaaatgcaaattatctaaaatcaaaattaaaaaatcattataatgttctttatactgggtcatctggaaaagttgctcatgaaatgattattgattgtagatcctttaaaaaagggtctacaattgaagttgaagacattgcaaaaagattgattgattatggatttcatgctccaacagtaagtttcccagttccgggaacattgctaattgaaccaacagaaagtgaatcattaaatgaactaaatcgatttgcggaagcaatgattaatataaaaaaagaaattgaggaaataaatcaaggtctatatgaaataaatgataatgttttaaaaaatgctcctcacactgcatttgaattaattgaaggtaaatggaatcacaaatactctaggattaaagctgcatatccaaataaaaatcaaataaataataaattctggccatcggtcggtagaattgacaatgcatatggtgatagaaatctagtatgtaattgtttgcctattgaagaatatgaacaaaaaataattgaaaattaa

SEQ ID NO: 220308 - DNA, 949 bp, Unknown
  Bacterial polypeptide expressing nucleotide sequence isolated from the Sargasso Sea
tcatgtacaatgaagctaaatgctgctgctgagatgatcccaatatcatggaaagaatttgcagaacctcatccgtttgttccaattgaacaaatggaagggtttagagatttatttactgatctaaaaaattggctacgatccataaccggtttttcaggtgtttctcttcaacctaatgcaggtgctcaaggtgaatatgcaggtttgatggttatccgaaagtatcatttagatagaggtgaggcaaatcgtaatatatgtttaattccaagttcagcacatggcactaatccagcaagcgcacaaatggctggaatgaaagttgttgttgttaattgtgataaagaaggaaatgttgattttgatgacttaaagaaaaaagcagagcaacattccgaaaatcttggagcattaatggtaacttacccatccactcatggagtatttgaagaaaaaatatcagatatttgcgagttagttcataaatatggtggtcaggtctacatggatggtgcaaatttaaatgcattggtaggtattgctaaacccggaaattttggtccagacgtttgtcatattaatttacataaaacattttgtatacctcatggtggtggaggacctggaatgggacccattgcctgtaaaagacatttgcaagtttacctacctaaccatccagtaataaaagattgtggaccaacctcaggaattggggcagtttctgcagctccgtggggaagttcaagcattttatcaatctcttggatgtatattaaaatgatgggatcagcagggctaaagcttgctactcaagttgcaatattaaatgcaaattatatagcccatagactaaaagatcactttccaattttatacaaagggtcaaatggcaatgttgcacatgaatgtattatcgatattagaaatataaatcagagaccag

SEQ ID NO: 220309 - DNA, 655 bp, Unknown
  Bacterial polypeptide expressing nucleotide sequence isolated from the Sargasso Sea
aatgttacataactcacaaaaagactttttaaaaagacacattggaccttcacaagaagatcaaaataaaatgctgaaggagcttaattacaattcattagatgatttcattaaaagcacagttccagaaaagatacaattgaaagatgggttgaatataggcgaatctaattctgagtatgaagcattaagaaaattgaaagcaatttcaaaaaaaaatcaaatttattcaaattttatcggtatgggttactatggaacatacactccatatgtaattttaagaaatattttagaaaacccaggttggtatacttcttatactccttatcagcctgaagtagcacaaggaagattggaaatgctacttaattttcaacaaatgattgtagatttcactggaatggatattgcaaatgcatctttattagatgaaggaacagcagctgcagaagcaatgggattaagtgatagattaaataaaaaagatagtaatttagtatttgtttcagaaaattgtcacccacaaacaatagatgtaatccaaacaagagcagaaccaatgggattaaaagtacttgtcggaaatgaagatgaagtattagatcaattaaaggaagatttagtttgtggtatatttgcatatcctggaaca

SEQ ID NO: 220310 - DNA, 751 bp, Unknown
  Bacterial polypeptide expressing nucleotide sequence isolated from the Sargasso Sea
cctgcaggagcttgaacaaaatgaccgctttatacaccgccacatcggtccctcggaaaatgagatttctcaaatgcttgatgcgctaggaatgtcttcactagataatttgatagacagggtcgtaccggattcaatacgtatgcccggggaactagaacttcctgacagtcgtactgaaacagacgttctgaatcagcttcgtggaatgggcgaacgcaaccagttggcaaaatcaatgatcggaatgggctatcacaacacatttcttcctggtgtaattcagcgaaatatactggaaaaccctggttggtatacggcctatacaccttatcagccggaggtttctcagggtcgtctggaagctttgctgaattttcagcaaatgataattgacctcacaggtatggagatcgccaacgcttctcttttggatgaggcaactgcggcagcggaagctatgactttctgcaagcgtgtttcaaaaaacaaaagcatgcgcttttttgctgctgatgactgccatccgcaaaccatagatgtactcaaaacaaggtctgaaccaatgggcattgaactagtagtaggtaatgtgtcagaacaacagcaaaccccagacgaggcattattcggtgctcttattcaaaatccagggacttttggagacatttatgatattgacgatttaattacaaaatggcatgagctgggaacactagtaagtgttgcttcagatccgatgagccttgtt

SEQ ID NO: 220311 - DNA, 504 bp, Unknown
  Bacterial polypeptide expressing nucleotide sequence isolated from the Sargasso Sea
aatgttacataactcacaaaaagattttattagaagacacattggtccgtcagataaggatcagcagaaaatgttaaaagagttaaattttaataatctagatgaacttattaatagtgctgttccagaaaaaatacattttaaaggtgaacttaatattggcgagtctaattcagaatatgaagctttaagaaaactaaaagcgatttcaaaaaaaaatcagatttactctaattttattggtatgggttattatggaacttatacaccttatgtgattttaagaaatatattagaaaatcctggttggtatacttcatacacaccttatcagcctgaagtagcacaaggtaggttagaaatgttactgaacttccaacagatgattgttgattttactggtatggacattgctaatgcatctttacttgatgaaagtacagctgccgctgaagccgtgggtttgagttacagattaaataaaagtgattgcaaactggtatt

SEQ ID NO: 220312 - DNA, 483 bp, Unknown
  Bacterial polypeptide expressing nucleotide sequence isolated from the Sargasso Sea
agggttcaaatggtaatgtagcacacgaatgtattattgatattagatctattaaaagtgacacaggtatttcagaagaggatatagctaaaagattaatagattttggatttcatgcaccaacaatgtcatggccagttgctggaacaatgatgattgaaccaacggaaagtgagagtttatctgaactagatagattttgtaacacattgattagcattaaagaggaaatagatatggttaagtcaggcaagtttgacaaagttgataacccaataaaaaatgcacctcatactgatacagaattagcttcagatgaatggaatcataaatattcaagagagcaagctgcatatccagcaaaattcttaaaagcaaataaattttggcctccagttgcaagagttgataacgtatatggagataaaaatattttttgtacttgtccaagtatggacgagtttaaagaagatgcagcataat

SEQ ID NO: 220313 - DNA, 877 bp, Unknown
  Bacterial polypeptide expressing nucleotide sequence isolated from the Sargasso Sea
tgtaattgattgtgataagcacggtaatattgatattgatgacttgaaagaaaaaagtacgcaatattctaaaaatttggcagccttaatggttacttacccatcaactcatggtgtttacgaggaatcaattaacgaagtttgtgaaatagtccataaaaatggcggtcaagtatatttagatggggcaaacttaaatgctatggttggagtatctaaattaggtgaatttggtgctgatgtatgtcatataaatctacataaaacattttccataccgcatggtggtggtggaccggggatgggaccaatttgtgtagctgagcatcttaaatcatttttgcctacacatcgttatggatcaaattcagaaaaatttacttattctatatcctctgctccattaggaagtgcaaatattttacctatctcatggggttatatattaatgctaggagatcatggattaaggtcatcaactgaaattgcaatattaaatgcaaactatatggcacaaagattatccaagcattatccaatactttataaagggattcgtggtttctgtgcacacgaattcattattgatattaggggcattaaagaagaatctgggataactgaagaagatattgcaaaaagacttattgattatggatttcatgctccaacaatgtcatggcctgttgctggaacaatgatgattgaaccaacagaaagtgaatctaaacaagagctagataaattttgtgatgcgatgatttctataaaaaatgagattaacaatgtgattattaaaaaatttaataaaaatgataacccccttatcaacgcaccacatacagccatggttgtaacaaatgatacttggggataa

SEQ ID NO: 220314 - DNA, 825 bp, Unknown
  Bacterial polypeptide expressing nucleotide sequence isolated from the Sargasso Sea
attgatggttacatatccatctactcatggagtttttgaagaaaaaatatcagatatttgtgaattaattcataaaaacggaggacaagtatatatggatggagctaatttaaatgctttagttggaatagcaaaaccaggaaatttcggtccagatgtttgtcatataaatttacacaaaactttttgcatcccacatggaggaggaggaccaggcatgggaccaattgcatgcaaaaagcatttagaaatttatttgccttcccatccagttattggagattgcggcccagcaactgggattggagctgtttcagcagcaccatggggaagttcaagtattttatcaatttcatggatgtatatcaaaatgatgggatctgaaggtttaaaattggctactcaaattgctattcttaatgcaaattatattgctaatagattaaaagatcattttccaattttgtataaaggtagtaaaggaaatgtagctcacgaatgtataattgatataagaataataaaaaaagaaactggcataactgaagaagatatagcaaaaagacttgtggattttggttttcatgcgccaacaatgtcctggccagttcctggtactatgatgatagaaccaacagaaagtgaaagtttatccgagcttgatagattttgtgatactttaattaaaataaagtctgaaattgataaaattaagtcaggaaagttcgacaaaattgataacccaataaaaaatgcacctcatactgacttggaactagcttcaaacgaatggaaccataagtactcaagagaagaggcagcata

SEQ ID NO: 220315 - DNA, 741 bp, Unknown
  Bacterial polypeptide expressing nucleotide sequence isolated from the Sargasso Sea
ttaagttttttgaatgtagtgaggattcaaaaaataattattctataaaagaaactagatcatccaagtacttaacacatgaggttttcaattcttaccattctgagacaaaaatgatgcggtatttgaaaaaactagaaacgaaagatttaagtttaaacactagcatgatttctcttggatcatgtaccatgaaattaaatgctgcagcagagatgattccggtctcgtggcctgagttcagctcaatccatcctttcgctccaaaatcacaaactctcggctatcaagagctttttgattccttagaaaagtggctcgtaaatataactggtttacactcctgttcattgcagcctaattctggagctcaaggcgaatacgctggcctcatggttgtacgagcttatcatcagaataatggcaataccgaaaggaatatatgtcttattcctgaatctgctcatggaactaatcctgcaagcgcagttatggctggtatgcaggtaattgtcataaaatgcgatgagtctggaaatattgatgtaggcgatcttaaacaaaaggctgaagaaaataaggagtctttatctgcattgatgataacatatccctcaacgcatggtgtttttgaagaaactatttctgatatttgtgatattattcatgaatttggtggtcaagtgtacctcgatggtgcaaatcttaatgcgatggttggtttatcaagagctgggtgac

SEQ ID NO: 220316 - DNA, 1221 bp, Unknown
  Bacterial polypeptide expressing nucleotide sequence isolated from the Sargasso Sea
aaattagaagataaagatatagctcttaatagaactatgattgcacttggctcatgcactatgaaattaaatgctacagcggaaatgatacctatttcttggagagaattagcagagcctcatccatttgtgcctattgagcagatggaaggatatagagatttattcactgatcttaaaaattggctaagatcaattactggtttttctggtgtttcacttcaaccaaatgcaggtgctcaaggggaatatgcaggattaatggtaattagaaagtatcatttagatagaggtgaagaaaataggaatatatgtttaataccaagctcagcacatggaaccaatcctgctagtgcacaaatggttggaatgaaagttgtggttgttgattgcgacaaagaaggaaatgttgattttgaggatttaaagaaaaaagcagaaatgcattctgaaaatcttggagcattaatggtaacttatccatctacacatggtgtatttgaggaaaaaattacagatatatgtgagttaattcataaacatggaggtcaagtttatatggatggtgcaaatttaaacgcgcttgttggtatagcaaggcctggaaattttggtccagatgtatgtcatataaacttacacaaaacattctgtattccacatggtgggggaggacctggaatgggaccaattgcatgcaaaagacatttacaagtttatctgcctaatcatccagttgttaaagattgtggtcctgcaacaggaataggagcagtttcagctgcaccttggggaagctcaagtattttatcaatttcttggatgtatattaaaatgatgggttctgaaggtttaaaattagctactcaagttgcaatattaaatgcaaattatattgctcatagacttaaagatcattatccaattctttataaaggctcaaatggaaatgtagctcatgaatgtataatcgatatacgatctattaaaagtgaaacaggaattactgaagaagatatagctaaaagattaattgattatggttttcatgcaccaacaatgtcatggccagtagcaggtacaatgatgattgaaccaactgaaagtgaaagcttatctgaactagaaagattctgtgatactttgattaacattaaatcagaaatagatatgatcaagtcaggaaaatttgataaagttgataatccaattaaaaaaatg

SEQ ID NO: 220317 - DNA, 1137 bp, Unknown
  Bacterial polypeptide expressing nucleotide sequence isolated from the Sargasso Sea
caaatgattgttgattttacgggaatggatatagcaaatgcatctttattagacgaaggaacggccgcggcagaagccatgggattgagtcaaagattagataaaaatgattcaaaaatagtatttatttcagaaaactgtcacccccaaactattgaagttgttaaaactagagctgagccaatgggattagaggttattattggaaaagaagaaaaggaattagaaaatttaaaagataaaatagtttgtggaattcttcaatatcctggaactctcggtgatataatagatccaagcgaaagtattagtaaaattcataaaagaaatggaaaagccattttagcatgtgatcttttagctttagcaaaacttaaaactcccggagaacttggtgcagatattgcaataggaagttcccaaagatttggaattccaatgggatacggaggtccacatgcagccttttttgcaactaaagatgattacaaaaggtcaatgccaggaagaataattggtgtttccgttgatagacatggaaacaaagcttataggctatcgctccagacaagagagcagcacattagaagagataaggccacaagcaatatatgtactgctcaagcattattagccatagtttctgcaggctatgctatttatcatggaccagaaggtataagaacaatttctgaaagggtttcgcaattagcaaataattttgctgataaaattaaaaaatctggatacgaattatactcaaaatatttttttgatacagtaacaattaaaacaaaagacaaaactgaaaaaattttaaaaaatgctttagaccaaaaagtaaacataagaaaagttaattctgaaatgctagcagtttcatttgatgaaaaaaaaaatgtttatagagccaatcagttacttaaaatttttaattgtacagagtctatcatggaaaacccaactgaaagtcttccaaatttaccaaaaaatttattaagaacttctaaatatttagaacatccagtttttaatagttatcattctgaaactgaaatgttgaggtatttaaaaaaattagaagataaagatattgctttaaatagatctatgattgcacttggctcttgtacgatg

SEQ ID NO: 220318 - DNA, 827 bp, Unknown
  Bacterial polypeptide expressing nucleotide sequence isolated from the Sargasso Sea
tttgtttattaagactcctgatgacttaaatattgaagggtttgccaaaagacatatcgggcttaaaaaggaagatattcaatcaataactaatgagctgggattcaatgatctagttgattttgttaatgccgtggttccaaataatattttaattgacggaactagcgattcagatggactttctgaagaggaagcacttaacaaacttaaatctattgcgaaaaagaataaaatctacaagacattcataggtcagggttattatccaagttttactccaagtattattaaaagaaaagtatttgagaatcctggttggtacacctcctatactccatatcaagctgaaatttcccaaggaagacttgaagcacttataaattttcagacaatggttcaagatttgacagatttagatatttcaaatgcatcattgcttgatgaacctactgcagcagcagaagcaatggcccttgcaaatagaacaacaaaattgaagtcaaaactttttttattagatgcaaattcatttccacaaacacaatcagttgttctctctcgagcaagaccacttaatattgaggtaataattgataaacctgaaaacttcaagaactacgaggcatttggagcattaatacagtacccaggaaatgatggctcaataaatgactatactgaaattgtttctaatctaaataaaaaatcaattattgctattgccgcgacagacttacttgctctaactcttataaaatcaccaggtgaaatgggatttgatattgctattggaaattctcaacggtttggagttccactaggat

SEQ ID NO: 220319 - DNA, 1232 bp, Unknown
  Bacterial polypeptide expressing nucleotide sequence isolated from the Sargasso Sea
tccaggttggtatacatcttatactccctatcagcctgaagtagcacaaggaagattggaaatgcttctaaacttccaacaaatgattgttgatttcacaggcatggatattgcaaacgcatctttgcttgatgaaggaacagcagccgcagaagctatgggattaagtcataggttaaataaaacggatagtaatttagtttttgtttcagaaaattgtcatccacaaacaattgatgtaatccaaacaagagcagagccaatgggattaaaagtacttgttggtaatgaagataaagtattagatcaacttaaagaggatttagtttgtggaattcttcaatatcctggaactttaggagatattaaagatccaagtgaagctattagtaaaatccataaaaaaaatggaaaagcagtattagtttctgatttattagctttagcgctacttaaaacaccaagagaattaggcgctgatattgcagttggaagttctcaaaggtttggaattccaatgggttatggtggacctcatgcagctttctttgcaactaaagacgagtttaaaaggtctatgccaggaagaattattggagtgtcagtagatagacatggaaataaagcttacagattatcgcttcaaacaagagaacaacatattagaagagataaagcgacaagtaacatttgtactgcacaagcattattagcaattgtttcagcagcatatgctatttaccacggtccagatggaataaaaactattgcagaaagagtttctcaattagctaaaaattttgcagataaattaaaacaatctggatatgaaatttattctgatcatttctttgatactgttacaattgtaacaaaggataaaactgatcaaatctataaaaatgctttagatcaaaaagtaaatatcagaagagtaaattctgaaatgttggcagtttcttttgatgaaaagaaaaatgtttatagagtaaatcaattattaaaaatttttaatgcagctgagtcgattaaaaaagaagatccgacagtaagtttacccaatttaccaaaaaatttactgagaacttcaaaatatttagaacatcctgtttttaattcatatcattcagaaactgagatgcttagatatttaaaaaaattagaagataaagatatagctcttaatagaactatgattgcacttggttcatgtactatgaaaataaatgcta

SEQ ID NO: 220320 - DNA, 2257 bp, Unknown
  Bacterial polypeptide expressing nucleotide sequence isolated from the Sargasso Sea
tttggaaaatccaggttggtatacttcttatacaccataccaaccagaagtagcccaaggaagacttgaaatgttactaaattttcaacagatgataattgactttacaggtatggatattgctaacgcatctttgttagatgagggaacggccgcagctgaagcgatgggtttatgtaatagattagacaaaatggataataaaattgtgtttatatcagtagattgtcatccacaaacaatagaagtgattaaaacacgcgcagagcctctaggtcttaaagtaattattggcaatgataatgaattatcaaatttatctgaagatattatttgtggaattctacaatatcctggaacattaggtgatataaaggatcctagtgaaaatatcagtaagattaaaaagaagaacggtaaagcaatacttgtatgtgatctattatctttagctaaactaaaaacaccagctgaattaggagcagatatagcagttggaagctctcaaaggtttggaattcctttaggttacggcggtcctcacgctgcattttttgcaacaaaagatgaatttaaaagatctatgccaggaagaattgtaggtgtttctgttgatcgacatggaaacaaagcatacagacttgctctgcaaactagagaacaacatattagaagagacaaagctacaagcaatatttgtacagctcaagcacttcttgccatagtttctgccgcttatgcaatttatcatggtccaaaaggaataagaacaatttctgaaagagtgtctcaattagccaaaaattttgctgataaattaaaacaatctggttataatttatactccgattatttttttgatactgttacaatcatcacaaaagaaaaaactgatcaaatatataataatgcattagcccaagaggtaaatattagaaaagttaattcagaaatgctttcagtatcattcgatgaaaagaaaaatgtttatcgtgctaaccaattattaaaaatttttaattgcgctgaatctataaaagaaattccaactgaaagtttaccaaatttacctaaaaatcttttaagaacttccagttatttagatcatcaggtattcaatagttatcactccgaaacagaaatgcttagatatttgaaaagattagaagaaaaagatattgcattaaatagatcaatgattgcacttggttcttgtaccatgaaactcaatgcagttgcagaaatgataccaatatcatggagagaattttctgagccacacccttttgttccaattgaacaaatggatggatttagaactctttttacagatttaaaaaactggttaaggtcgataactggtttttcaggagtatctttgcaacccaatgcaggtgcacaaggggaatatgctgggttaatggtaattaggaaatatcacattgagagaggtgaatctaatagaaatgtttgcttaataccaagctctgctcatggaactaaccccgctagtgcacaaatggttggaatgaaagtcgttgttgtaaattgcgataaacaaggaaatgtagattatgacgatttaaagaaaaaagctgaaacctattcagaaaatctaggtgcattgatggttacttatccttcaacacacggtgtatttgaagaaaaaatttcagatatatgtgaattaattcataaacatggtggtcaagtttatatggatggggcaaacttaaatgctcttgtaggaattgcaaagccagggaattttgggccagatgtttgtcatataaatttacataaaaccttttgtatacctcatggtggaggaggaccaggtatggggcccattgcatgtaaaaaacatttagaaatatatttaccgtcgcatcctgttatcaaagattgtggaccagcaactggtataggtgctatatctgcagcaccatggggaagttcaagtattttgtcgatatcttggatgtatattaagatgatgggttctgagggtttaaaattggcaactcaaattgcaattttaaatgctaattatgttgctaacaagttaaaagatcattttccgatattatataaaggaaaaaatggaaacgtagctcatgaatgtataatcgatataagatcaataaaatctgaaacaggaattacagaggaggatattgcaaaaaggttaatagattttggatttcatgctccgactatgtcatggcctgtaccaggtacaatgatgatagagcca

SEQ ID NO: 220321 - DNA, 1304 bp, Unknown
  Bacterial polypeptide expressing nucleotide sequence isolated from the Sargasso Sea
tgtttcagtggataggcatggcaacaaagcttacagattagctttacaaacaagagagcaacatataagaagagacaaagctacaagcaacatttgtaccgctcaagctttgcttgccatagtttcagctgcctacgctgtatatcatggtccaaaaggaattaaaaaaatagcagatactgttgcacaacttgctaaaaattttgcagataaattgaaacagtctggctatgaactttactcagattatttttttgataccgttactgtaaaaacactagataaaacagataaaatttataaaaatgcactagatcaacaaataaacataagaaaagttaattctgagatgttagcagtttcatttgatgaaagaaaaaatctatatagagccaatcaggtactaaaaatttttaactgttcagaaacaattaaggaaactactaaagagacgacaaacaaaagcttatctaatttgccaaaaaatttattaagaaactcaacatatttagatcatccagtttttaatagttaccattctgaaacagcaatgcttagatatttaaaaaaattagaagattctgatatcgcattaaataggtcaatgatagctttaggttcatgcacaatgaaactaaattcagtttccgaaatgatacctgtaacatggaaagaattttcgcatccacatccatattcccccatcgaacagatggatggtttcagagaattatttactgatttaaaaaattggttaagaacaataacaggtttttctggtgtttctttgcaaccaaatgctggtgcccaaggagaatttgctggcttaatggttattagaaagtttcatgaaaaaaatggtcaaaaaaagagaaatgtttgtttaatacctagctctgcgcacggaactaatccggcaagcgctcaaatggccggcatgaaagttgttgttgttaattgcgattcatatggaaatgtagattatgaagatttaaagaaaaaggccgaagagtactcagatactttgtccgcactaatggtaacttacccgtcaactcatggagttttcgaagaaaaaataacggatatttgtgatttagttcataaacatggtggtcaagtttatatggatggagcaaatctaaatgcattggttggtattgcaaaaccaggaaattttggccctgatgtttgtcatatcaatttacacaaaacattctgcatacctcacggtggaggcggtccaggaatgggtcctattgcctgtaaaaaacatttagagacttattgccaagtcatccagt

SEQ ID NO: 220322 - DNA, 1234 bp, Unknown
  Bacterial polypeptide expressing nucleotide sequence isolated from the Sargasso Sea
atgcttgctgtttcttttgacgaaaagaaaaatgtttatagagtaaatcaattattaaaaatttttaacgctgctgagtctattaaaaaagaagatcctacagttagtttacctaatctaccaaaaaatttattaagaacttctaagtatttagaacatcctgtttttaattcatatcattcagagacagaaatgcttagatatcttaagaagttagaagataaagatatagctctcaatagaactatgattgcccttggttcatgtacaatgaaattaaatgctactgcagaaatgatacctatctcatggagagaattagcagagccccacccatttgtgcctattgaacagatggaaggatatagaacaatgttcacagatcttaaaaattggttaagatcaatcactggtttttcaggagtttcgcttcaacctaatgcaggtgcccagggtgaatatgcaggtttgatggtaataagaaaatatcatttagatagaggcgataataatagaaatatatgtttaataccgagttcagcacatgggactaatcctgcaagtgcccaaatggttggaatgaaagttgttgtagtcaattgcgataaagagggtaatgttgattttgaggatttaaagaaaaaagcagaattacattctgagaatcttggagcattaatggtcacctatccatctacacacggagtttttgaggaaaaaatatcagacatttgtgatttaattcacaaacatggaggtcaagtttatatggatggagcaaatttaaatgctctagtaggaattgcaaaacctggaaattttggtcctgatgtttgtcatattaacttacacaaaactttttgcataccacatggcggaggaggacctggaatgggacctattgcatgcaaaagacatttacaagtttatttgcctaatcatcctgttgtcaaagattgtggacctgcaactggaattggtgcagtttctgctgctccatggggaagctcaagtattttgtcgatttcatggatgtacattaagatgatggggtctgaaggacttaaactagctaccaaagttgcaattctaaacgccaattatattgctaatagacttaaagatcattttcctattttatataaaggttcaaaaggcaatgttgcacatgaatgtataattgatatcagaacaattaagtctgagaccggaattactgaagaagatatcgcaa

SEQ ID NO: 220323 - DNA, 1237 bp, Unknown
  Bacterial polypeptide expressing nucleotide sequence isolated from the Sargasso Sea
tactacattttcatcactatttgatgaaactacaactttagaagacatcgataatctaattgctttttttaatataactaataaaaaaattgatgctaacgaaattgaaaaaaatcttgatcctatttttaatgatgaaaatattcttagaaaagataaaatattatcccatccaatatttaatatatatcattctgagacagaaatgatgcgatatctaaaaaaattagaaaataaggatatcgcactaaatagatcaatgattccccttggttcatgtactatgaaattaaatgctgcctcagaaatgttaccaataacgctaccaggctttgcaaacgcccatccttttttagaaaaacaacaaagagagggctataatcaaatgatgagagaattaatatctatgctcaaagatataacaggatttgatgcaatatcattacaaccaaatgcaggagcacaaggtgaatttgcaggattacttgcaattaaaaaatttcatgagtctaataatgactatgatagaaatgtatgtctaatacctaatagtgcccatggtactaatccagcaagtgcacagatgtgtggtatggaagtatccattgttaaatgtgatgatttaggaaacgtagacttaaatcatttggacatcaaaattaaagaggctggaaataaattagcagctttgatgattacttatccatctacacatggcgtatttgaagaatcaatatcaaaaatttgcgaagtaattcataataatggcggtcaagtttatatggacggggctaatttaaatgcaatggtaggaattgcaaaacctggaaaatttggtcctgatgtttctcatatgaatctacataaaactttttgtattcctcatggaggaggtggccctggcatgggccctattggagtcaaatcacatctagagaattttctaccaggacatccaatcgttaaaaatgagcttggattaacagaacttgatgcggtttctgccgcgccatggggaagcccatctatattgcctatttcttactcatatatttcgatgatgggagacgagggattaaaattagcgacacaaatagcaattttaaatgccaattatataaaagaaaaattaagtgatttctttcctttgttatattctggtaaaaatggaatggttgctcatgagtgcataattgatattcgtccaatcaaagatgaattaaatatatctgaagaa

SEQ ID NO: 220324 - DNA, 719 bp, Unknown
  Bacterial polypeptide expressing nucleotide sequence isolated from the Sargasso Sea
aactttaagcccatttcttcctactcattctttaatggataataatttatcaaatagttctaattatgtatcttctgccaagcatgggagtgcaagtattctcccaataagttggatgtacataaaaatggctggtcttagtggtttaaggaaagcaactgcgcatgcaattctatctgcaaattatattgcacattctttaaagcataaattcaagattctttataaaggaaaaaataattttgtcgcacatgaatgtattttagattttagagatttaaaatctaaaactggtttgagtgtaaatgatttagctaaacgattaatagattatagttttcatgccccaactataagttggcctgttccagagactattatgatagagcctactgaaagtgaaagtttggctgaattggatagattttgtgaggctatgctactgatcggggaagaaataagtgaaatagaaaataatgttgaattaaataataataatgtaataagcaatgctccccatacgctgaaagagttaattgcggataattggaattatccttattcaaaagaaaaagcttctttcccttataaaactctaacatctattaagttttggtcttcagtttctagaattaataatgcatatggtgatcgcaatttaatttgttcttgcaatgtaaatcaaggagatactttagatgaaaaaaaatgtgcttaaa

SEQ ID NO: 220325 - DNA, 784 bp, Unknown
  Bacterial polypeptide expressing nucleotide sequence isolated from the Sargasso Sea
taacttacacaaaacattctgtattcctcatggtggcggaggaccaggtatgggcccaatcgcatgtgctaaacatttggcagattttttaccaacacatgaaattattaaggaagcaggacctaaaaatggaatgggagctgtctcagctgctccttggggtagctcaagcatacttccgatctcctggatgtatattaagatgatgggtgcggaaggattgaaaaaagcatcacaagtttcaattttaaacgcaaactacatttcaaaaaaattatctaatgattacaaagttttatacactgggaaaaatggaaacgttgcacatgagtgcattatagatattcgaccaattaaagctagctcaggtatttcagaggaagatttagcgaagagacttattgattttggttatcatgctccaacaatgtcgtggccggttgcaggaacaattatgattgaaccaacagaaagtgaaaatttagaagagatagataaattttgtaatgcattaataaaaattaaaaaggaaatcaatcttgttgagcaatcaaaatttgataaaattgacaacccacttaaaaatgctcctcatacttatgttgaattggcttctaatgagtggaaacacagctacacaagagaagaagcggcgtttccaactgaatatgtaaaaaataataagtattgggctccagttggcagagtagataacgtttttggagatagaaatttagtttgttcatgtccttcgatggatgagtacaaggatgaagctgcgtaa

SEQ ID NO: 220326 - DNA, 2317 bp, Unknown
  Bacterial polypeptide expressing nucleotide sequence isolated from the Sargasso Sea
tatgctaacagattttcccaatcgccatattggccccagagatgaccaaattcaaaagatgttatctgaattaggtttttcatcgttagatgagctatcaaataaaataattccaaaaaatattttatttgattcacttattgacctccctgacaaaatgagcgaatcggacactatagaaaggttaagtgaattggcaaatatgaattgtgttttcaaatcattcataggaatggggtattatggaaccctcttacctcctgtcattcagcgcaacattttagaaaatccaggttggtatacacaatacaccccttatcaggcagagatcagccaaggaagattagaggccttattgaattttcaaacgatggtatcagatatcacaggcctgcccatggcaaatgcatcattacttgatgaagcaacagctgcagctgaggcgatgttaatgttttacaatattacaaaagaaccttcaaagctagtattcctcgtatctgaaaattgccatcctcaaactatagatgttttaaaaacacgatctgaaccactaggcataattttgaagatctgcaatataacgactgaggattttaatgatgatatttttggtgctattgttcaatatccagatacaagtggatcaatacatgatctgactgaattatctaaaacagcacatcaatacaatgcatatttatgcgtggcaactgatctacttgcactaactcttttaaagcctcctggtgaaatgggtgctgatgttgctgttggaaacgctcaacgctttggtgtcccaatgggctatggtggacctcatgctgcattttttgcgactagtgaaaagtttaaaaggaaaatcccaggtagaattatagggttatctatagactctcatggtaagcctgctcttcgtatggcattgcaaacaagagagcaacatattcgaagggagaaagcaacttccaacatatgcacagctcaggttttactggcaattatatctggcatgtatgctgtttatcatggcccaagtgggataaaaagcattgccctaagagttaaccatttaactaggttattagcttcttcgctcaatgaggcaggatacaagctagagaataattcattttttgatacaattagatttaaagctgatggatggaaaacaaaatcagatcaaaaacaaatgaattttcgtgattacaatgatggctctgtaggtatctctgttgatgagaccactacagaatctgatattattgcaattcttgatattttttgtgcagaaaaaagtgattctttagaaacttccattccatctacccttgaaagggaatcagccattttacaaaaccctgttttcaatcaatatcaatctgaaactgatatgttacgctatatgcataaattagaaaccaaagacctaagcctgaatacaagtatgattccattgggttcatgtactatgaaactgaatagcacgacagaaatgactgcagttacatggccggaattctcgaacattcatccgtttgcacctgacgatcaagtaaaaggataccaaaaactgatacaggaattgaacgattggctcatcgagataacaggttttgattcaatctcaatgcaacctaattcgggcgcgcaaggagaatatgctggactaatggttattagagcctatcacaaagcacaaagaaatgaacataggaatatttgtttaattcctgattcagcgcatgggactaatccagcgtccgctgtaatggcgggaatgaaagtggtggtagttgattgtgatgaacaagggaatatcgatattgaagatctaaagaaaaagataactgagcatgaaaaaaatctttcctctgttatgataacttatccttcaacacatggtgtctttgaatctacaatcaaagaattatgtgaaatggttcatgatagtggcggtcaggtttacatggatggtgcgaatcttaatgctctagtaggagtttgtaaacctggacaatttggtgctgatgtaatgcatattaatctacataaaactttttgcatacctcatggtggaggaggtccgggtatggggcctatcgtatgtaaagatcatttatctccctttcttccaggccacacacaattaaaagtaaataatgaccaggcaattacagctgtgtctgcatcaccatttggcagtagtagtattttaccaatatcatggtcatatatagccatgatgggtaatgaaggtttaaagaaagcaacccaggtcgccatcttgagcgcgaattatttagctaaaaaactt

SEQ ID NO: 220327 - DNA, 1123 bp, Unknown
  Bacterial polypeptide expressing nucleotide sequence isolated from the Sargasso Sea
gaaaacggatttgaattgctgaatgatagcttttttgacaccttaacaatatctacaaaagagaatacagaagagataattaatagggccttaaaaaaggaactgaatctaagaatagttgatgatgacactcttggagtttctttagatgaaacctctacattagaagatgtaaaaatattactttcaatctttttaggcaaagatataaaaattcaaagatacgaaaatacctctatccctaaagatttaatcagaagaacaaaatttttaatacatcctgttttcgcaaattatcaaacagagaccgaaatgttgaggtatatcagaaagttatgtgataaagatattgcccttgatagagccatgatcccccttggatcctgtactatgaaattaaatgcaacttcagaaatgattcctattagctggcctgaattctctcaaattcatccctttgcccccaaagaccaactgcatggctatgaacagctagtattagatattgaaaatatgttatctgaattaacaggctatcctgcaatctctcttcaaccaaatgctggttctcaaggtgaatatgctggcctattagctatagatgccttccataaaaataataatgataacgaaaggaatatttgtttaattcctaaatctgctcatggaactaatcccgcatcagcacaaatggctggcttgaaagtagtgcctattgaatgcgatgaacaagggaatatagatttagaagacttaaaaaataaggctgataagcattccaataatctatcttctttaatgatcacttatccttcaactcatggcgtttttgaaacgacagttaaggaggtttgtgaaattattcattcatatggagcctttgtatatatagatggagcaaattttaatgccatggttgggctttgttatcctggcttgtttggaggtgacgtatctcatctaaatcttcataaaactttttgtattccgcatgggggtggaggtccgggaattgggcctataggcgtagttgataaattaaaagaatttattcctagtaatcatgatgaaattaataaaattggccctgtagctggaacgaactggggaagtgcaagtattc

SEQ ID NO: 220328 - DNA, 2635 bp, Unknown
  Bacterial polypeptide expressing nucleotide sequence isolated from the Sargasso Sea
gagctaaagctcattgcaaaagaaaataaggttttcaaaagctttataggccaaggtcattacaatacatacactcctaaagtaattcttagaaacgtatttgaaaaccctggctggtatacatcctacacgccttaccaacctgaaatatctcaaggcagattagaagctctcattaattttcaaaccatggttagcgatcttacaggcatggatattgctaatgcatctctgctagatgaagctactgccgctgcagaagcaatgacgcttgctaaaagagcttccaagtctaagtcagatatcttctacgttgatgaaaatagttttgaaaataccataaatgttttaaaaactagagccaagccattgggaatagacgttatagttggacctatagaggaggctaaagacgcagactgttacggtgcatttattcaatacccagggtcagatggctcaatccaagatcattctaaaattgttgactcgattcatggaaaaaaaggaattgccgtattcgcttcggacctattagcattatgcctacttaaacctccaggagagatgggggcagatatagttgtaggttcgtctcaaagatttggtgttcctctgggctgtggtggtccccatgcagcttttatgtcagtaaaagaagatctaaaaaggtctttgcccggaaggatagttggcgcctcggtagatagttctggagatctggcatatagactcgcacttcaaactagagagcagcatataaggagggaaaaagctactagtaacatatgcacagcgcaagctttgcttgcgatcatggcgggattttattctctttatcatgggaaagaaggactcataaaaatcgcccagaaagtgaacaatcttactggcttgcttaaagaaaacttatctgcaaaaggcttaaattctaagaatgagaatttctttgataccttggtgattgaaacaggttcgcatacagaagcaattcatctaagagcccgagataatggcattaatctaaggttaatagattctacttctataggaatctcattagacgaaactacctccatggatgatctagaggttctgataaaaatattcactgattctaatgatcatttgaaagagattaaaagccaatctatacctaaaaacataatcagaaaatctagctttctagatcataatatcttcaatgtatttcataccgagaccgagatgctgagatatataagaagactttatgataaagatattgctctagacagagcaatgattcctctaggctcatgcaccatgaagttaaatgcaacctctgagatgatacctgtgagttggccagagttttctaatattcatccttttgccccaaaagatcaactatcaggatactcaaagttagtatcggaaatggaagaaatgttagccctacttacaggctattctggtatatcgctgcaaccaaatgctgggtctcaaggagaatatgcgggacttcttgcaatagatgcatatcatcaaaataataatgaagctcacagaaacatttgtttaattcctaaatcagctcacggaacaaacccagcatctgctcagatggtaggcttaaaagtagttcccgttgattgtgatgaagaaggaaatatagatataaaggaccttaaggaaaaagcatcaactcactctgataacctttcatcattgatgattacttacccttctacacatggtgtatttgagacttcggttactgaggtatgcgaaataattcattcgcatggcgctttcgtttatatagatggagccaactttaatgccatggttgggttatgttacccaggttcttttggtggtgatgtttctcacttaaatttacataaaacattttgtatacctcatggcggaggaggcccaggtattgggcctataggtgtagttgaaaagcttaaagaatttatgccttctcatcataatgaaaataaagctgttgggcccgtatcaggtactgattggggaagcgcaagtatcctgcctataagttggatgtatatgaaaatgatgggaactcaaggtcttctagaggccactcaaaatgcaatactgaatacaaactatattgccacaaaactcaaaggtcattatgagatactctataaaggaaaggatggtcttgttgctcatgaatgtattattgacataaggcccctaaaagagactgcaggaattgaagttgaagatgtagccaaaagacttatagactatggatttcatgccccaacaatgtcatggccagtggcgggtaccttaatgatcgagcccactgaaagtgagtctttaaaagaattagatagattttgtgaagccatgataaatatcagagacgagataagagaaatagaagatggcaatagctcaaaagaaaacaatgttttaaaaaatgctcctcataccgccaaaactttaatagatagtaattgggatcgagaatacgaacgatctaaagctgcatacccagtggatagtctgtatgagaataaatattggcctcctgtaggcagagtagacaatgtttatggggataggaatttagtttgcagctgtccttctatggaagactacaattaag

SEQ ID NO: 220329 - DNA, 880 bp, Unknown
  Bacterial polypeptide expressing nucleotide sequence isolated from the Sargasso Sea
aaaaaagtttgtgaaacaattcataaatatggaggacaagtatacgttgatggagcaaatttaaatgcgttaataggactagtctctcttactgagattggtgcagacgtaagtcatttaaatcttcataagacattttgtataccacacggtggtggtggaccaggtgtaggtccagtagcagttaaaaaacatttgatcccatttctacctggaaatgtatttgatgagactagcgctatatcatcaacaacttatggaagtgctggtatcttaccaatttcttggtcttatatatctatgatgggagaagaaggtttgagagatgccacaaaaacagcaattctttcagctaattacattgcaaataagttacgtccttattacccaattcttttcactgatgaaaaaagtatggtagctcatgagtgtattttagatattaatgaaattacttctaacacaaacataactaacgaagatatttcaaaaagactaattgattacggcttccatgctcctacaatgtcttggccagttcctaatactttgatggttgaacccactgagtcagaaccaatgtcagagcttgataggttttgcgacgcaatgatttcaattgctaaggaaattgataaagtaaaaaatgggaattggtctaaagaagacaatccaataataaatgcgcctcatactgttgagacattaactcaagaaaattggtcacatccttattcaagacaaattgcattagctaatctatctgaaaaaagtaataaatattttccaccagtaggcagaatagataatgtatttggtgatagaaatttagtttgtagttgtcctccaattgaagcatatgagcatgaacaaacttagt

SEQ ID NO: 220330 - DNA, 1298 bp, Unknown
  Bacterial polypeptide expressing nucleotide sequence isolated from the Sargasso Sea
gtccgaagaagaggcccttaaagagctgaaaagaatatcaaaagaaaatagtgtttatcgatcatttattggtcagggctactatggaacaattacgcctaaagttattttaagaaatgtgtttgaaaatccaggatggtacacctcctataccccctatcaagcagaaatctctcaaggcagattggaggctctcattaatttccaaactatggttggagacctcacgggatttgaaatagctaatgcatcactgcttgatgaggccactgcagcagcagagtcaatgactcttgtacatagagttggtaaatctaaatcccaaaaattttttatagatcagaactgttttcctcaaacagtctcagtagttacagccagagcaaagccgatcggtattgaggtaatggttggggatccacagcaattgaacaatttaaaaaaagaaacatattttggagctttgctccaatatcctggtaatgatggagcgattattgatttctctcgagagattaaaagtgttcatgaacaaaatggcttggtgatcatggcaacagacttgctggctctaaccttgttaaagagcccgggtgagataggagctgatatagcaataggaagctcacaaagatttggggtgccccttggttttggtgggccgcatgcagcatttatggctaccaaagaaaaatataaaagatccttgccaggaagattggttggagcgtcaattgataaagatggaagaacggcgtatagattagccttgcaaaccagagaacaacatataagacgagaaaaagctacaagtaatatttgtactgcccaggcactcttagcaatcattgccggattttatagtgtataccatggcccagaaggtttaaaacaaattgctgaatctgttcactcaaaagcaacttccttggcaaaagaaataaatgagctagggtataagcttaagtcttcaagtttttttgacacagtaactatccaaactaaatctaatactcaggaaatttttttgacggctcaaaatcaactgatgaatattagaatgcttgatgaaaatcatataagtatttcattggatgaaacaacaacagacaaagagatcgaaaacatagcaaaactttttaagagcctgccaaaaaaagaaaagattttttcaagctttgatctcccaatagatatcatcagatcatctgattatctagctcacccagtctttcacctgtatcgaactgaaacagaaatgctgaggtatatcagaaaactctgtgataaagacattg

SEQ ID NO: 220331 - DNA, 1225 bp, Unknown
  Bacterial polypeptide expressing nucleotide sequence isolated from the Sargasso Sea
gagataaccggatttgatgcggtatctttgcagcctaattctggtgctcaaggagagtatgcaggcttaatgacaataagagctttccacaaaagcaacaaacaggctaacagaaacatttgtctaattcctaattctgcccacggaactaatccggctagtgctcagatgtctggtatgaaagtagttgtagtgaattgtgatgaaaaaggaaatattgacttagatgacttacaaaataaatctgaaaaatattctaaagatttagcagctttaatggtgacttatccatcaactcatggagtatttgaagaaaaaataactgaaatttgcgaaatcgtccattctaagggcggtcaagtttatatggatggtgcaaatttaaatgctttagtaggaattgcaaaacctggaaaatttggacctgatgtatgccatattaatttacacaaaaccttttgtatccctcacggaggaggaggcccaggtatgggaccaattgcttgcgcaaaacatcttgaagactttctaccaacacatcaacatctcagagattcaaatccagataaggggatgggttctgtttctgccgcaccatggggaagtgcgagtattttagttatatcttggatgtacataaaaatgatgggatcaaaaggactgaaggctgcatcaaaaatatcaattttgaatgctaattatatttcaaaaaaattatcagagaagtataaaattttatatacaggaaaaaatggtaacgtggcacacgaatgtattattgatataagacctataaaagaaaagtctggcataacagaggaagacattgcaaaaagattaattgattatggttatcacgctcctacaatgtcatggccagtttctgggaccattatgattgaacctacagaaagtgaaaatttagaggaaatagatagattttgtaaggctttaataagtataaaagatgaaatagataaaatcgagtctggtaaatttgaaaaaaaagataaccctgtaataaatgcgccacacacttatttagaattatcatctgatgaatggaaacattcatactcaagaaaagaagcagcttttccaaaagaatatttgaaagaatataaatactgggcaccagttgccagagtggacaatgtttatggtgatagaaatcttgtatgttcatgcccttcaatggaagaatataaagatgctgctgcctaaa

SEQ ID NO: 220332 - DNA, 925 bp, Unknown
  Bacterial polypeptide expressing nucleotide sequence isolated from the Sargasso Sea
aatgttacataactcacaaaaagattttttgagaaggcatatcggtccgtctgaagaagatcaaaaaaaaatgctcagtgaacttaaatgtagttctttagacgaccttatcaaaaatactgttccagaaaaaatacattttaaaggagaacttaacattggcgagtctaattcagaatatgaagcgctaagaaaattaaaattgatatcaaaaaaaaatcagatttactctaattttattggtatgggttattatggaacttacacaccttatgtgattttaagaaatatattagaaaatcctggttggtatacttcatacacaccttatcagcctgaagtagcacaaggtaggttagaaatgttactgaacttccaacagatgatcgttgattttactggtatggacattgctaatgcatctttacttgatgaaagtacagctgctgctgaggctgtgggtttaagttacagattaaataaaagcgattgcaaactagtatttgtatcagaaaactgtcatccacaaacaattgatctgataaaaactagggcagaacctatggggctcaaagttcttgttggtaatgaagaaaaagttttagataatttaaagcaagatgttgtatgtggaattctacaatatcctggaactttaggcgacattaaagatccaagtgagtcaataagtaaaatccataaaaagaatggtaaagcgatacttgcatgcgatttactttcacttgctaagttgaaaacaccaaaagaattaggtgctgatatagccgttggaagttctcaacggtttggaattccaatgggttatggtggacctcacgcagcattttttgctacaaaagatgaatataagagatctttacctggtagattagtaggtgtttcagtggatagacatggaaataaa

SEQ ID NO: 220333 - DNA, 1137 bp, Unknown
  Bacterial polypeptide expressing nucleotide sequence isolated from the Sargasso Sea
ctggattattaagcattagagaatatcataaagcaaaaaattcaacaagagatatttgtctaatacctgaatcagcccatgggacaaatcctgcaagtgcaataatggctggacttaaagtggtgatagttaaatgtgatgaccatggtaacatagattttaaagatttaagcttaaaagttgatgaggctggtgataggttgtcatcattaatggttacttacccctcaactcacggtgtatttgaacataacattgatgaaatatgtaatttaattcataaaaatggcggcttagtctacatggatggagccaacttgaacgctatggttggtgtatgtaaaccaggtaaatttggagctgatgttatgcacattaatcttcataaaactttttgtataccacatggtggaggtggccctggtatgggtccaatttgtgtgaatgaaaaattaaagccacatcttccaaaacatagttttactggtgaagatttttcatactctgtatcgtcatcgccatttggtagtgcaagtattctactaatttcttatatctatatgaaattaatggcagcaaacggtttattgaaagcatcccaagttgcaattttatctgccaactatatggctaagagacttgaaaatgattataacattctatatcgcggtaagagcggattaaatgcgcatgagttcattgttgattgtagatcatttaaatctactgctaatattactaatgaagatattgctaaaagattaattgattatgggtttcatgctcctactatgtcttggcctattccaggaacactaatgattgaaccaactgagagtgaagcaaaatctgagcttgataaattttgtgatgctatgattgcaattaaaaaagaaattattgaaatagaatcaggtaaaatgtctcaagaagacaatgttttagttaatgctccacatactgtacacgatatttgcgatgattggaatcacccttattcaaaagaaagtgcggttttccctacccaatggaataaagaaaataagttttggccatatgtttctagaatagataatgcctttggggatagaaattttttctgtgtatgtccggacatagattcttataaagaataaa

SEQ ID NO: 220334 - DNA, 943 bp, Unknown
  Bacterial polypeptide expressing nucleotide sequence isolated from the Sargasso Sea
gatgccttttacaccaactgattatcttccctatgattttgcgaatcgtagacacataggtccgtcgccatctgaaatggaggaaatgttcaaaacgatcggagttgaatcactggatgagttgataaatcaaacggttccagaaagcattcgtcagaaagatgcactagacttcggaaaaccaatgtccgaaagagagcttttgagacatatgcgcatcacgtcttcaaaaaacaaaattcttacaagtttgattggccaaggttactacggaacagtaacgccgccagtaatacaaagaaatatacttgaaaatcctgcttggtatacggcttacactccctatcaacctgaaataagccagggccgattagaagcacttcttaattttcaaactatgatctcggacttaacgggtttagaaatagcaaacgcttcacttttagatgaagcgactgcctgtgcagaggccatgacaatggctcaacgcatctcgcggtcaaagaacacaatattttttgtggatgaaaattgtcatcctcaaaatatctcagttttgaaaactcgagctaagccactgggtatttctttaataattgatcacgtagataaccttgacgctagtaaagtttttggcgccatttttcagtatcctggaacaaacggtaatgttagagattttactgcggaaatagagaagttgcatgaatttaaagctataagtgtaatttctgcggatccactatcacttactttactgaaagaaccgggagccatgggtgcagatatagcagtaggcacaactcaaaggtttggcgtgccagtaggatatggagggccacatgctgcttacatggcaacaaaagatacttacaaaagatcaatgcctggaagaattgttggcgtttccattgatgccaatggtaataaagcttatcgatta

SEQ ID NO: 220335 - DNA, 1345 bp, Unknown
  Bacterial polypeptide expressing nucleotide sequence isolated from the Sargasso Sea
tcattagatgaattaattgaaaaaactataccaattcatatcatttttaaagacaaacttgtatttagacctggtatgtctgaggagtttaataaaattaatactcaacttttatctttaaaaaataatttcaaaaaaacttatattggaatgggttattataatactattacacctagcgttattttaagaaatattcttgaaaatccaggatggtatactgcttacacaccttatcaaccagaagtaagtcagggcaggttggaaatgttaatgaattttcaacaaatgataattgatttgactggaatggatattgcaaatgcatctttacttgatgaaagtactgcggcagctgaggctatgatgatggcttttaaaattaaaaaaagtgcaaagtttactttttgtgttcaaaatacatgtcatccacaaacactgtctgtcttaaaaacaagagcaaagcctctaggtataaaaattatatttgataatccagataatgatacttttggttgtttaattcaaaatccagacacatacggagaaattgcaaatctcaatgatttaataaatataaataaatcttacgatgcgttatcaatcatagcagctgatataatgagtttggtagttatgaaatcaccaaaagattttggagctgatatagttgttgggagtacacaaaggtttggtgttccaatgggtctaggaggccctcacgcagcatattttgcaacactagatgaatacaaaagaatgatacctggaagactaattggcgtgtcagttgatcgtactaataaaagatcttacagaatggctcttcaaacacgcgagcaacatattagaagggaaaaagctacaagtaacatatgtactgcacaggccttattagcaattatatctgcttcctatgcaatatatcatggcccaactagattaaaaaatattgctaatgacattcactataagtctagatatctaaaaaaatcattagagatattaaattttgaagtaaaatctaaaaattattttgataccttattaataaaagattcaaaatcaaaatactgggtaaacaaatctatagataatggtatcaattttagatttgtaaatgacgatcacttttcaatttccttagatgaaactacatcactacaagatgtagataatttaattaaattttttaatgaaaataatattgaaatatatgctgaagagattgagggtaaaattgaaaattcaattttcaaaagtgatttagaaagaaaagacaacattttaactcatccagtatttaatatctatcattctgaaacagaaatgatgagatatttaa

SEQ ID NO: 220336 - DNA, 1313 bp, Unknown
  Bacterial polypeptide expressing nucleotide sequence isolated from the Sargasso Sea
tattagttggccaatcgttaattcaatacacccatttgttcctaagcaacaatctcaaggatacaaaattattattgataaacttaaagatatgttgtgtaaaataactggttttgatgaggtatcacttcaacctaatgctggcgcacaaggtgagttagctggcttgatgaccataaaagcttttttagaggcaacaggtgaatcatcaagagatatatgtttgattcctagttcagcacatggcactaatccagcaagtgcaattttggctggaatgagagtagagattataaagtgtgatgaaaacggtaatgttgatacaaaagatttagcatataaaatccaagaatttccagatcaaatagcagccttaatggttacttatccttcaacacatggtgtctatgaagaatccatttcaaaaatatgtaatatggtacatgaggcaggtggacaggtttatatggacggtgcaaacttaaatgctttagtgggagtatctaagcctggtaattttggcccagacctttgtcatataaatttacataaaactttctgtattcctcatggtggtggaggaccaggggtaggcccaattgctgtcaaatctcatttgtctaaatttattccaaatcattgtctaaattcagatgcagggcctaaatcaggatttggcccaatttcatctgcaccctggggtagtgcatctatcctaccaatatcattaatttatataatgatgatgggagctgaaggaataaagaaagcaactcaggtagctatattaaatgcaaactatattgctaataaaattaataaacattttgatatcttatacaccggaaggaatggaagagtagctcatgaatgcattatcgatttaagagaaattaagaaaaataaccatataaccgaagaagatattgcaaaacgtctgattgactatgggtttcatgcaccaactatgtcttttcctgttcctggaaccttaatgatagagccaactgaaagtgaatcaaaaaaagagattgatcgtttctgtgatgcattgatttctattagaggtgaaattaacagttattcaatgattgataatccaaaagattcacctttaaaaaatgctccacactcatttaaagatcttattgatagtaattttaattattcttcaaaaacagcttatccaatccaaaatagtctagagccaaatatcagatatattgcaccagttgctagagtaaataatgcttatggtgataaaaactttgtatgcagttgtttgccaatagagatgtatttagaaaagtgat

SEQ ID NO: 220337 - DNA, 1544 bp, Unknown
  Bacterial polypeptide expressing nucleotide sequence isolated from the Sargasso Sea
atatccaggaactttaggtgatattaaagatcctagtgaggccataagtaaaattcataaaaaaaatggaaaagcaattttagtttgcgatctccttgcgctttctatgctaaaaacacctagagagcttggtgctgatattgctgtcggtagctcccaaaggttcggtataccaatgggttatggaggacctcatgcagcattttttgcaacaaaagatgaatacaaaagatctatgccaggtaggattgttggggtttcagttgataggcatggaaaccaggcctatagattgtcattacaaactagagagcaacatattagaagagacaaagctacaagtaacatttgcacggctcaagccttgctagcgattgtttcagcagcatatgccatttatcacggtcctgatggaattaaaagtatatctgaaagagtatctcaactagcaaaaaattttgctgataaaataaaacaatctggatatgaattatactcggattatttttttgatactgtaactattattaccaaagaaaagactgatcaaatatttaaaaatgctttagaccaaaaagttaatataagaaaagtaaattcagaaatgctgtcagtttcttttgatgaaagaaagaatgtttatagagtaaatcaattattaaaaatttttaatgctgcagagtctattaaaaaagaggatcctactgtcagtttaccaaatttaccaaaaaatttattaagaacctcaaaatatttagaacatcctgtttttaattcatatcactcagaaacagagatgcttagatatcttaaaaaattagaggataaggatatagctcttaatcgaacaatgatcgctttaggctcatgtactatgaaattaaatgctactgcggaaatgatacctatttcttggagagaattagcagaacctcatccatttgtacctgtagaacagatggagggatatagagaaatgttcacagatcttaaaaattggttaagatctatcactggtttttctggtgtttcacttcagccaaatgcaggagctcaaggtgagtatgcagggttaatggtaataagaaaatatcacttagatagaggggatgaaaatagaaatatatgtttaataccaagttcagcacatggaactaatcctgctagcgcacagatggttggaatgaaagttgtcgttgttgattgtgataaagagggaaatgttgactttgaagatttaaagaaaaaagctgaattgcattcagagaatcttggtgcattaatggtaacttacccatcaacacatggtgtatttgaagaaaaaattaaagatatatgtgaagtaattcatgaacatggtggtcaagtttatatggatggagcaaacttaaatgcacttgttggtgtagcaaaaccaggaaattttggtccagatgtttgtcatattaatttgcacaaaacattttgtattccacatggtggaggaggacctggaatgggacctattgcatgtaaaagacatttacaagtttattgcctaatca

SEQ ID NO: 220338 - DNA, 1147 bp, Unknown
  Bacterial polypeptide expressing nucleotide sequence isolated from the Sargasso Sea
ttgcttgctataatatcaggaatgtatgcattatttcatggtcaagatgatttaaaaaatattgccaaaagaatacatagtcatacaaaagaactggctgataaaatttcaaaattgggtcacgagattgtaattaatgataattcattttttgatacagtagttataaaattatcaaatatgagtattgatagtttaaaagataaggcattaaagcataattttaatttaatgtaccatgagaatggacttattggcatctctttagatgaaaagactgattataatgaagttgaggtacttgcaaatttattcgatgtaagtaatgattctcaaaatacttataatatttttaaaccaaatagaacaggtgatattttgacccaccctatttttcatagcattaattctgaaacagaaatgcttaggtatatcaataagttagaaaaaagggatctctccttaaactatagtatgataccgttaggatcttgtactatgaagctgaatgcaactgttgaaatgattccaattagttggccagaatttaattctattcacccttttgctccattaaatcaggctaaaggttataaaaaaatcattaatgaactggaagaaatgctctataaagttactgggtttgatgctgtatcttttcaaccaaattctggtgctcaaggagagtatgcagggctattaagtattagagaatatcataaagcaaataattcaaatagggatatatgtttaatacctgaatctgcacacggaacaaatccagcaagtgcaattatggcaggacttaaagttgtaatagtaaaatgtgatgatcatggtaatatagattttaaagatttaagtaaaaaagttgatgaagctggtgatagactatcatcattgatggttacttatccatccacacacggtgtatttgaacataatatcgatgaaatatgtgatttgattcatacaaatggtggattagtctatatggacggagcaaacttaaatgcaatggttggtgtatgtaaaccaggaaagtttggtgcagatgttatgcatattaatcttcataaaactttttgtataccacatggtggaggtgggccaggcatgggtccaatttgtgtaaatgaaaaattaa

SEQ ID NO: 220339 - DNA, 2347 bp, Unknown
  Bacterial polypeptide expressing nucleotide sequence isolated from the Sargasso Sea
cacattggaccttctaaagaggaccaatcaaaaatgttaaaagaattaaattatcaatcattagatgatttaatcgacagtactgttccagaaaaaataaagtttaaaggcgaactaaatattggcgagtcgaattcagaatacgaagcgttaagaaaattaagagcaatttcaaaaaaaaatcaagtttattcaaattttattggcatgggttattatggaacttatacaccgtatgtaattttaagaaatctattagaaaatccaggttggtacacctcatatacaccttatcagccagaggttgctcaaggaagacttgagatgttattgaactttcaacaaatgattgttgactttacaggaatggatattgcaaatgcgtctttattagatgagggtactgcagcagcagaggctatgggtttaagtcacagattaaataaaaaagatagtaatttagttttcgtatctgaggattgtcatcctcaaactatagatgtaattcaaacaagagctgaaccaatgggtttgaaagttttggttggtaaagaagatgaagttttagaccaattaaaagaagatttagtttgtggaattttacaatatcctggaactttaggagatattaaagatccaagtgaagcaattagtaaaattcataaaaagaatgggaaggctgtattagcttgtgatctgttagcgttagcaaaattaaaaacaccaagagaacttggtgctgacatagcagttggaagttcccaacgatttggtattccaatgggatatggaggtccgcacgcagctttttttgcaacgaaagatgagtataaaagatcaatgccaggtaggattgttggtgtatcagttgatagacatggtaataaggcatatagattatccttacaaactagagagcaacacatcagaagagataaagcgacaagtaatatttgtactgcccaagctttattagcaattgtgtcagcggcatatgctatttatcatggtccagatggtattaaaaatatttctgaaagagtatctcaattagcaaaaagttttgctgacaaaataaaacagtctggatatgaactttattctaattatttctttgatactgtcacaattattaccaaagaaaaaactgaccaaatttataaaaatgccctaaatcaaaaagttaacatacggaaagtaaattctgaaatgctcgccgtttcttttgatgaaagaaaaaatgtgtatagagtaaatcaattattaaaaatttttaatgcagcagaatcaatcaaaaaggaagatccttcaataagtttgcccaatctaccggaaaatttattaagaacttcaaaatatttagaacatccagtttttaacttgtatcattcagaaactgaaatgcttagatatcttaaaaggttagaggataaagatatagcattgaacagaacgatgatagctcttggctcatgtacaatgaagttgaattcggctgccgaaatgattccaatttcttggaaagaattcgcagaacctcatccatttgttccaattgaacaaatggaagggtttagagatttatttactgatctaaaaaattggttgcgatctataactggtttttcaggtgtttctctacaacctaacgcaggtgctcagggagaatatgcaggattaatggttatccgaaagtatcatttagatagaggagaggctaatcgtaatatatgtttaattccaagttcagcacacggcactaatccagctagcgcacaaatggttggaatgaaagtggttgttgttaattgtgataaagaaggaaatgttgattttgatgatttaaagaaaaaagcagagcaacactcagaaaatcttggggcactaatggtaacttatccatctacccatggagtatttgaagaaaaaataactgatatttgcgagttagtccataaacatggtggccaggtctacatggatggagcaaatttaaacgccctagtaggagttgcaaagcctggaaattttggtccggacgtttgccatattaatttgcataaaacattttgtattcctcatggtgggggaggacctggaatgggacccattgcctgtaaaagacatttacaagtttatttacctaatcatccagtaataaaagattgtggaccaacaactggaattggagcagtgtcagcagctccttggggtagttcaagtattctatcaatctcttggatgtacattaaaatgatgggatctgcaggattaaagcttgctactcaagttgcaatattaaatgccaattatatcgctcatagactaaaagatcactttccgattt

SEQ ID NO: 220340 - DNA, 990 bp, Unknown
  Bacterial polypeptide expressing nucleotide sequence isolated from the Sargasso Sea
aatgttacataattctcaaaaagattttattaaaagacacataggatctactcaagaagaacaggtaaaaatgttaaaggagttaaattacaactcgcttgatgaattaattagtaacaccgttcctgaaaaaattcactttaaagataatttaagtattggggaatcaaattctgagtatgaagctttgagaaaactaaaagcaatttcaaaaaaaaatcaaatatattccaattttattggtatgggatactatggtacatatacgccttatgttattttaagaaatattttagaaaacccaggatggtatacctcttataccccttaccaaccagaagtagcacaaggaagactcgaaatgcttttaaattttcaacaaatgattgtagattttacaggcatggatattgcaaatgcttctttacttgatgaaggtacagcggcagcagaagcgatgggattaagtcatagactcaataaaaaagatagcagtttaatttttgtttcagagaactgtcatcctcaaactataaatgttgttcaaactagagctgaaccgatgggtctaaaagtcttaattggaaaagaaaatgaggtattagataatataaaagaagatttagtatgtggaattcttcaatatcctggaactctaggggatattaaagatcctagtgaaagtataagcaaaattcataaactaaatggtaaagctattttagcgtgtgatctattatcattggctaaattaaaaacacctggggaacttggagccgatatagcagttggaagttcacaaagatttggaataccaatgggatacggaggaccacacgctgcttattttgctaccaaagatgaatataaaagatcaatgcctggaagaattgttggtgtatctgttgatagacatggaaacaaagcttataggctagcacttcaaacaagagaacaacacattagaagagataaggccacaagcaatat

SEQ ID NO: 220341 - DNA, 1521 bp, Unknown
  Bacterial polypeptide expressing nucleotide sequence isolated from the Sargasso Sea
aattttattaaaagactcgttaagcattggagagcctaattctgagtatgaagctttaagaaaactcaaagcaatttctaaaaaaaatcaaatttactcaaattttattggaatgggttactatggaacttatacaccaaatgtaattgtaagaaatattttagaaaatccaggatggtacacttcttatactccttatcaggctgaagtggcacaagggcgattagaaatgcttttaaactttcaacaaatgattattgattttactggtatggatatagccaatgcttcattattagacgaaggtactgctgcagcagaagcaatgggcttaagccatagattaaataaaaaagatagcaaaatagtttttgtatcaactgattgtcatcctcaaacaatagatgttattaaaacaagagctgaacccatgggattaaaagtaatagttggtcaagacactgagttagacaaaataccaggagatataatttgtggtattcttcaatatcctggaactctaggagatataaaagatccaagcgaacagattagtaaaattaaaaaaaaaaacggaaaagcaatattagcttgtgatctactcgctttagcaaaactaaaaacacctgctgaactaggagccgatatagcaataggtaattctcaaagatttggaattccaatgggctatggaggtccacacgcagcattttttgcaactaaagatgagtttaaaagatcaatgccaggtaggatcataggtgtttccgtcgatagacatggaaataaagcatacagacttgctcttcaaacaagggagcagcatattagaagagataaagctactagcaacatttgtacagctcaagctttattggctattgtttctgcggcttacactatttatcatgggccaaacggcataagaaaaatttcagagagagtttctcaactagctaataattttgcagataagattaaaaaatctgggtatgaaatatattctaataacttttttgataccgtagcaataaaaacaaaagataagacagaaaaaatatttaaaaatgctttagatcaaaaagtaaatattagaaaagttaattccgaaatgttagcagtttcttttgatgaaaagaaaaatgtttatagagctaatcaactattaaaaatatttaattgtgcagaatctattaaagataatccaactgaaagtttaccaaatttaccaaaaaatcttttaaggacatcaaaatatttagaacacccagtttttaacagttaccattcggaaactgaaatgcttagatatttaaaaagactagaggataaagatattgcacttaaccgttctatgattgctcttggatcatgcaccatgaagttaaatgcagtggccgagatgatacctatatcttggagagaatttgctgaaccacatccatttgtaccagtcgagcaaatggaaggttttagaacactttttacagatttaaaaaattggttaagatctattactgg

SEQ ID NO: 220342 - DNA, 784 bp, Unknown
  Bacterial polypeptide expressing nucleotide sequence isolated from the Sargasso Sea
atgctaaaaaatgctcaaaaagattttatccaaaggcatataggatcttctaaagaagaacagcaagttatgcttaaagaattgggttataataatctagatgaattgattgctaaaacagtcccagaaaaaattctattaaaagaaaatctaactattggcgatcctaattcagagtacaaagcacttagaaaattaagagacatttctcaaaagaataaaatttattcaaattttatcggaatgggatattacggaaattataccccatatgtaatactaagaaatattttagaaaatccaggatggtatacttcctatactccatatcaaccagaagtagctcaaggaagactcgagatgcttttaaattttcagcagatggtaattgattttacagggatggatattgcgaatgcatctcttttagatgagggtacagccgcagctgaagccatgggtttaagttatagaatttgcaaaaaagatataaataaagtttttgtctcgaaaaactgccacccccaaaccattgatgttattaaaacaagagccgaacctctaggtttaaaaataatagtaggggatgaagataaagatattaatgagaatatagtttgtggaattatacaatacccaggaactttaggagatataaaggatcctagtgaagctattagcaaaatacataaacaaaatggaaaagcagtattggtttgcgatttattagctctagctaaaattaaaacacctgctgaattaggcgctgatatagccgtgggaa

SEQ ID NO: 220343 - DNA, 1147 bp, Unknown
  Bacterial polypeptide expressing nucleotide sequence isolated from the Sargasso Sea
attgttaaaaatatttggaatatctaaagtaattaaacaagacgctaaggttgaactagacaatcttccacaaaatcttttaagaacttcaaaatatttaactcatccagtttttaacaaataccattctgaaactgagatgctaagatatctaaagaaactagaagattgtgatatcgcgctcaatagatcaatgattgctttaggatcttgtaccatgaagctcaatgcaacagcagaattaattcccattacctggaaagagttttcacttccacatccatttgttcctacaaatcaaatggaaggctataaaattctttttaatgatctaataaatgatctgaaagaaattactggatatgatgcagtttctttacaacctaactctggggctcaaggagagtatgcaggtctaatgactataagaaaattccataaaaataacaaacaagaaaatcgtaacgtttgtctaattccggactcggcccatggaactaatccagcaagtgcccaaatgtgtgggatgaaagtggttgtagtcaattgtgacgacgatggaaacgttgacatagatgatctaaaaaataaagctgaaaaacactcaaaagatttagctgctttaatggttacttacccctctactcatggagtatttgaagaaaaaatcatggatatttgtcaagtaattcacaagcacggcggacaagtttatatggatggagcaaatctaaatgctcttgtaggtgttgcaaaaccagggaaatttggaccagatgtttgtcatattaatttacataaaacattttgcataccgcacggaggaggcggaccaggaatgggcccaatcgcttgctctaagcatctagctgattttttaccaacacatgaaattattaaagaggcaggtcctaagaatggaatgggagctgtatcagctgctccttggggaagctcaagtatacttccaatatcttggatgtatataaagatgatgggtgctgagggattgaaaaaagcctcacaggtttcaatattaaacgcaaattatatttcaaaaaaattatctaaagattacaaagttctttacactggaaaaaatggaaacgttgcacatgaatgcataattgatattcagaccaattaa

SEQ ID NO: 220344 - DNA, 1837 bp, Unknown
  Bacterial polypeptide expressing nucleotide sequence isolated from the Sargasso Sea
atgttacataattctgaaaaagattttattaaaagacacataggtcttaaaaaaaaggacgaaaagaaagcattaagtgaaattggctataaatcattagatgaattgataagtaacactgtcccaaaaaatattttattaaaagatcaacttagtatcggagaaccaaattcagaatatgaggcattaaggaagttaagacttatttcaaaaaaaaacaaaattttctcaaactttattggaatgggttattatggaacttacacaccaaacgtaatagtaagaaacatatttgaaaatccaggttggtatacttcctatactccataccagcccgaagtagctcaaggaagattagaaatgctgttaaattttcaacaaatgataactgattttactggaatggacatagctaatgcttcattgttagacgaaggtacagccgctgctgaagcaatgggattaagttatagattaaataacaaagatagcaaaatagtttttgtatctgaagattgtcatcctcaaacaataaatgtaattcaaactagagcagagccaatgggtttaaaaatggtaatcgggaatgatgatgaactaaataaaataactggcgatctagtatgtggtattttgcagtaccctggaactttaggagacataaaagatccaagtgaaaacattagcaaaattcataaaaagaatggtaaagctattttagcttgtgatcttttggcattagcaaaacttaaaacaccaggagagttgggagcagatatcgcggtaggaagttcacaaagatttggaataccaatgggttatggaggacctcatgcagctttttttgcaaccaaagatgaatataaaagatcaatgcctggaagaataataggagtttcagttgatagaaatggaaacaaggcttatagactatccctgcagactagagaacaacatatcagaagagacaaggctacaagcaatatatgtacagcccaagctttattggcaatagtgtcagctgcttatacaatatatcacggtccaaaaggaattagaacaatttctgaaagagtatctcaattggcaaaaaattttgctgataaattaaaacaatctggttatgaattatattcagattatttttttgacactgtaacaattaaaaccaaagaaaaaacagatcaaatatttaataacgctttatctcaaaaagttaatattagaaaagtaaattctgaaatgttagcagtttcatttgatgagaaaaaaaatgtatacagagcaaatcaattattaaaaatatttaattgtgcagaatccataaaagagaatcctactgaaagtttaccaaacttaccaaaaaatctattaagaacatcaaaatatttagaacatccagtatttaatagttatcattcagaaactgaaatgcttagatatttaaaaagacttgaagataaagatattgcacttaaccgttcaatgatagctttaggatcttgcacaatgaaattaaatgcagttgcagaaatgatacctgcaagttggagagagttttcagaacctcatccttttgttccaatagaacaaatggaaggttatagaacactttttacagacttaaaaaattggttaagatctattactggtttttcaggagtttcgctgcaacctaatgctggagcccagggtgagtatgctggtttgatggttattagaaaatatcacatagaaagaggagaaaagaatagaaatatatgtttgataccaagttctgcacatggaacaaatcctgctagcgcccaaatggtaggaatgaaaattgtagttataa

SEQ ID NO: 220345 - DNA, 1555 bp, Unknown
  Bacterial polypeptide expressing nucleotide sequence isolated from the Sargasso Sea
gtctgaggagtttaataaaattaataatcaacttttatctttaaaaaataatttcaaaaaaacttatattggaatgggttattataatactattactcctagcgttattttaagaaatattcttgaaaatccgggatggtatactgcttacacaccttatcaaccagaagtaagtcagggaaggttggaaatgttaatgaattttcaacaaatgataattgatttgactggaatggatattgcaaatgcatctttacttgatgaaagtactgcggcagctgaggctatgatgatggcttttaaaattaaaaaaagtgcaaagtttactttttgtgtgcaaaataaatgtcatccacaaacactgtctgtcttaaaaacaagagctaaacccctaggtataaaaattatttttgataatccagatgacgatacatttggttgtttaattcaaaatccagatacttacggagaaattgcaaatctcaacgatttaataaatataaataaatctcacgatgcgttatcaatcatagcagctgatataatgagtttggtagttatgaaatcaccaaaagattttggagctgatatagttgttggaagtactcaaaggtttggggttccaatgggtctaggaggtccacacgcagcatattttgcaacattagatgaatataaaagaatgatacctggaagactaattggtgtatcagttgatcgtaataataaaagatcttacagaatggctcttcaaacgcgtgagcaacacattagaagggaaaaagctacaagtaatatatgtactgcacaagctttattagcaattatatctgcttcatatgcaatatatcatggtccaactagattaagaaatattgctgaggacattcattataagtctagatatctaaagaaatcattagagatattaaattttgaagtaaaatctaaaaattattttgataccttattaataaaagatacaaaatctaaatactgggtaaataaatctatagacaatggtataaattttagatttgtaaatgacgatcatttttctatttccttagatgaaactacatcactacaagatgtagataatttaattaaattttttaatgaaaacaataatgaaatatacgcagaagaaattgaaagtaaaattgaagattcgattttcaaaaatgatttagatagaaaagacaaaatattaactcatcctgtatttaatatctatcattctgaaacagaaatgatgagatatttaaaaaaattagaaaataaagacgttgctttaaatagatcaatgatacctctaggatcttgtactatgaaactaaatgcggcatctgaaatgcttccaattactttacctggtttttcaaatgcgcatccattcttagagccccatcaacgtgagggatataatgaaatgatgagtgaattaatatcgatgttaaaagatattactggttttgatgcagtttcacttcaacctaatgcaggagcacaaggtgagtttgctggtttattagctatacaaaaatatcatgag

SEQ ID NO: 220346 - DNA, 1051 bp, Unknown
  Bacterial polypeptide expressing nucleotide sequence isolated from the Sargasso Sea
aatggaaatatctatagttaattgtgatgaaaaaggtaatgttgacatagatcatttagaaaaaaaaattgaagaagcaggagataaactttcctcattaatgataacttatccttctactcatggagtatttgaagaaagtattgttgagatttgtaaaaaaattcatgatgcaggaggtcaagtctatttagatggcgcaaattataatgccatggttggaatagcaaagccaggtaaatttggacctgatgtttgtcatatgaatcttcataaaacatttacaattccacatggcggaggaggtcctggagttggagcaataggtttaaaaaaacatcttgagaaatttgctccagggcatccagtttttaaaaatgaaattggtttaactgaacaagaagcagtatctgccgctccttggggtagtgcatcaatattgccaatttcatattcttatatttctatgatgggtgacgacggcttaaaactagcaacacaagtggctatattaaatgctaattatgtaaagcaaagattaagtaaatattatccaatattgtataaaggtaaaaatggaatggtagcgcatgaatttattattgatataagaccttttaaagaagaaattaatgtctcagatgaagatattgctaaaagactaatagattatggatttcacgctccaacaatgtcttttccagtacctggcacacttatgattgaaccaacagaaagcgaatcaaaagaagaattagatagattttgtgaagcaatgatttctatttataaagaaatcgaaaaaattagaaatggaacatttgataaagttgataatcctataaaaaatgctccacatacagttgaagaaatttcatctgatgaatgggaacatagttactcaagacaggatgctgcatatccgcattcttatttactaaataataagtactggagccctgtaagtagaattgacaatgtatatggagataggaatttattttgtgtatgcccacctattgatgaatatagtgatgttaaaactggataa

SEQ ID NO: 220347 - DNA, 2845 bp, Unknown
  Bacterial polypeptide expressing nucleotide sequence isolated from the Sargasso Sea
aatgagaaaattttcagatagacatattggtatttccgaagttgatgaaaaatctatgaaagattttttaggagttgaatccttagaacaattaattcaagaaactattcctgatgaaattagaacgaaagaggaattgaagcttgacaatgcaatctccgaatcccaatactctactcatatttatcaactttctcaaaaaaataaatatttcaaaaactatattggattaggctataatgaagcaatacttccacctgtaattcaaagaaatattttagaaaatccaggttggtatacagcatatacaccctatcaagcagaagttgcacaaggcagattggaagcgcttttaaattaccagaccgtaatttgtgacttgactggaatggaaatttctaatgcctcacttttagatgaaggaacatctgcagccgaagcaatgactatgttatttggttgtagatctagagatcaaatcaaaaatggagtaaacaagtttgtaataagtagtgatgtttttgatcaaacgataagtgttttagaaactagagctgaacctcttggaattgaaatagaaattgttgattatgattcaataaatatagacgatagtgtatttggatgtatagtacaatatattggcaaaacaggtaaaattaataatctggaaaatatttcaaaaaaagttcaggattctaattcaaaattaatagtagctgctgatttaatggcgttaactttgttaaaagaacctgcctcatttaattgtgacgttgttgttggaacatcacaaagatttgggattccattaggatatggtgggccccacgcaggatactttgctacgaaaaccgattataaaagatttattccaggtagaattattggcgtatccaaagatagaaatggtaatagagcattaagaatggctcttcaaactagagaacagcatataaaaagggaaagagcaacctcaaatatttgtactgctcaagttttattggctgttatggcaggaatgtatgctgtttatcatggtaaaaatggattgattgaaattggtgataaaattaatagtttaactaaaatacttgatgaaaaactcaatttattaggattagatcaactaaatgactcttattttgatactttacattttaaatatccagtagaaaaagttagagaggaagctattcaaaataaattaaatttcaatttcataaatgataatgagttctctatatctttaaatgaagctacagaaattgaagatgttaataaaataattgatattttttcctccgtaaccgaaaaagaaatagattttaatatttcaaaaattaattttaattctatacctcaagaacttaatcgaaaatctagttttctagatgaaaaggtatttaatttataccattctgaaacttcaatgatgagatacattaaatcattggaaagaaaagatcttgcattaaatcactctatgattgcgcttggttcttgtacaatgaaattaaatgctgctgctgaaatgttaccattgagctcagctcgttggaacaatattcatccttttgctcctcacaaccaggttgaaggctacaacataatgttgaataagcttgaactacaacttaatgaaataaccggctttagcggcacatcactacagccaaattctggagctcaaggcgaatatgccggattgatggtaattagatcatactttaaaagcataaaccaaacaaatagaaatatttgtattattccagcttcagctcctggtactaaccctgcatctgcagtaatggcaggaatgaaagttgttgtagttggtactgacaaatttggaaacattgatgaagatgacctgattaaaaaagctgaagaaaacagtgagaatctagccgctttaatgattacttacccatcaactcatggtgtttttgaatcttcaataaaaagaattacgcaaacaatacatgataatggaggtcaagtctatatggacggcgctaacatgaatgctcaagttggactaaccaatccatattcaattggtgctgacgtatgtcatttgaatctacataaaactttttccattccgcatgggggtggtggacctggcgtcggacctatttgtgttgcaaaacatttagtagactttcttccccaaactgacagaaatattacaaaaaaacatggagtcaaagctatttcggctgccccttggggatccgcaatggcatgtctgatttcttatggatatatatctatgatgggacctgacggtttgaaaaaagctactgagatagctatacttaatgcaaattacataaagaaaaggattgaaaaagactataaaatactttaccaaggtgaaaaaggcagatctgctcatgaattaattattgattgccgagattataaagatgaatttggtattgatgttatggatattgccaagaggttaattgattatggtttccatgcccctacagtttcatttccagttccaggcaccatgatgatagaaccaactgaaagtgaaagtctagaggaaattgatagattttgtgatgctctgatttcaatcaaaagtgaaattattgcttgcagtaaagatgatgaatacaatattttaaaaaatgctcctcacactcaactcactcttactgatgatgaatggaatctcaattattctagagagcaggcagcatttccaatgccttatttgaagagtaataaattttggccatctgtcaccagaattgatgaagccttcggagatagaaatttgatttgtacttgtgcaccgattgaagattatatcgagtcctaa

SEQ ID NO: 220348 - DNA, 657 bp, Unknown
  Bacterial polypeptide expressing nucleotide sequence isolated from the Sargasso Sea
tatgtcttctggcacagcttctccacacactctttcatctgaatctcacgcacctgcgtgtaacaaaacgactgcatctgatgacaatccagaatttgcaggtcgacacattggcctttcaccaaccgatgagcacttcatgcttgaagccatcggagcaaaaagtcgagatgcattgattgaagaaattgtgccagcgagcatcctgaggcgaacggtgatggatttaccatcggctgtctcagagcaagaagcacttgcagaactgaaggctgtcgcccagcagaacaacgtctgcaaaagtttcttgggtcaggggtactatggcacgcatactccagcggttatccaacgaaatgttttggagaatcctgcctggtacaccgcctacacaccgtatcaggcagaaatctctcagggccgcatggaggcagtacttgcatttcagacaatgatttgtgacctctctggcatgcctatcgcgaatgcttctcttcttgatgaagcaacggctgctgccgaagcaatgacattagcccacagaatgcaaaaaggtcaggagtctaccttcatagccgaccgaaggtgccatccacagacactggaagttttggcaacacgagcggagccactgggtatcgatctcattattggtga

SEQ ID NO: 220349 - DNA, 908 bp, Unknown
  Bacterial polypeptide expressing nucleotide sequence isolated from the Sargasso Sea
tgttgagatttgtaacaaaattcatgatgctggtgggcaagtgtatcttgatggcgctaattataatgcaatggttggtgtagctaaaccaggtaaatttggacctgatgtatgccatatgaatctccataagacattttgcatacctcatggagggggtgggcctggagttggggctataggattaaaaaaacatttagcagattttgctcctggacatcccatgtttaaaaatgaaataggtttaaccactcaggaggcagtttcagctgcaccttggggaagtgcatctatattacctatttcatattcttatatatctatgatgggtgacgatggcttaaaattagcaactcaagtagcaatattaaatgctaattatattaaagaaagattaaaaaattattaccctattttatatactggtaagaataatatggtggctcatgaattcattattgatatcagaccatttaaacaagaattaaatatttcagatgaagatattgctaaaagactaattgattatggatttcatgcacctacaatgtcttttcctgttcctggtactcttatgattgagcctactgaaagtgaatcaaaagaggaactagatagattttgtgaagcaatgatttctattcacaatgaaatcagtatgattagagatggtaaatttgataaagtagacaatcctataaaaaatgcccctcataccattgaagaagtgtcttctgacaattgggatcacaaatattcccgaaaagatgctgcctacccgcatgcttatttgataaataataaatactggagtccagttagtagaattgataatgtatatggtgatagaaatttattttgtgtttgtcctccaattgatgaatacgaagaggctaaaacaggataat

SEQ ID NO: 220350 - DNA, 1015 bp, Unknown
  Bacterial polypeptide expressing nucleotide sequence isolated from the Sargasso Sea
aatgttaccaaattcagaaaaagattttttaaaaagacacattggtccttcaaaagaagaccaatcaaaaatgttaaaagagctaaattatcaatcactagatgacttaattgacaatactgttccagaaaaaataaagtttaaaggtgaacttaatattggtgactcaaattcagagtacgaggcgttaagaaagttacgagcaatttcgaaaaaaaatcaagtttactcaaattttattggtatgggttattatggaacatatacaccatatgttattttaagaaatatattagaaaatccaggttggtacacttcctatacaccttatcagcctgaggtagctcaaggaagacttgagatgttattaaactttcaacaaatgattgttgactttacaggaatggatattgctaatgcttctttattagatgagggtacggctgcagcagaggccatgggtcttagtcatagattaaataaaaaagatagtactttagtatttgtatctgaggattgccacccccaaacaataaatgtaattcaaacaagagctgaaccaatgggtttaaaagttctagtaggaaaagaagatgaggttttagatcaattaaaagaagatttagtttgtggaattttacaatatcctggaactttaggagatataaaagacccgagtgaagcgattagcaaaattcataaaaagaatgggaaggcgatattagcttgtgatttattagcgttagcaaaactaaaaacgccaagggaacttggcgctgatatagcagttggaagctctcaaagatttggtattccgatgggatatggaggtcctcatgcagctttttttgcgactaaagatgaatacaaaagatcgatgcctggaagaattgtcggtgtgtcagttgataggcatggtaataaggcatatagattatctttacaaactagagagcaacatattagaagagataaggcgacaagtaacatttgtactgctcaagccttattagca

SEQ ID NO: 220351 - DNA, 1290 bp, Unknown
  Bacterial polypeptide expressing nucleotide sequence isolated from the Sargasso Sea
ttgttcctcaagatcaaatgaagggatataaggttttatttaatgatttagttaatgatttaaaagaaatcacaggttttgatgcagtttctcttcagccaaattccggcgctcaaggcgaatattcaggactaatgacaatacgtaagtttcacttaaataataatcaaaaaaatagaaacgtatgtttaataccagaatcggcacacggtacaaatcctgcaagtgcacaaatgtgtgggatgaaagtagtagttattaaatgtgatgacgaaggtaatgttgatctaatagatttgaaagaaaaagttaataagtattcaaaagatctagctgctttgatggtaacttatccatcaactcatggagtttttgaggaaaaaattagtgaaatttgtgaatatgttcacaaagcaggcggtcaagtttacatggatggtgcaaatcttaacgccttagttgggattgcaaaacccggaaaatttggaccagatgtttgtcatattaacttgcataaaactttttgtattccccatggtggaggtggcccaggtatgggtccaatcgcttgcgccaaacatttaaaagattttttgcctaatcacaatattactaaaaataccagatctgaaaaaagtttgggatccgtatctgctgctccatggggtagtgcaagtatattacctatttcctggatgtatataaagatgatgggagctgaaggtttaagaaaagcttctgaagtagcaattttaaacgcaaattatatatcaaaaaaattatctaatcactacaaagtactttataaagggaaaaatggaaatgtagctcatgaatgtataatcgatcttagaccaataaaatccaaatcaggaatttcagaagaagatattgcgaaaagattgatagattatggatatcatgcaccaacaatgtcatggccggttgctggaacattaatgattgaacctacggaaagtgaaaatttagcagagataaatcgtttttgtaatgcgttgatatctattaaaaaagaaattgataaagtagacaacggcagttttgataagaaagacaatcctctgaaaaatgccccgcatactcatattgaattaagtgcaaatgaatggaaacattcttacacaagagaagaagccgcatttccaaacgaatatttaaaggataataaatattggcctcctgttgctagagttgacaatgtttatggagatagaaatttagtttgttcgtgtcctagtctagacgaatataaagatgaggccgcataaa

SEQ ID NO: 220352 - DNA, 2051 bp, Unknown
  Bacterial polypeptide expressing nucleotide sequence isolated from the Sargasso Sea
acctcatgcagcattttttgcaactaaggatgaatttaaaagattaatgccaggtagattaataggtgtatcagttgatagaaacaacaaaagatcatacagaatggctcttcaaactcgtgaacaacacataagaagagaaaaagcaactagcaatatttgtactgctcaagctttattagcaataattgccgcggcttatgctatttatcatggaccggaaaggttaataaatattgcgtctactataaattacaatattagatatcttaaaaaatcattagaaaaattaaattataaaattaaatctaataaatattttgacacaatagtcattgaagactctaaagctaaagagtggtttaataaatcagttgaagagggaattaattttagattaattaacaacactgcattttcaatcactattgatgaaactacaactttagaagatatcgataatctaattgctttttttaatataaccaataaagaaattgatgctaacgaaattgaaaagaatcttgaccctatttttaatgatgaaaaaattcttagaaaagataaaatattatcccatccaatatttaatatttatcattctgagacagaaatgatgcgatatctaaaaaaattagaaaataaagatattgcactaaatagatcaatgattcctcttggttcatgtactatgaaattaaatgcagcctcagaaatgttaccaataacgttaccaggatttgcaaacgcccatccttttttagaaaaacaacaaagagagggctataatcaaatgatgagagagttaatatctatgctcaaagatataacagggtttgatgcaatatcattgcaaccaaatgcaggagctcaaggtgaatttgcaggattacttgcaataaaaaaatttcatgagtctaataatgagtatgatagaaatgtatgtctaatacctaatagtgctcatggtactaatccagcaagtgcacagatgtgtggtatggaagtatccattgttaaatgtgatgatttaggaaacgtagacttaaatcacttggacctcaaaattaaagaagctggaaataaattagctgctttgatgattacttatccatctacacatggcgtatttgaagaatcaatatcaataatttgtgaagctattcataatgctggcggtcaagtttatatggatggtgcgaatttaaatgcaatggtaggaattgcaaaacctggaaaatttggtcctgatgtttctcatatgaatcttcataaaactttttgcattccgcatggaggaggtggtcctggtatgggccctattggagtcaaatcacatctagagaattttttaccaggacatccgattgttaaaaatgagcttggattaacagcacttgacgcggtttctgccgcgccatggggaagcccttccattttacctatttcttattcatatatttccatgatgggagatgaaggattaaaattagctacacaaatagcaattttaaatgccaattatataaaagaaaaattaagtgatttctttactcttttatattctggtaaaaacggaatggttgctcatgagtgcataattgatattcgtccaatcaaagatgaattaaatatatctgaagaagatattgcaaaaagacttatcgattatggtttccatgcgccaacaatgtccttccctgttccaggaactttaatgatcgaacccactgaaagtgaatcaaaggaagaaattgatagattttgtacagctatgatttctatacataatgaaattcaaaaaattcgagatggcacttatgatgcagaagataatccaataaaaaactctccacacactatagaggaagtttcagcagatgaatggagtcataaatatacaagagcggaggcagtttttcctcattcttacttatacaataataaatattggccacctgttgcaagaatagataatgtatttggtgatagaaatcttttttgcgtatgcccacctattgaagactatgaagatgtatcaaatgcataac

SEQ ID NO: 220353 - DNA, 1423 bp, Unknown
  Bacterial polypeptide expressing nucleotide sequence isolated from the Sargasso Sea
aatgttaccaaattcagaaaaagattttttaaaaagacacataggaccttctaaagaagaccaatcaaaaatgttaaaagaattaaattataaatcactggatgacttgattgacaatactgtcccagaaaaaataaagtttaaaggtgaacttaatattggtgattcaaattcagagtacgaggcattaagaaaattaagagcaatttctaaaaaaaatcaagtttactcaaatttcattggtatggggtattacggaacttacacaccctatgtaattttgagaaatatactagaaaatccgggttggtatacttcatataccccttatcagcctgaggtagctcaaggaagacttgagatgttattgaactttcaacaaatgattgttgactttacaggaatggatattgctaatgcctctttattagatgaaggtacagcagcagcagaggctatgggtctaagtcacagattaaataaaaaagatagtaatttagtttttgtttctgaggattgtcatcctcaaacaatagatgtaattcaaacaagagctgagccaatgggtttaaaggtttttgtcggtaaagaagatgaagttttagaccagctaaaagaagatttagtttgtggaattttacaatatcctggaactttaggggatattaaagacccaagtgaagcaattagcaaaattcacaaaaaaaacgggaaggctatattagcttgtgatctgttagctctagcaaaattaaaaacacctagagaacttggtgccgacattgcggttggaagctcccaaagatttggtattccaatgggatatggaggtccgcatgcagctttttttgcaaccaaagatgagtataagagatcaatgccaggaaggattgtcggtgtatcagtcgatagacatggtaataaggcatatagattatctttacaaactagagagcaacatattagaagagataaagcgactagtaacatttgtactgcacaagccttattagcaattgtgtcagcagcatatgccatttatcatggtccagatggaattaaaaatatttctgaaagagtgtctcaattagcaaaaagttttgctgataaaattaaacagtctggatatgaactttattctaataatttttttgatacggttacaattattacaaaagaaaaaactgatcaaatttataagaatgctctgaatcaaagagttaatatacgaaaagtaaattctgaaatgttagctgtttcttttgatgaaagaaaaaatgtttatagagtaaatcaattattaaaaatttttaatgcagcagaatcaattaaaaaagaagacccttcagtaagtttacctaatttaccaaaaaacttattaagaacttcaaaatatttagaacatccagtttcaacttatacc

SEQ ID NO: 220354 - DNA, 2872 bp, Unknown
  Bacterial polypeptide expressing nucleotide sequence isolated from the Sargasso Sea
atgttacataattcacaaaaagattttttaaaaagacatattggtccatctgaaaaagaccaaaaaaaaatgctcagtgaactcaaatatagttctttagatgaacttataaataaaactgttccagaaaaaattcagtttaaaggtgagcttaatattggtgagtctaattcagaatatgaagcactaagaaaattaaaagcaatttcaaaaaaaaataaaatttactccaattttattggtatgggttattatggaacttacacaccatatgtaattttaagaaatatattagaaaatcctggttggtacacttcgtacacaccctatcagcctgaagtagcacaaggaagattagagatgttattaaactttcaacaaatgattgttgattttacaggtatggatattgcaaatgcatccttacttgatgaaggaacggcagcagctgaggctgtgggtttaagtcataggcttaataaaagcgatagcaatttagtttttatttcagagaattgtcatccacaaacaattgatgttattcaaacaagagctgaaccaatgggtttaaaagtattagttggtaatgaagataaagctttagataatttgaaagaagatattgtttgtggaattctacagtaccctggaactttgggagatattaaagatcctagtgaggcaataagtaaaattcacaagagaaatggtaaagcgattttagcatgtgatcttctagcgcttgctaagttaaaaacaccaagagaacttggggctgatattgcagttggtagttctcaaaggtttggtattccaatgggttatggaggacctcacgcagcattttttgcaactaaagatgaatataaaagatctatgccaggtagaattattggtgtttcagttgatagacatggaaataaggcatacagattgtcacttcagaccagagagcaacacattagaagagacaaagctacaagtaatatttgtacagcccaagctttattagcaattgtgtcagcagcatatgcaatttatcacggaccagacggaattaaaaatatttctgaaagagtatctcaattagcaaaaaattttggagataaaataaaacaatctggatatgaactatattcagattatttttttgatactgtaactattataactaaagataagactgatcagatttttaaaaatgctttagatcaaaaagtaaatattagaaaagtaaattcagaaatgttgtcagtatcttttgacgagaaaaaaaatgtttatagagtaaatcaactgttaaaaatttttaatgcagcagaatcaattaaaaaagaagaccctacagtaagtctacccaatcttccaaaaaatttactaagaacttcaaaatatttagaacacccagtttttaattcataccattcagaaactgaaatgcttagatacttaaaaaaattagaggataaagatatcgctcttaatagaacgatgattgcattaggctcatgcaccatgaaattaaatgctactgcagaaatgatacctatttcatggagagaattagctgagcctcatccgttcgtacctgtagagcagatggaaggatatagagaattattcaccgatcttaaaaattggctaagatcaattactggtttttctggagtttcacttcagccaaatgcaggcgcccaaggtgaatatgcaggattaatggttataagaaaatatcatttagatagaggtgaagaaaatagaaacatatgtttaatacctagttcagcacatggaactaatccagcaagtgcacaaatggttggaatgaaagttgtagtagttaattgtgataaagaaggcaatgtagattttgaagatttaaagaaaaaagcagaaacacattcagaaaatcttggagctttgatggttacatatccatctactcatggtgtatttgaggaaaaaataacagatatctgtgatttaatccataaacacggaggtcaagtttatatggatggtgcaaacttaaatgcacttgtaggaattgcaaaacctggaaattttggtccagatgtttgtcatataaacttacataaaacattttgtattcctcatggtggaggaggaccaggtatgggaccaattgcttgcaaaaaacatttacaagtttatctgcctaaccatccagtagtaaaagattgtggtcctgcaaccggtataggtgcagtttcagcagcaccttgggggagctcaagtattttatctatttcatggatgtatataaaaatgatgggatcacagggtttaaaattagctacggaagtagcaatattaaacgctaactatatagctcatagattaaaaaaccattttccaatcttgtataaagggactaatggaaatgttgctcacgaatgtatcattgatattagatcaattaaaagtgaaacaggggttacggaagaagacatagccaaaagattaatagattatggatttcatgcgccaacaatgtcatggcctgttgctggtacaatgatgattgaaccaacagagagtgaaagtctaactgagatagatagattttgtgatactttaataaatatcaaatcggaaatagaaatgattaagtctggtaaatttgataaagtagataatccaattaaaaatgcaccccatactgatattgaactttcttcagatgaatgggaccacaaatattctagacagcaagcagcgtatcctgcaaaattcttgaaaacaaataaattttggcctccagttgcgagagtagataatgtttacggagataaaaatattttttgtacttgtccaagtatggacgagtttaaagaagatgcagcataaa

SEQ ID NO: 220355 - DNA, 1375 bp, Unknown
  Bacterial polypeptide expressing nucleotide sequence isolated from the Sargasso Sea
gattgtcattacagacaagagaagcaacatatcagaagagacaaggcgacaagtaatatttgcactgctcaggcattgttagccatagtttcagctgcatatgctatttatcatggtcctgatggaattaaaaatatttccgaacgagtatcacaattagcaaaaaattttgctgataaaataaaacaatctggctatgaaatatattctgatcatttttttgatactgttacaattaatactaaagaaaagactgatcaaatctataaaaatgctttaaatcaaaaagtaaatatacgaaaagtaaattctgaaatgcttgcagtttcttttgatgagagaaaaaatgtttatagagtaaatcaactattaaaaatttttaatgcagcagaatcaattaagaaagaagatcctacggtaagtttacccaatctgccaaaaaatttattaagaacttcaaaatatttagaacaccctgtttttaattcatatcgttcagagacagaaatggttaggtatcttaaaaagttagaggacaaggatattgctcttaatagaactatgattgcattaggttcttgtaccatgaaattaaatgctactgcagaaatgatacctatctcatggagagaattagccgaacctcatccgtttgtacctatagagcaaatggaaggatatagaacattatttactgatctaaaaaattggttaagatcaattactggcttttcaggcgtttcacttcaaccaaatgcaggtgctcaaggtgaatatgcaggattaatggtaattagaaaatatcatttagatagaggtgataaaaatagaaacatatgtttgataccaagctctgcacatggaacaaatcctgctagtgctcaaatggttggaatgaaagtagttgtagttaattgcgataaagaaggtaacgttgattttgatgatttaaagaaaaaagtagaacttcattcagaaaacttaggagccttaatggttacatacccatctactcatggtgtgtttgaagaaaaaataatggagatatgcgaattaattcacaaacatggtggacaagtttatatggatggtgcaaacttaaacgcattagttggtatagctaaacctggaaactttggtcctgatgtttgtcatatcaatttacacaaaacattttgtatccctcatggtggcggtggaccaggtatggggcccatagcttgtaaaaagacatttacaggtttatctgcccaatcaccctgttgtaaaagattgtggtcctgcaacaggaataggagctgtatctgccgctccttggggaagttcaagtattttatcaatttcttggatgtatataaaaatgatgggatctgag

SEQ ID NO: 220356 - DNA, 2797 bp, Unknown
  Bacterial polypeptide expressing nucleotide sequence isolated from the Sargasso Sea
atgttacataattcagaaaaagattttattaaaagacatataggtttgtccaaaaaagacgaaaaaactatgttatcagaccttggttataaatctttaaatgaattaattgaagatactgttccaagtaaaattttgcttaaagatttgttaagcataggagatcctaattctgagtatgaaggtttaagaaaattaagatcgatatcaaaaaaaaatcaaatttactcaaattttataggtatgggttactatggaacttatactccaaacgttattgtcagaaatatactagaaaatccgggatggtatacttcttacactccttatcaaccagaggtggcccaaggaagattggagatgctattaaattttcagcaaatgataatagattttacgggaatggatattgcaaacgcatcactacttgatgaaggaactgctgctgctgaagctatggggttaagtcatagattagataaaaaagataataaaattgtgtttatatcaaatgattgtcatccacaaactatagaagttgttaaaactagatcagagcctttagggcttaaagttgttattggcaatgacgaagacttatcaaatatttcagaggatataatatgtggaatacttcaatatcctggtacacttggagatattaaggaccctagcgaaaatataagtaaaattaaaaaaagaaatggtaaatcaattttagtatgcgatttattatctttagcaaaattaaaaacaccagcagaattaggagctgatatagctgtgggaagttctcaaagattcggaattcctatgggttacggtggtccacacgcagctttctttgctacgaaggatgaattcaagagatcgatgcctggaagaattgtaggtgtttcagtcgatagacatgggaacaaagcttatagattagctttacaaacaagagagcaacacattcgaagagataaggcgacaagtaacatttgtacagcacaagctcttttggcaattgtatcagcagcatatgcaatttatcacggcccaaaaggtataaaaacaatttctgaaagagtttcacaattagctaaaaattttgcagataaattaaaacaatcaggctatgagttatattcagaccatttttttgacacagtaactataataacaaaagataaaacagatcaaatttttaataacgctttggcccagaaagttaatattagaaaagtaaattctgaaatgctatcggtatcatttgatgaaaagaaaaatgtttatagagcaaatcaactacttaaaatattcaattgtgcagaatcaattaaagaaaatccgacagaaaatcttccaaatttacctaaaaacttgctaagaacgtcaacttatttagatcaccaagtatttaatagctatcactccgaaactgaaatgctaagatatttaaagagattagaggaaaaagatattgcacttaataggtcaatgatagcattaggctcgtgcacaatgaaattaaatgctgtagcagagatgataccaattacatggcgtgaattttcagagcctcatccttttgcacccattgaacaaatggaaggttttagaactctttttactgatctaaaaaattggcttagatctatcacaggtttttcaggtgtatcactacaaccaaatgctggtgctcaaggtgaatatgcaggactgatggttatacggaaatatcatcttgaaaggggagagtctaatagaaatgtttgtttaattcctagctctgctcacgggaccaatccagcaagtgcacaaatggttggaatgaaagtggtagtggttaactgtgataaacaaggaaatgtagattttgaagatctaaataaaaaagtagaagcgcattctgagaatttaggtgcgttaatggtaacatacccatctacacatggagtttttgaggaaaaaatatcagatatatgtgagctagtacataaacatggtggccaagtttatatggatggtgcaaacttgaatgctcttgttgggatagcaaaacctggaaattttggtccggatgtatgtcatataaatctacataaaactttttgtattccacatggaggtggtggaccaggtatgggcccaatagcatgtaagagacatttagagatatatttgccctcacatcctgttataaaagattgtggccctgcaaccggtataggtcctgtctctgcagcgccatggggaagttcaagtattttatctatatcttggatgtacattaaaatgatgggttctgaaggtttaaaattagcaactcagattgcaattttaaatgctaactatgttgcacataaattaaaaaatcattttccaattctttataaaggaacaaatggaaacgtagctcatgagtgtattatagacattagatcaattaaaaatgataccggcgtaacagaggaagatattgcaaaaagattaatcgattttggttttcatgccccaactatgtcttggccagtgcctggcacaatgatgattgaacctacagaaagtgaaagtttacaagaacttgatagattttgtgattgcttgataaaaattaaagaggaaatagacaaaatcaaaagtggtgatttcgataaaaatgacaatcctatcaaaaatgctccacacacagatttagaacttgcctcaaataaatgggaacataaatattcgagggaggaggccgcttacccttctaactttttgagatctagtaaatttttggccacctgtcgcaagagtcgataat

SEQ ID NO: 220357 - DNA, 1628 bp, Unknown
  Bacterial polypeptide expressing nucleotide sequence isolated from the Sargasso Sea
aatgcttgccgtttcatttgatgagagaaaaaatgtatatagagtaaatcaactgttaaaaatttttaatgcagcagagtcaatcaaaaaagaagatccatcagttagtttacccaatcttccaaaaaacttatcaagaacttcaaaatatttagaacatccagttttcaactcatatcattctgagactgaaatgcttagatatttaaaaagattagaagataaagatatagcattgaatagaacaatgattgcacttggctcatgtacaatgaagttaaatgctgctgctgaaatgatcccaatttcttggaaagaatttgcagaacctcatccgtttgttccaattgaacaaatggaagggtttagagacctatttactgatctaaaaaattggttacgttctataactggtttttcaggtgtttccctacaacctaacgcaggtgctcagggtgaatatgcaggattaatggttatccgaaagtatcatttagatagaggtgaggctaatcgtaatatttgtttaattccaagttcagcacatggcactaatccagcaagtgcacaaatggttggaatgaaagtagttgttgttaattgcgataaagagggaaatgttgattttgatgatttgaagaaaaaagcagagcaacactctgaaaatcttggagcattaatggttacttatccgtctacccatggagtatttgaggaaaaaataactgacatatgtgagttagttcataaacatggtggccaggtctacatggatggggcaaatttaaacgcccttgtaggagttgcaaaacctggaaattttggtccagacgtttgccatattaatttgcataaaacattttgtattcctcatggtggaggtgggcctggaatgggacccattgcatgtaaaaaacatttacaaatttatctacctaatcatccagtaataaaagattgtggaccaacaacaggaattggagcagtttcagcagctccttggggcagttcaagtattctatcaatctcttggatgtacattaaaatgatgggatccgcaggattaaagcttgcttctcaagttgcaatattaaacgctaattatatagctcatagactaaaagatcactttcctattttgtataaagggtcaaacggtaatgttgcacacgaatgtattattgacattagaagtattaaatcagaaacaggagtaacggaggaagatatcgcaaaaagattaatagattttggatttcatgcaccaacaatgtcatggcctgtggcaggtactatgatgatagagccaactgaaagtgaaggcttgtcagaacttgatagattttgcgatacattaattaagattaaacaagaaattgaaaaaattaaatcaggtgaatttgacaaaatagataatccaataaaaaatgcaccacatactgatactgaacttgcatctgataattgggatcataaatattctagagagcaagctgcttacccagcaaaatttttaaaagcaaataaattttggcctccagtagcaagagttgataatgtatatggagataaaaatatcttttgtacttgtcctagtatggatgaattcaaagaagatgcagcataac

SEQ ID NO: 220358 - DNA, 1822 bp, Unknown
  Bacterial polypeptide expressing nucleotide sequence isolated from the Sargasso Sea
tatgacttcaaaggatactttttctcaatcactccacgaacttgaacaacgtgagatgtttcaacgtcgtcacatcgggccgtcttcatctgagcaggacaaaatgctcaaaactctgaatcttgactctcttgagtcattgatcgatgaggcagtcccgctgtcgatacggatgaatcaggatttggaactccctgaatcgaggacggaagttgatgttctacaggaactgaaatcgattgcttcggaaaataaaatctcccgttccttcatcgggatgggttactacgacaccatcacaccgaatgtgatcctcaggaaccttctcgaaaatccaggctggtatacagcctacaccccttatcaggcagaagtttctcagggaagacttgaagcattgttaaattatcaacaaatggtgatggacctcacagggatggatatcgccaacgcatccctgcttgatgaagcaacggctgcagcggaagcaatggcctttagcagaaggatctcaaggatcaaaagcatgaagttttttgcgtccgaagattgtcatccccaaacccttgatgttctgaaaacccgtgcagaaccgatgggaatcgaacttgttttgggaacaccagaagataacctgggaactgaattttttggggttttgcttcagtacccttctaccacaggcgtcattcatgatattggaaagtggattgagcaatggcatcaaaacgacaccatggtttctgtggcaaccgatctgttaagtttggttttactcaaaccacccggggagttgggggctgatgttgtcattgggaactcccaaagatttggggtgccaatgggattcggaggacctcatgccgctttttttgcaacccatgaccgccacaaacgttccatgccgggcaggctgattggagtttcggtggatgggcgtggaagacgggctttgagaatggcccttcaaaccagagaacaacacatccgccgggaaaaagcgaccagcaacatctgtactgctcaggtgctacttgcagtcattgcaggatgctatgcggtttatcatggaccagatggactcaaattgattgccagaagagttcacagaatgacgatgttgtttgcaaaatcgttaaacaaaatcggaatccgttgcagtgaacatttttttgataccctccatattgatgcgggaaatgaaagggatcaaatctacgagagtgccctgcagcagggggtgaattttcgaaaaatcggttccaaccatttgggtgtttcgctggatgagaccacaactcttgatgatttggagcagctggttggagtattccaaaattcgaatgaaaatacttctgaaaccattgatctagagacatgggatcaagaattgtcatccagtggagaaagtgcgattccgagcaatctcagaagaacatccgaattccttactcatccagtttttgaacgttaccattcagaaacttccatgatgcgttatctgaagcatttggaagacaaggatattgcactcaatcgttccatgattcctctgggttcatgtacgatgaaactgaattcggcagtcgaaatgataccggttacctggcaggaattcggcggaatccatccatttgctcctgctgagcaaacacagggttaccaaaaaatgattaaagaacttgaggatcaattaatccgaatcaccggatttgatgctatatcaatgcagcccaattcgggtgctcaaggggagtacacaggtttgctgttgattcatcggtaccagatccatcgaggcgaaggccaaagaaacatctgc

SEQ ID NO: 220359 - DNA, 865 bp, Unknown
  Bacterial polypeptide expressing nucleotide sequence isolated from the Sargasso Sea
atgttacataattcacaaaaagactttattcgaagacacataggtccttcaaataatgagcaacaaaaaatgcttaaagaacttaattttaagtcattggatgatctaataaatagtactgttccagataaaatacagttcaaaggtgaactaaatattggagagccgaattcagaatacgaagcgcttagaaaattaaaatcaatttcaaaaaaaaaccaaatttactccaattttattggcatgggttattatggaacttatacaccgtatgttattttaagaaatatattggaaaatcctggttggtatacatcatacaccccttaccagcctgaggtggctcaaggaagattagaaatgctattaaactttcaacaaatgattgttgattttacaggaatggatattgcaaacgcatctttgcttgacgaaggaacggcagcagcagaggctatgggtctaagtcatagacttaacaaaagtgatagtaacttggtttttgtctcagagaattgtcacccacaaactatcgaagttatacaaactagagcagaacctatgggattaaaagttcttgttggaaatgaggacaaagttttggatcagttaaaagaggatattgtttgtggtattttacaatacccaggaactctaggtgacattaaagatccaagtgaacatataagtaaaatccataaaaaaaatggtaaagcgatcttggcttgtgatttattagcacttgctaaattaaaaacaccaggagaacttggtgcagatatagctgtcggtagctctcagagatttggtattccaatggggttatggagggcctcatgcagctttttttgcaacaaaagatgaa

SEQ ID NO: 220360 - DNA, 1126 bp, Unknown
  Bacterial polypeptide expressing nucleotide sequence isolated from the Sargasso Sea
aatggtaattaaatcttatttagataaaaaaggtgatagtcacagaaacatatgtctaattccatcttctgctcatggaactaatcctgcatcagcaattatggctggattagaagtagtagttattaatactgatgagagaggaaatattgatattgaagatcttaaaactaaagtaaacgaacataaagataaccttgctgcattaatgattacttacccatctactcatggagtatttgaatctgagattcaatcaattaatgacttgattcatcaaaatggtggtcaggtatacatggatggtgccaatatgaacgcacaggttggattgactagtccaaaaataattggcgctgatgtttgtcatttgaatcttcataaaactttctctattcctcatgggggtggtggtccaggtgttggaccaatttgtgtagcagaacatcttaaagaattccttccatctaatccattaattaagacaggtggagatgattcacttgaagcaatttcatctgcaccctggggatctgcacttgtttgccttatatcatacggatatataaggatgttaggtagaaatggtattaaaaaatctacagaaattgcaattgtaaatgcaaactatttgaagactaaactcgagaaaaattataaaatactttacagtggagaaaatggaagatcagcacatgaatttattatagattgtagagatttcaaaaaatataatattgaagttgtagatattgccaaaagactaatagattatggatttcatgctccaacagtttcatttcctgttcccggcactatgatgattgaacctactgaaagtgaaaatttaaatgaattagataaattttgtgaagctcttaattcaatttatactgagattatttctgatgatgattccaaaagggagatgctcaggaattctccccatacattaaagatgttgacatcgactgactggccatatagttatagtagagaagacgcctcattccctaaaagctatttaaaaactaataaattttggccatcagttagaagagtagatgaagcttatggtgacaggaatttaatttgtagctgccctcctatagagacttatcaataa

SEQ ID NO: 220361 - DNA, 1441 bp, Unknown
  Bacterial polypeptide expressing nucleotide sequence isolated from the Sargasso Sea
attgcaataccctggaacattaggagatataaaagatcctagtgaaccaattagtaaaattcataaaaaaaatggtaaagcaatattagcttgtgatttattggcacttgctaaattaaaaacaccaagagaactaggagcagatattgctgtaggaaattctcaaagatttggaattccaatgggttatggtggacctcatgcagctttctttgcaactaaagacgaatataaaagatctatgcctggaagaatagtaggggtctctgttgatagacatggaaacaaagcttacagattatcgttacaaacaagagaacagcatatcagaagagataaggctacaagtaatatttgtacagcccaagctttgttagcaattgtttcagctgcatatgccatttaccacggaccagatggaataaaaactattgcagaaagagtttctcaattagctaaaaattttgcagataaattgaaacaatctggatatgaaatttattcagatcatttctttgatacagttacaattgtaacaaaagataaaactgatcaaatctataaaaatgctttggatcaaaaggtaaacattagaagagtaaattctgaaatgttggcagtttcttttgatgaaaagaaaaatgtttatagagtaaatcaattgttgaaaatttttaatgcagctgagtcaattaaaaaagaagacccaacagtaagtttacctaatttaccaaaaaatttattaagaacttcaaaatatttagaacatcctgtttttaattcatatcactcagaaactgagatgcttagatatttaaaaaagttagaagataaagatatagctttaaatagaactatgattgcacttggttcatgtactatgaaattaaacgctactgcagaaatgatacctatttcgtggagagaattagcagagcctcatccatttgtacctattgagcagatggaaggatatagagatttattcactgatcttaaaaattggctaagatcaattacaggtttttctggtgtttcgcttcaaccaaatgcaggcgcccaaggtgaatatgcaggattaatggttattagaaaatatcatttagatagaggagaagaaaatagaaacatatgtttaatacctagctcagcacatggaactaatcctgctagcgcacaaatggtaggaatgaaagttgtcgttgttgattgtgacaaagaaggaaatgttgattttgaggatttaaagaaaaaagcagaaatgcattctgaaaatcttggagcattaatggtcacttatccgtctactcatggagtatttgaggaaaaaattacagatatatgtgagttaattcataaatacggtggtcaagtttatatggatggtgcaaatttaaatgcgcttgttggtatagcaagacctggaaattttggtccagat

SEQ ID NO: 220362 - DNA, 1129 bp, Unknown
  Bacterial polypeptide expressing nucleotide sequence isolated from the Sargasso Sea
aatgatagacgatacttcagaagaatttattaacagacatattggtccctcaaaagaggatcaattaaaaatgttagattatattggcaacaattctttaaagcagttaataaaagatactgttccagaaaatatattgctaaaaaatgaattaaatatggcccactcactttctgaaagtgaagctttaaaaaaacttaaattgattgcccaaaaaaatcaaacttatagaaattttattggtatgggttactacaattgtttcactccccatgtcatcctaagaaatttattagaaaatccgggatggtatacttcatatactccttatcagcctgaagttgctcaaggcagactagaaatgttattaaattttcaacagctggtcatggattttactggtatggatatcgcaaatgcttctttattagatgaggcaacagctgctgcagaagcggttggtttagcacaaagagtatctaaaaataactcaaaaaaagtttatgtttctgaaaaatgtaatcctcaagttattgatttgataaaaactagaatagagccctttggactagagcttctaattggcaatcaaagtgaattcattaaaaatatagatggagatttaatttgtggagttttagcttatccagatactcttggagaaatcgtagaccctagtgaagcaataagcttaataagaaaaaaaggaggaaaagctatagtagtttgcgatcttctttctttagcaaaattaaaaacacctgcagaactcggagctgatattgcagtaggtagtgctcagaggtttggagttcctatgggttatggaggacctcacgctgctttctttgccacaaaagaaaatttgaaaagatcaatgcctggaagaattataggcgtgtccgtagataaatttggtaaaaaagcttacagactttctcttcaaacaagggagcaacacatcagaagagataaggcaactagcaatatctgcacagcgcaagctttattggctatagtttctgctgcatatgcaatttatcatggtcctgctggaatcttaaatattgctagtagaacttctaaattggcaaaattatttgctaacaatataaaagaaggaggtttg

SEQ ID NO: 220363 - DNA, 1206 bp, Unknown
  Bacterial polypeptide expressing nucleotide sequence isolated from the Sargasso Sea
tatgtctgaatttcataaaaaacatattggtccttcacagagggaaattgatgaaatgttgcaatatcttggttgtagctcactcaatgatcttcttgaaaaaattgtgcctaaaaatattttagatatagatgacatgtctgttggtaacgaggtattttcagaaaatgatattttaaatcacgttaaaaagattggtagaaataacaaagttcatagatctttaattggtcaaggttattatgatacaattactcctaacgttattttaagaaatattcttgaaaatccaggatggtatacacagtatactccctatcaacctgaaatttctcaaggtagactagaagcactattaaattatcaaacgatgattacacaaatcaccgctttaccgattgctaatgcttccttattagatgaggggactgcagcaagtgaagcaatgttaatgctttatcgtaaaaataagtctgaaaagacacaatttttagttgataaagaatgttttcaacaaaccatagatgtaattatttcaagagctgaaccattaaatattgaaatcattgtaacagactttaaaaatttcgattttaccaatgcttttggatgtattgtccagtatccaaataaatatggacacattgcaatggaaaatgattacaagcgcgttgtgtctgatgctcgtaattcaaattgcaaagtcatctttgcgagtgatttgatgtgcctacagctttttgaagctcctggtaatttaggagcagatattgccgttggaaacagtcagcgttttggtgttccgcttgggtatggaggacctcatgccgcatttatgtctacaagcgaagaatttaaaagggatattcctggaagaattgttggcgtatcacaagatcgtagaggtaatcaagcttacagacttacgctacaaactagggagcagcatatccgaagagaaaaagcaacttcaaatatctgtacagctcaagtcttgcttgctatcatttcaggaatgtatgcattgtttcatggtcctgatgatttaaaaaatattgctaagagaattcatagtcatacaaaagaacttgccaataaaatttcaaaattaggtcatgagattgtaactaatgataattcattttttgatacagtagtaatacaattatcaaatatgagtattgaaagtttaaaagaaaaggcgtt

SEQ ID NO: 220364 - DNA, 1936 bp, Unknown
  Bacterial polypeptide expressing nucleotide sequence isolated from the Sargasso Sea
atggtaattgattttacaggtatggacattgcgaatgcatctcttttagatgaaggtacagcagcagccgaagctatgggtttaagttatagaatttgcaaaaaagataccaaaaaagtctttgtctcgaaaaactgtcacccacaaaccattgatgtgattaaaacaagagccgaaccattaggcttagaaataatagtaggggatgaagataaagatattaatgagaatattgtttgtggaattatacaatacccaggaactttaggagatataaaggatcccagcgaagctattagcaaaatacataaacaaaatggaaaagcagtattggtttgtgatttattagctctcgctaaaattaaaacacctgccgaattaggagccgatatagctgtgggtagcactcaacgatttggaattccaatgggttatggaggtcctcatgctgcgttttttgctactaaagatgaatacaaaagatcaatgccaggaagaatagttggtgtttcagtggataggcatggtaacaaagcttacagattggccctacaaacaagagagcaacatataagaagagataaagctacaagcaatatttgcactgcccaggctctgcttgcaatagtttcagctgcctatgctgtatatcatggcccaaaaggaattaaaaaaatagcagacactgtttcacaacttgcaaaaagttttgcagataaaataaaacaatctggctatgaactttactcagattatttttttgatactgttactgtaaaaacactagacaaaacagataaaatttataaaaacgcacttgatcaacaagtaaacataagaaaagttaattctgagatgttagctgtttcatttgatgaaagaaaaaatctttatagagctaatcaggtgttaaaaatttttaactgttcagaaacaattaaggaaacgactaaagaaatgacaagtaaaagcttatctaatctaccaaaaaatttattaagaacctcaacatatttagatcatccagtttttaacagttaccattctgaaactgcaatgcttagatatttaaaaaaattagaggactctgatattgcattgaataggtcaatgatagctttaggttcgtgtacgatgaaattaaattcagtttctgaaatgatacctgtaacatggaaagaattttcacatccacatccatattcacccattgaacaaatggatggttacagagaattattcactgatttaaaaaattggctaagaacaataacaggtttttctggcgtttctttacaaccaaatgctggagcccaaggagaatttgctggattaatggttattagaaaatttcatgaaaaaaatggtcaaaaaaaaagaaatgtttgtttaataccaagctctgcgcatggaactaatccagcaagcgctcaaatggctggcatgaaagtcgttgttgttaattgcgacgcattgggaaatgtagattatgaagatttaaagaaaaaagcagaagaacactcagaaactttgtccgcactaatggtaacttacccgtcaacccatggggtgtttgaagaaaaaatatccgatatttgtgatttagttcataaacatggtggtcaagtttatatggatggggcaaatctaaatgcattggtcggtattgcaaaaccaggaaattttggtcccgacgtttgccatattaatttacataaaacattctgtatacctcacggcggaggaggcccaggaatgggtcctattgcctgtaaaaaacatttagaaatttatttaccaagtcatccagtaattgattgtggtcctccttcaggaataggagcaatttcagcagctccatggggaagctcaagtattctctctatatcttggatgtatattaaaatgatgggatctgagggtttaaaattggcta

SEQ ID NO: 220365 - DNA, 887 bp, Unknown
  Bacterial polypeptide expressing nucleotide sequence isolated from the Sargasso Sea
aatgttaccaaattcagaaaaagattttataaaaagacacattggaccttctaaagaagaccaatcaaaaatgttaaaagaattaaattatcaatcaatagatgatttaatgaataacactgttccagaaaaaataatgtttaaaggtgagcttaatatcggagagtctaattcagaatatgaggcgttaagaaaattaagagcaatttcaaaaaaaaatcatgtttactcaaattttattggaatgggttattatggaacttatacgccatatgtaattttaagaaatattttagaaaatccaggttggtatacatcatatacaccttatcagcctgaagtagctcaaggaagacttgagatgttactaaactttcaacaaatgattgttgattttactggtatggatattgctaatgcttctttattggacgaaggtacagcagcagcagaagccatgggtcttagtcatagattaaataaaaaagatagtaatttagtttttgtatctgaggattgccatcctcaaacaataaatgtaattcaaactagagctgaaccaatgggtttaaaagttttagttgggaaagaagatgaagttttagatcaattaaaagaggatttagtttgtggaattttacaatatccaggaactttaggagatattaaagatcctagtgaagcaattagcaaaattcataaaaaaaacggtaaggctgtattagcttgtgatttattagcattagcaaaattaaaaacaccaagagaacttggtgctgatatagcagttggaagctctcagcgatttggaataccgatggggtatggaggacctcatgcagcattttttgcaactaaagacgagtataagagatcgatgcctggta

SEQ ID NO: 220366 - DNA, 1057 bp, Unknown
  Bacterial polypeptide expressing nucleotide sequence isolated from the Sargasso Sea
atgattgatcttaatagttttgcaagtagacatataggtccaagaaacgaagatattaaattaatgcttaaaagcattaattgtagttctttagatgatttaataaaaaaaactgtaccttctaatattttatctgaatcttctttaaatttaaaacctggaatgagtgaagaatttaacaaacttaatatgcaattattgtcaataaaaaataatttttctaaaacatatattggacttggatattatggaactattactccaagtgttattctacgcaatatattggaaaatccaggatggtacactgcttataccccatatcaacctgaagtttctcaaggaagattagagatgctaatgaattttcaacaaatgataatagatttaactggaatggaaattgctaatgcatctttattagatgaaagtactgcagcagctgaagctatgatgcttgcttataaaaataatggtaaaaaaaataagacattttgtattcagaatacttgtcacccacaaacaatatcagtattaaaagcaagagcagaacctttgggaatcaagattctatcatcaaccaaacctgataatgatacttttggttgtttaattcaaaatcctgatacttttggtgaaatacatgacttaaattccattattaaatcaaataaagaacaaggaattctttcagttattatttcagatttaatgagtttagttttaatgaaatctcctggtaaatttggagcagatatagttgttggtagtgcacaaagatttggtgtgcccattggttttggaggtcctcacgcagctttttttgctactaaaaatgaatttaaaagattaattcctggtagaataataggtgtgtcaattgatagaaataataaacgtgcctatagaatggcactacaaactcgagaacaacatattagaagagaaaaagctacgagtaatatttgtacagcccaagcattgttagccattatatcagctgcatatgcaatgtatcacggacctaaaagattacaatacatcgcaaacacaatac

SEQ ID NO: 220367 - DNA, 2851 bp, Unknown
  Bacterial polypeptide expressing nucleotide sequence isolated from the Sargasso Sea
cttgcgaagactaaaattattggaaaatttaaataaaataaatctcttttcaaaacgccaccttggttcgagtgaggccgatgttaattatatgcttggtgaggttggatacgactctatgagctcttttattgattcagtagttcccggatcaatcctcaaaagaaatgccgttcaaataggtgaagaaaggactgaagaaggagttttggaagaattgaaagaaatagcttctaaaaataaggtattcaaaagttttattggtcagggtcattatgataatttcacaccatctgtaatccttagaaatgtttttgaaaatcctgggtggtacacctcttatacaccctatcaacctgaaatatctcaaggaagattagaagctttaattaactttcaaacaatggttagtgatcttaccgctatggaattatctaatgcttctttacttgatgaagcaactgcagccgctgaagcgatgacattagctaagcgctcatctaaatcaaagtctgattctttttttgtggatgagaatagttttcaaaatacaataaatgttcttaaaactcgagcagagcctttgggaataaagcttatatttggaaatcctattgaccttccaaaccatgaggtttttggtgcatttcttcagtatccaggttcaaatggaaaaattactgatatgagccaacatattaaatcatgccatgaccaatctgctttagccgttataggttctgatcttttggcattaacaattcttaaaccccctggtgaaatgggggcagatattgtcatcgggtcctctcaaagatttggcgtacctttagggtgcggaggacctcatgcagcttttatggcagttagcgacaaattgaaaagatctatgccaggcagaatagttggagcatcagtagattctaatggagatgttgcctatagattagctctccaaacaagagaacaacatataagacgagaaaaggctacaagtaatatttgcactgctcaggcattgttggccattatggcgagtttttattcgatctatcatggcaaagagggattgattgagatagcaaataaggttaactacctcacttctttgttaaaaaagaatttcgaagttaatggtatagattgtcttgaagataacttcttcgataccttaataattagatccggccaacaaacaaaagagatacataaacgctctctgagcaagaatataaatcttagaagaatagatgaagaacatataggtatctcattagacgagaccacttccatgaaggatatagaaaatatcttggaaatattcacaaatcaaaaaatagattctaatttgaattttgaatcttcaattccaaaaaagctgaaaagaacttcttccttcctagatcatgaggtttttaaaagatacaggacagaaacagagctcgtaagatacattagaaaattaagtgacaaagatatagcactcgatcgagctatgatccctcttggatcttgcacaatgaaactaaatgccacttcagaaatgattccggtgagttggcctgagttttcgaaaattcatcctttcgctcctaaagatcagctccaagggtataaagagctaattgaggatatggaaaagatgcttgttgaccttactggatattctaagatttctttacaacctaatgccggatcacagggagaatatgctggtcttttagcgatagatgcatttcataaaaaaaataatgaatctcatagaaatatttgcttaatacctaagtctgctcatggtactaatcctgcatcagctcaaatggtaggccttgaagtcgtaccggtcgagtgcgatgaagatggaaatatcgatattgatgacttaaaacaaaaagcagagattcatgaggaaaatctttcctctctaatgataacgtatccttcaacacatggcgtttttgaaacgaatgtcagtgaggtttgtgatgttattcattcaaaaggtgcctttgtctatattgatggagcaaactttaatgcaatggttggaatttgctatccgggatcctttggcggagatgtttcgcacctgaatctgcataaaaccttttgcattccgcacggaggcggaggtccaggtatcggaccaattggtgttgtcgaaaagctaagtgattttgtcccttcacatcatgataaaagtgacccagctgtgggacctgtctctggcactgactggggaagcgcaagtatactgccaatcagttggatgtatatgaagatgatgggttctgaaggattgactcaagcaactcaactggccattttaaatacaaattacatagctaataggcttaaagatcattataagatcttatacaaaggttctaatgatttagtagctcatgaatgtattattgatgttcgtccattaaaggaaacagcagaagttgaagtagaggacattgctaaaagattaatcgattatggattccatgcaccaacgatgtcctggcctgtagcgggcaccttaatgattgaaccaacagaaagtgaatctctgagtgagatagatagattctgtgacgcaatgatttcaatcagaaatgagataaaagaaattgaggaaggaaaagtttctaatcaagataatctattaaagaactcccctcactgtgcaaaaactcttttacaacatgaatgggatcatccctatacaagagctgcagctgcgttacctgcgaagggtttacatgaaaataaatactggccacctgtaggaagagttgataatgtttatggagatagaaatttgatatgtagttgtccttctatggaagactacgagtag

SEQ ID NO: 220368 - DNA, 723 bp, Unknown
  Bacterial polypeptide expressing nucleotide sequence isolated from the Sargasso Sea
taaaaaaacatttagcagattttgctcctgggcatcccatgtttaaaaatgaaattggtttaactacccaagaggcagtttctgcagctccttggggcagcgcatctattttacccatttcatattcttatatttctatgatgggtgacgatggtttaaaattagcgactcaagtagcaattttaagtgctaattatattaaagaaagattaaaaaaatattaccctattttatatactggtaagaataatatggtggcacacgaatttattattgatatcaggccatttaaacaagaactaaatatttcagacgaagatattgcaaaaagattaattgattatggatttcatgcacctacaatgtcctttccggttcccggtactcttatgattgagcctactgaaagtgaatcaaaagaggaactagatagattctgtgaagcaatgatttctattcacaatgaaatcactatgattagagacggtaaatttgataaagtagacaatccgataaaaaatgccccacataccattgaagaagtatcttctgacaattgggaacataaatattcacgtaaagatgctgcctatccacatgcttatttaataaataataaatactggagtccagtcagtagaattgataatgtatacggtgatagaaatttattttgtgtttgtcctccgatcgatgaatatgaagaggcaaaaacaggataat

SEQ ID NO: 220369 - DNA, 979 bp, Unknown
  Bacterial polypeptide expressing nucleotide sequence isolated from the Sargasso Sea
atgattgaagatacttctaaagaatttattcaaagacatattggaccaacaagtcatgaagaaaatactatggtcaaaaaagtcggcgctcaatctcttgaggacttaatagaaaaaactgttcctcaaaaaatacttataaaagataacttgaaaattgatgaaccaatgtcagaaaatgatgctttaaagaaattaaaattactttctaagagaaacgaaatttatcgaaattttattggaatgggttattacaatacaattactcctaacgtaatactaagaaatatattagaaaatcctggttggtatacttcttacacgccctatcagccagaagtagcacaaggtcgattagaaatgctattaaacttccaacaagtcattatggatttgaccggaatggatatcgcaaatgcttcattattggatgaagggacggctgctgcagaagcagtaggtctttgtcaaagactagacaaaggtgattcaaaaaaaatatttgtatcaagttcttgtaacccacaaacaatagatattatcaaaacaagagttgagcctttcgggatagaaattatcgttggtagtgaagataaagaactaaataaaatcaaagataaaataatttgtggggttttagcttacccaggaactttaggagacataaaagatccaagcgaggccataagtttaattcataaaagagagggcaaggcaataatggtttgtgatcttttatcgctagcaagacttaaaactccggcagaacttggcgcagatattgcggttggtagtgctcaaagatttggtattcctatgggatatggtggcccgcatgcagctttttttgcaacaaaagaggaatttaaaagatctatgccaggtagaataattggtgtctcagttgatagacatggaaaaaaggcttatagattatcacttcaaacaagggaacaacacataagaagagataaagcga

SEQ ID NO: 220370 - DNA, 892 bp, Unknown
  Bacterial polypeptide expressing nucleotide sequence isolated from the Sargasso Sea
aatgttaaaaaatgctcaaaaagattttattcgaagacatataggcccttctgaaaaagaacaagctaagatgcttcaagatctaggatataaaaacttagatgagcttatagaaaaaactgtgcctgaaaaaattcttttaaaagatagtttggaaattggagatcctaattcagaatacaaagcgctcagaaaactaaaaaatatttcaaaaaagaataaaattttttcaagttttatagggatgggatattatggaacaaatacaccttatgtaatcttaagaaatatattagagaatccaggctggtatacttcgtatacaccctaccaacctgaagttgctcaaggaagacttgaaatgttgctaaattttcaacagatgattattgattttacaggtatggatatagcaaatgcttctcttttagatgaaggtactgcagctgcagaagcgatgggactgagttatagagtttcaaaaacagatactaaaaaggtatttgtttcaaaaaattgtcatccacaaactatagatgttattaaaactagagctgaaccgttaggattagaaatattggttggagatgaagataaagatataaatgaaaatattatttgtggaattattcaatatcctggaactttaggtgatataaaagatcctagtgaagctattagtaaaattcataaaaataatggtaaagcagttttagcatgtgatttacttgctttagcaaaacttaaaacacctgctgaactaggagccgatatagctgtaggaagttctcaaagatttggaattccaatgggttatggaggtcctcatgcagcattttttgctacaaaagatgaatataaaagatcgatgcctggaagaatagttggtgtt

SEQ ID NO: 220371 - DNA, 1117 bp, Unknown
  Bacterial polypeptide expressing nucleotide sequence isolated from the Sargasso Sea
aatgatagacgatacttcacaagaatttattaatagacatattggtccttcaaaagaagatcaagaaaaaattttagattatattggcagtaaatctttagatgaattaattcaaaatactgttccagaaaatattttacttaaaaatgaactaaaaattggtcattctctttctgaaagtgaagcgttgaaaaaacttaaaattatttctcaaaaaaatgaaactttcaggaattttatcggtatgggatattataattgttttactccaaatgttgttgtgagaaatattttagaaaatccaggttggtatacctcttacacgccttatcaaccagaagttgctcaaggaagattggaaatgcttctaaattttcaacaactaataattgattttacaggaatggatatcgctaatgcctccttattggatgaagctacagctgctgctgaggcggttggtcttgcacaaagagtttcaaaaaataattcaagaaaagtttatgtatctgaaacttgtaatcctcaggttattgatttaattaagactagaattgaaccttttggtttagaacttttaattggtaatcaaaaagattatataaaaaatttaaatgaagaattgatatgtggagttctagcatatcctgatacttttggtgaaatagtagatccaagtgaatcaataagtcttataagaaaaaaaggcggaaaagctattatagtttgtgatcttctttctttagcaaaattaaaaacgccagcagaattgggagcagatattgcagttggtagcgcacaaagatttggagttccgatgggttacggtggaccgcacgcagctttttttgctacaaaagaggagtttaaaagatcaattccagggagaataatcggagtatctgtagataaatttcgtaaaaaagcatacaggttatctcttcaaacacgggagcaacatatcagaagagataaagccacaagtaatatctgtacagctcaagctcttttagcaatagtatctgcagcatacgcgatttatcatggaccaaaaggaattttagatattgcaaatagaacatccaaattggctaaactgtttgcagaaaatataaga

SEQ ID NO: 220372 - DNA, 2657 bp, Unknown
  Bacterial polypeptide expressing nucleotide sequence isolated from the Sargasso Sea
tttggataaatacgtgaaagacagatcaaaagatttttcaactagacatattggaatcaaagatagtgaagcaaaacaaatgcttcaggatcttggttataacgatatggataagtttctgaaagatttaatgcctgaatcaatctttgatcttaatgctctaaagttgcctgaacctcttgatgaagcttcagccttaaaaaatttaaaagcaatatcaaaaaaaaataaagtttataaatcatttatagggcagggattttatggttgtaatgtgccaaccgttatcaaaagaaatgtctttgaaaacccaggctggtacacatcctatacgccttatcaacctgagatcgctcagggtcgtttagaagctctaatgaactaccaaactatggttgctgatttaacaggcatggatatttcaaatgcctccttactggatgaaccaaccgctgccgctgaagcaatgatgttggcgaacagagtggctaaatctaaatcaaatgtatttttcattcacgagaatagctttcctcaatcgattgccattatgaagtctcgagcaaaacctctaggcattgaaattgaagttggtaaagaaatggattctaaaaaagaatattttggttgttacgttcaatatcctggtgatgatggatcaataatagatttctctcctgtttcagaatcaattcatgcacatggtggtttgctcgtagttggttctgatttattggccttaactcttttaaaacctccgagtgagtttggcgctgacatagtggttggctcttcgcaaaggtttggtgtgccaatgggttttggtggacctcacgcaggctttatagcagtaaaagatagtcataaaagatcacttccgggaaggttaattggtttaagtaaagatcagcaagatagaccttgttatagattggctctacagacaagagaacaacatataagaagggagaaggctacgagcaatatatgcacagcacaggcattgctggctattatgtcaggcttctatgccatatatcatggacctgaaggcctaaaagaaattgcaactagaataaatggtttaactaaagacctagccaacaaactaattgataaaggtttagaaattaaatctgaaactttctttgacactttggtagttaaagttaaggacgctaaaaaaatacatgaaaaagccaatgcaaatggtatgaatcttcgtgatatttctaatgactctgttggaattagtctagatgaaactagcgctcaagatgatgtcaaagccatcattcaaatatttgacgatgaacagaataagaacagcaagatcgaacagagttggagcaaagaatttaatagagcaacagattttttaactcatgaagtatttaattctcatcattctgagactcaaatattgcgctacattagaagtctggctgacaaggatatagccttagatagatgtatgattcctcttggatcatgcaccatgaaattaaatgcaacaactgagatgataccagtaggctggaatggttttgccaacatgcatccacatgcaccagaggatcaggctcaaggctatctcgacataataaatgatttagagaattggcttactcaaataaccggttataaagctatctctctacaacctaatgctggttctcagggtgaatatgctggcttattagcaattgatggttatcacaaagccaacaaggatctttctagaaacatttgtctcattccagaatcagcgcatggaactaatcctgcttcagcacaaatggttggatatgaagttgtggttatcgattgtgatgaaaatggagacattgatatgaaggatctaaaggaaaaggctgatcttcataataaaaatattgcagcaatgatgattacttatccttcaactcatggggtctttgaagagaaagtaaaagaggtctgtgaactaatacatagtcatggtggtttcatttacatcgatggagcaaattttaatgccatggtaggaatgtgttatccaggtcaatttggtggagatgtatcgcatctaaatctgcacaaaacattttgtatacctcacggaggaggaggtcctggagtaggtccaattggtgtagtcaaagaattggttccttacttaccagctgatccacttactcaaaaagattcagaatattcaatatctggatctaagttcggtagcgctagtattctgccaataagttggatgtatataagaatgatgggagaagagtcgctgagaagggcaacccaaattgctatcctaaacaccaactacatagccaataaacttaaagatgattatgacgtgctttataaaggtaaaaatggactagttgctcatgaatgtattcttgatgtaagaccatttaaagaatcctgtggaattgaggcagaagatattgcaaaaagacttatagattatggttttcatgctccgacaatgtcatggccggttgctggaacattaatgattgaacctacagaaagtgaatcattggatgaattagaccgcttttgtaaagctatgataggtataagagatgaaattagagccattgaagagggtaaatcgtctcaagatgataatttacttaaaaatgcccctcatagcg

SEQ ID NO: 220373 - DNA, 1051 bp, Unknown
  Bacterial polypeptide expressing nucleotide sequence isolated from the Sargasso Sea
aaaaaaaatagaaacgtgtgtttaataccagagtcagcacacggtacaaatcctgcaagtgcacaaatgtgcgggatgaaagtagtagttattaattgtgatgatgaaggtaatgttgatctaatagatttaaaagaaaaagttaataagtattcaaaagatctagctgctttgatggtaacttatccatcaacacatggagttttcgaggaaaaaattagtgaaatttgtgaaattgtacacaaagcaggtggtcaagtttacatggatggtgccaatctaaacgcattagttgggattgcaaaacctggaaaatttggaccagatgtttgtcatattaacttgcataaaactttttgtattcctcacggaggaggaggtccgggtatgggaccgatcgcttgtgctaaacatttaaaagattttttgccaaaccacaatattactaaaaatacgagatctcagaaaagtttaggctccgtatctgctgctccttggggtagtgcaagcatattacctatttcatggatgtatattaaaatgatgggggcagaaggtttaaggaaagcttcagaagtagcaattttaaatgcaaattatatatcaaaaaaattatctaatcactacaaagtactttacaaaggcaaaaatggaaatgttgctcatgaatgtataatcgatcttaggccaataaaatctaaatcaggaatttcagaagaagatatcgctaaaagattaatcgattatggatatcacgcaccaacaatgtcatggccagttgctggaacattaatgattgaacccacagagagcgaaaatttagcagagataaatcgtttttgtaatgcattgatatctattaaaaaagaaatcgataaagtagataatggtagttttgataggaaagataatcctttaaaaaatgctccccatacttatattgaattaagtgcaaatgaatggaaacacttatacaaaagagaagaagccgcttttcctaatgataatataaaagataataagtattggcctcccagttgcaaggagtaga

SEQ ID NO: 220374 - DNA, 877 bp, Unknown
  Bacterial polypeptide expressing nucleotide sequence isolated from the Sargasso Sea
catggaggtcaaagtttatatggatgtgcaaaatctaaatgcactggtaggaatgcaaaaacctggaaattttggtccagatgtttgtcatataaacttacataaaacattttgtattcctcatggtggtggaggaccaggtatgggaccaattgcttgcaaaaaacatttacaagtttatctgcctaaccatccagtagtaaaagattgtggtcctgcaactggtataggtgcagtttcagcagcaccttgggggagctcaagtattttatctatttcatggatgtatataaaaatgatgggatcacagggtttaaaattagctacagaagtcgcaatattaaacgccaactatatagctcatagattaaaaaaccattttccaatcttgtataaagggactaatggaaatgttgctcacgaatgtattattgatattagatcaattaaaaatgaaacaggcgtaacggaagaagacatagcgaaaagattaatagactatggatttcatgcgccaacaatgtcatggcctgttgctggtacaatgatgattgaaccaacagagagtgaaagtttacccgaaatagatagattttgtgacactttaataaatattaaattggaaatagaaatgattaagtctggtaaatttgataaagtagataatccaattaaaaatgcaccccatactgatattgaactttcttcagataaatgggaccacaaatattctagacagcaagcagcgtatcctgcaaaattcttgaaaacaaataaattttggcctccagttgcaagagtagataatgtctacggagataaaaatattttttgtacttgtccaagtatggacgagtttaaagaagatgcagcataa

SEQ ID NO: 220375 - DNA, 1003 bp, Unknown
  Bacterial polypeptide expressing nucleotide sequence isolated from the Sargasso Sea
atgttacataattcacaaaaagattttttgagaagacatatcggtccgtctgaggaagatcaaaaaaaaatgctcagtgaacttaaatatagttctttagatgaccttataaaaaatactgttccagaaaaaatacagtttaaaggtgaactaaatattggtgagtctaattcagaatatgaagcgctaagaaacttaaaagtgatttcaaaaaaaaatcagatttactctaattttattggaatgggatactacggaacttatactccatatgtaattttacgaaatatattagaaaatcctggttggtatacttcgtacacaccttatcagcctgaagtagctcaaggtaggttagaaatgttacttaacttccaacagatgattgtcgattttactggtatggacattgctaatgcatctttacttgatgaaagtacagctgctgctgaagccgtgggtttgagttacaggttaaataaaagtgattgcaaactagtatttgtatcagaaaactgtcatccacaaacaattgatctcataaaaactagggcagaacctatggggctaaaagttcttgtcgggaatgaagataaagttttagagaatttaaaagaagatgttatatgtggaattttacaatatcctggaaccttaggtgacattaaagatccaagtgaatcaataagtaaaatccataaaaagaatggtaaagcgatacttgcatgcgatttactttcacttgctaaattgaaaacaccaagagaactaggtgctgatatagccgtgggtagttctcaacggtttggaattccgatgggttatggtggtcctcacgcagcattttttgcaacaaaagatgaatataaaagatctttaccaggtagattagtaggagtttcagtggatagacacggaaataaagcatatagattatcattacaaactagagagcagcacataagaagagataaagctacaagtaacattttacagctcaagc

SEQ ID NO: 220376 - DNA, 1258 bp, Unknown
  Bacterial polypeptide expressing nucleotide sequence isolated from the Sargasso Sea
accagaggatcaagctcaaggctatctagaaataataaatgatttagagaattggcttactcaaataaccggttataaagctatctctctacaacctaatgctggttctcaaggtgagtatgctggcttattagcaattgatggttatcacaaagctaacaaggatctttctagaaacatttgtctcattccagaatcagcgcatggaactaatcctgcttcagcacaaatggttggatatgaagttgtggttattgattgtgatgaaaatggagacatagatatgaaggatctaaaggaaaaggccgatcttcataataagaatatagctgcaatgatgattacttatccttcaactcatggtgtctttgaagagaaagtaaaagaagtttgtgagctaatacatggtcatggaggtttcatttacatcgatggcgctaattttaatgccatggtaggaatgtgttatccaggtcaatttggcggagatgtatcgcatctaaatctgcataaaacattttgtatccctcacggaggaggaggtcctggagtaggcccaattggcgtagtcaaagaattggtcccttacttaccagctgatccacttactcaaaaagattcagagtattcaatatctggatctaagttcggtagtgctagcattcttccaataagttggatgtatataaaaatgatgggggaagagtcgctgagaagggcaacccaaattgctatcctaaataccaactacattgccaataaacttaaagatcattatgacgtgctttataaaggtaaaaatgggctagttgctcatgaatgcattcttgatgtgagaccatttaaagaatcctgtggaattgaggcagaagatattgcaaaaagacttatagattatggttttcatgctccgacaatgtcatggccggttgctggaacattgatgattgagcctacagaaagcgaatcattggatgaattagaccgcttttgtgaagctatgataggcataagagaggaaattagagctattgaagagggtaaatcgtctcaagatgataatttacttaaaaatgctccacacagcgttgatactcttatagaagactggaaatacccatattctagaaaagaggcctattatcccaatgaacaaactaaacaacaaaagtactggcctcccgtcggaagagtcgataatgcctatggtgaccgtaatttagtctgcacttgtccagacattaaagaccttaaataa

SEQ ID NO: 220377 - DNA, 984 bp, Unknown
  Bacterial polypeptide expressing nucleotide sequence isolated from the Sargasso Sea
aagtagaacaacattcagaaaaccttggagcattaatggtaacttatccatctacccatggagtatttgaagaaaaaataattgatatttgtgatttagttcataagcatggtggccaggtctacatggatggtgcgaatttaaacgcattagtcggagttgcaaagcccggaaattttggtccagacgtttgtcatattaatttgcataaaacattttgcattccccatggtggtggaggacctggaatgggccccattgcttgtaaaaaacatttacaagtttatctacctaatcatccagtaataaaagattgtggaccatcaactggaattggagctgtgtcagcagctccctggggcagttcaagtattctatcaatctcttggatgtacattaaaatgatgggatcggcgggattaaagtatgctactcaagttgcaatattaaatgcaaattatattgctcacagactaaaagatcactttccgattttgtacaaagggtcgaatggcaatgttgcacacgaatgtattattgatattagaagtattaaatcagagacaggagtaacagaagaagatatcgcaaaaagattaatagatttcggatttcatgcaccaactatgtcatggcctgtagccggtacaatgatgatagaaccaactgaaagtgaaggcttgtcggaaattgatagattttgtgacactttaattaagattaaacaagaaattgaaaaaattaaatcaggtgaatttgataaaatagacaatccaattaaaaatgctcctcatacagactctgaggttgcttcagataattgggaacacaaatatacgagacaggaagcagcttatccatcaaaatttttaagagcaaataaattttggccacctgttgccagagtagataatgtatatggtgataagaatattttttgtacatgcccaagcatggatgaatttaaagaagatgctgcttaat

SEQ ID NO: 220378 - DNA, 1531 bp, Unknown
  Bacterial polypeptide expressing nucleotide sequence isolated from the Sargasso Sea
ttcacaaatcaaaaaatggatctagatttaaattttgaatcttcaatcccagatgatcttaaaagaacttcttccttcttagatcatcaggtttttaaaaagtataggacagaaacagaacttgtaagatacattagaaaattaagcgacaaagatatagcactcgatcgagctatgattcctcttgggtcttgtactatgaaactaaatgctacttctgaaatgattccagtaagctggccagagttttcaaaaattcatccattcgctcctaaagatcaactccaagggtatgcagagttaatagaggatatggaaaagatgcttgttgaccttactggatattctaaaatttctttgcaacctaatgcgggatcacaaggagagtatgcaggtcttttagcgatagatgcatttcataaaaaaaataatgaatctcatagaaatatttgcttaatacctaagtctgcacatggcactaaccctgcatcagctcaaatggtaggccttgaagtcataccggttgagtgcgatgaagaaggaaatattgatattgatgatttaaaacaaaaagcagagattcatgagaaaaatctttcttctctaatgataacttatccctcaacacatggcgtttttgaaacaaatgttagtgaggtatgtgatgttattcattcaaaaggtgcctttgtctatattgatggagcaaactttaatgcaatggttggaatttgctatccgggatcctttggtggagatgtttctcacctgaatcttcataaaaccttttgcattccacatggaggcggtggcccaggtattggaccaattggtgttgtcgaaaaacttagtgattttgtcccttcacatcatgatgaaaatagcccagctgtaggaccggtctctggtacagattggggaagcgcaagtatactgccaataagttggatgtatatgaagatgatgggttcagaaggactgactcaagcaactcaactggccattctaaatacaaattacatagctaataggctaaaagatcattataaaattttatataaaggctctaatgatttagtagctcatgaatgtattattgatgttcgtccattaaaggaaacagcagaagttgaagtagaggatattgctaaaagattgattgattatggattccatgctccaacaatgtcctggcctgtagcgggcactttaatgattgaaccaacagaaagtgaatctctgagtgaaatagatagattctgtgatgcaatgatttcaattagaaatgagataaaagatatagaggacggaaaagtttctaaacaagataatctattaaaaaattctcctcattgtgcaaaaacacttatacaagaagaatggggccatccctatactagagctgaagctgccttacctgtgaagggtttacatgaaaataaatactggccacctatagggagagttgataatgtttatggagatagaaatttgatatgtagttgcccttctatggaagactatgagtagc

SEQ ID NO: 220379 - DNA, 1258 bp, Unknown
  Bacterial polypeptide expressing nucleotide sequence isolated from the Sargasso Sea
atatctgtagcattcgatgaggctaaaagacttgatcatgtaaatttgcttttaaagatattcggaataaataaagatgtgacaaaaactgtagatataaatctagataatcttccaaaaaatttgttgagaacatctaaatatctaactcatccagtttttaacaaatatcactcagaaactgaaatgatgagatatcttaaaagactagaagacagcgacatcgcattaaatagatcaatgattgcgttaggctcatgtactatgaaattaaattctacagctgaaatgatacctatttcttggaaagaattcgctcttcctcatccatttgtacccatagatcaaatgaagggatatgaaattttattcaatgatttaataaaagatctcaaagagattacaggatttgatgcagtatctttacagcctaattctggtgcacaaggtgagtatgctggcttgatgacaattagagcattccataaaaataacaaagaggcaaatagaaatgtttgtttaattcctaattccgctcacggaactaacccagctagcgcccagatgtcaggtatgaaagtagttgtagtgaattgtgatgataatggaaatatagacttagaagatttaaagaataaatctgaaaaatattcaaaagatctagcagctttaatggtgacttacccctctactcatggagtatttgaagaaaagataactgaaatttgtgaaatcatacattctaatggtggtcaagtttatatggacggtgcaaatttaaatgctcttgtaggaattgcaaaacctggaaaatttggacctgatgtatgtcacattaatttgcacaaaactttttgtattcctcatggaggaggagggccaggtatgggaccaatagcttgtgcgaagcatcttgaaaactttttaccaacacatcaacatcttaaaaatattaacccagaaaaaggaatgggttcagtttctgctgctccctggggaagtgcaagtattttagttatttcttggatgtatattaaaatgatgggatcaaaaggattaaaagatgcctcaagaatctcgattttaaatgctaattatatttcaagaaaattatctgagaaatataaaattttgtacacaggaaaaaatggcaatgtagctcatgagtgtataattgatataagacctattaaagaaaagtctggtataacagaagaggatattgcaaaacgattaattgattacgggtatcatgctc

SEQ ID NO: 220380 - DNA, 2830 bp, Unknown
  Bacterial polypeptide expressing nucleotide sequence isolated from the Sargasso Sea
gatgtttagagaaaatttttcaaaaagacatataggacctaactctttagagctaaaaaaaatcctaaaaacaattggagttaaaagcattgaacatcttttaaaagatactatccctaagtcaattataatcaacaaaaagcttgaattgcctgattcaataactgaacatgagtttcttaaagaaataaagtcattatcctctatgaataagaaattcaaaacctacataggattgggttatcatgatacctttacaccatctgtaattcaaagaaatattttagaaaatcctggatggtatactgcatatactccatatcaagcagaaattgctcaaggtagacttgaagccttattaaattttcaaacaatggtttgcgatctaacaaagatggaaattgcaaatgcttccctacttgatgaaagtacatctgcagctgaggcaatgactcttctttttaataatagaactgctgaacaaaaaaaagatgaaatagtcagcttttttatagatgataatattctaccacaaacaaaatcagttcttggaacaagagcagaacctattggaattaaattagaatttggtgatatatctaaaatacaaacaaagaaatactttggaactatagttcagtttccaggaaaacatggtgatttaaaaaactataacaatattttagagaaacttcaaaaaaatgatattaaggttgttatcgctgctgatttaatgagtctagttattatagaacctccaaaagaaaatcttgtagatgttgttgttggaactactcaaagattcggaataccattaggatatggaggaccacatgctgctttttttgcaactaaggaaaaatacaaaagaagtttaccaggaagaattattggattaactaaagatgtgaatggaaatagagcattaagaatggctttacaaacaagagaacaacatatcaaaagagatagagctacatccaacatctgtactgctcaagttcttcttgcagtaatggcaggtatgtatactgtatatcatggtccaaagggattaaaaaaaatagcctcaagtatcaataaaaaaactcaatttttatctaaaaagattagttcattaggtttaaatcaattaaataaatctttctttgatacacttctcattgaatgtgattctaaaaaaataatttcaatttttaaatctaaaaaaattaatgttttaaaagtagatagttctaaaatttctatttctattaatgaaaaaactcttgagaaagatatagaatcaattatatctgtattcgaagagtacactaataaaaaagctaagtcttttgggtttccttcaaatattaatatggataaaaaaatggttagatcttctaaattcttgactcataaagtatttaactcataccattctgaaacttcattaatgagatatataaaaaagctagaaaataaggacttatcactaacaagatcaatgatttctcttggatcatgtactatgaagttaaatgctgcaagtgaaatgattccgcttagctggacagagtggaattctattcatccctttgttccaactgaccaagcaaaaggataccataatataatttcaaaacttgaagagtatttatcagaaattacaggtttctctgctacttctcttcaaccaaattctggagctcaaggagagtatagtggtctaatggtaataaagtcctatttaaatgatataggtcaagggaatcgaaatatatgtctaataccttcatctgcacatggaacaaatcctgcttcagctgtaatggctgggtttaaagttgtagttataaaaactgataaacatgggaatatcgatcttgatgatattaaggataaaataaatgagtatgataatagcctcgctgctttaatgattacttatccttcaacacatggagtatttgaatcaaatattaaaacaataactaagctaattcataaatcaggtggacaagtttacatggatggtgcaaacatgaatgctcaagttggggttacaagtcccaatatgattggtgcagatgtttgtcacttaaatcttcataaaacatttgcaatacctcacggtggaggtggcccaggtattggacctatttgtgttgcagatcatttaaaagaatatcttccatccaatccaattataaaaactggtggaaataaagctataccagctatttcttcagcaccttggggatctgcattagcatgtttaatatcatacggatatattagaatgcttggaccaaaagggctaagggaatcaacagaaattgcaatagttaattcaaattatttaaaaacaaaattggaaaagaactttagtatattatattcaggagaaaaaggtcgatctgctcatgaattcataattgactgtagaccttttaaaaaattaaatattgaagtaaatgatattgcaaaaagattgatggattatggtttccatgctccaacagtttcttttcctgttcctggaacaataatgattgaacctacagaaagtgagaatctagatgaacttgatcgattctctgatgcaatgaattcaatatatgaagaaattacaactgatgaagtttccagagaattattgagaaatgccccacatactcttcaaatggctatttctgataaatggccatataagtattcaagagatgaggcttgttttccaaaggaataccttagagaaaataaatattggccatcagtaagaagggttgatgatgcatttggagatagaaacttgatttgtacttgcccaccattatcatcattttaa

SEQ ID NO: 220381 - DNA, 2700 bp, Unknown
  Bacterial polypeptide expressing nucleotide sequence isolated from the Sargasso Sea
tatgctggagacactaggcttatccgaccttgagagtcttattgatgaaactcttccaaaatcaatacgccagaagaatcctttaaactttggaaagccgaagtcagaaagagctcttttaaatcacatgcgcataactgcttctaaaaataaagtgctcactagtttgattggccaaggttaccatggaactgttacgccaccagtaattcaaagaaatattttagaaaacccagcatggtatacggcctacacaccctatcaacctgagataagtcaggggaggttggaagcattattaaattatcaaacaatgatatctgatcttaccggcctagaaatcgccaatgcttccctcttggacgaagctacagcttgtgctgaagcaatgacaatggctgaaagaattgccaagtcaaaagctaaagcctttttcattgatgagaattgtcatccgcaaaatattgcagtcatgaaaaccagagcgcgtcctttgggtatagaaattgttactggcgatcctgacaaacttaatccagcagacgtatttggagcaatttttcagtacccaggtacttttggtcatgtacgagattttacaagccatattgaaaaactccatgaaaacaaagctattgcagtgatcgctgccgatccgctttcacttactttactaaaagagccaggagctatgggagccgatattgcaataggtagcacccaaagatttggcgtgcccattggctatggaggccctcacgcagcttatatggcaacgaaggatgcttacaaaagatccatgcctgggcggctggttggagtttctgttgatgctcaaaataaagccgcctacaggctgtccttacaaacacgggaacagcatattagacgtgaaaaagcaacttctaatgtttgtaccgcgcaagcgcttttagcagttatggcctctttctatgccgtatttcatggtccagaaggcctgaaagccatagcacaaagaatccatagaaaaacagtaagactagcgaaaggcttagagaccgccggatttaaagttgagccagacgcattttttgacacgattactgtcgaagttggtctaatgcagaaaacagttatggatgccgctgtgcgtcaaggcattaatcttcgtgctgttggcaaaacaaaaatcggtatcaatttggatgagcgctcacgacgaaaagttacagaagcggtttggcgcgcatttggaataactcgcagtgacgatgatctctctcacgattaccgtgtacctgatagcctgcatcgtaaatcgaaatatcttgaacatgacgtatttcatatgaatcgggctgaaaccgaaatgatgcgctatatgcgcagactagcagatcgcgatttagctttagatcgagcaatgatcccgcttggctcatgtactatgaagttaaactctgctgctgaaatgatgcccgttagctggcgtgaattttcacttcttcatccttttgcaccaaaagatcaagctctagggtatgaggaaatgatttcagatctttcatcaaagctatgtgacataacaggctatgatgctatttccatgcaacctaattcgggtgcacagggtgaatatgcaggattgttaacaatagcagaataccatagagctaagggagaagagcatagaaatgtctgcttaattcctacttctgcccatggaaccaacccagcaagtgcacaaatggtcggttggaaggtaatacctgtccagtcagctgaaaacggagatattgatgtagcagattttagagaaaaggctgaactgcacaaaaatgatttagcaggatgtatgattacatatccttccactcacggcgtattcgaagagacagttcatgaagtatgcgcaattactcatgaatatggagggcaggtctatattgacggcgccaatatgaatgcgatggtcggcttaagccgacccggcgatattgggggtgatgtcagccatctaaacttacataaaacattctgtattcctcacggtggtggtggaccaggaatggggcctattggtgtgaaagcccacctgacacctcatttaccgggacacccagagcttggagatgataccgggccagtatcagccgcaccttttggttcaccctcattactacctatatcgtgggcctattgtctaatgatgggtggagaaggacttactcaagccacccgagtggcaattctaaatgcaaattacatcgctaaacgcttagagggatcatttgatgttctttatcgtggagcgaatggaagagttgctcacgaatgtattattgatacacgcccattcgccgaaacagccggtgtaagtgtggacgatatagcaaagcgtctcattgatagtggtttccatgctccgacaatgagttggccagtcgcagggactttaatgattgagccaaccgagtcagagactaaagcagaattagaccgtttctgtgatgctatgctatctatccgagaagagattaggcttatcgaagatggtaaatatcctaaggacaataatccgcttagtaatgcaccgcacactgtacaagaccttgttggtagctgggagcgaccttattcgcgggaacaggggtgtttccctccaggggcttttaaagttgataaatattggccgccagtgaacagaattgataacgt

SEQ ID NO: 220382 - DNA, 1180 bp, Unknown
  Bacterial polypeptide expressing nucleotide sequence isolated from the Sargasso Sea
aaaaaactatcatctttaaatcagaaatttaaaacatatattggacttggttatcacgacacatttacaccctcagtaattcaaagaaatattttagagaacccaggttggtataccgcctacactccatatcaaccagagattgctcaagggaggctagaggctctgttaaacttccaaacaatgatttgtgatataaccaaaatggagatagctaatgcatcacttttagatgaaggaactgcagctgctgaagcaatgattatgatgtataataatagatcaagagaacaaaaactaacaaatcaaaataaattttatgttgactcaaatatttttccgcaaaccttagctgttctttcaacaagagctaacccactcgatattgaattagttataggtaatataaatgaaattaatgaaaatgagttttttggatgtattattcaatatcctggaaaggatggtaaacttgagaagattggtaattttctagaatctataaataatgataatcttaaagtaattattgctgttgatttaatgtcaattgttttaattgaacctcctgaaactgataaaattgatgttattgttggaacaactcaaagatttggaatacctcttggttatgggggtcctcatgctgctttttttgcaaccaaagaaaagtataaaagaaacattccaggaagaattattggagtaaccaaggatatagatggggattactctctcagaatggctcttcaaaccagagagcaacatattaaaagagacagagcaacatcaaatatctgtactgcacaagttttacttgcagtgatggctggaatgtatgcagtttatcacgggccaaaaggcttaaaagaaatttcaaaatctattcatcttaaagctgtttatctaaaaagaaatttagaatcaattggacttaaaattaaatattctaaattatatgatacagtaacagtcttatgcgattcaaaaaaaataaaagaattggcttacataaaaaaaattaatttttgctatctctctgatggagaaatatcaatctctgtaaatgaaaaaacaaatttaaaagatcttaaagagattatttcagtttttgaagactttacaagaaaggtgtcaactatcaacgaatttccaacagatgtgaagtacaaagagagaa

SEQ ID NO: 220383 - DNA, 1006 bp, Unknown
  Bacterial polypeptide expressing nucleotide sequence isolated from the Sargasso Sea
aatgaatcaaattaaatctttcgttgataggcatattggtattagccctggtgatcagaaagatatgctagattttcttggttacaaggatatcaatgcgtttattgaggccgttgtccccgagagcatattagaagatgattatttagatcttggggaaggattgtcagagatggcagctctgaaaaagcttgataaagttgccaagcaaaacagagtcttcagatcttatattgggcagggttattatggaacggtcactcctaaggttattaaaaggaatgtatttgaaaatcctggatggtatacctcatacactccatatcaagctgagatttctcaaggaagattagaagcacttatcaatttccagacgactatctgtgagctaacttctatggaaatagctaatgcgtcccttcttgatgaagctacagccgcagctgaagctatgatgctagcaaagagggtatcaaaaagtaagtctaatactttctttatagataaaaattgttttaaacaaactatttctgttcttcaaacaagggctaaaccatttggtattgagcttgagatcggagatccccaagattttaatgaaaaagatttctttggaatgttaatacaatatccaaataagtttggagaaatagatgatttcacaaagctatcagcttattgtaaaaaaaataaatccttactagtgtgtgctactgatttgcttgctttgacccttttaaaacccccaggagaaattggtgccgatattgttataggctcatcccaaagatttggagtcccaatggggtttggaggcccgcatgctgcatttatggcaactcatgagagttttcaaagatcgatgccaggaagaattattggggcatcgaaagatgccagtgggaatcttgcctataggctcgcacttcaaacaagagaacaacatataagaagggaaaaagctaccagcaatatttgtacctcccaagctcttctagcagttatg

SEQ ID NO: 220384 - DNA, 874 bp, Unknown
  Bacterial polypeptide expressing nucleotide sequence isolated from the Sargasso Sea
ttggtgacctcccccttcctgcagcgtcacgtcggtcccagcgacgccgaacagcaacggatgctcactgcgctgggctacgcggacatggctgcttttcttgccgacgttgtgccggaggacatccttgatgaatttccaccgcaggggttgcttccaccgggttgcggcgaagccgaagccttagctcatttgcgtgagatcgcagccgccaatgattcacgccgctcgttgatcggcctgggctactacggcacggccacgccggccttgatccagcgccacgtcttcgaaaatcctgcctggtacacggcctataccccgtaccaagcggagattgcccagggacgcctcgaggccctgctgaatttccagaccctgatcagcgagctgaccggtctgcccatcgccaatgcgtccttgctggatgaagccacggcggcagcggaagcgatgagcctgagttacggcatttgtcgccggacggaagccaaccgcttcctggtggatgccaacgctcttccccagacctgggccgtgctgcagacccgcgcggaacccttggggatcgttctggagcgtgtcaccccagagcaggccagctttgacgcctcagtgtttggcgtgctgctgcagttgcccggcgctgatggtcagatctgggatcccacggccgtgatagcccgtgcccacgaggctggggccctggtgacggtggccatcgatcctctggctcagaccttgatcgccccagtggcgtccttcggcgctgacattgcggttggcagcgcccagcgtttcggtgtgccgatgggtttcggggggccccatgccgccttctttgccaccaaggacacctacaagcgtcagatcc

SEQ ID NO: 220385 - DNA, 1108 bp, Unknown
  Bacterial polypeptide expressing nucleotide sequence isolated from the Sargasso Sea
gcttctttacttgacgaaggtactgcagcagcagaagcaatgggattaagtcatagacttaataagaaagatagtgatttaatttttatatccgaagattgccatccgcaaactataaatgttgttcaaacaagagcagaaccaatgggtctaaaagttttaattggcaaagaagatgaagttttagataatttaaaagaagatttggtatgtggaattctacaataccctggaaccttgggggatattaaagatccaagtgaaagtataagtaaaattcataaattaaatggtaaagcaattttggcatgtgatttattagcattagctaaattaaaaacaccaggagaacttggagcagatatagctgtaggtagttctcaaagatttggaataccaatgggatatggtggtccacacgcagccttttttgctactaaagatgaatacaaaagatcaatgcctggaagaatagtcggagtatctgttgatagacatggtaataaagcttataggttatctcttcaaacaagagaacaacatataagaagagacaaggcaacgagcaatatatgtactgcccaagcactattagcaattgtttcagctgcttatgctatttatcatggtcctgatggaattagaaaaatttcagaaagagtttctcaattagcaaaaaattttgcagataaattaaaacagtctggttatgaattatattccgataatttttttgatacagttaccattgtaactagagagaaaacagaacaaatatttcaaaatgctttagatcaaaaagtcaatataagaaaagttaattcagaaatgttggcagtttcttttgatgaaaagaaaaatgtttatagagcaaatcaactgttgaaaatatttaatgcagctgagtctatcaaagaaaatccaactgaaagtttaccaaatctcccaaaaaatttgttgagaaaatcaaagtatttagaacatccagtatttaatttatatcattcagaaactgaaatgcttagatatttaaaaaaattagaagataaagatattgcactgaacagaacaatgattgcattaggttcttgcacaatgaagctaaatg

SEQ ID NO: 220386 - DNA, 2185 bp, Unknown
  Bacterial polypeptide expressing nucleotide sequence isolated from the Sargasso Sea
atggttctatccatagatcaaactgaattatgtgaggccgcacatgataatcaggcgcatatatgcatagctactgatctgctcgcactggctttattaaaatctccaggagaaatgggtgcagatgttgcagtaggcagtgcacaacgttttggagtgccaatgggatacggcgggccacacgcagcgtttttttcaaccaatgaaaaatttaaacggaagattccaggtaggatcataggggtgtctcaagattcgcttggtaaacccgcacttcgtatggcccttcaaacaagagagcaacatatacggagagaaaaagcaacctcaaacatatgcacagctcaggtcttattagcaattatctctggtatgtatgctgtttaccatggtccagatggtataaaagagattgctttaagagtaaaccaatttaccaggctattagcagtatcacttaagaacgcaggaattgaccttgttcataatgcttactttgatacaataagatttaaagcagaagggtggaaaacaaaagccaatgaaaaacaattgaatttccgtgaccataaagatggaacagttggtatttcgatcgatgagaccactacagaagatgatattatttcaatacttgatgtgttcaatgtagaaaaatatgatgttttagaatcatcggttccagaccatttagaaagaacatcaagttttttagaaaattctgtttttcataaatacagatcagaaacagatatgttacgctatatacatacattagagaccaaagatcttagtctgaataccagtatgatacctctaggttcctgtactatgaaattaaatagtaccacagaaatgactgctgttacatggccagaattctccaacattcatccgtttgcaccatctgaacaggtagaaggatatcaatcactaattcaagaactgaatgattggcttattagcataacaggttttgatgcaatatcaatgcaacccaattcaggagcacaaggagaatatgcaggattaatgatcattagagcttatcataaagcccaaggcaatgatcaccgagatacttgtttgatccctgattctgcgcatggtacaaatcccgcatctgctgtaatggcagggatgagggtcgttgtggtcgactgtgatgaccaaggtaatattgatatagatgatctaaagaaaaaaataatggagaatgaagataatctttcctcagtaatgatcacttatccctcaacacatggtgtttttgaatctacgataaaagaaatatgcgaaatggtccacaatagtggtggacaggtctatatggatggcgcaaatcttaatgcgctagtaggtgtctgtaagccaggagattttggagctgatgttatgcatataaatctgcataaaactttttgtattccacatggcgggggtggacccggcatgggccccattgtatgtaaagatcacttgtcacctttccttccaggacacactcaaattgaaactagtaataaacaggcaattactgctgtatcggccgcaccttttggcagtagcagcattttacctatatcatggtcttatatagcaatgatgggcaatgatggtctaaagaaagcaacacaggtcgctatattaaatgcaaactacttagctaaaaaactcgaagattactaccctgttttgtaccgcggtgatagcgggtatcatgcccatgaattcattattgacataagacccattaaagatgcttcaggtattaatgaagaggacattgcgaagagactaatggactacggatttcatgctcctactatgtcttggccagtcccagggaccatgatgatcgagccaacagagagtgaatctaaacctgaactagatcgatttattggggctatgatatcaataaaaaaagaaatagataatgttatttctggtgaatttgaccctactgacaatcctttaaaaaatgccccacacacagcagaacatgccctgtcagataattggccgcatcactactcgaggtatattagttgtttccctatgcattggcaaagtgaatacaaatattggccttcagttggaagaatagataatgcttatggagatagaaacttagtatgcacttgtccagctactgatgactatagagacagagatctttgat

SEQ ID NO: 220387 - DNA, 1456 bp, Unknown
  Bacterial polypeptide expressing nucleotide sequence isolated from the Sargasso Sea
acattttttttgataccctccattattgatgcgggaaatgatagtgatcaaatttacgagagtgctctgcagcaggggttgaactttcgaaagatcggttccaaccatttgggggtttcgctggatgagaccacaactcttgatgatttggagcagttggttggagtatttcaagattcgaaggaaaacacttctgaagccattgatctagagtcatgggatcaagaattgtcatccaatagagaaagtgcgattccgaaaaatctcagaagaacttccgaattccttactcatccggtttttgaacgttatcattcagaaacttccatgatgcgttatctgaagcatttggaagacaaggatattgcactcaatcgttccatgattccactgggttcatgtacgatgaaactgaatgcggcagccgaaatgatacctgttacctggcaggaattcggcggaatccatccatttgcccctgctgagcaaacacagggttaccaaaaaatgattgaagaacttgaggatcaattaatccgaatcaccggatttgatgctatatcaatgcagcccaattcgggtgcccaaggggaatacacaggtttactgttgattcatcgctaccagatccatcgaggtgaaggccaaagaaacatctgcctgatcccgagttccgcacatgggaccaatcctgccagcgcgatgatggcatccatgaaagtcgtcattatccaatgtgatgaagagggcaacattgacctggaagatcttgaggcaaaagctcaaaaacattcatcagaactttcagctttgatgattacttatccctccacccacggtgtttttgaagaaacgctgaccaagatttgcgatatcatccatcatcatggtggccaggtttacatggatggtgcaaatctgaatgccctggtcggcatcgcccagcccggaaaaatcggtcctgatgttttgcacatgaacctccacaaaaccttctgcattccccatggtggcggaggtccgggaatggggccgattggatttaaaaaacatctcgcgccttttgctccaagtcatgcggtttgcccggttccaggtgttcctgaagaaaacagcgcggtttctgcggcaccttatggaagtccggggatccttccaatttcctgggtttatataaaattgatgggaggtccgggtctcttgaaagctaccaaggttgcgattctcaatgcgaattacattgcatcaagagtcgggaaacatttcccggtggtctatactggaaacaatggtagggttgcccatgaatgcatcattgatgttcggccttttcgggaaacagccggaattaccgaagaggatgtggccaaaagattgatcgattacgggttccactctccaactatgtcatggccggtggcagggaccttgatgatcgaacccactgaaagtgagc

SEQ ID NO: 220388 - DNA, 776 bp, Unknown
  Bacterial polypeptide expressing nucleotide sequence isolated from the Sargasso Sea
tatggaagaaaatttttcaaaaaggcatattggtcttaacgaagaagataaaagaaagcttttaaaaaaacttggttatgggacgatggataagttcattaatgatgtcgtgcctcaaaatataaaaagagttgcccctatgaaaattgaaaaagagctttcagaaaaacagcttctttcaaaaatcaaagagtatgcatccttaaacaaaactatgatctcaatgattgggcagggtttttacagtacgcatacaccttcagtacttttaaggaatattctagaaaacccatcttggtatactgcttatacaccttatcagcccgaaattagtcaaggcaggcttgaagcattattaaattttcaaacaatgatatcagaaattacttcattgccaattgcgaatgcatctatgctcgatgaatcgacagctgcagccgaagctatgaccatgtcatttaaactttccaacaaaaagaacactgttattttagataagtatctccacccgcaaaccattaacgtcattaagactagggcagaaccacttggcataaatttaataatttcagaaaatcctgaaaaggaaaaactcgacgattgttcttgtgtaatcttccaatatcctaataccgagggaagaataaagaaccttgatgatgatatcaaaataattcaaagcgctggtagtatggtaattcttgttgcggatttattatctttagcattaataaaatcccctggtgaaatgggagcagatattgctgttggatcta

SEQ ID NO: 220389 - DNA, 1469 bp, Unknown
  Bacterial polypeptide expressing nucleotide sequence isolated from the Sargasso Sea
attggcaatagtatctgctgcttatgctatttatcatggtccaactggaattttaaatattgctaatagaacttctaaattggcaaaattatttgctaataatataagggagggaggttttgagctccactcaaataatttttttgatactgtaacgatcaaaacaaatgaaaaaactaaagaaatttataaaaaggcaattactgaaaaagtcaatttaaggaaagtagacaataacactttatcggtagcttttgatgaagcaaaaagaatcgatcatgtcaacttacttttaaagatttttggaattaacaaagatttaaaagacatagaagatgttatgctggataatcttccaaaaaatctattaagaacatcaaaatatttatctcacccagtttttaataagtatcattctgaaactgaaatgatgagatatttaaaaagattggaagatagtgatatagcactaaatagatcaatgatccctctaggatcgtgtactatgaaattaaattcaacagctgaaatgataccgatatcatggaaagaattttctcttcctcacccttatgttcccgttgaacaaatgaaaggatatacaacattgtttaatgatttagaaaaagatctaaaagaaattactggatttgatgcagtatctttacagcctaattctggagcacaaggggaatatgctggtcttatgacaataagagcatttcataaaaacaataatcaagctaacagaaatgtttgtttaatacctaactccgcacatggaacaaatccggcaagtgctcaaatgtctggaatgaaagtagtagtgattaattgtgatgctaacggaaatattgattttgaagatttaaaaattaaatctgagaaatattctaaagatttagcagcattaatggtcacttatccttcaacacatggagtgtttgaagaaaaaatatctgaaatttgtgaagttatacattctaatggaggtcaggtttatatggacggagcaaatttaaatgctttggtagggattgcaaaacctggagagtttggtccagatgtttgtcacataaatttacataaaactttttgtattcctcatggaggcggaggacctggaatgggcccaatagcatgcgcaaaacacttaaaagattttttacccactcatcagcatttaaaagagttgaatttagataaaggcatgggttcagtatctgctgcaccatgggggagcgcaagtattttagtcatttcatggatgtatattaaaatgatgggagctaaagggttaaaattagcttcagaaatatctattttaaacgctaactatatttcgaaaaagttatctgaaaaatacaaaattttatataccgggaagaacggtaacgttgcacatgaatgcattatcgatataaggccgattaaagaaaaaacaggaattacagaagaggacattgcta

SEQ ID NO: 220390 - DNA, 2929 bp, Unknown
  Bacterial polypeptide expressing nucleotide sequence isolated from the Sargasso Sea
atgaagctcgaacacccggaccgcctgatgaaccgcacgcccctctcgctcgccgcgctcgaaacgcacgacgcgttcgccgaacgccacatcggccccgacgccgccagccagcaggccatgctcgacacgctcggcttcgcgtcgcgcgccgccctgatcgacgccgtgatcccggcctcgatccgccgcgccgaaacgctgccgctcggcccgttcgcgcagccgaagagcgaagccgaagccctcgccgccctgcgggttctcgcggacaagaaccaggtgttccgctcgtatatcggtcagggttaccacgacacgcacacgccggccgtcatcctgcgcaacgtgctcgaaaacccggcgtggtacacggcctacacgccgtaccagcccgaaatttcccagggtcgcctcgaggcgctcctgaacttccagcagatggtcgccgacctcaccggcctcgcgatctcgaacgcgtcgctgctcgacgaagccaccgccgccgccgaagcgatgacgctgctgcagcgcaccggcaagccgacgtcgaacgtgttctacgtcgccgacgacgtgctgccgcaaacgctcgaagtgatccgcacgcgcgcgctgccggtcggcatcgaggtcaagaccggcccggccgccgacgccgcgcaagcgaatgcgttcggcgtgctgctgcagtacccgggcgtgaacggcgacgtgcgcgactaccgcgcgctcaccgacgcgatccacgcggccggcggccacgtggtcgtcgcggccgacctgctcgcgttgaccgtgctcacgccgccgggcgactggggtgcggacgtcgcgatcggcaacacgcagcgcttcggcgtgccgatgggcttcggcggcccgcacgcagcgtatctcgcggtgcgtgacgaattcaagcgccagatgccgggccgcctcgtcggcgtgacggtcgacgcgcagggcaagcccgcgctgcgcctcgcgctgcagacgcgcgaacagcacatccgccgcgagaaggccacgtcgaacgtgtgtaccgcgcaggcgctgctcgcgatcatggccagcatgtacgcggtctaccacggcccgcacggcctgaaaacgatcgcgctgcgcgtgaaccgcatcgcggcgctgctcgccgccggcgtgaagcagctcggcttcgcgaccgtcaacgacacgttcttcgacacgctgacgatcgacaccggcgcgcgcaccgcgcaggttcacgaattcgcgaaggcgaagcgcatcaacctgcgccgcgtgagcgacacgcaagtcggcgtgtcggtcgacgaaacgacgacgcgtgacgacctcgccgatctcctcgccgtgttcgcgcaggccgcgggcggcaccgcaccggccgtcgacgcgctggacgcgggcctcgccggcgtccccgcgctgccggccggcctcgagcgcacgagcgcgtacctgacgcaccacgtgttcaaccgccaccattccgaaaccgaaatgctgcgctacctgcgcagcctgtcggacaaggatctcgcgctcgaccgctcgatgatcccgctcggctcgtgcacgatgaagctgaacgcgacgtcggaaatgctgcccgtcacgtggcccgaattcggccgcatccacccgttcgcgccggccgagcagaccgtcggctaccgcgagatgatcgaccagctcgagcagatgctcgtcgcggccaccggctacgcggccgtgtcgctgcagccgaacgcgggctcgcagggcgagtacgcgggcctgctgatcatccacgcttaccacgcatcgcgcggcgaagcccatcgcgacgtgtgcctgatcccggcgtccgcgcacggcacgaacccggcatccgcgcacatggccggcatgaaggtcgtggtcgtcgcctgcgacgcgcagggcaacgtcgacatcgccgacctgaaggcgaaggccgagcagcacgcgaaggatctcgcggcgatcatgatcacgtacccgtcgacgcacggcgtgttcgagcagaacgtgcgcgagatctgcgaaatcgtgcacgcgcacggcggccaggtgtacgtcgacggcgcgaacatgaacgcgatggtcggcctcaccgcgccgggccagttcggcggcgacgtgtcgcacctgaacctgcacaagaccttctgcatcccgcacggcggcggcggcccgggcgtcggcccggtcgcggtcggcgcgcacctcgcgaagttcctgccgaaccagcgttcgaccggctacacgcgcgaagaagacggcatcggcgcggtatcggccgcgccgtacggctcggcgtcgatcctgccgatctcgtggatgtacatcgcgatgatgggcgcgaagaacctgaccgccgcgacggaaaccgcgatcctcaatgcgaactacatcgcgaagcgcctcgcgccgcactacccggtgctgtattcgggcccgggcgggctggttgcgcacgagtgcattctcgacctgcgtccgatcaaggaatcgagcggcatcaccgtcgacgacgtcgcgaaacgcctgatggactacggcttccacgcgccgacgatgagcttcccggtgccgggcacgctgatggtcgaaccgaccgaatcggagtcgcaggaagaactcgaccgcttcatcgccgcgatgatcgcgatccgcgatgaaatccgcgcagtcgaggaaggccgcgccgatcgggaggacaacccgctgcgtcacgcaccgcacacggcggccgtcgtcaccgcgaacgaatggccgcacgcgtactcgcgcgagcaggctgcgtacccggtcgcgtcgctgggcacgaacaagtactggccgccggtcggccgcgcggacaacgtctacggcgaccgcaacctgttctgctcgtgcgtgccgatgtcggaatacgcataac

SEQ ID NO: 220391 - DNA, 1372 bp, Unknown
  Bacterial polypeptide expressing nucleotide sequence isolated from the Sargasso Sea
ttaattcataaaaaaaaaggtaaagcaattttaatttgtgatttgctagctctagcaaaaattaaaactcccgctcagcttggcgctgatattgtagttggtaattcacaaagatttggaattccaatggggtatggaggtccacatgctgcattttttgcaacaaaagatgagtataagagagcaatgcccggaagaatcataggtgtttcagttgatcgattgggaaaaaaagcgttacgtatggcgttacaaacacgcgaacaacacataagaagagaaaaagctactagcaatatttgcaccgcgcaagctttgctagcaattatttcagcagcatatgctatctatcatggacccaaaggtattaatgcaattgcagaaagaatttccaaaatagctaaaagttttgctgataaaataaaaaaatcgggatatgaactttattctgacagtttttttgacaccgttacgataattacaaaaaataaaacgcaaaatatttttaaaaatgctttaaggaatggagttaatttaagaatggttggtgataatatgatctcagttgcctttgatgaaagaaaatctatagaaaaaactaatcttcttttaaaaatctttaatagttcagaatcaataaatgaaacaggaaaagttgtattaaataatattccaaaaaatttgataagaacctcaaaatatcttacccacccagtgtttaattcgtatcattctgaaactgaaatgcttcgttacttaaaaaaactagaagattctgatattgctttgaacagatcaatgatttctttaggatcttgtacaatgaaacttaatgcagtttctgaaatgatccctgtaacttggggagaattttatgaacctcatccatttgctccagtagagcaaatggaaggctacagaaatctatttactgatttaaaaaattggttaagagaaataaccggtttttctggagtgtctttgcaaccaaatgcaggggcgcaaggtgaatatgctggattgatggtaattagaaaatatcatttagaaaatggaaataaagaaagaaatgtttgtttaattccaagttcagctcacggaactaatccagcgagcgcacaaatggctggaatgaaagtggttgtgattagttgtgataaaaatggaaatgttgatcttgaggaattaaaaataaaagcaaaagaatattcaaaaaatttatctgctttaatggttacttacccttcgacccacggagtttttgaagagaaaataaaagaaatttgtagcattgtacatgataacggaggacaagtttatatggatggagctaatcttaatgctttagttggaattgctaaacacaggtaaa

SEQ ID NO: 220392 - DNA, 1044 bp, Unknown
  Bacterial polypeptide expressing nucleotide sequence isolated from the Sargasso Sea
aaaacaatcaggatatgaaatttattcagatcatttctttgatacagttacaattgtaacaaaagataaaactgatcaaatctataaaaacgctttagatcaaaaagtaaatattagaagggtaaattctgaaatgttagctgtttcttttgatgaaaagaaaaacgtttatagggtaaatcaattattaaaaatttttaatgctgctgagtcgattaaaaaagaggacccaacagtaagtttgcctaatttaccgaaaaatttattaagaacttcaaaatatttagaacatcctgtttttaattcatatcattctgaaactgagatgcttagatatttaaaaaaattagaggataaagatatagctcttaaccgaactatgattgcgcttggttcatgtactatgaaattaaatgctactgcagaaatgatacctatttcatggagagaattggctgaacctcatccatttgtgccagtagagcagatggaagggtatagagcactattcactgatcttaaaaattggttaagatcaattacaggtttttctggagtttcacttcaaccaaatgcaggtgctcaaggagagtatgcaggactaatggtaattagaaaatatcatttagatagaggcgaagaaaatagaaatatttgtttaataccaagctcagcacatggaacaaatcctgctagcgctcaaatggttggaatgaaagttgtagttgttgattgtgataaagaaggaaatgttgattttgatgatttaaagaaaaaagctgaaacgcattcagaaaatcttggagcattaatggttacatacccatctactcatggtgtatttgaagaaaaaattacagatatctgtgaattaattcataaacatggtggtcaagtttatatggatggtgcaaatttaaacgcacttgttggaatagcaagaccaggaaattttggtccagatgtttgtcatataaacttacacaaaacattctgtattccgcacggaggaggaggtccaggaatgggacctattgcatgtaa

SEQ ID NO: 220393 - DNA, 499 bp, Unknown
  Bacterial polypeptide expressing nucleotide sequence isolated from the Sargasso Sea
tttaaatattataccacaggaaaaaacggtaacgttgctcatgagtgtattgtcgatttaaggcctataaaagaaaagtcaggtatttctgaagaagatatagcgaaaagattaattgactacggttatcatgctcctacgatgtcatggccagtctctggtacaattatgattgagccgactgaaagtgaaaatttagaagaaatagatagattttgtgatacattattaaatatcaaagatgaaatagataaaattgattccggtaaatttgataaagaggataatccattaataaatgctcctcatacttatctagaattatctgcagatgaatggaaacattcttattcaagaaaggatgctgctttcccaaaaacacatttaaaagaatataaatattgggctcccgttgctagagttgacaacgtttacggagatagaaatcttgtgtgctcttgtccttctatggatgagtataaagaagaagctgcttaaa

SEQ ID NO: 220394 - DNA, 1485 bp, Unknown
  Bacterial polypeptide expressing nucleotide sequence isolated from the Sargasso Sea
aatgttacataattcacaaaaagattttattaaaagacacataggtccatcaaaaaaagaccaagaaaaaatgcttaaagaccttaactttaagtctttagatgaatttattaatagtactattccagaaaaaattcagtttaaaggtgaattaaatattggggaaccaaattcagaatatgaagctttaagaaaattaaaagcaatttcaaaaaaaaatcaaatttactcaaattttataggcatgggttattatggaacctacacaccatacgtaatattaagaaatatattagaaaatcctggttggtatacatcttatacaccttatcagcctgaagtagcacaaggtagattagagatgctattaaactttcagcaaatgattgttgattttacaggcatggatatagcaaacgcctctttacttgacgaaggaacggcagctgccgaagctatgggtttaagtcatagactaaataaaagtgatagtaatttagtttttgtttcagagaattgccatccacaaacaattgatgttattcaaactagagcagagccaatgggtcttaaagtacttgttggaaatgaggataaagttctagaaaagttaaaagaagatattgtttgtggagttttacaatatccaggaactttaggtgatatcaaagatcctagtgaggccataagtaaaattcataaaaaaaatggaaaagcaattttagtttgcgatctccttgccttgtctatgttaaaaacaccaagagaacttggagctgatattgcagtcggtagctcccaaagatttggtattccaatgggttatggaggacctcatgctgccttttttgcaacaaaagatgaatataaacgatctatgccaggtaggatcgttggggtttcggtggataggcatggaaacaaggcttataggttatcattacaaactagagagcaacacattagaagagacaaagctacaagtaatatttgtactgctcaagccttactcgcaattgtttcggcagcatatgccatttatcacggaccagacggaattaaaagtatttctgaaagagtatctcaactagcaaaaaattttgcagataaaataaaacaatccggatatgaattatactcagattatttttttgatactgtaactattattaccaaagaaaagacagatcagattttcaaaaatgctttagatcaaaaagttaatattagaaaagtaaattcagaaatgctgtccgtttctttcgatgaaagaaaaaatgtttatagagtaaatcaactattgaaaatttttaatgcagcggaatctattaaaaaagaagatcctactgtcagtttaccaaatctaccaaacaatttattaagaacttcaaaatatttggaacaccctgtttttaattcatatcactctgaaacagaaatgcttagatatcttaaaaagttagaggataaggatatagctcttaa

SEQ ID NO: 220395 - DNA, 1383 bp, Unknown
  Bacterial polypeptide expressing nucleotide sequence isolated from the Sargasso Sea
ggcgtatctcaagaccgtagaggaaatcaagcttatagacttacacttcaaaccagagaacaacatattagaagagaaaaagcaacttcaaatatttgtacagctcaagtattacttgctatcatttcaggaatgtatgcattatttcacggtccagatgatttaaaaaatattgcaagaagaattcatagtcacacaaaagaacttgccgataaaattgcaaaatttggtcatgagattgtaactaatgataattcattttttgatacaatagtaatcaaattatccaatatgagtattgagagtttaaaagataaggcattaaagcaaaattttaatttgatgtatcatgataatggatttgttggtatatctttagatgagaaaacagattttaatgaagttgaggcgcttgcaaatctatttgatgtgaataatgattctaaaaattcttatagtatttttaaaccaaatagaataggcgatattttaacccatcctatttttcatagtattaattctgaaacagaaatgcttagatatatcaataagctagaaaaaagagatctttccttgaactatagcatgataccattagggtcttgcactatgaaacttaatgcgactgttgaaatgattccaattagctggccggaatttaattctatccacccttttgcaccattaagtcaagctaagggttatgaaaaaatcattaatgagctagaggaaatgctatataaagttactggatttgatgccgtatcatttcaaccaaattctggtgcacaaggagaatatgctggattattaagcattagagaatatcataaagcaaataattcaagaagagatatttgtctaatacctgaatctgcccatgggacaaatcctgcaagtgcaataatggctggacttaaagtggtgatagtaaaatgtgatgaccatggaaatatagattttaaagatttaagcgcaaaagttgatgaggctggtgacaggttatcatcattaatggttacttatccctcaacccatggtgtatttgaacataatattgatgaaatatgtaatttaattcacgaaaatggtggcttagtctatatggatggagccaacttgaacgccatggttggtgtatgtaaaccaggtaaatttggagctgatgttatgcacattaatcttcataaaactttttgtataccgcatggtggagggggtccaggtatgggtccaatttgtgtgaatgaaaaattaaagccacatcttccaaaacatagtttcactgatgaagacttttcttactctgtatcgtcatcaccttttggtagtgcaagtattctattaatttcttatatctatatgaaattaatggcagcaaac

SEQ ID NO: 220396 - DNA, 1092 bp, Unknown
  Bacterial polypeptide expressing nucleotide sequence isolated from the Sargasso Sea
tatgtctgaatttcataaaaaacatattggtccttcgcaaaaagaaatcgatgaaatgttgcaatatcttaattgtgactccttaaatgatcttcttgaaaaaattgtgcccaaaaatattttagatattgacgatatatcaattggaaatgacgtattctcagagaatgatattttaaatcatgtcaaaaatattggtagcaacaataaggttcatagatctctaattggtcaaggctattatgatacaattactccaaatgttattttaagaaatatacttgaaaatccaggatggtatactcagtatacgccatatcaacccgaaatttctcaaggtagattagaagctcttttaaactatcaaacaatgattactcaaattactgctttgccaattgctaatgcttctcttttagatgaaggaactgcagcaagcgaggcaatgttaatgctttatcgtaaaaataaatctgaaaaaatgcaatttttagttgataaagagtgttttcagcaaactatagatgtaattatttcaagagctgaaccattagatattgaaataattgtaacggactttaaaaattttaactttaccgatgcctttggttgtattttacaatatccaaataaatatgggcatatttcatcaaatgatgattataaaaaccttgtctctgatgcacacaactcaaactgtaaagtaatttttgctagcgatctaatgtgtttacagctttttgaagcaccaggtaatctaggagcagatattgctgttggtaatagtcaacgttttggtgtcccgcttggatatggaggccctcatgctgcatttatgtcaactagtgaagaatttaaaagagatatccctggaagaattgtaggtgtatcacaagaccgtagaggtaatcaagcttatagactaacactccaaactagagaacaacacattagaagagaaaaagcaacatcaaatatttgtacagcgcaagttttgcttgctataatatcaggaatgtatgcattatttcatggtcaagatgatttaaaaaatattgccaaaagaatacatagtcatacaaaagaactggc

SEQ ID NO: 220397 - DNA, 808 bp, Unknown
  Bacterial polypeptide expressing nucleotide sequence isolated from the Sargasso Sea
aatgttaaaaaacgcacaaaaagattttattcaaagacatattggcccttcagaagaagagcaaaatataatgcttcaagaattaggatttaaaaatttagatgagttaattaaaaacacagtaccagaaaaaatcctttttaaagatgatctaggtattggcgaacctaattcagagtataaagcactcagaaaactaaaagatatttcaaaaaaaaataaagtatactcaagttttattggtatgggatactacggaacttatactccgtatgtaatattaagaaatatactagaaaatcctgggtggtatacatcttatacaccataccaaccagaggtggctcaaggaagacttgagatgttattaaactttcaacaaatggtaattgattttacaggtatggatattgctaatgcttctttattggatgaaggtactgcagccgcagaagctattagtttaagttatagagtttctaaatctaaaacaaaaaaagtttttgtttctaaaaattgccatccacaaactatagaagttgttaaaacgagagcggaacctttaggacttgaaataatagttggagatgaagatacagatattaaagaagaaattatttgtggcgttattcaatatccaggaactttaggtgatattaaagatccaagtgaagctataagtaaaatccataaacataatggtaaagcagtactagtttgtgacttattagctttagcaaaattaaaaacaccagctgaattaggtgcagatattgcggtgggaagttctcaaagatttggcataccc

SEQ ID NO: 220398 - DNA, 1554 bp, Unknown
  Bacterial polypeptide expressing nucleotide sequence isolated from the Sargasso Sea
cagaatcaattaaaaaagaagatcctgtagcaaatttagtaaatttaccaaaaaatttaattagaacttctaaatatttagaacaccctgtttttaatttatatcattcagagacagaaatgcttagatatcttaaaaagttagaagataaggatatagctcttaatagaaccatgattgcactaggctcatgtactatgaaattaaatgctactgcggaaatgatacctatttcatggagagaattagctgagcctcatccgtttgtgcctgttgaacaaatggagggttatagggaattgttcactgatcttaaaaattggctaagatcaattactggtttttctggagtttcgcttcagccgaatgcaggcgctcaaggtgaatatgctggattaatggtaatacgaaaatatcacttagacagaggtgatgaaaatagaaatatatgtttaatacctagctcagcacatggaacaaatccagcaagtgcacaaatggttggaatgaaagttgtagtagttgactgtgataaagaagggaatgtagattttgaagatttaaagaaaaaagcagaaacacattcagaaaatcttggagctttgatggttacatatccatcaacacatggtgtttttgaggaaaaaatatcagatatctgtgatttaattcataaacatggtggtcaagtttatatggatggtgcaaacctaaatgcgctcgtaggtattgcaaaacctggaaattttggtccagatgtttgtcatataaacttacacaaaactttctgtattccacatggtggtggaggaccaggtatgggtccaattgcttgcaaaagacacttacaagtttatttgcccaatcatccagtggttaaagattgtggtcctgcaacaggtataggcgcagtttctgcagcaccatggggtagttcaagtattttatctatttcatggatgtatataaaaatgatgggttctcaaggtttaaaattagcaacagaagttgccatcttaaacgccaattatatagctcatagattaaaaaaccattttccaattttatacaaaggtactaatgggaatgttgcccatgaatgtataattgatattagatcaattaaaagtgaaacgggtgtgagcgaggaagacattgcaaaaagattaatagactatggattccatgcaccaactatgtcatggccagttgctggtacaatgatgatagagcctaccgagagtgaaagtttaccagaaatagacagattttgtgatactttaataaatattaaaacagaaatagaaatgattaaatcaggtaaatttgataaaatagataatccaattaaaaatgcacctcacactgatattgaactttcatcagatgaatgggaacacaaatattctagacagcaagcagcgtatcctgcaaaattcttgaaaaaaaataaattttggcctccagtcgcaagagtagacaatgtttatggagataaaaatattttttgtacttgtccaagtatggatgagtttaaagaagatgcagcataaa

SEQ ID NO: 220399 - DNA, 2890 bp, Unknown
  Bacterial polypeptide expressing nucleotide sequence isolated from the Sargasso Sea
atgaccaagcaaaccctcactcagttagaacagcacgatttattcttacgtcgccatatcggcccagatagcagccaacaacaagaaatgttgaactacgttggtgctgagtctttggacgatctgaccgcgcaaatcgtgcctgagtcgatccgtttaagccaagagttgagcattggtgattcctgcggcgaagccgaaggtttggcctacattcgtggtttagccaaacaaaaccaagtcttcaaaagctacattggtatgggttactacggtacccaagtgcctaatgtgattttacgtaacgtcttagaaaatccaggttggtacacggcgtacacgccctatcagccagagatcgcccaaggccgtttagaagccattctaaacttccaacaagtgtcgatggatttaaccggtttagatttagcatcagcttcactgctggacgaagcgaccgccgccgccgaagcgatggcgctggctaagcgtgtatctaaagccaaaaaagccaacattttcttcgtagccgatgacgtattcccacaaaccttagacgtagtgaagactcgcgctgagtgttttggttttgaagtggtggtgggtcctgcccatgaagcggtaaaccacgagctgtttggtgctttgttccaatattcaaaccgtttcggtcaaatcactgacttcaccgacttattcgccgaattacgcgcgaaaaacgtgattgtgactgtggctgccgacatcatggcattagtgttactcaagtcaccgggtgccatgggtgccgacgtggtcttcggtagcgcgcagcgttttggcgtgccaatgggctttggtggtccacatgcagccttcttcgtggcccgtgacgagcacaaacgctctatgcctggccgtatcatcggtgtgtcaaaggacacccgtggtaaccgcgcactgcgtatggcgatgcaaactcgcgagcagcatatccgccgcgaaaaagccaactcaaacatttgtaccgcgcaaattctgttagcgaacatggcgtctttctacgccgtattccacggcccacagggcctgaaaaccatcgcatcacgcatcaaccgctttgctgatatcttagccgcgggcttacaagctaaaggcgtgagcttagtgaacacaacttggttcgataccatcagcatcaaaggcttagacgttgcagcagtcaatgcacgcgcgctggctgctgaaatgaacctgcgtttcgatgctgacggcatcgtcggcgtgagcttagatgaaaccactatccgcagcgatatcgaagcgctgttcgatgtgattttaggtgctggccatggcttagacgttgccgcattagatgcgcaaatcgtggcgcaaggtagccaatcgattcctacctctttagtgcgtcaagatgccatcctgagccacccaaccttcaatcgctaccaaagcgaaaccgagatgatgcgttatatcaagcgtctcgaaagcaaagacttagcactgaactactcaatgatttcattgggttcatgcaccatgaagttaaacgctgcggttgaaatgatcccagtcagctggccagaatttgccaacatgcacccattctgcccactggatcaagccaagggttacactcaactgattgaagaactgtcttcatggttagtgaatgtcacaggttacgatgccgtgtgtatccaacctaactcaggcgctcagggtgaatacgcgggtctgctggcgattcgtaaataccacgagtctcgcgggcaggcccacagaaacatctgcttaatcccacaatctgcccacggtactaaccccgcatcggcgcaattagcgggtatgcaagttgttgtgactgcctgtgataagcaaggtaacgtggatttagacgatctgaaggccaaagcggctgaagtggcagaaaacctgtcatgtatcatgatcacttacccatcgacccacggtgtgtacgaagaatctatccgcgaaatctgcaacattgtgcaccagcacggtggtcaagtgtacttggacggcgccaacatgaacgcccaagtttgcttaacctcaccaggctttatcggtgccgacgtatcgcaccttaacctgcacaaaaccttcgccattccacacggcggcggtggtcctggtatgggcccaatcggcgtgaaagcgcacttagcgccgttcgtcgcgggtcacgtagtggtgaaaccaggccgcgaaagcgataacaacggtgcagtatcggctgcgccatacggcagtgctggcattctgccaatcagctggatgtacattaagctgctcggttcaaacggcctgaaaaagtcgactcaaactgcgctgttaaacgctaactacgtgatgaagaagctgtctgaacactacccagtactgttccgtggccgtaacgatcgcgtcgcgcacgaatgtattatcgacctgcgtcccatcaaagaagcctctggcgtgaccgaaatggatatcgctaagcgtctgaacgactacggtttccacgcgccaaccatgagcttccctgttgcgggcacgctgatgattgagccaaccgaatctgagtctaaggttgaactggaccgctttatcgacgctatggtgtcaatccgcgccgaaatcgcgaaagttgaagcgggcgagtggccagcggacaacaacccgctgcacaacgcgccacacactatggccgatattatggacccagcgttcgattcacgcccatacagccgtgaagttgccgtgttcccaagtgccgcagtgcgtactaacaagttctggccaaccgtgaaccgtattgatgatgtgtacggcgacaggaatttattctgtgcgtgtgtgccgatatcagactacgagtagg

SEQ ID NO: 220400 - DNA, 1119 bp, Unknown
  Bacterial polypeptide expressing nucleotide sequence isolated from the Sargasso Sea
taaatgaattagaagagattgcgaataaaaataccaaaatgagatcacttataggccttggttattatgacaatcacatgcctaaagtaatccaaagacatgttcttgaaaatccaaggtggtacacgtcttatactccatatcaagcagaaattgcacaaggaagattagaagctctatttaattttcagactattgtttgtgaactaacaggattccctgtcgctaatgcctctttgttggatgaggggactgctgcagcagaagccatggccatgagtttttccgcaagaaaaaataaatcatcaaaagtgtacttagtggagtcaaatgtttttgatcatacttttaatgttctacaaaccagagcaaaacctttgggaatatctttaaaacgctttactcaaagcaaccttcctaatcatgatgatgtttttggaatgttgttgcaattacctggtaaaaatggggaattatatgatcccacattcttaatatcccaagcacatagatcagaaattattgtaacggcatgtattgatccactggcgcaagttttaataaaaccaatttctgaatttggtgttgatgttgcagtgggcagtatgcaaagatttggtgttccaatgggttttggtggcccccatgctgcatattttgcatgtagcgaaaaatataaaaggctgatacccggaagaattgttgggcaaactctttctaaaaatggagaaaagtctctaagactagcattgcaaacaagagagcaacatattagaagggaaaaggccactagtaatatttgtactgctcaatctttgttagccataatttcttctttttatgctatttatcatggaccctctggattaacgcaaattgctaagagattagttgagttgagaataaatttagaatcaagtttagctgctttaggttttgatattcctaatgggattagatttgatagtgttgatgtttattctgagcactcccagaggatccataatgaagctttaaaaaatggctataacttaagaattttgccgttgggatcaactattgaacattcaactggctttgggatctctttagatgagcttagtaatgaaaaagaataaa

SEQ ID NO: 220401 - DNA, 703 bp, Unknown
  Bacterial polypeptide expressing nucleotide sequence isolated from the Sargasso Sea
aatgttacacgactcagaaaaagattttataaaaagacacattggaacttcagaagaggaacaaagcaaaatgttaaaagttcttggatatacttcacttgatgaacttatatctaaaactgtaccagaaaaaattcttttcacggaggatttagatattggcgaaccaaattctgaatatgaagcgttaagaaagttaaaaaatctatcaaaaaaaaatactatattttctaattttataggaatgggttattacggtacctatactccaaacgttattatcagaaatattctagaaaatccgggatggtacacttcttatacaccttaccaaccagaagtcgcccaaggaagattagaaatgttacttaattttcaacagatgattgttgattttacaggaatggatattgcaaacgcatccctacttgatgaagggacagctgcagcagaggccatgggtctaagttatagacttgataaaaaagattctaaaacggtttttatttcagaaaactgtcatccgcaaacaatcgaagtggttaaaacaagagctgaaccattaggtttaaaagttgttgttggaagcgaagataaagtaatcgatgaaacatctgatttagtatgtggtatcattcaatatccaggtacattgggtgatattaaagatccaagtgcatatataagtaaaattcacaaaaca

SEQ ID NO: 220402 - DNA, 1935 bp, Unknown
  Bacterial polypeptide expressing nucleotide sequence isolated from the Sargasso Sea
aatgttacataattcacaaaaagattttattagaagacacataggtccatcagaaaaggaccaagaaaaaatgcttaaagatcttaactttaagtcattagatgaatttattaatagcaccattccagaaaaaattcagtttaagggtgaattaaatatcggtgaaccaaactcagaatatgaagctttaagaaaattaaaagcaatttcaaaaaaaaaccaaatttactcaaattttataggcatgggttattatggaacttacacaccatatgtaattttaagaaatatattagaaaatccgggatggtatacatcatatacaccttatcagcctgaagtagcacaaggtagattggagatgctattaaactttcagcaaatgattgttgattttacaggtatggatatagcaaatgcgtctttactagacgaaggaacagcagctgctgaagctatgggtttaagtcatagacttaataaaagtgatagtaatttagtttttgtttcagagaattgccatccacaaacaattgatgttattcaaactagagcagagccaatgggtcttaaagtccttgttggtgatgagaataaagttctagagcagttaaaagaagatattgtttgtggtgttttacaatatccaggaactttaggtgatattaaggaccctagtgagtccataagtaaaattcataaaaaaaacggaaaagcaattttagtttgcgatctacttgctctttctatgctaaaaacacctagagagcttggagctgatattgcagtcggtagctcccaaaggtttggtataccaatgggttatggaggacctcatgcagccttttttgcaacaaaagatgaatataaaagatctatgccaggcaggattgttggcgtttcagtggataggcatggaaacaaggcttatagattatcattacaaactagagagcaacacataagaagagacaaagccacaagtaatatttgtactgctcaagctttactggcgattgtttcagcagcatatgctatctaccacggtcccgatggaattaaaagtatttctgaaagagtatctcaactagcaaaaaattttgctgataaaataaagcaatctggatatgaattatactcagattatttttttgatactgtaactattattaccaaagaaaagactgatcagattttcaaaaatgctttagaccaaaaagttaatattagaaaagtaaattcagaaatgctgtctgtttctttcgacgaaagaaaaaatgtttacagagtaaatcaactactaaaaatatttaacgcagcagagtcaattaaaaaagaggatcctactgttagtttaccaaatctaccaaaaaatttattaagaacttcaaaatatttggaacaccctgtttttaatttatatcattcagagacagaaatgcttagatatcttaaaaagttagaggataaggatatagctcttaacagaacaatgatcgctctaggttcatgtactatgaaattaaatgctaccgcagaaatgatacctatttcgtggagagaattggctgagccccatccattcgtacctgtcgaacagatggagggatatagagaaatgttcacagatcttaaaaattggttaagatctattactggtttttctggtgtttcacttcagccaaatgcgggagctcaaggtgagtatgcagggttaatggtaataagaaaatatcatttagatagaggggatgaaaatagaaatatatgtttaattccaagctcagcacatggaactaatccagcaagtgcacagatggttggaatgaaagttgtcgttgttgattgtgacaaagaaggaaatgttgattttgaggatttaaagaaaaaagcagaattgcattcaaacaatcttggtgcattaatggtaactac

SEQ ID NO: 220403 - DNA, 1388 bp, Unknown
  Bacterial polypeptide expressing nucleotide sequence isolated from the Sargasso Sea
aatgaaaaaagacgttaaatattatcagcatcagtttgtagataggcacgtagggccaaaccaagaagaattatcacaaatgcttcatactattggcgtaggatcaattgaagagttaattgatttatccataccaaaatcaattcaatcaaaagaaaaattaaacgtaggcaatggcatatcagaaaaagaacttatcgaaaaattaaaatcaattgctgaaaagaatacaataatgaaaacatatatagggatgggatactataattgtataactccaccagttattcagcgaaatattttagaaaaccctggttggtatacacaatatactccatatcaagcagagataagtcagggcaggttagaggccttaataaattttcaaacgatggtttgtgatcttacagcgctacctattgcaaacgcatctttacttgatgaggcaactgctgctgctgaggcaatgacaatgacttatagaatgagtaaagatcgtaacatttttttagtatcaaagcattgtcatcctcaaacaattgatgtcctgaaaacaagatctgaacctttaggtataactgtacaattatgcgatgatgatgacttcattttcaatcaaaatgtttttggatctattttgcagtatcccgatacaaatgggtcagtgaataattttcaaaaaataacaaatgctgcccataaagaatctgcttatgtaattattgcaactgatctaatgagcttagctttactaaaaccaccaggagagcttggtgctgatgtcgctcttggctcatctcaacggtttggagttcctatgggctacggaggaccacatgcggcattttttgcagtaaaagaaaaatttaaacgttttttaccagggagactaataggtgtttccgttgactctgaagggaatcaagcatatcgaatgtctcttcaaacaagagaacaacatattagaagagaaaaggcaacttccaatatctgtactgcgcaagtattattagcaataatgtcaggtatgtacgctgtatatcatggccccaaaagaataaaagaaatagctagaacaattcatcaacatacctgtgatttagcaacaagcttatcaaaagctgggtatgaaatactcaatgatacattcttcgatacaattcgttttttaggtcctgataaaacaaaagaaaaattattgaaacacaatattaatatcagagatttctctgatggttcattaggtattttcattgatgaaacagtcatgaaaaaagatatttctcatttattatcgattctaaatgtatcacatgaattgaaatatatatcaactctaccatctgatcttagaagaagaacttcatttttaggtcaccctgtattta

SEQ ID NO: 220404 - DNA, 2284 bp, Unknown
  Bacterial polypeptide expressing nucleotide sequence isolated from the Sargasso Sea
agaagatgaagttttagatcaattaaaagaagatttagtttgtggaattttacaatatcctggaactttaggaaatattaaagacccgagtgaagcaatcagcaaaattcataaaaagaatggaaaggctgtattggcttgtgatttattagctttagcaaaattaaaaacacctagagaacttggtgctgatatagcagttggaagctcgcaaagatttggtattccaatgggatacggaggtcctcatgcagctttttttgcaacaaaagacgaatacaaaagatcgatgcctggaagaattgttggtgtgtcagttgataggcatggtaataaggcatacagattatctttacagactagagaacaacatattagaagagataaggcgacaagcaacatttgtactgctcaagccctattagcaattgtatcagcagcatatgctatttatcatggtccagacggaattaaaaatatttctgaaagggtttctcaattagcaaaaagttttgctgataaaataaaacagtctgggtatgagctttattccaattatttttttgatactgttacaattattaccaaagaaaagactgatcaaatttataaaaatgctttaaatcaaaaagttaatatacgaaaagtaaattctgaaatgttggctgtttcttttgatgagagaaaaaatgtttatagagtaaatcaattattaaaaatttttaatgcagcagaatcaatcaagaaagaggacccttcagtaagtttacccaatttaccaaaaaatttattaagaacttcaaaatatttagaacatccagttttcaacttatatcattcagaaactgaaatgcttagatatctaaaaaggttggaggataaggatatagcattgaatagaactatgatagcacttggctcatgtacaatgaagttaaatgctgcagctgaaatgatcccaatttcttggaaggaattcgctgagcctcatccatttgttccaattgaacaaatggaagggtttagagatttatttactgatctaaaaaattggttgagatctataactggtttttctggtgtttctttacaacctaatgcaggtgctcaaggtgaatatgcgggtttaatggttatcagacagtatcacctagatagaggtgaggctaatcgaaatatatgtttaattccaagttcagcacatggcactaatccagcaagcgcacaaatggttggaatgaaagtggttgttgttaattgtgataaagagggaaatgttgattttgatgatttaaagaaaaaagtagagcaacattcagaaaaccttggggcactaatggtaacgtacccatctacccatggagtatttgaagaaaaaataattgatatctgtgagttagttcataaacatggtggccaggtctacatggatggagcaaatttaaacgctttggtcggagttgcaaagcctggaaattttggtccagatgtttgtcatattaatttgcataaaacattttgtattcctcatggtgggggaggacctggaatgggtcctattgcttgtaaaaaacatctacaagtttatctgcctaaccatccagtaataaaagattgtggaccgataaccggaattggagcagtgtcagcagccccttggggtagttcaagcattctatcaatctcttggatgtatattaaaatgatgggatcagcaggattaaagcttgctactcaagttgcaatattaaacgcaaattatattgcacatagactaaaagatcactttccaattttgtacaagggatcaaatggtaatgttgcgcacgaatgtattattgatattagaaatattaaatcagaaacaggtgtaacagaggaggacatagcaaaaagattaatagattttggctttcatgcaccaactatgtcatggccagtagctggtacaatgatgatagaaccgactgaaagtgaaggcttgtctgaaattgatagattttgtgacactttaattaagattaaacaagaaattgaaaaaattaaatcaggtgaatttgataaaatagacaatccaattaaaaatgctccccatacagactccgagcttacttcagataattgggaacataaatatacgagacaagaagcagcctatccatcaaaatttttaaaagctaataaattttggccaccagttgcaagagtagacaacgtatatggtgataagaatattttttgtacatgtccaagcatggatgaattcaaagaagatgctgcataa

SEQ ID NO: 220405 - DNA, 1390 bp, Unknown
  Bacterial polypeptide expressing nucleotide sequence isolated from the Sargasso Sea
tctgcccctcaactacgccatgatctccctgggctcctgcaccatgaagctcaacgctaccgccgagatgatcccggtgacctggcccgagtttggcaaactgcacccgttcgctccgctggcccaggccaagggttatcagctgctgctggccgaccttgaaaactggctggtgaaggtgaccggttacgatgcggtctgcatgcagcccaactccggtgcccagggcgaatacgccggcctgctcgccatcaagaagtaccacgagtctcgcggcgaggggcatcgcgatatctgcctcattccggcgtccgcgcacggtaccaacccggcttccgcccagatggcgggcctgcgggtcatcgtcaccgcctgtgacaagtcgggcaacgtggatctggacgacttgcgcgccaaggccgccgaggcgggggatcagctctcctgtctgatggtgacttacccctccacccacggtgtgtacgaggagaccatcaaggaggtgtgcgacatcgttcaccagcacggtggtcaggtctatctggacggcgccaacatgaacgcccaggtgggcctcactgcaccgggctttatcggggcggacgtgtcccacctcaacctgcacaagaccttcgccattcctcacggcggtggcggcccgggcatgggccccatcggcgtgaagaaacacctggcgccgttcgtggccggtcacgccgtggtcaagaccgacaaggagagccgcaacaacggcgccgtgtcggcggcaccgttcggctcggccagcatcctgcccatcagctggatgtacatcgccatgctgggggacgaggggctgaagaaatccactcaggtggccatcctcaacgccaactacctggccaagaagctgggtgaatccttccccgtgctctattccgggcgcaacggtcgggtggctcacgagtgcatcctggatatccgcccgctcaaagaagcctctggcatcagcgagatggacgtggccaaacggttgatggactacggcttccacgcgccgaccatgagtttcccggtagcgggtaccctgatggtcgagccgaccgagtcggaatccaagcgcgagctggaccgtttcgtcgaggccatgaccgccattcgcgccgagattgccaaggtgcaggatgggcagtggagtctcaccgacaacccgctggtccatgcgccgcacactcaggatgacgtgatggacgctgagtggtcccgtggctacagccgcgccgaagcggtgttcccgtcggaggccgtgcgtgccgccaagctgtggccgtcggtcaaccgcatcgacgacgtctacggcgatcgcaacctgttctgctcctgcatcccgaccgaggattacgccaagtaa

SEQ ID NO: 220406 - DNA, 1780 bp, Unknown
  Bacterial polypeptide expressing nucleotide sequence isolated from the Sargasso Sea
aagagagggcaaggcaataatggtttgtgatcttttatcactatcaagacttaaaactccagcagaacttggcgcagatattgcggttggtagtgctcaaagatttggtattcctatgggatatggtggcccgcatgcagctttttttgcaacaaaagaggaatttaaaagatctatgccaggtagaataattggtgtctcagttgatagacatggaaaaaaggcttttagattgtctcttcaaacaagggaacaacacataagaagagataaagcgacaagtaacatttgtactgctcaagcacttttagcaataatttcagctgcttatgcaatctatcatggacctgaaggtattttaaaaattgcaaatagaacatcgaaacttgcaaaaatatttgctgacagcttagaagagaatggttttaaaatattttctaaaagcttttttgatacagtcacaattgaaacaaatgaaaaaactgaaactatttttaataaagctttagcagaaaaaataaacttaaggagggtaaacaaaaaaactttatcggttgcttttgacgaagtaaagaagataaagcatgtcaatactcttctaaaagtatttggagttaaaaaagaatatgataactcggtgaacgtagagctgaataatttgccaaaaaatctattaagaacatcaaaatatttaacccatccaatttttaacaaataccactcagaaacagagatgcttagatatctaaagagactagaagattgcgatattgccctaaatagatcaatgattgccttaggttcttgtacaatgaagctaaatgcaacagctgagctaataccagttacatggaaagaattttctttacctcatccatttgtacccgaggatcagatgaaaggttataaggttttgtttaatgacttaataaatgacttaaaagaaattactggttttgatgctgtctctcttcaaccaaattctggagcgcaaggggaatactctggattaatgacaattagaaaatatcatatcaataataaacaaaaaaatagaaatatatgtctaattcctgaatctgcacatggaactaatccagctagtgcacaaatgtgtggtatgaaagttgtagttgtgaattgcgatgaagacggaaatgtagatttaaaagatttaaaaagtaaagttgataaatactctaatgatctcgcggcactaatggttacttatccttcgacacatggagttttcgaagaaaagatcacagaaatatgcgactacgttcacaaagctggcggccaagtatatatggatggtgcaaatttaaatgctttagttggaattgctaaacccggtaaatttggtccagacgtctgccacataaaccttcataagacattttgtatacctcacggtggcggtggaccgggtatgggtccgatagcatgtgcaaaacatttagaagattttttaccaaatcattcagttataaaaagtattggcactgataaaagccttggttcagtatctgctgccccttggggaagctcaagtattttagttatatcatggatgtatattaaaatgatgggagctgaaggtttaaaaaaagcatctcaagtagcgattttaaacgcaaactatatttcaaaaagattatcaaaattttataaagttttatacactggaaagaatggaaacgtcgctcacgagtgcataattgatttaagacctattaaagctaaatcaggaatttcagaagaagatatagcaaaaaga

SEQ ID NO: 220407 - DNA, 922 bp, Unknown
  Bacterial polypeptide expressing nucleotide sequence isolated from the Sargasso Sea
atgaatcaaattaaatcttttattgatagacatattggtattggtgctgatgaccagaaagaaatgctcgactttcttggttacaaagatatgcattcgtttattgaggatgttgtgccggaaagtatattagaagatgattatttagatcttggagagggattatcagagatggcggctctgaaaaagcttgataaaattgctaagcaaaacaaagtctttagatcttatattgggcagggttactatggaacagttactcctaaggtcattaaaagaaatgtatttgaaaatcctggatggtatacctcatatactccatatcaagctgagatttctcaaggaaggttagaagcgctaataaatttccaaacaactatctgtgagttaacctcaatggaaatagctaatgcatctcttcttgatgaggctacagccgcagctgaagctatgatgctagcaaaaagagtatcgaaaaataaatctaattatttttttgtcgataaaaactgtttcaggcagactatttccgttcttaaaacgagggctaagccatttggtattgagcttgaggttggagaccctcaagattttaatgaaaaagatttttttggaatgttaatacaatatccaaataaatttggagaaatagaggatttttcaaggctatcagattactgcaaaaagaataagtccttgcttgtttgtgctactgatcttcttgccttgactcttttgagacctccaggagaaattggtgctgatattgttataggttcgtcccaaaggtttggagtcccaatgggatttggagggcctcatgctgcatttatggctacacatgagagttttcaaaggtcgatgcctggaaggattataggggcatctaaagatgctggcggaaatctatcctacaggcttg

SEQ ID NO: 220408 - DNA, 864 bp, Unknown
  Bacterial polypeptide expressing nucleotide sequence isolated from the Sargasso Sea
gacggggcaatttaaatgcattagtaggtatagctaaaccaggattttttggacctgatgtttcacatatgaatttacataaaactttttgtattcctcatggaggaggaggccctggtatgggtcctataggtgtcaaaaaacatttaataccctttttgccaggacatcctttaatagataatgaaattggacttcagcaggatcaagaagctatttcctcagctccctggggaagtgcatctatattacctatatcatattcttatatatttatgatgggagatataggtttaaaaaatgcaactcaagtagctattttaaatgcaaattatattaaacattctttggagccttattttccaattttatataaaggaaaaaataatatggttgcacacgaatgtataatagatttaagacctttgaaagaagaattaaatataactgaagaagacatagctaaacgtcttattgattacggttttcatgcacccactatgtcttttccagtacctgggactttaatgattgaacctacagaaagtgaatctaaagaagaaatagatagattttgtactgcaatgaaaagtatatttgatgaaatagaaaaaattagatcaggtaaatttgatattctagataaccctataaaaaattcacctcacactattgaagaattaactgatgataaatgggaacataaatatacaagaaaagaagcagcttttccgcattcatatcttcaaaataataaatattggtctccagttggacgtatagataatgtatatggagatagaaatttattttgctcttgtcctccattagatgaatatgaagaacttgagaatactgcttaaa

SEQ ID NO: 220409 - DNA, 1756 bp, Unknown
  Bacterial polypeptide expressing nucleotide sequence isolated from the Sargasso Sea
tgatagacgatacttcaaaagaatttattgggtagaccatattggcccgaatactagtgaccaaaaagagatgttaaaagcaatatcttcgaaatctattaatgatttaattgagaaaaccgtaccaaaaaatattttaattaaagataaccttaaaattgatgagcctatgtctgagactgatgctctcaaaaaattaaaatttttgtcaaaaaataatcaaatttttagaaattttataggtatgggttattataatactgttaccccaaatgtgattttaagaaatattcttgagaacccaggttggtatacttcttatactccttatcaaccagaagtagctcagggcagattagaaatgcttattaattttcaacaaatgataatggacttaaccggtatggatattgcaaatgcttcattgttagatgaaggaacagctgccgctgaagcagttggtttatgtcaaagaatagataaaagtaattcaaaaaaaatatttgtatcaagctcatgtaacccacaaacaatagatataattaagacaagagtagaacctttcaatatagaattaataattggtgatgaagaaaaagttttaaaagatatcaaagacaaaattatttgtggtgttttagcttatcctggaactttaggtgaaataaaagacccaagtgaagctataagtttaattcataaaaaagaaggtaaagtaattatggtaagtgatctattggcgctagcaagactcaaaacaccagcagagctcggggcagatattgccgttgggagtgcacaaagatttggaataccgatggggtatggaggtccacatgctgcgttctttgcaaccaaggaagaatttaaaagatcaatgccaggaagaattattggagtatctgttgatagacacggaaaaaaagcatttagattatctcttcagacaagagaacagcacataagaagagataaggccacaagcaatatatgtactgcgcaagcactgctcgcaattatttcagctgcttatgcaatttatcatggtcctgatggaattttgaaaatagcaaacaggacatctaaacttgcaaaaatatttgctgatggtttgaaatcaggcggctacaaactgcatacagaaaattactttgatacagttactattagaactaatgaaaaaacagatactataaataacaaagccttatctgagaaaattaatttaagaattgtagataaaaataccttatcagtagcatttgacgaagtaaaaagagttgatcatgtaaatactttattaaaaatatttggagttaaaaaattgtttaataatactgatacagttgaattaactaatttaccagaaaaccttttaagaacatctaaatttcttactcatcctatttttaacaaatatcattctgaaacagaaatgcttcgttacctaaaaaaattggaagattgtgatatcgctttgaataggtctatgattgcacttggttcatgtactatgaagctaaatgcaacggctgagcttatccctgtaacctggaaagaattctcgcagccacacccatttgtgcctcaagatcaaatgaagggatataaggttttatttaatgatttagttaatgatttaaaggaaatcacaggttttgatgcagtttctcttcaaccaaattctggcgctcaaggcgaatattcaggactaatgacaatacgtaagtttcatttaaataataatcaaaaaaat

SEQ ID NO: 220410 - DNA, 1501 bp, Unknown
  Bacterial polypeptide expressing nucleotide sequence isolated from the Sargasso Sea
ttacctaacctaccgaaaaatttattaagaacttcaaaatatttagagcatcctgtttttaattcatatcactcagaaacagaaatgcttagatatcttaaaaagttggaagataaggacatagctcttaatagaactatgattgcactaggctcgtgtacaatgaaattaaatgctaccgcagaaatgatacctatttcgtggagagaattagccgagcctcatccatttgttcctgttgaacagatggaaggatatcgagcgttgttcactgatcttaaaaattggttaagatcaattactggtttttctggtgtctcacttcagcctaatgcaggggctcaaggagaatatgctggattaatggtgataagaaaataccatttagatagaggcgaacaaaacagaaatatatgcttaattccaagctcagcacatggaactaatccagcaagcgcccagatggtgggaatgaaggtggtagtagttaattgtgataaagagggaaatgttgattttgaagatttaaagaaaaaagccgagacacactcggaaaatcttggagctttaatggttacatatccatccacacatggtgtatttgaggaaaaaataaaagatatctgtgaattaattcataaacacggaggccaagtttatatggatggtgcaaacttaaatgcacttgttggtatagcaaaaccaggaaattttggtcctgatgtttgccacataaacctgcataaaacattttgtattcctcacggtggaggaggccctggaatgggacctattgcatgtaaaaggcatttacaggtttatcttcccaatcacccggtcgttaaagattgtggaccttcaactggaattggacctgtctctgcagcaccttggggaagctcaagtattttatcaatttcttggatgtatatcaaaatgatgggctctcaaggattaagacttgcgacacaaattgcgatactaaatgcaaattacatagcaaataggttaaaagatcactatccaatactttacaaaggctcaaatggtaatgtggctcatgaatgcattattgatattagatcaattaagagtgaaacaggtattaccgaagaagatattgctaaaagattgatagattatggttttcatgcaccaacgatgtcatggccagttgctggtacaatgatgatagaaccaactgaaagtgagagtttatctgagctggatagattttgtgataccttgattagcattaaatcagaaattgacatgatcaagtcaggtaaatttgataaagttgataacccaataaaaaatgctccacataccgattttgaattagcttcagacgagtggacacataaatattcaagagagcaagctgcttatcctgcaaaatttttgagagtaaataaattttggcctccagttgcaagagtagacaatgtttatggagataaaaatatattttgtacctgtccaagtattgacgaataaa

SEQ ID NO: 220411 - DNA, 401 bp, Unknown
  Bacterial polypeptide expressing nucleotide sequence isolated from the Sargasso Sea
gcccaaacgattgatggattacggcttccatgcgccgaccgtgagctggcctgtggccggcaccgtgatggtggagcccacagagagcgaaagcctggcggaattggatcgtttcgctgatgccatgatcgccatccgcgatgaagttcgggcgattgaatcaggggcgattgatgccagcaataaccccttgaaacaggccccccacacgatggctgcggtgatggccgaggtctgggatcggccctacacccgacaacaggctgctttcccattgccagatcaacagcagcacaaggtgtggcctgcggtggctcgtattgacaatgcctacggcgatcgcaacctgatttgtacttgcccaagtgttgaggatgtggccgttgctgttgctgcgtaaa

SEQ ID NO: 220412 - DNA, 670 bp, Unknown
  Bacterial polypeptide expressing nucleotide sequence isolated from the Sargasso Sea
tttatgccttcacatcatgaaaatattcagaatgtaggtcctgtatcctcaacagattttggaagtgccagcattctaccaattagttggatgtatattacaatgatgggatcaaagggtttaaaacaagctacgatgactgccattttgagcgcaaattatgttgcaaagcgcctaagcgatcactaccaaatactttataaaggtgagaataacttaattgcccacgaatgcataatagatgcaagaccttttaaagagtcctcaaatattgatgttgatgatatagctaaaaggcttatggattacggttttcatgctcctactatgtcctggccagttgcaggcactcttatgattgagcctactgaaagtgaatcaagagaagaattagatatattctgtgatgctatgatttctattaggaaagaaatagaggaaattgaaaagcgtaatgaggatcctgaaaataatattctaaagaattcacctcacactgtagaagaacttagcagtgataactggaaacataattattctagagaaaaagctgcatatccactggattacttaaaagcaagaaagtattggccgcccgtaaagaggatagacaatgtttacggtgataaaaacctattttgtacctgtccagatatggatgagttttaga

SEQ ID NO: 220413 - DNA, 1273 bp, Unknown
  Bacterial polypeptide expressing nucleotide sequence isolated from the Sargasso Sea
gcacaaaggctaggagtcccaatgggctttggagggccacatgctgcttttttcacaacgacagaacaatttaaaagaaaaattcctggccgtatcataggcgtatcgaaagattcacatggaaatcaagcattgcgcatggctcttcaaacgcgagagcaacatattcgtagggaaaaagccacatcaaacatatgtacggctcaagttttattggctgttatgtcagggatgtatgcagtatatcatggccctgagggtcttgtccgcattgcacaaagaataaaccacttaacaaaccagttggcttcttctttagtctattccgggtatgaaataaaaagtaacaggttttttgacacaatttgtttcaaggcatctggctggaaagaaaaatcagaggcgatgaaattaaattttcgagattttggtgatggctttgttggcatttcattagatgaaacaactacagaatcggatatagaaagtatacttaatgttttcagtgcaaagatcagtcctgatactaatacatcaataccagataacttagtaaggagctctagatttttaagtaattctgtttttacaaagtatcgatcagagactgaaatgcttaggtatatgcataaacttgaactaaaggacttgagtctaaatacaagcatgatccccttaggctcttgcacaatgaaactgaatgcaactactgaaatgaaacctgtaacctggcctgagttttctaatgttcatccttttgctccgataaaccaggtaggtggctatcatacattgatcaatgaactgggtaataggctaattcaactaactggatttgatgcaatatcaatgcaacctaactcaggggcacaaggagagtatgctggtcttatgactataagagcttttcacaaagccaataaccaacaagaaagagacatatgcctaatcccatcttcagctcacggaacaaacccagcatcagctataatggcaggtatgaaagttgttgtcgtagaatgtgatgaccaagggaatattgatgaggtagattttcaaaataaagctagtgaatatcgtgataatctatctgctattatgattacctatccatccacacatggtgtttttgaaccatcaattaagcaattatgtcaaatagcacatgataatggagggcaggtatacatggatggtgccaacctgaatgcactagttggcctttgtgaacctggtaattttggtgtagatgtaatgcatataaatctgcata

SEQ ID NO: 220414 - DNA, 1347 bp, Unknown
  Bacterial polypeptide expressing nucleotide sequence isolated from the Sargasso Sea
catgaacgctccgcaccccgcttcctcggcgcttgccgccgaacgcccgacgttggctgacctggaggcgcgcgacgccttcgcgcaccgccacatcggcccgtctgccgacgagcagaccgccatgctcggcacgctgggctacaccagccgcgccgcgctgatcgacgccgtgattccgccggccatccgccgccaggacggcatgccgctgggcgaattcacgcagccgctgaccgaagaagcggcgcttgccaagctgcgcggcatcgccgggcagaaccgcgtggtcaagagcctgatcggccagggctattacggcacgcatacgccaggcgtcatcctgcgcaacatcctcgagaaccctgcctggtacacggcgtacacgccgtatcagccggaaatctcgcagggccgcctggaagcgatgctgaacttccagcagatggtgatcgacctgacggccatggacatcgccaatgcgtcgatgctggacgaagcgaccgccgcagctgaagccatgacgctgctgcagcgcattggcaagtcgaagtcgaccgtgttcttcgtggcggacgacgtgctgccgcaaacgctggaagtcgtgcgcacgcgcgccgagccgatcggcgtgcaagtggtgaccggcccggcggccgatgcggccaagcacgacgcgttcggcgtgctgctgcaatacccgggcgccaacggtgcgctgctgggcgatctggcgacgtaccaggccctgaccgatgccgtgcacgccgccggcggtctggtcgtggccgccgccgatctgctggcactcacgctgctggccgcgccgggcgaatggggcgccgacgtcgtgatcggcaacacgcagcgttttggcgtgccgttcggtttcggcggcccgcacgccggttacatggccgtgcgcgatgcgttcaagcgctcgatgcccggccgactggtcggcgtgacgatcgatgcgcaaggcaacccggcctaccgcctcgcgctgcagacgcgcgagcagcacatccgccgcgagaaggccacctcgaacatctgtaccgcgcaggtgctgctgggcgtgatggcgtcgatgtacgccgtctaccacggcccgcaaggtctgaagcgcatcgcccagcgcgtgcaccgcctgaccgccacgctggccgccggcctgcgcgcgatcggctacacgctggaagccgacgccttcttcgacacgctgaccgtcgccaccggcccgcgcaccgcgaacctgcacatcgcagcacaggcgcacggtataacctgcgccagatcgacgatgcgcgactgggcatctcgctggacgagaccgtccgcgcg

SEQ ID NO: 220415 - DNA, 1757 bp, Unknown
  Bacterial polypeptide expressing nucleotide sequence isolated from the Sargasso Sea
ccggtacggagagcgcttcgacacggtcaccgtgacctcacctctggcgccagctgtgcatcaagcggttggggaagcaggtttcaacctgcgggtgctcccggatggcgcgaatcccgccgagtcaacgggttttggcatcgccttggatgaatgcaccacggccgatgaactctccaggttggtcgcggccttggccacggccgctggccagacttctccctccttaccgctggcgcccgttgaggagctgtgcggtgtgcccgagcgggttgacccctggcttagccaatcggtgtttcacgaccatcgcagtgagaccgaactgatgcgctatatccagcgcctggtgagtcgagatctttccttggtgcacgggatgatccccctcgggagttgcaccatgaagctcaatgcagccgctgagctgctgcccgtgagctggcccgccttcgctggcctgcaccccttcgctccgatggctcaggccgccggctaccagcggttggctgagcagctggaggcttggctcgcagctctcacggggtttgcggcggtgtccctgcagcccaatgctgggtcccagggggagtacgccgggctgctggtgattcgtgcctggcatcgctccaggggcgacgaccatcgtgatgtctgcctgatccccaccagtgcccacggcacgaatcccgccagtgccgtgatggcgggtctcaaggtggtggctgtggcttgcgacgctgacggcaacatcgatcagcaggatctggctgcccgtgcagcggagcacgccgaccgcctggcggccctgatggtcacctacccctccacccatggcgtcttcgagaccggcattcgcgggatttgtgagctggtgcatcgccacggtggtcaggtgtatctcgatggcgccaacctcaatgctcaagtcggtttgtgccgtccgggtgccttcggtgccgatgtctgccatctgaacctgcacaagaccttctgcattccccacggcggtggcggccccggtgttggtcccatcggtgtggcggcccatctggctcccttcctccccggtcatcccctgcaggcttcgccagatcaagccatcgggccggtgtctgcagcagctttgggcagcgcgagcatcttgccgatcagctggatgtacctgcggatgatgggggcggaggccctgcgccaggccacagcggtggcgttgctgtctgccaactatctggcccttcgcctggacccgcactaccccgtgctgttccgcggtgccactggacgtgttgcccatgaatgcatccttgatttgcgtccgttgaaacgggatgccgggatcgatgtggatgacatcgccaaacgattgatggattacggcttccacgcgccgacggtgagttggcctgtggccggaaccgtgatggtggagcccaccgaaagcgaaagcctggcggaattggatcgttttgctgacgccatgattgccatccgcgatgaaattcgggagatcgaatcaggggctatggatgccagcaataaccccttgaaacaggctcctcacacgatggctgctgtcatcgccgaggactgggatcgtccttacagccggcaacaggctgcattcccgttgcctgatcagcagcagaacaaggtgtggcccgcggtggctcgtattgacaatgcctatggcgatcgcaacttgatttgcacctgcccaagtgttgaagagattgccgtggcggttgctgcttaag

SEQ ID NO: 220416 - DNA, 1459 bp, Unknown
  Bacterial polypeptide expressing nucleotide sequence isolated from the Sargasso Sea
ttgagctcgggttttgttcaacggcatctcgggccttcggctgccgagcaggcccagatgttgcagcggctgggttgccgagatctcgagcagctgcttgagcagtgcgtgccggccgaaatcctgattgacgctgatcaggctcgccaagctttgccgcaagagtgcgatgaacgtcaggccttgcgggagctcgagcagcgcgctgccgctaattcggtgctgcgcaacctgattggcctgggttactacgacaccgccacgccggctctgatccagcgccatgtgctggaaaacccctcttggtacaccgcttacaccccctatcaagcggagattgcccagggccgtttggaggctctgctcaatttccaaaccctgatcagcgagctcacgggcttgccgattgccaatgcctccctgctcgatgaggccaccgctgcggccgaggcgatggccctggcctatggcgcctgccggcgtaaggcagcccgccgcttccatgtccaggccgatctattcccccagaccctggcggtgcttcaaacccgcgccgagcccctgggcattgagttggtggtggctgatcccgctgcaatggagttcggcgaggacagctttggcttgctgctgcagctgcccagcgcaagtggcggctgccccgatccaaccgaggtgattgcctgcgccaaggccgccgatgtgttggtgatcgcggctgtcgatcccctggcccaagtgctgatgcccccagtggcgcagctcggcgtgcagatcgccgtgggcagtgcccaacgctttggcgtgcccctgggctttggcggtccccacgctgccttttttgccaccacggaggcctacaaacgccagatccctggccgcttggtgggcatgtcgcgggatgcggctggcgagccagccttgcgcttggccttgcaaacccgcgagcaacacatccgccgcgataaggccaccagcaacatctgcaccgctcaagtgctgctggcggtgatggctggcttctacgcggtgcaccacggccctgatggcctcacggctatcgcgagccgcgtgcagcgcctcaccacagccttggccagcggcctgcaacaactgggcttggagctggctgcggcgccggcttttgacaccttgcgtctgcgacttgatcagcccaaggcatggattgagcgtttggaagcggcgggcttcaacctgctgcccctgcctgatggggtaggcatcagcctggatgaatgcagtgatgaggctgaagttcaggcgctgctggattgttttgccgctggttgcggccgcatggcccccgccagcagcgagctattgactgccacgcctctgcccaaggccattggtgagctgccagtgcgaccggccggttggctaccccaggaagtgttccagctctaccgctcagaaaccgagctgtgcgctacatcca

SEQ ID NO: 220417 - DNA, 1618 bp, Unknown
  Bacterial polypeptide expressing nucleotide sequence isolated from the Sargasso Sea
aaaccctggatggtatacctcatatactccatatcaagctgagatttctcaaggaagattagaagcacttatcaatttccagacgactatctgtgagctaacttctatggaaatagctaatgcgtcccttcttgatgaagctacagccgcagctgaagctatgatgctagcaaagagggtatcaaaaagtaaatctaattatttctttgttgataaaagttgtttcaagcaaactatttctgttcttcaaacaagggctaaaccatttggtattgagcttgagatcggagatccccaagattttaatgaaaaagatttctttggaatgttaatacaatatccaaataagtttggagaaatagatgatttcacaaagctatcagcttactgtaaaaaaaataaatccttactagtgtgtgctactgatttgcttgctttgacgcttttaaaacccccaggagaaattggtgccgatattgttataggctcatcccaaagatttggagtcccaatggggtttggaggcccgcatgctgcatttatggcaactcatgagagttttcaaagatcgatgccaggaagaattattggggcatcgaaagatgccagtgggaatcttgcctataggctcgcacttcaaacaagagaacaacatataagaagggaaaaagctaccagcaatatttgtacctcccaagctcttctagcagttatggcaggcttttatgcaatttatcatgggccagaagggttaattgggattgctactaaaatccatctaaaaacgtgtacactttataatgcgctcaagagagaaaatcatgaaatcctttatgacaacttctttgatactctttctgtgcgtttgaaaggagacttatcgaaagtcaaagaacgtcttctagatgcaaatataaatattaattggtttgatcaagatcttgctagtattgctcttgatgaggcgactgttagtatctcgattgatgaggctacttcagttgatgatatcaaagatatcttctttgccattacaggaaaggaaccgcctagatttagttacagaactgaagttgttttggcaaatgtcggcatgacaaaaaatatgagaagatcctccggttttatgaaacaagagcgttttaataaatatcactctgaaacagagatgatgaggtacattaaaagactttctgacaaggacatcgcacttgacagatcaatgattccacttggctcttgcacaatgaaattaaattcagcttcagagatggcaccagtaagctggccagaatttgcaaatatgcatccctattgtcctaaaaaccaaacaaaaggctatagagctcttatcaaagacttaaaaaatatgttatcaaaaataactggttattatgatatttctcttcagcctaatgctggatctcaaggagagtatgccgggcttttagcaatagatgcattccataaaaataatggcgatgagaatagatctatttgtctcataccaagatctgcacatggaacaaatccggcttcagcaatgatggttggaatgaaagttgtgccagtagaatgtgattcagatggcaatattgatttggaggatttaagagaa

SEQ ID NO: 220418 - DNA, 1244 bp, Unknown
  Bacterial polypeptide expressing nucleotide sequence isolated from the Sargasso Sea
aatgacccagtcactgtttgaactcgagcaaaaaaccgatttcatccgccgccacatcgggccgggtgaggaagatctgcgcgccctgctggccgtggtgggcgccgagagcctggatgatctgattgagcagaccgtccccgccgccattcgccggccgggcccgctcggcatcggcgcctccatgaccgaggtggaagcgctggccaagctcaagagctatgccgcccagaacaaggtcgccaagagctacatcggcatgggctatcacgatacccatgtaccccacgtcatcttgcgcaacgtgctggaaaacccgggctggtacaccgcctacaccccgtaccagcccgagctggcgcagggccgtctcgaagccctgctcaacttccagcagctgaccctggacttgaccggcatggatctggccagtgcctccctgctggatgaggcgaccgccgccgccgaggcgatggcgctggccaagcggatggccaagtccaaagccaatctcttcttcgtggccgacgacgtgcacccgcaggtgatcgacgtggtcaaggagcgggcggttcacttcggttttgacgtggccgtcggcccggccgcacaggcctgcgccgaagaggtgttcggtgccctgttccagtaccccaccaccacgggtgaagtgaaagatctgcgagccctcatcgccgccgtgcaagcccagaaagggctggcctgcgtcagcgccgacctgctctccttgctgctgctcaaatccccgggcgagctgggggccgatgtggtgctgggctcggcccagcgctttggcgtgcccatgggctacggtggcccgcatgccgccttcttcgccactcgcgatgcttacaagcgctccatgccgggccgcatcatcggtgtctccaaagatgcccgcggcaaggccgccctgcgcatggcgatgcagacccgcgagcagcacatccgccgcgagaaggccaactccaacatctgtaccgctcaggtgttgctggccaacatggcgagcttctacgccgtctaccacggcccggtgggactgaaaaccatcgcctcccgcgtgcaccgtctgaccaccattctggcgctcggcctccaggccaagggcgtggccctccagcatgccagctggttcgataccctgacagtgctgaccacgggcaaatcagagctgatcgccaaggccgaggggctcggcatcaacctgcgcgcggatctgg

SEQ ID NO: 220419 - DNA, 2041 bp, Unknown
  Bacterial polypeptide expressing nucleotide sequence isolated from the Sargasso Sea
aatgttacataattctcaaaaagattttttaaaaagacacattggaccatcagatgaagatcaaaataaaatgcttaaagaacttaattacaaatcactagatgatttaatcaaaagtacggttccagaaaagatccaattgaaagatgaattaaatattggtgagtctaattcagaatatgaagcattaagaaaattaaaagcaatttcgaagaaaaatcaaatttactctaactttatagggatgggctattatggcacttatacgccatatgtaattctaagaaatattttagaaaatccaggttggtacacttcttatacaccttatcaacccgaggtagctcaaggaagattggaaatgctgcttaatttccaacaaatgatagttgatttcacaggaatggatattgcaaatgcatctttattggatgaaggaacagcagccgcagaagcaatgggattaagtcatagattaaataaaaaggacagcaatttagtttttgtctcagaaaattgtcacccacaaacaattgatgtaatccaaacaagagcagaaccaatgggattaaaagtacttgttggtaatgaagataaagtattagatcaattaaaagaagatttagtttgtggcatattgcaatatccgggaacattaggagatataaaagatcctagcgaagcaataagtaaaattcataaaaaaaatggtaaatcaattttagcttgtgatttattagcacttgctaagttaaaaacaccaagagaactaggagcagatattgctgtaggaagctctcaaaggtttggaataccaatgggctacggtggaccccatgcagccttctttgcaactaaagacgaatacaaaagatctatgccaggaagaattgtcggtgtctctgttgatagacacggaaacaaagcatacagattatcattacaaactagggaacaacatataagaagagataaggctacaagtaatatttgtactgctcaagccttattagcaattgtgtcagcagcatatgctatttatcatggtccagagggtatccgcactatttctgagagagtttctcaattagctaaaaactttgcagataaattaaaacaatcaggatatgaaatttattcagatcatttctttgatacggttacaattgttactaaagataaaactgatcaaatctacaaaaatgctttaaatcaaaaagtaaatatcagaaaagtaaattctgaaatgctagcagtttctttcgatgaaaagaaaaatgtttatagagtaaatcaattactaaaaatttttaacgctgcagaatcaattaaaaaagaagatccaacagtaagtttacccaatttaccaaaaaatttattaagaacttcaaaatatttagaacaccctgtctttaattcataccattcagaaactgagatgcttagatatttaaaaaaattagaagataaagatatagctcttaatagaactatgatagcacttggctcatgtactatgaaattaaatgctactgcggaaatgatacctatttcatggagagaattagcagagcctcatccatttgttcctattgagcagatggagggatatagagatttattcactgatcttaaaaattggctaagatcaattactggtttttctggtgtttcacttcaaccaaatgcaggtgctcaaggggaatatgcaggattaatggtaattagaaagtatcatttagacagaggtgaagaaaacaggaatatatgtttaataccaagttcagcacatggaactaatcctgctagtgcacaaatggtaggaatgaaagttgtcgttgttgattgtgacaaagaaggaaatgttgattttgaggacttaaagaaaaaagcagaaatgcattctgaaaatcttggagcattaatggtcacttacccttccactcatggagtttttgaggaaaaaattacagatatatgtgagttaattcataaacatggtggtcaagtttatatggatggtgcaaatttaaatgcgctt

SEQ ID NO: 220420 - DNA, 786 bp, Unknown
  Bacterial polypeptide expressing nucleotide sequence isolated from the Sargasso Sea
aatgggcaaaaagaaaaaatatttagaagatcaatttgttgaaaggcatattggcccaaacgaagatgatataaaatggatgcttgaaaagatgggtcttgaatctattgaacaactaattaatttttctgttccaaaatcaatccggtcaaaagaaaaattaacgattggtagtggtatatctgaaaaaacattaattgaaaaattaaaaattatagcggaaaaaaatgtcttaatgaaatcatatattggcatggggtactataattgtatcactccgcctgttattcaaagaaatatattagagaacccaggatggtatactcaatacacaccttatcaagctgaaattagccaagggagacttgaggctttaattaattttcaaacaatggtttgtgattttacagcattacctatttcaaatgcatctttgctggatgaagccactgctgctgcagaagcaatgataatggcgttcagaatgagtaagaatggaaatatttttctagtatcaaataattgtcaccctcaaacgattgatgtattgaaaacaagatccgaaccattaggtatatcaattaaaatacaaaatgaagatgattttgtttttaatcatcaagtatttggttctattatacagtatccgggtaatgatgggtcagtaaataatttccaagatattacaaatgctgcgcataaggagtctgcttatgtaatagttgcaactgatcttatgagcttagctttactaaaggcgcctggtgagcttggagcagatgtagc

SEQ ID NO: 220421 - DNA, 1594 bp, Unknown
  Bacterial polypeptide expressing nucleotide sequence isolated from the Sargasso Sea
atgagtcaaaactctaaagaattttctcagagacatattggtcttaaagatagcgaaatcaatcatattcttcatgatcttggttatggaagtatggaagattttttagaaaaactaattccagattcaatttatagtaagaaaaagttaaatctgccagaaccacttgatgaaccaagcgctttaagagcattaaaagagatatcgaaaaaaaataaggtttttaaaactttcattggtcaaggtttctataattgcaacgttccagcagtgattaaaagaaatgtttttgaaaatcctggttggtacacatcttacacaccatatcaaccagagatagctcaaggaaggctagaagcattgatgaattatcaaactatggtttctgatttaactggaatggatatttctaatgcatcattgcttgatgagccaacttcagctgctgaggcgatgatgttagccaaaagagtagctaagagtaaatccaatactttttttgtaaacagcaaaacatttaaacaaacaatcgcaattattaaatctcgagcaaaaccacttggtgttgaaattgaaattggtgattgtcctgacaaggggaaggaatattttgctgcatattttcaatatccaaatgcagagggctcaattgaagatttagaaagtgttactaaagatattcaagcaaaaggtggtctcatgattattggaactgatttgcttgctttaacacttttgaaaactccaggagattttggtgcagacatagcggtgggctcagcacaaagatttggtgtgccaatgggatttgggggcccacatgcaggttttatggcagtaaaagatgtctataaaagatctctacctggcagattaatcggattaactcaagatagtaaaggacgtccttgctacagactcgcactacaaactagagaacaacacattagaagagagaaggcgacaagtaatatttgtacagctcaagcattattagcaattatgtctagcttttatgcaatttaccacggtccaaatggtctaaaatctattgcgagtgatgttaaagaaaaaacactaaaaattgctaatgagctttctagaaaaggctatgttattaaaaataacaattttttcgacacactagttgtagaacttgaaaatccagaacaagttcatctaagggcaaaggataaaaaaattaatctaagggttatctctgaaaaagaattaggcctgagttttgatgaaatgacaacggatcaggatgttaataacatatctgatctttttgatgatctaaaaaagccattgaaaaaatatgaaacaaactgggataaatctttcgacagaaaaacagaatatttaaatcatgaagtatttaatagccatcactcagaaacacaaattctaaggtatatcagaagtctatctgataaagatatagcgctggatagatgtatgattccattgggctcctgcacaatgaaattaaatgctacttctgaaatgattccagttggctggaatgggtttgcaaatgttcatccgcatgcaccaactgatcaaactgagggttatcaaaaaataattt

SEQ ID NO: 220422 - DNA, 2902 bp, Unknown
  Bacterial polypeptide expressing nucleotide sequence isolated from the Sargasso Sea
catgaccacttcagctgtgaaaaccctgtcgcaacttgcgaacaaccaggaatttatacaacgccatataggcccggacgctaacgaaacagcagctatgctggctgaattaggcgtaagcagcatggaagagctgatcgcacaaactgtgcctgcttccattcgcctgccaaagccattggcaactggtgaagccacaactgaagcggacgctctggcgtacttaaaagctgctgcgaacaaaaacaaactattcaaaagctacattggtatgggctaccacccaactctgacaccaaacgtgatcttacgtaacgtgttagaaaacccgggctggtacacagcctacaccccataccagccggaaattgctcagggccgtttagaagctctgctgaacttccaacaaatttctttagatttaacaggcatggagctggcatctgcttcattactggacgaagccactgcagctgctgaagctatggcgctggctaaacgtgtcgcgaaaagcaaagccaatacctacttcatcgctgacgacgtgcacccacaaactattgacgtagtgcgtacccgtgcggaaatgtttggttttgacgtaatcattggcaaagccactgacgcagtgaaccacgacgtcttcggtgctttattacagtacccatctacaacaggtgaagtacgtgacgacagcggcctgattgcagcgctgcaggcgaaaaaagccgtagttgcagtagcagccgacatgatgagcttactgttattaaaatcgccaggcgaattaggcgcagacgtagtattaggttctgcccagcgttttggtgttcctatggcttttggtggcccacactcagccttcttcgcaacccgtgacgattacaaacgttctatgccaggccgtatcataggtgtgtcaaaagaccgccgtggtaatcaggcactgcgtatggcgatgcaaacccgtgaacagcatatccgtcgtgaaaaagccaactctaacatctgtactgcacaggtattactggcgaacatggcatctttcttcgctgtgtaccacggcccagaaggcctgaaaaacattgctgaacgtattcaccgttctgctgatgtattcgcagctggcttacaagccaaaggcgtttcattagtacacagcacctggttcgacactgttacttttaaagtggctgacagtgctgcacgctctgctgtgatcgcgcgcgctatcgccgctgaagtgaacttacgtactgatatcgccgaaagcttaagcgtaagcttccacgaaatgacttcagctgctgacatcgctcagctgtttgatatcgtattaggcgctggtcatggcttagacgtgactaagctggacgctgacatcgtagctaaaggctcaaactctattcctgctgacttagtacgtacttctaagtacttaacgcacccggtatttaaccagtaccacagtgaaactgaaatgctgcgttatatcaaaaagctggaaaacaaagacttagcactgaaccactcgatgatttctttaggttcgtgcaccatgaagttaaacgctacagccgaaatgatcccggtcacctggccagaattcggttcgctgcacccattcgtgccacgcgaccaggctgaaggttactacgacatgattggcgagctggccaactggttagtcgacatcacaggctacgacgctgtgtctatgcaaccaaactcaggcgcacaaggcgaatacgccggtatgatcgctattcgtaaataccacgaaagccgcggcgattcacaccgtaacgtgtgtttaattcctgtgtctgcgcacggtactaaccctgcaacagcagctatggcgtgctttgaagtggtactggttgactgcgacaagagcggtaacatcgacatggccgatttaaaagccaaagccgaagccgtatcagacaagttagccgccattatggtgacttacccttccacacacggtgtgtttgaagagtctatccgcgagctgtgtgacatagttcacgcgcacggtggccaggtgtatatggacggcgccaacatgaacgctcaggtaggtattacttctcctggctttatcggtgctgacgtatcgcacttaaacctgcacaaaaccttctgtattcctcatggcggtggcggcccaggtatgggtcctatcggtgtgaagaagcaattagctccgtttatgccaaaccacgctgtggttaaaattgaaggcacaggccaggacaacggcgcagtatctgcagcaccatttggtagcgcaggcattctgccaatcagctggatgtacatcaaaatgatgggcggcgacggtttacgtcaagccactgaaatggcgattttaagcgcgaactacatggcgaaaaaactgggtagcctgttccctgtgctgtacgtaggtaccaacggccgcgtagcgcacgaatgtattatcgacatgcgtccattaaaagaaaaaaccggcgtgaccgaaatggacatcgccaaacgtttaatggactacggcttccacgccccaactatgtcattcccggtagccggcacgctgatgatcgagcctactgagtctgaaagcaaagtagaactggacaaatttatcaccgccatgacttctatccgcaatgaaattgccagggtagaagcaggggaatggactgcagacaacaacccactgcatttcgcgcctcatactatggaagatattttcgacccaagctgggaccgcccatacgagcgtcagtacgctgcattccctgcacagtacgtggcagaaaacaaattctggccaacagtcacccgtatcgacgacgtatacggcgaccgcaacctgatgtgtgcctgccctagcccggaagattataggtaa

SEQ ID NO: 220423 - DNA, 1222 bp, Unknown
  Bacterial polypeptide expressing nucleotide sequence isolated from the Sargasso Sea
ttgccaaaaaaacttttaagaacttctacttatttggatcacccagtatttaatagttatcattcagaaactgaaatgcttagatatttaaaaagattagaagattctgatattgctttaaatagaacaatgatagctcttggatcttgtactatgaagttaaatgcagtttcagaaatgattccagtaacatggcaagaattttcacaacctcatccattttcaccagtagaacaaatggaaggatatagagagctttttactgatttaaaaaattggctaagatcaattacaggtttttctggcgtttcacttcaacctaatgctggagctcaaggtgaatttactggattaatggtgattagaaaatttcatgaaaaaaatggtgaattaaatcgtaatgtttgtttaattccaagttctgctcatggcactaatcctgctagtgctcaaatggtaggaatgaaagttgttgttgttaaatgtgatgaatatggaaatgtagattatgaagatttaaagaaaaaggctgaggaacattctgaaaatttagctgcattaatggtaacatacccatcaacacatggtgtttttgaagaaaaaataattgatatatgtgacttgatacataaacatggtggtcaagtctatatggatggagcaaatctgaatgctttagtaggaattgcaaaaccaggaaaatttggtccagatgtatgccatataaatttacataagactttttgtattcctcatggtggaggcggaccaggaatgggtccgattgcttgtaaaaagcatttagaaatatttttacccaaacatccagtgatcaaagactgtggcccagcttcaggaataggtgcagtttctgcagctccttggggaagctctagtattttatctatatcatggatgtacatcaaaatgatgggatcagaaggtttaaaaaaagcatctcaagtagcaattttaaatgcaaattatattgctcataagttaaaaaattcatttcctattttatataagggaaaaaacggtaatgttgcacatgagtgcattatcgatattagaaaaataaaaactgatactggtatcacagaagaagatatagccaagcggcttattgattttggttatcatgccccaacaatgtcttggccagttactggaacgatgatgatagagcctacggagagtgaaagtttaaacgaaatcaata

SEQ ID NO: 220424 - DNA, 1662 bp, Unknown
  Bacterial polypeptide expressing nucleotide sequence isolated from the Sargasso Sea
aatggaaaattttgatagctttgcactaagacatattggtttaagccagacagatattggccttctgctagatcaatttggatacaaggacttggaagacttctcaaaatctgtactacctaaaaacatctttattgaagaaaagcttgatcttagcgatgccatgtctgaagaagaagcgctaaaagtgctaaaagaaatatcaaaagaaaatgctgtttatcgatcattcattggtcaaggctattatggaacagttacgcctaaggttattttaagaaatgtctttgaaaaccctggatggtatacctcctacactccctatcaagctgagatctctcaaggcaggttagaagcgctcatcaattttcaaaccatggttggagatctaacagggtttgaaatagctaatgcgtcccttcttgatgaggccactgcagcagcggaatcaatgactttagctcacagggtcggtaaatctaaatcccaaagattttttatagatcaaaactgttttccccaaacaatctctgtggtgacagccagagccaagccaattagtattgaggtaatggtaggtgacccaaagcaattaactgatttaaaagaagaaacatattttggagctttgcttcaatatcctggtaatgatggagcagtcattgatttctctcaagaaattgtaagtatgcatgcacaaaatggtctggtgatcatggcaacagacttgttggctctaacattgttaaaaagcccaggtgagatgggtgctgatatagcaataggaagctcacaaagatttggggtgcctctcggctttggtgggccgcatgcagcatttatggctaccaaagaaaaatataaaagatccttgcctggaagattggttggagcatcaatcgatgaggatggtagaacagcatatagattagctttacaaaccagagaacagcacataagaagagagaaagctacaagtaatatatgtactgcccaagcgctcttagcgatcatggcaggtttttatgctgcatatcatggccctgctggattaaaacaaattgctcagtctgttcgctcaaaggcaactgtcttggcaaaaggaattaatgagcttgggtatgatctcaagtcttctagtttttttgatactgtaactatccataccgaatctaggactcaggaaattttttcaactgctcaagatcaacttatgaatcttaggatgctggatgcaaatcatataagcatctcattggatgaaacagtgacagaacaagagatcaaaaatataacaaaactttttaaagacttgtcgaaaaaagaaaaggttgttttaaacttcgagctgccaatagatatcataagatcaactgaatatcttactcatccagtctttcacctatatcgaactgaaacagaaatgctgaggtatatcagaaaactctgcgataaagacattgctttggatcgagcaatgattccgttaggctcatgtaccatgaaattaaatgccacatctgaaatgctccctgttggttgggaagaattctccaacattcatccttatgctccttatgatcaaacagctgggtataaaattttaataaatgatcttgaagctaagctctccgagataacggggttattcagctgtatctt

SEQ ID NO: 220425 - DNA, 973 bp, Unknown
  Bacterial polypeptide expressing nucleotide sequence isolated from the Sargasso Sea
tatgacatccaaatttgggtctgatttgtttatagataggcatcttgggttaggagataatgatgaaagaattatgctgaacaagcttggttttaataatattgatcaatttataaatcaagttattcctgaagatattcagcttaaagataaatcttcagaaatattgccccaaggttgttcagaaattgaggctttaaacgaattagaagagattgcgaataaaaatactaaaatgagatcacttataggccttggttattatgacaatcatatgcctaaagtaatacaaagacatgttcttgaaaatccaaggtggtacacgtcttatactccatatcaagcagaaattgcacaaggaagattagaagctctatttaattttcagactattgtttgtgaactaacaggattttctgtcgctaatgcatctttgttggatgagggtactgctgcagcagaagctatggccatgagtttttccgcaagaaaaaataaatcttcaaaagtgtacttagtggagtcaaatgtttttgatcatacttttaatgttctacaaaccagagcaaaacctttgggaatatccttaaaacgctttactcaaagtaaccttcctaatcatgatgatgtttttggaatgttgttgcaattacctggtaaaaatggacaattatatgatcccacattcttaatatcccaagcacatagatcagaaattattgttacggcatgtattgatccactagcacaagttttgattaaaccaatttctgaatttggtgttgatgtagcagtgggtagtatgcaaagatttggtgtaccaatgggttttggtggcccccatgcagcatattttgcttgtagcgaaaaatataaaaggctgatacccggaagaattgttgggcaaactctctctaaaaatggagaaaagtctcttaagactagcattgcaaacaagagagcaacatattag

SEQ ID NO: 220426 - DNA, 796 bp, Unknown
  Bacterial polypeptide expressing nucleotide sequence isolated from the Sargasso Sea
tgttatccaggtcaatttggtggagatgtatcgcatctaaatctgcacaaaacattttgtatacctcacggaggaggaggtcctggagtaggtccaattggtgtagtcaaagaattggttccttacttaccagctgatccacttactcaaaaagattcagaatattcaatatctggatctaagttcggtagcgctagtattctgccaataagttggatgtatataagaatgatgggagaagagtcgctgagaagggcaacccaaattgctatcctaaacaccaactacatagccaataaacttaaagatgattatgacgtgctttataaaggtaaaaatggactagttgctcatgaatgtattcttgatgtaagaccatttaaagaatcctgtggaattgaggcagaagatattgcaaaaagacttatagattatggttttcatgctccgacaatgtcatggccggttgctggaacattaatgattgaacctacagaaagtgaatcattggatgaattagaccgcttttgtaaagctatgataggtataagagatgaaattagagccattgaagagggtaaatcgtctcaagatgataatttacttaaaaatgcccctcatagcgttgatactcttatagaagagtggaaatacccatattctagaaaagaggcctattatcccaatgaacaaactaaacaacaaaagtattggcctccagtcggaagagtcgataatgcctatggtgatcgtaatctagtctgcacctgtcctgacatcaaagacctgaaataag

SEQ ID NO: 220427 - DNA, 652 bp, Unknown
  Bacterial polypeptide expressing nucleotide sequence isolated from the Sargasso Sea
aatgggcgctgtttcggctgctccatggggtagttcaagtattttacctatttcctggatgtatataaaaatgatgggagcagagggtttgaaaaaagcatctcaaatttcaattttaaatgcgaactatatttctaaaaaattatctaaagactacaaagttttatacactggtaaaaatggaaatgtagctcacgagtgtataattgacataaggccgataaaagcaagctcaggaatttcagaagaggatctggcaaaaagattaattgattttgggtatcatgctccaactatgtcgtggcctgttgctggaacaattatgatagaacccactgaaagcgaaaatctagaagagatagataagttttgtaatgctttgattaaaattaaaaaagaaattaatttagttgagtcatctaaattcgataaaatagataatcctcttaaaaatgctccacacacttatatagaattagcctctaacgaatggaatcataaatattcaagagaggaagcagcctttccaaacgaatatgtaaaaaataacaaatattgggcaccagtagctagagtagataatgtttacggtgatcgtaatttagtttgttcttgtccttccatggacgaatataaagacgaagcagcttaa

SEQ ID NO: 220428 - DNA, 1068 bp, Unknown
  Bacterial polypeptide expressing nucleotide sequence isolated from the Sargasso Sea
aatgtttaaagaaaattttactcgaagacatataggcccaaactcttctgagttaaacaaaattttaagcacaataggtgtcacatcagttgaacaacttcttgagcaaactattcctgaaacgattagattaaaaaacgacttaaatattccagagggtatttctgaaatggaatttttaaaagagataaaaaaattgtcatctctaaatcagaagtttaaaacttacattggacttggatatcatgacacttttaccccctcagttattcaaagaaatattttggaaaatcctggatggtatacagcttacactccctatcaacctgaaattgctcagggaagacttgaagctttattaaatttccaaacaatggtttgcgatattactaaaatggaaatagcaaacgcctcacttttggatgagggtacttcagccgctgaagccatgataatgatgtataataatagatcaaaagatcagaagtcaacaaaccaaaataagttttatgttgactctaacatctttccacaaactttagctgttctatcaacaagagctaaaccacttgatattgaattagtagtaggtgatataaaagagttaaatgaaaatgagttttttggatgtattattcaatatcctggaaaggatggaaaactggaggagatagataatttattagaatcaataaataatgaaaatcttaaagtaataattgctgttgatttaatgtcaatagtcttgattgaacctcctaatcctgataaaattgatgttgttgttggaacaactcaaagatttggaatacctcttggttatggaggtcctcatgctgctttttttgcaactaaagaaaaatacaaaagaaatataccaggaagaattattggcgtaaccaaggaccttgatggtgattattcacttaggatggctcttcaaactagagaacaacatattaaaagagacagagctacatcaaatatttgtactgcacaagttctattagcagtaatggctggaatgtatgcagtctatcatggttcagaaggcttaaaagaaattca

SEQ ID NO: 220429 - DNA, 2080 bp, Unknown
  Bacterial polypeptide expressing nucleotide sequence isolated from the Sargasso Sea
gtgggagctcaaaagatttggaatcccaatgggttacggtggcccgcacgcagctttttttgcaacaaaagatgaatttaaaagatcaatgccaggacggataattggagtttcagtcgatagacacggtaataaagcttatagattgtctctgcaaacaagagagcaacatataagacgggataaagctacaagtaatatttgtacagcacaagctttattagctatagtttcggcagcttatgcagtgtatcacggtccaaaaggaataaaaaatatttcagaaagagtttcccaacttacaaagaactttgctgataaaataaaacaatctggatacaaattatattcagagtcatactttgatactgttacaatttataccaaggaaaagactgatcaaattttcaaaaatgctcttgatcaaaagataaatgtaagaaaagtaaactcagaaatgatagcagtttcttttgatgagagaaagaatgtatatagagcaaatcagcttttaaaaatatttaattctactgagtcaattaaagataatcctaccagaagtttgccaaatctacctaaaaatcttctaaggacatcaaaatatttagaacaccctgttttcaactcttatcattcagaaactgaaatgcttagatatttgaagagattagaagataaagacattgctcttaatagatctatgattgcacttggatcttgcacaatgaaacttaatgctgtggcagaaatgataccaatcagttggagagaatttgcagagccacatccttttgctcctgtagaacaaatggaagggtacagaaaattattcacagatttaaaaaattggttgagatcaattacaggtttctctggtgtttcattacaacctaacgcaggagctcaaggtgaatatgctggcttaatggtaattagaaaatatcacattgatagaggagaaagtaatagaaatgtatgtcttatcccaagttcagcccatggaacaaatcctgctagcgcacaaatggtaggaatgaaagttgttgtcgttaattgcgataaagagggtaacgtcgacatcgaagatctaaaaaagaaagcggagcttaattcagaaaatcttggagcattaatggtaacttatccatctactcatggtgtctttgaagaaaaaatttctgatatctgtaaaataattcatgataacggtggccaagtttatatggatggtgcaaatttaaatgcattggttggtatagctaaacctggtaattttggaccagatgtctgtcacataaatttacataaaactttttgtatacctcatggaggaggaggcccaggtatgggaccaatcgcttgtaaaaaacatttagaagtttttttaccaagtcacccaattgtaaaggattgtggtccagtttcaggaattggatctgtctcagcagctccttggggaagctctagtattttatctatttcttggatgtacattaaaatgatgggctcagaaggtcttaaattggctactcaaaatgcaatccttaatgcaaattacttagcatataaacttaaaaatcatttcccaattttgtatactggtaaaaatggaaatattgctcacgaatgtattatcgatataagacctatcaaagctgaaacaggtataacagaagaagatattgcaaaaagaatgattgattttggatttcatgcgccgacaatgtcttggcctgtagctggtacaatgatgatagagccaactgaaagtgaaagcttaacggaaatagataaattttgtgaaaccttaattaagattaaagaggaaatagaaaagatcaagtctggagaatttgataaagtagataacccaattaaaaatgcaccacatactgatcttgaactatcttctgatgaatggaaacataagtattcaagagaagaagcagcttatccatctaaacatttaaaaactaataaattttggcctccagttgccagagttgataatgtatatggagataagaatattttttgtacatgcccaagtattgatgaattcaaagaagacgcagcttaa

SEQ ID NO: 220430 - DNA, 1057 bp, Unknown
  Bacterial polypeptide expressing nucleotide sequence isolated from the Sargasso Sea
ggtgctcaaggtgaatatagtggattaatggtaatcaaatcttatttagataaaaaaggtgacagtcacagaaacatatgtctaattccatcttctgcacatggaactaatcctgcatcagcaattatggctggattaaaagtagtggttattaatactgacgaaagaggaaatattgatcttgaagatcttaaaagtaaagtaaaagaacataaagataaccttgcagcattgatgattacttatccatctactcatggagtatttgaatctgaaattcaatcaattaatgacttgattcatcaaaatggtggtcaagtatacatggatggtgccaacatgaacgcgcaggtcggcttgactagtccaaaaataattggtgctgatgtatgtcatcttaatttacataaaactttctcaattcctcatggtggtggtggtcctggtgtagggccaatttgtgtagcagaacatcttaaagaattccttccatctaatccattaattaagacaggtggagatgattcacttgaagcaatttcctctgcaccctggggatctgcacttgtttgccttatatcatatggatatataagaatgttaggtagagatggtattagaaaatctacagaaattgcgattgtaaatgcaaactatttgaagactaaactcgagaaaaattataaaatactttacagtggagaaaatggaaggtcagcacatgaatttattatagattgtagagatttcaaaaaatataatattgaagttgtagatattgccaaaagactaatagattatggatttcatgctccaacagtttcatttcctgttcccggtactatgatgattgaacctactgaaagtgaaaatttaaatgaattagataaattttgtgaagcacttaattcaatttatactgagattatttctgatgatgattccaaaagagagatgctcaggaattcgccacatactttaaaaatgttgacgtctactgactggccatatagttatagtagagaagacgcctcattccctaaaagctatttaaaaa

SEQ ID NO: 220431 - DNA, 1195 bp, Unknown
  Bacterial polypeptide expressing nucleotide sequence isolated from the Sargasso Sea
accgctcaagctttgtttagcaatagtttctgcagcctatgcgatttatcatggtccaaaaggaattagaaaaatatcagaaagtgtttcacaattaacaaaaaattttgcagacaagttaaaacaatcaggttacgaactttattcaaatcatttttttgatactgtaacagttaaaactttagataagacagataaaatttataaaaatgcattagatcaaggagttaatattagaaaagttaattctgagatgttagcagtttcttttgatgagagaaaaaatctttatagagcaaatcaattattaaaaatttttaattgttctgaaacgataaaggaaacaatgaacgagagtttatctaatttacctaaaaatttattaagaacctcaacctatctagatcatcctgtctttaataattatcattcagaaacagagatgcttagatatttaaaaagattagaagactcagatatagctttaaataaatcaatgatcgcattgggttcgtgtacaatgaaattaaatgcagtgtctgaaatgataccaattacatggaaagaattttcacaaccacatcctttttctccagtagaacaaatagatggttatagagaattatttacagatttaaaaaattggcttagatcaattacaggtttttcaggtgtatcattacaaccaaatgctggagctcaaggagagtttgccggtttaatggttattcgtaaatttcatgaaaaaaatcgtgaagacaatcgaaatgtttgtttaataccaagttcagctcatggtacaaaccctgcaagtgcacaaatggtaggcatgaaagttgttgttgttaaatgtgatcaacatggaaatgtagactttgaagatttaaaaaataaagctgaagaacattcaaataatcttgccgcattaatgatcacttatccttcaacgcacggtgtttttgaagaaaagataactgatatatgtgaacttgttcataagcatggaggtcaagtttatatggatggtgcaaatttaaatgcattagtaggaattgcaaaacctggtaaatttggtccagacgtttgccatattaatttacataaaacattttgtataccacacggaggaggtggaccaggtatggggccgatagcatgcaaaaaacatttagaaagttttttacctaaacattct

SEQ ID NO: 220432 - DNA, 787 bp, Unknown
  Bacterial polypeptide expressing nucleotide sequence isolated from the Sargasso Sea
atgaagctcgaacatccggatcgtctgatgaaccgcactcctctctcgctcgccgcgctcgaagtgcatgacgccttcgcagaacggcacatcggcccggattcggccgaccagcaggccatgctcgaagccctcggcttcgcgtcgcgcgccgcgctgatcgacgccgtgattccgaagacgatccgccgggccgaaacgctgccgctcggccccttcgtgcaaccgaagagcgaagcggaagcgctcgccgcgctgcgcgagctggcggagaagaaccaggtgttccgctcatacatcgggcagggctactacaacgcgcacacgccggcggtgatcctgcgtaacgtgctcgaaaacccggcgtggtacaccgcgtatacgccgtaccagccggaaatctcgcagggtcgtctggaagcgctgctgaacttccagcagatgatcgtcgacctgacgggtctcgcgatttcgaacgcgtcgctgctcgatgaagcgaccgccgcggccgaagcgatgacgctgctgcaacgcgtcggcaagccgaagtcgaacgtgttttatgtcgccgacgatgtgctgccgcaaaccatcgaagtggtgaaaacgcgcgccacgccggtcggcatcgaagtgaaagtgggcccggccgcggacgccgcgaacgcaaatgcgttcggcgtgctgctgcaatatccgggcgtcaacggcgacgtgcgcgactaccgcgcactcgctgacgcgatccacgcggcgggcggccacgtggtggtcgccgccgatctgc

SEQ ID NO: 220433 - DNA, 1264 bp, Unknown
  Bacterial polypeptide expressing nucleotide sequence isolated from the Sargasso Sea
agcggcgagcgcatggcctaccgtcttgccctgcagacccgcgagcagcatatccgtcgtgagaaggccacctctaacatctgtaccgcacaggtactgcttgctgtgatggccggattttacggcttgtggcacggcccggaagggctgacccggatcgccagtcacgcccatggcctggcctgccgcttcgccacggcgatgcgcgccgccggccgcaccgtgcgccatggcagtttcttcgataccgtcaccatcgaggcggcggacgatcgcgatgcgcttgtcgcggcagctttgggagccggtatcaacctgcgtccgctggatggcgcgatcgcggcgagcttcgacgagacaactactgatgaggcgctggagtcgctgctggctgcgcttggcgccggcagcgccggagaggcgccctcagccattccgtcatcgctgtcccgcaagggcggtttcatgcgccagccggtgttctaccgctaccgtaccgagaccgagatgctgcggtacatgcgcagcctcgccgaccgcgacctggcgctcgaccgctgtatgatcccgctgggatcctgcaccatgaagctgaacgccaccgccgagatgatcccggtgacctggccagaattcgcgcggattcacccctatgccccggccgatcaggcaaaaggctatgccgagatgattacccgtctcgaggagatgctcgccgactgtaccggctatgcggccgtatcgctgcagccgaacgccggatcgcagggcgagtttgccggccttatggcgattgcccgctaccaccagtcgcgcggcgaaggccaccgcaatgtgtgcctgatcccgcaatcggcgcatggcaccaatccggcatctgctgcgatggcaggcatggaggtcgtggtcgtgaaatgcgatgatgacggcaatgtcgatatcgccgatctgaaggagaagactgaggcccaccgcgatgcgctgtcggccatcatggtgacctatccctcgacccatggtgtgttcgaggaatcaatcgccgagctttgcgatatcgttcacgaggcgggtggccaggtctatgtcgacggggccaacctcaacgcccttgtcgggcattgtgcgccactacagttcggtgccgatgtcagccacctgaatcttcacaagaccttctgcatcccgcatgggcggcggcggcccgggcgtcgggccgatcggtgtcgccgcgcatctggcacttttccttccgggctcgccgctc

SEQ ID NO: 220434 - DNA, 1009 bp, Unknown
  Bacterial polypeptide expressing nucleotide sequence isolated from the Sargasso Sea
attgctaatgcttcacttttagatgaaggaactgcagcaagcgaggcaatgttaatgctttatcgtaaaaataaatctgaaaaaatgcaatttttagttgataaagagtgttttcagcaaactatagatgtaattatttcaagagctgaaccattagatattgaaataattgtaacggactttaaaaattttaactttaccgatgcctttggttgtattttacaatatccaaataaatatgggcatatttcatcaaatgatgattataaaaaccttgtctctgatgcacacaactcaaactgtaaagtaatttttgctagcgatctaatgtgtttacagctttttgaagcaccaggtaatctaggagcagatattgctgttggtaatagtcaacgttttggtgtcccgcttggatatggaggccctcatgctgcatttatgtcaactagtgaagaatttaaaagagatatccctggaagaattgtaggtgtatcacaagaccgtagaggtaatcaagcttatagactaacactccaaactagagaacaacacattagaagagaaaaagcaacttcgaatatttgtacagctcaagtcttgcttgctataatatcaggaatgtatgcattatttcatggtcctgatgatttaaaaaatattgcaaagagaattcacagtcatgcaaaagaactggctgataaaatttcaaaattgggtcacgagattgtaactaatgataattcattttttgatacagtagttataaaattatcaaatatgagtattgatagtttaaaagataaggcattaaagcataattttaatttaatgtatcatgaaaatggacttattggcatctctttagatgaaaagactgattataatgaagttgaggcgcttgcaaatttattcgatgtaagtaatgattctcaaaatacttataatatttttaaaccaaatagaacaggtgatattttgacccaccctatttttcatagcattaattctg

SEQ ID NO: 220435 - DNA, 1324 bp, Unknown
  Bacterial polypeptide expressing nucleotide sequence isolated from the Sargasso Sea
catgaccaagctcgatacccagaacgaattcatcgcccgccacatcggcccgcgcgatgccgacaccgcagccatgctgcaactgcttggctatgactcggtggacgcgctgaccaatgcggtgatccccgagtccatcaagggcaccagcatcctcggcgaacagccgggcctgtcggaagccgacgccctggccaagatcaaggccatcgccgccaagaacctccagttcaagaacttcatcggccagggttactacggcacccatacgccgagcccgatcctgcgcaacctgctggaaaacccggcctggtacaccgcctacaccccgtaccagccggagatttcccagggccgtctggagtcgctgctgaacttccagaccctggtcagcgacctcaccggcatgcagatcgccaacgcatcgctgctggatgaagccaccgctgctgccgaagccatgaccttctgcaagcgtctgtcgaagaacaaggccgccaacactttcttcgtgtcccagcactgccacccgcagaccctcgacgtgctgcgcacccgtgccgagccgctgggtatcgacatcgaagtcggtgacgaagccgccatcaccgacgccagcgcctacttcggcgccctgctgcagtacccggcgagcaacggcgatatcttcgactaccgcgccctggtcgagcgtttccacgccgccaacgccctggtggctgtcgctgccgacctgctggccctgaccctgctcaccccgccgggcgagttcggcgccgacgtcgccctgggcagcgcccagcgcttcggtgtaccgctgggcttcggtggcccgcacgctgcctacttcgccacccgcgacgcgttcaagcgtgacatgccgggccgtctggtgggcatgtcggtcgaccgtttcggcaagccggccctgcgcctggccatgcagacccgcgagcagcacatccgccgcgagaaggccaccagtaacatctgtaccgcccaggtgctgctggccaacatcgccagcatgtacgccgtataccacggcccgaaaggcctgaccgagatcgcgcagcgcgtacacagcttcaccgccatcctcgccctgggcctgaccaagctgggccacagcgtcgagcagcagcacttcttcgacaccctgagcatcaagaccggcgccaagaccgccgagctgcatgccaaggcccgtactgccggcatcaacctgcgcgagatcgacgccgagcgtctaggtctgtcgctggacgaaaccactgaccaagccgccgtggaggcgctgctgaacctgttcgccgctgaccag

SEQ ID NO: 220436 - DNA, 421 bp, Unknown
  Bacterial polypeptide expressing nucleotide sequence isolated from the Sargasso Sea
atgttaccaaattcagaaaaagattttttaaagagacacattggaccttctaaagaagatcaatcaaaaatgttaaaagaattaaattatcaatcactagatgatttaattgacagcacagtaccagaaaaaataaagtttagaggagaattaaatattggtgaatcaaattcagaatatgaagctttaagaaaattaagagcaatatcaaaaaaaaatcaagtttactcaaattttattggtatgggttattatggaacttatacaccttatgtaattttaagaaatatattagaaaatccaggttggtatacttcatatacgccttatcagccagaagtagctcaagggagacttgagatgttattaaattttcaacaaatgatcgttgactttacaggaatggatatcgctaatgcct

SEQ ID NO: 220437 - DNA, 1558 bp, Unknown
  Bacterial polypeptide expressing nucleotide sequence isolated from the Sargasso Sea
agaagaagatttagagcatataaaatttgataaagaatttcatcttgaaagtttagcgttgagatccagtgcatggatgcagcaagatatattcacaaattacgaaagtgaaactgaattaatgagatatatatttcgacttgcagaaaaagatttttctttggtagatgggatgatgccattgggaagctgtaccatgaagttaaattctgcagcagagttaaatccagtctcttgggctaatttatcttccatgcatcctttttccccaccagatcaaactaagggctattcaaaaattatatctgacctagaaaaatggataagtgagattgttggtttaaaatcagtttcttttcaaccaaatgcaggctctcaaggagagtttgcaggtttattggcaattaattcttattttgaatcaaaaggtgaactgttaagaaaaaaatgtttaattccaaaaagtgctcatggaacaaatcctgctagtgcagttatggcaggttttgacgtgttaactgttgaatgtgatgaagaaggaaatattgattatcaagatttgtcaatcaaggtcaagaaatttgataaccaaataggggctcttatgttgacttatccctctactcatggagtttttgaattacaaatcagaaagatatgtgatttaattcattctgtgggaggatttgtctatttagatggagcaaatttgaacgctcaggttggattatgcaaacctggaaactatggcgttgatgtttgtcatttgaatttacataaaacattctgcattccgcatggaggtggtggtccaggagtaggtccagttgctgcatcagaaactttaagcccataccttcctactcattctttaatggataataatttatctaatagttttaatttcgtatcttccgccaagcatgggagtgcaagtattcttccaataagttggatgtatataaaaatggcaggtcttagtgggttaaggaaagcaacttcgcacgcaattttatctgcaaattatattgcgcattccttaaaacataaattcaagattctctataaaggaaaaaatgattttgtcgcacatgaatgtattttagattttagagatttaaaatccaaaactggattgagtgtcaatgatttagccaaacgattaattgattatagttttcatgccccaactattagttggcctgttccagagacgataatgatagagcctactgaaagtgaaagtttggcagaagtagatagattttgtgaggctatgctattgattggagaagaaatcagtgaaatagaaaataatcatgaattaaaaaataataatgtaataagcaatgctccccatacgctgaaagagttaattgctgataattggcaatatccttattcaaaagaaaaggcttcttttccttataaaacttctacatctattaagttttggtcttcagtttctaggattaataatgcatatggcgatcgcaatttaatttgttcttgcaatgtaaatcaagatgagactttagaagaaaaaaaatgtgcttaa

SEQ ID NO: 220438 - DNA, 1027 bp, Unknown
  Bacterial polypeptide expressing nucleotide sequence isolated from the Sargasso Sea
atgattgacgataattcaaaagaatttattaaaagacatattggtccttctgaagaagatcagtccaaaatgttgcaatatgttgggtataaatcattagaggatctaatgagcaatactgtaccagaaaaaatcttattaaaagatgatcttaaaatcgatcagccaatgtcagagaacgatgctttaaaaaaattaaaatctatatctaaaaaaaataaaatctttaaaaattttattggaatgggatactataattctattacacctaatgtaattcttagaaatattttagaaaatccaggatggtatacatcttatacaccttaccaacctgaagtggcacaaggtcgtcttgaaatgcttttaaattttcaacaatcaataattgacttaacgggcatggatatagctaatgcttctttgttagatgaggcaacggcaacagcagaagcggtaggtttgagccagagattagataagactaattcaaaaaaaatatttatttcaagcaattgtaaccctcagacaattgatctaataaagactagaacaaatccttttggtttagaattgatcattggtgacgaaaaaaaggaacttccaaaaattaatgaagatattatttgtggagttttatcatatcctggaactttaggtgagataaacgatcctagtgaaagtattagtcaaatacataaaaaaaatggaaaagctattttagtttgcgacttattggctttagctagattaaaaactccagctgaacttggagctgacattgctgtcggtagtgctcaaagatttggtatcccaatgggttatggcgggcctcatgcagcattttttgctacaaaagaggaatttaaaagatcaatgccaggaagaataataggcgtttctaaagatagacacggaaaaaaagcttacaggctttctttacaaactagggagcaacacattagaagagacaaagcaacaagcaatatttgcactgctcaagcattactagctatcatttctgctg

SEQ ID NO: 220439 - DNA, 484 bp, Unknown
  Bacterial polypeptide expressing nucleotide sequence isolated from the Sargasso Sea
aatgttacataattctcaaaaagattttattaaaagacacattggtcctacaaaagaggaacaattgaaaatgttaaaagagttaggctataactctcttgatgatttaataaataatactgttcctgaaaaaattcactttaaagaaaaactaagcataggtgattcaaattctgaatatgaagctttgagaaagctaaaagttatttcaaaaaaaaatcaaatatattcaaattttattggcatgggatattatggtacttacacaccctatgttattttaagaaatattttagaaaatccagggtggtatacatcttatactccttaccagccagaagtagcgcaaggcagactcgaaatgcttttgaattttcaacaaatgatagttgattttacaggtatggatattgctaatgcttctttactcgacgaaggtacagcagcggcagaagcaatgggattaagtcataggctaaaataa

SEQ ID NO: 220440 - DNA, 2281 bp, Unknown
  Bacterial polypeptide expressing nucleotide sequence isolated from the Sargasso Sea
tgaacctttaggtataactgtacaattatgtgatgatgatgacttcattttcaatcaaaatgtttttggatctattttgcagtatccagatacaaatggatcagtgaataattttcaaaaaataacaaatgctgcccataaagaatctgcttatgtaattattgcaactgatctaatgagcttagctttactaaaaccaccaggagagcttggtgctgatgtcgctcttggctcatctcaacggtttggagttcctatgggctacggaggaccacatgcggcattttttgcagtaaaagaaaattttaaacgttttttaccagggagactaataggtgtttccgttgactctgaagggaatcaagcatatcgaatgtctcttcaaacaagagaacaacatattagaagagaaaaggcaacttccaatatctgtactgcgcaagtattattagcaataatgtcaggtatgtacgctgtatatcatggccccaaaagaataaaagaaatagctagaacaattcatcaacatacctgtgatttagcaacaagcttatcaaaagctgggtatgaaatactcaatgatacattcttcgatacaattcgttttttaggtcctgataaaacaaaagaaaaattattgaaacacaatattaatatcagagagttctctgatggttcattaggtatttcaattgatgaaacagtcatgaaaaaagatatttctcatttattatcgattctaaatgtatcacatgaattgaataatatatcaactctaccatctgatcttagaagagaaacttcatttttaagtcaccctgtatttaatagttatcactcagaaacagaaatgcttagatatatacatcgattagaaacaaaagacttatcattaaatactagtatgataccattagggtcttgtacaatgaagttaaacgccacaactgaaatgattggagttacttggccagagtttgcttcgattcatccatttgtacccgtcaaccaagcaaaaggttataaacatttatttgatgatctttctaattggctcggagatattactggattacctggtgtttcactgcagccaaattctggagcacaaggtgaatatgcgggcctaatggttatacgagcgtttcatctttcacaaggagatagtaatagaaatgtctgccttatccctgagtctgcacatggaacgaaccctgcaagtgcaattatgtgtggcatggaagtaattgttgttaaatgtgattctaaagggaatattgatattgaagatctgaaaaataaagctcaaaaacatcaaaacaatcttgctgcgcttatgatcacatatccatctacgcatggtgtatttgaaagtaccgttcaaaaaatatgtaaaattattcatgattataaggggcaagtatatatggatggtgctaatctaaacgctatggttggtgttagcagggtgtctgatattggagttgatgtatgtcatatcaatctacataaaacatttgcgataccccacggtggcggtggaccggggatgggcccaatttgtgctgcaaaacatctcacttcatttctgccaactcacaatgtaatcccttgtaatacatcttcaaatgcaatctctgctgtctctgctactccatggggaagcgctggtgtattaccaataagttggagctacatggctttattaggaaatgaaggcatgaaaaaatcaacgtctatagcaatattaaatgccaactacatggcaaaattattagaggaccatttccccattttatatagaggagaaaatgggttcaacgctcatgagtttattattgatttgagacctataagaaaagaatcaggcattacagatgaagatattgcgaaaagattaatggactatggatttcatgctccaaccatgtcatggcctgttcctggaactttaatgattgaaccaactgaaagtgaatcaaaaaatgagcttgatagattttgttcggcgatgatatctataaaaaaagaaataaatgatgttattgagggaaaatctgatgctaaaaataatatgctaaaaaactctcctcacactatggaaaccattacaaaagaaacttgggatcatccatatacaagagaagatgctgtttttcctgcgccctggctcagagagtataaatattggcctaccgtaggaagaatagagaatgcaattggtgatagaaatttaatctgtacatgtcctgatatatcagattatgaggaagataattaa

SEQ ID NO: 220441 - DNA, 2416 bp, Unknown
  Bacterial polypeptide expressing nucleotide sequence isolated from the Sargasso Sea
tatgggtctaagtcacagattaaataaaaaagatagtaatttagtttttgtttctgaagattgtcatcctcaaacaataaatgtaattcaaacaagagctgaaccaatgggtttaaaggttttagtcggtaaagaagatgaagttttagaccagctaaaagaagatttagtttgtggaattttgcaatatcctggaactttaggagatataaaagacccaagtgaagcaattagcaaaattcacaaaaagaatgggaaagctgtattagcttgtgatctgttagccctagcaaaattaaaaacgccaagagaacttggtgccgacattgcagttggaagctcccaaagatttggaattccaatgggatatggaggtccacatgcagctttttttgctacaaaagatgagtttaaaagatcaatgcccggaaggattgtcggtgtatcagttgatagacatggtaataaagcatacagattatcattacaaactagagagcaacatatcagaagagataaggcgacgagtaatatttgtactgcccaagctttattagcaattgtgtcagcagcatatgctatttatcatggtccggatggaattaaaaatatttcagaaagagtgtctcaattagcaaaaagttttgctgataaaataaaacaatctggatacgagctttattcaaataatttttttgatactgtaacgattattactaaagaaaagactgatcaaatttataagaatgctctgaatcagagagttaatattcgaaaagtaaattctgaaatgcttgctgtttcatttgatgagagaaaaaatgtatatagagtaaatcaactattaaaaatttttaatgcagcagaatcaatcaaaaaagaagatccatcagtaagtttacctaatcttccaaaaaatttattaagaacttcaaaatatttagaacatccagtttttaactcatatcattccgaaactgaaatgcttagatatttaaaaagattagaagataaagatatagcattgaatagaactatgattgcacttggttcttgtacaatgaaattaaatgctgctgccgaaatgatcccaatatcatggaaagaatttgcagaacctcatccgtttgtcccaattgaacaaatggagggttttagagatttatttactgatctaaaaaattggttgcgttctataactggtttttcaggtgtttctttgcaacctaatgcaggtgctcaaggtgagtatgcgggcttaatggttatcagaaagtatcatttagatagaggagaggctaatcgtaatatatgtttaattccaagttcagcacatggtactaacccagcaagtgcacaaatggttggaatgaaggtggttgttgttaattgtgataaagagggaaatgttgattttgatgatttaaagaaaaaagctgaacaacattcggaaaatcttggggcactaatggtaacttatccatctacccatggagtatttgaagaaaaaataactgatatctgtgagttagttcacaaacatggtggacaagtgtatatggatggagcaaatttaaacgccttagttggagttgcaaagcctggaaattttggtccagatgtctgtcacattaatttacataaaacattttgtattccacatggcgggggaggaccaggtatgggaccaattgcttgtaaaagacatttacaagtttatctacctaatcatccagtgattaaagattgtggaccaacatctggcattggagcagtctcggcagctccttggggtagttcaagtattctatcaatctcttggatgtacattaaaatgatgggatcagcagggttaaagcttgctactgaagtagcaatattaaatgcaaattatattgctcatagacttaaagatcactttccaattctgtataaaggatcaaatggaaatgttgctcatgaatgtattattgatattagaaatattaaatcagagacaggagtaaccgaagaagatattgcaaaaagattaatagattatgggtttcatgcaccaactatgtcatggccagtagctggtacaatgatgatagagccaactgaaagtgagggtttgtcagaactcgatagattttgtgatactttaattaagattaaagaagaaattgaaaaaattaaatcaggtgaatttgataaaatagacaatccaataaaaaatgctcctcacacggacagcgaactagcttctgatgattggacgcataaatattcaagagcagaagctgcttatccagcaaaattcttaagagctaataaattttggcctccagttgcaagagtagataatgtttatggtgacaagaatatattctgtacttgtccaagcatagatgaatttaaagaagatgcagcttaa

SEQ ID NO: 220442 - DNA, 1627 bp, Unknown
  Bacterial polypeptide expressing nucleotide sequence isolated from the Sargasso Sea
aaatactttatcagttgcttttgatgaggttaaaaaagttgaacacgttaacattctattacaaatatttggaattgataaaaaatatgataattcagagaatgttgagttgaacaatttgccaaaaaatttattaagaacttcaaaatatttgagccatccagttttcaacaagtatcattcagaaactgaaatgcttagatatctaaaaagacttgaagattgcgatattgctttaaacagatcaatgatagctcttggttcctgcacaatgaagcttaatgctacagctgaacttataccggtaacttggaaagagttttctcagccccatccatttgtacctgaagatcagatgaaagggtataaggttttattcaatgatcttataaatgatcttaaagaaattacaggttttgatgcggtatctcttcaaccaaattctggagcccaaggtgaatactctggattaatgacaataagaaaatatcatataaataataatgaaaaaaatcgaaatgtgtgcttaatacccgagtcagctcatggaactaatcctgcaagcgcacaaatgtgcggaatgaaagttgtagtagttaattgcgatgaagatggcaatgtagatttaaaagatctaaaaagtaaagtagaccagcatgcaaaagatctcgcagcactaatggtcacttatccctcgactcatggagtgtttgaggaaaaaattactgaaatatgtgattatgttcataagtctggtgggcaggtatatatggacggtgccaatttaaatgctttagtcgggattgcaaaaccaggtaaatttggaccagatgtatgtcatataaatcttcataaaacattttgtatacctcatggtggtggcggtcctggaatggggccaatagcctgcgcaaaacatttaaaagattttttacctaatcattctgttataaaaaatataggtactgaaaaaagtcttggttcagtatcagcagctccatggggaagctcaagcattttatctatatcttggatgtacattaaaatgatgggggcagaaggtttaaaaaaggcttcccaagttgctattttaaatgcaaattatatttctaaaagattatcaaaacattataaagttttgtacaccggaaaaaatggaaatgttgcgcacgaatgtataattgatttacgacctataaaagcaaaatcaggaatttctgaggaagacattgcaaaacgattaatagattatggctaccacgcacctacaatgtcatggcctgttgcaggaacattaatgatagaaccaacagaaagtgaaagtttaggcgagatgaaccgtttttgtaatgctttaatatctataaaagaagaaattgacaaagtagataatggaaaatttgataaaaaagataatccacttaaaaatgctcctcatacttatctagaattaagtgcaaatgattggaaacattcgtatacaagagaacaagccgcattcccaaatcagtacttaagagataacaaattttggccacctgttgctagagtggataatgtttatggagatagaaatttagtttgctcttgtcctagtcttgacgaatataaggatgaggccgcttaa

SEQ ID NO: 220443 - DNA, 2536 bp, Unknown
  Bacterial polypeptide expressing nucleotide sequence isolated from the Sargasso Sea
aatgaatcaaattaaatctttcgttgataggcatattggtatcggtgctgatgaccagaaagaaatgctggatcttctaggttacaagaatatgaatacgtttattcaatccgttgtgcctgatagcatattagaaggtgattatttaaatcttggggaaggattgtcagagatggcagctctgaaaaagcttgataaagttgccaagcaaaacagagtctttagatcctatattgggcagggttactatggaacagttactcctaaggtcattaaaagaaatgtatttgaaaaccctggatggtatacctcatatactccttatcaagctgagatttctcaaggaagattagaggcactaataaatttccaaacaactatctgtgagttaacctctatggaaatatccaatgcatctcttcttgatgaagctacagccgcagccgaagctatgatgctggcaaaaagagtgtcgaaaaataaatctaattatttctttgtcgataaaaactgtttcaggcagacaatttccgttcttaaaactagggctaagccatttggtattgagcttgagattggagatccgcaagattttaatgaaaaagatttctttggaatgttaatacaatatccaaataaatttggggaaatagacgatttttcaaggctatcagattactgtaaaaaaaataaatccttgctagtttgtgccaccgatcttcttgccttaactcttttgagacctcctggagaaattggtgctgatattgttataggttcatcccaaagatttggagtcccaatggggtttggaggtcctcatgctgcatttatggcaactcatgagagctttcaaaggtcaatgcctggaaggattattggggcatcgaaagatgctagcgggaatctatcctataggcttgcacttcaaacaagagaacaacatataaggcgggaaaaagccactagtaatatttgtacttctcaggcactactagctgtaatggctggtttttttgcaatttatcatggtcccaatgggttgataggaattgctaaagatgtccataaaaaaactcgtaaactttttgatgctattaagtctagtgatcatgaaatccttaataataacttttttgacactctctctattcaattaaagggcaatgttacggaaataaaagatcgtctactagatgcaaaaataaatattaattggtttgatgataatttggttagtatttcaatagatgaagctacaacctttgatgacattgctgatctagtctttgcactctcaggtaaggctatattaaatcattccgaagatgataaagttgatcttaataaagaaatagtcagatcctctgattttatgaaacaagaacgttttaataaatatcattctgaaacagagatgatgagatacattaaaaggctatctgacaaggacatcgcactcgatagatcaatgatcccacttggttcttgcacaatgaaattaaactcagcttcggaaatggcaccagtaagttggccagaatttgcaaatatgcatccatattgtccgatcgaccaaacagaaggttatcaagttcttattaaagacttaaaagaaatgttatcagatataacaggatattatgatatttcacttcaaccaaatgctggttctcagggagagtatgcaggcctccttgcaattgatgcatatcataaaaataatggtgatgataatagatcaatctgtcttattccaagatcagcacatggaactaatcctgcctcagcaatgatggttggaatgaaagttgtccctattgagtgtgactcggaaggtaatattgatcttacagatttaaaagaaaagtcatctcttcacaaaagtaatttatcagcaattatgatcacatatccttctacacatggagtctttgaaagcaatgtcagagaagtttgtaaaattgttcatgatcatggagggttagtttacattgatggagctaacttgaatgcgcttgttggtattgcaaaacctggagagtttgggggtgatgtttctcatctcaatctccataaaacattttgcattcctcatggcggaggtggacctggtgtcggcccgataggagttgtagaaaaacttaaagattttatgccttcacatcatgaaaatattcagaatgtaggtcctgtatcctcaacagattttggaagtgccagcattctaccaattagttggatgtatattacaatgatgggatcaaagggtttaaaacaagctacgatgactgccattttgagcgcaaattatgttgcaaagcgcctaagcgatcactaccaaatactttataaaggtgagaataacttaattgcccacgaatgcataatagatgcaagaccttttaaagagtcctcaaatattgatgttgatgatatagctaaaaggcttatggattacggttttcatgctcctactatgtcctggccagttgcaggcactcttatgattgagcctactgaaagtgaatcaaga

SEQ ID NO: 220444 - DNA, 2569 bp, Unknown
  Bacterial polypeptide expressing nucleotide sequence isolated from the Sargasso Sea
atgagtaatttttcaaaacgtcatataggtccaacaacaaaagaaattaatgaaatgttgaatgaacttggacttaactcaactgatgaattaatagaaagatcggttccaggatcaatccgtgatacatctgaccttggtattggcaagggtctaaatgaattttcatatttaaatgcaataaagggtcttgcaaaaaaaaataaagtgtttcgttcatatatagggaatggatattacggaacaataacaccaacagtgattcagagaaatatattagagaatccagggtggtatactgcatatacaccttaccaagctgaaattgcccaaggcagactagaggctctacttaactttcaaacaatggttacagatatgactggattaccgattgctaacgcttcattattagatgaagcaaccgcagctgctgaggcaatggtgatgatgttaagatccactaaagataaaaatacaatgctagtagctgacaattgccatcctcaaactattgatgtaataaaaacaagggcagaaccaataggcgtaaaaataaatattatgccaattaatgaatttgaattttcgaatgatatctttggtgtattattgcagtatccagctaccgatggacaagtatttatttttgatgaaatttgtaataaagcgcatgcggcaggtgcacttgtttcagttgcaacagatctactaagcctggcaattctgcctagccccggtgaaataggagctgatattgcaattggaaattcacaaagatttggtgttccaataggatatggtggtcctcatgcagcatttatttcatgtagtgaaaaatttaaacgaaaaatgcctggtcgtataattggagtatcagttgatcaaaatggtaataaagcattaagaatggctttacaaactcgtgagcagcatataagaagagatcgtgctacttctaatatttgcacagctcaagttctacttgcagtcatggctggaatgtatgcagtctatcatggacaaaaaggaattaagcaaattgcagaaaaaattcataataatacaaatttgttagccagctcattgcaaaacaaaggatacaaaattcttcatgaagaattttttgatactatacgtatttcgttagaaaacttttcattagataaaataaaagagcgcgcagaggctttaagaatcaatcttagatattatcaaaatgaagatgtggggatttcaatagatgaaacctgcagtgataacgacataaatgatatactatctatatttgatgcagatatgaatgataatctaaaatttaaattaagaagcaaaagaaaaagtgaattcttaactcactccattttcaacaaatatcattctgaaactgaaatgatgcgatacttacatcgtttggaatccaaagatcttgcattaaacactagcatgattgcgctaggttcatgcacaatgaaattaaatgcagcatctgaaatgatacctatttcatggcctgaattttcttcaatacatccatttgcacctaaatcgcaaactgaaggttataatgaattagcctctactttatcagattggttaatgaaaattactggattagatggatgctcactacaaccaaactcaggggctcaaggtgaatatgctggattacttgtaattagagcttatcatatagcaaataatgatacagacagaactgtgtgccttataccatcatcagctcacgggactaatccagcaagtgctgtaatggcagggatggaagtaattgtaattgattgtgatgaccatggtaatattgatattgatgatttgaaatcaaaaagtgaaagatactcaaaaaatttagctgctctgatggtaacctatccatcaactcatggtgtttatgaagaatcaatttctgaagtatgtgaaataattcataaaaatggtgggcaagtatatctagatggtgcaaatctcaatgctatggttggattatctaagttaggtgaatttggcgctgatgtttgccatattaatttacataaaacatttgctattccgcatggtggtggtgggccaggaatgggaccaatatgtgttgctaaacatcttaaatcatttttaccgacacatcgttattcatcaagctcacaagaatttacttattcagtatctgctgctccattaggtagtgctaatatcttacctatctcatggggctatatccttatgttaggtgatgatggtttgagggcatcaactgaagtagcaatattaaatgcaaactatatggcaaaaagattatcagaacactatccgatactatataagggagcaaatggtttatgtgctcatgaattcattattgatattagaaacataaaggaagagtctggtattactgaagaggatattgcaaaacgtctcattgattatggttttcacgctccaacaatgtcatggcctgttattggaacaatgatgattgagccaactgaaagtgaatctaaagaagagttagataaattttgtgatgcaatgattctcataaaaaatgaaa

SEQ ID NO: 220445 - DNA, 1081 bp, Unknown
  Bacterial polypeptide expressing nucleotide sequence isolated from the Sargasso Sea
cagcccaacgcgggctcgcagggcgaatacgctggcctgctggccatcaagggttaccacgaatcgcgtggtgaaggccaccgcaacatctgcctcatccccagcagcgcccacggcaccaaccccgccagcgcgcaaatggtgggcatgcaggtggtggtgaccaagtgcgacgacaacggcaacgtggacatggccgacctgaaggccaagtgcgagcagcacagcggcaatttggccgcgatcatgatcacctaccccagcacgcacggcgtgtttgaaaccagcgtgaaggaactgtgcgccctggtgcacagccacggcggccgcgtgtatgtggacggcgccaacatgaacgcgttggtgggtgtggcagcacccggcgagtttggtggtgacgtgagccacctgaacctgcacaagaccttctgcattccccacggcggtggcggccccggcgtcggccccgtctgcgtggtggaagacctggtgcccttcctgcccggccatgccacagcgggcgtggcaggcggcgtgggtgccgtcagcgctgccccgctgggcaacgccgccgtgctgcccatcagctggatgtacatccgcatgatgggtgccgaaggcctgcaagccgccaccgagaccgccatcctgagcgccaactacatcagcgcccgcctcaaggaccactaccccacgctgtacgcgagcgaaaacggccatgtagcccacgagtgcattctggacctgcgccagctcaaggacaccagcggtgtgatggccgaagacgtggccaagcgcctgatcgactacggcttccacgcgcccacgctgagcttcccggtgcccaacacgttgatggtggagcccaccgagagcgaaaccctgtttgagctggaccgcttcatcgacgcgatgatcgccatccgcgaggagatccgccagatcgaagcgggcaagctgccgcaggacaacaacccgctcaagaacgccccgcacaccgcagaaagcctgctgagcgtcgaatggaaccgcccctacacccgcgaagcggcagcctaccccgtggctgcactgcgcagca

SEQ ID NO: 220446 - DNA, 748 bp, Unknown
  Bacterial polypeptide expressing nucleotide sequence isolated from the Sargasso Sea
atggaaaataaactcaatattaattcttcctactctttagtagaaaaaaaaccctccttctcagataggcatattggtccttcagaagccgaggtaaaagaaatgttggataaattagaattctcaactcttgaggagttaatccaggccactgttcctaatcaaatcctcttagatgctccattaacattagataatccaatgagtgaggaagatgctctagagtatttaagttcaaaaattagtcaaaataatttatttaaaagctatataggaatgggttatagcaacacaattactccatctgttattttaaggaatattttggagaatccaggttggtataccgcgtatactccatatcaacctgaggtttctcaaggcaggctggaaatgcttataaatttccagcaaatgataatggattttactggtctagaagttgctaatgcttctcttttagatgaaggaacagctgctgttgaagcgatgatccttgcatttagacactcaaaagatgatagatgtatttttctagtttcagagttttgtcatcctcagactattgatttgctgcatactagagcagaaccattaggtatagaaataaaagttggggacctagatctattaattaaggaaaatccaaacctcttctttggatttataggacaatatccaaatactttgggtcaaatttccgactttaagtttgctttatctcaatctaaagcccaatcttcaatat

SEQ ID NO: 220447 - DNA, 919 bp, Unknown
  Bacterial polypeptide expressing nucleotide sequence isolated from the Sargasso Sea
ttttgaagaaaagataactgatatatgtgaacttgttcataagcatggaggtcaagtttatatggatggtgcaaatttaaatgcattagtaggaattgcaaaaccaggtaaatttggtcctgacgtttgccatattaatttacataaaacattttgtataccacatggaggaggcggaccaggcatggggccgatagcatgcaaaaaacatttagaaggttttttacctaaacattctgtaattaaagattgtggacctgctactggtatcggagctgtctctgctgcaccttggggaagtgcaagtattttatcaatttcgtggatgtatattaaaatgatgggatctgaaggtttaaaaaaagcctcgcaagtagccatattaaatgcaaattatattgcacataaactaaaaaaatcatttccaatcttatataaaggaaaaagtgggaatgttgcccatgagtgcattatagatattagaaaaattaagtcagatacaggtataacagaagaggatattgcaaaacgattaatagattttggataccatgctcccactatgtcttggccagtagcaggtactatgatgattgaacctacagaaagtgaaagtttaaaggaaataaacagattttgttctacgcttgaaaaaattaaaaccgaaattgataaaattcagaatgataaatatgataaaattgataatcctcttaagaatgcgccacatactcaccttgaattaacatcagacaaatgggatcataaatatgaaagagaagaagcagcttatccatctgaatttttaaagacagccaagtattggccgccagttggaagagtagataatgtttatggtgataaaaatttattttgtacatgtccatctattgatgagtatgaagatacagcggcgtaa

SEQ ID NO: 220448 - DNA, 940 bp, Unknown
  Bacterial polypeptide expressing nucleotide sequence isolated from the Sargasso Sea
ctacccttcactcatggagtatttgagccaaatatcagtgaaatgtgccaagtcattcatcaagagggtggtcaggtctatttggatggagcaaatttgaatgctcaagtaggtatttgcaggcctggatcttatggcatagatgtgtgccatttaaatcttcataaaactttttccattcctcatggtggaggaggccccggagtaggtcctatcgctgtagcagatcatttggttccttatctgcctggacattcaattatcaagtgcggaggcaaaaaggctatttcggcagtatctgcagctccatttggtagcgctggaatattgcccatcagttggatgtacatccgaatgatgggtagcgatgggttacgcaaagcgagttctatagcaattctttctgctaattatttagcaaaaagacttgatccttattatccagttttatttaaagatcccaatggattagtagctcatgaatgcatattagacttacgaccattaaagagtcagttaggtatagaagtagaggatgttgccaagagattgatggattatggatttcatgcaccaacaataagttggcctgttgctggaactttgatggttgaaccaacagagagtgaaagtttgtctgaattagatcgtttttgtgacgcgatgataggaatacgcgaagaaattgaacaaataaaattaggaaagattgatccaataaataatcctttaaaacaatctccacataccttaaaaagagttacctcggatgattgggatagaccttattctcgtaaagaagctgcttatccattgcctgatcaagaaaaatataaattttggccatcagtttcacgtattaataatgcttatggagacaggaatttgatatgtagttgtccttcagttcaagatttagaagatactaattctatttgaa

SEQ ID NO: 220449 - DNA, 2658 bp, Unknown
  Bacterial polypeptide expressing nucleotide sequence isolated from the Sargasso Sea
aaaaaaataaaatttttagaaattttataggaatgggatattataactcaattacacctaacgtaattttaagaaatattttagaaaatcctggatggtacacttcttatacaccttatcagcccgaagtagcgcaaggtcgacttgaaatgcttttaaattttcaacaatcaataattgacttaacgggcatggatattgctaatgcctctttattagatgaagcaacagcaacagcagaagcagtaggtttaagccaaagattagataagactaactcgaaaaaaatatttatttcaaataattgtaatcctcagacaattgatcttataaagacaagaacaaaccctttcggtttagaattgatcataggtgacgaaaaaaaagaacttacaaaaattaatgatgatattatttgtggagtgttgtcttatccgggaactttaggtgaaataaatgatcctagtgaaagcattagcctaatacacaaaaaaaacggaaaagctatattggtttgtgatttattagcgctagccagattaaaaaccccagcagaactcggtgctgacattgctgttggtagtgctcaaagatttggtatcccaatgggatatggtggcccacatgcagcattttttgctaccaaggaagaatttaaaagatcaatgccagggagaattataggtgtatcaaaagatagacacggaaaaaaagcttacagactttctttacaaactagggagcagcacattagaagagataaagccacaagtaacatttgtaccgctcaagctttattagctatcatttccgctgcttttgcaatttatcacggaccagaaggaatacttaaaatagctaacagaacttctaaattagctaaaattttcgctgataatattaaatctggtggttacaaaattttatcagattatttttttgataccgttactattaaaaccaatgaaaaaacaaattctatttatgaggctgcattaaaagaaaatattaacttaagaaaagttgataaagagcatttatcagttgcttttgatgaagcaaaaaaacttgatgatgtaaatatattattaaaattatttggaatttctaagacaattaagcaagatgtaaaggttgaattagacaatcttccaaaaaaccttttaagaacttcaaaatacttaactcatccagtttttaacaaatatcattctgagactgaaatacttagatatttaaagaaacttgaagactgtgatattgcactaaataggtcaatgattgctttaggatcttgtaccatgaagctcaacgcaacagctgaattaattcctattacatggaaggagttttcacttccgcatccttttgttcctacaaatcagatggaaggttacaagattctttttaaggatttaataaatgatttaaaagaaattaccggatatgacgcagtctctttacaacctaactctggcgcacaaggagagtatgcaggtctaatgactataagaaaattccataagaataataaacaagaaaatcgtaacgtttgtctaatcccagactcagctcatggaactaatccagctagtgctcaaatgtgtggaatgaaagtggttgtagtcaattgtgacgatgatggaaacgtcgatataaacgatcttaaaaataaagctgaaaaacactcaaaagatttagctgcattaatggttacatatccttctactcacggagtatttgaggaaaaaatcatggaaatttgtgatgttattcataagcacggtggacaagtttatatggatggagctaatctaaatgcacttgtgggtatagcaaaaccagggaaattcggacctgatgtttgtcatattaatttgcataaaacattttgcatacctcacggtggcggtggacctggaatgggaccaattgcttgctctaagcatttagctgattttttaccaactcatgaaattattaaagaagctggtcctaaaaatggaatgggagctgtttcagctgctccttggggaagttcaagtatacttccaatatcttggatgtacataaagatgatgggtgcggaaggtttaaaaaaagcttcacaagtttcaatattaaatgccaattacatttcaaaaaagttatctaaagactataaagttctttatactggcaaaaatggtaatgtcgcgcacgaatgcataattgatattagaccaattaaagcaagctcaggaatatctgaagaggatttagcgaaaagattaattgattttggttaccacgcaccaactatgtcatggccagttgccggtacaattatgattgagccgacagaaagtgaaaatttagaagaaatagataaattttgtaatgcatttattaaaattaaaaaagaaataaatttagttgagtcggctaaatttgataaaatagacaatccacttaaaaatgctcctcatacttatgttgaattagcttcaactgagtggaaacatgcttattcaagagaagaagcagcttttccaactgaatacataaaaaataataaatattgggccccagtagcaagagtggataatgtatttggggatcgtaatcttgtatgttcatgtcctactatggatgaatataaagatgaagctgcataat

SEQ ID NO: 220450 - DNA, 1299 bp, Unknown
  Bacterial polypeptide expressing nucleotide sequence isolated from the Sargasso Sea
ccacatccttttgtgccacaaaccagatggaaggctacaaaattctctttaatgatttgataaatgatttaaaggaaatcacgggatatgatgcagtatcattacaaccaaattctggagctcagggtgagtatgctggattaatgacgataaggaaatttcatgaaagcaatggacaaggcgatcgagatgtgtgcctaataccaaattctgctcacggaaccaatccagcgagtgctcaaatgagcggaatgaaagtagtagttattaattgtgacgatgacggtaacgtggaccttaacgatttaaaaaataaagcagaaaaatattcaaaaaatttagctgctttaatggttacttacccatctactcatggagtatttgaagaaaaaattactgaaatttgtgatgttattcacaaacacggcggtcaagtttatatggatggagcaaatttaaacgccttagtaggtattgcaaagccaggaaagtttggaccagacgtctgtcatataaatttacacaaaacattttgtattccacatggtggtggaggaccaggtatgggaccgatagcttgtacaaaacatttatctgattttcttccaactcatgaaataattaaagatgctggaccaaaaaatggaatgggggctgtttcggctgctccatggggaagttcaagtatactacctatatcatggatgtatataaaaatgatgggcgctgagggtttgaaaaaagcttcgcaaatttcaattttaaatgcgaattatatttcaaagaaattatctaaagattacaaagttttatacactggcaaaaatggaaatgtagcacatgagtgtataatagatattagaccaattaaggcgagttcaggaatttcagaagaagatttagctaaaagattaatcgatttcggttatcacgctcctacaatgtcttggccggttgcaggaacaataatgatagagcccacagaaagtgaaaatttagaagaaatagataagttttgtaatgcattaattaaaataaaaaaagaaattgatttagtggagtcatcaaaatttgataaaattgacaatccattaaaaaacgctcctcacacctacattgaactagcttctaatgattggaatcataaatatacccgagaagaggcggccttcccaactgcgtttgtaaaaaataataaatattggcctccagtcgcaagagttgacaatgtttatggagatagaaatcttgtatgttcttgcccatcaatggatgaatataaagatgaagctgcttgat

SEQ ID NO: 220451 - DNA, 1642 bp, Unknown
  Bacterial polypeptide expressing nucleotide sequence isolated from the Sargasso Sea
tggctttggtatctctttagatgagcttagtaatgaaaaagaaatcaaagatattttgactttcatagcaaaccttatagaaaaagaagaagatttagagcatataaaatttgataacgtatttcatcttgaaagtttagctttgagaaacagtgcatggatgcagcaagatatattcacaaattaccaaagtgaaactgaattaatgagatatatattccgacttgcagaaaaagatttttctttggtagatgggatgatgccattgggaagctgtacgatgaagttaaattctgcagcagagttaaacccagtctcttgggctaatttatcttcgattcatcctttttcccctcaagatcaaactaaaggttattcaaaaatcatatctgacctagaaaaatggataagtgagattgttggtttaaaatcagtttcttttcaaccaaatgcaggctctcaaggagagtttgcaggtttattggcaataaattcttattttgaatcaaaaggtgaactgttaagaaaaaaatgtttaattccaaaaagtgctcatggaacaaatcctgctagtgcagttatggcaggttttgacgtgttaactgttgaatgtgatgacgaaggaaatattgattttcaagatttgtcaatcaaggtcaagaaatttgataaccaaataggggctcttatgttgacttatccttctactcatggagtttttgaattacaaatcagaaagatatgtgatttaattcactctgtgggaggatttgtctatttagatggagcaaatttgaacgctcaggttggattatgtaaaccggggaattatggtgttgatgtttgtcatttgaatttacataaaacattctgcattccacatggaggtggtggtccaggagtaggtccagttgctgcatcagaaactttaagcccatttcttcctactcattctttaatggataataatttatctattagtcctaattacgtatcttctgccaagtatgggagtgcaagtattcttccaataagttggatgtacataaaaatggctggtcttagtggtttaaggaaagcaactatgcatgcaattttgtctgcaaattatattgcgcattctttaaagcataaattcaagattctttataaaggaaaaaataattttgtcgcacatgaatgtattttagattttagggatttaaaatccaaaactggtttaagtgtaaatgatttagctaaacgattaatagattatagttttcatgccccaactataagttggcctgttccagagacgataatgatagagcctactgaaagtgaatgtttggttgaattggatagattttgcgagtctatgctactgattggagaagaaatcagcgaaatagaaaaaaatagtgaattaaagaataataatgtaataagtaacgctccccatacgctgaaagagttaattgctgataattggcattatccttattcaaaagaacaagcttcttttccttataaaactccaacatctattaagttttggtcttcagtttctaggatcaataatgcatatggcgatcgcaatttaatttgttcttgcaatgtaaatcaaggagagactttcgaagaaaaaaaatgtgcttaa

SEQ ID NO: 220452 - DNA, 2872 bp, Unknown
  Bacterial polypeptide expressing nucleotide sequence isolated from the Sargasso Sea
aatgttaccaaattcagaaaaagattttttaaagagacacattggaccttctaaagaagatcaatcaaaaatgttaaaagaattaaattataaatcgctagatgatttaattgacagcacagtgccagaaaaaataaagtttagaggtgaattaaacattggtgaatcaaattcagaatatgaagctttgagaaaattaagatcaatatcaaaaaaaaatcaagtttactcaaattttattggtatgggttattatggaacttatacaccttatgtaattttaagaaatatattagaaaatccaggttggtatacttcatatacaccttatcagccagaggtagctcaaggaagacttgagatgttattaaattttcaacaaatgattgttgattttactggaatggatatagctaatgcctctttattagatgagggtacagcagcagcggaggctatgggcttaagtcacagattgaacaaaaaagacagtaatttagtttttgtatctgaggattgtcatcctcaaacaataaatgtagttcaaactagagctgaaccgttgggtttaaaagtattggttggtaaagaagatgaggttctagaacagttaaaagaagatttagtttgtggaattttacaatatcctggaactttaggagatattaaagacccaagtgaagcaattagcaaaattcataaaaagaatggtaaggctgtattagcttgtgatttgctagcattagcaaaattaaaaacaccaagagaacttggtgctgacatagcagttggaagctcacaaagatttggtatcccaatgggatatggaggtccacacgcagctttttttgcaacaaaagatgagtacaaaagatcaatgccaggaagaattgtcggtgtgtcagttgatagacacggtaacaaggcatatagattgtccttgcaaactagagagcaacatatcagaagagacaaggcgacaagcaacatttgcaccgcccaagctctattagcaattgtatcagcagcttattctatttatcacggcccagatggaattaagaatatttctgaaagagtctcacaattagcaaaaagttttgccgataaaataaaacagtctggatatgaactttattctaattatttttttgatactgtcacaatcattactaaagaaaaaactgatcaaatttataaaaatgctttaaatcaaaaagttaatatacgtaaagtaaattctgaaatgcttgcagtttcttttgatgaaagaaagaatgtttatagagtaaatcaactgttaaaaatttttaacgcagcagaatcaattaaaaaagaggatccttcagtaagtttacctaatctcccaaaaaacttattgagaacctcaaaatatttagaacatccagttttcaactcataccattctgaaactgaaatgttgagatacttaaaaagattagaagataaggatatagcattgaatagaacaatgattgcacttggttcatgcacaatgaagctaaatgctgccgctgagatgatcccaatttcatggaaagagtttgcagaacctcatccatttgtcccaattgaacaaatggagggattcagagatctatttactgatctaaaaaattggttgcgttccataactggtttctcgggtgtttctcttcaacctaatgcaggtgctcaaggtgaatatgcgggattaatggttatacgaaagtatcatttagatagggatgagggcaatagaaacatatgtttaattccaagttcagcacacggtactaatcctgcaagtgcacaaatgactggaatgaaagttgttgttgttaattgcgataaagaaggaaatgttgatttcgatgacttaaagaaaaaagcagagcaacattctgaaaacctcggggcattaatggtaacttacccatccacccatggagttttcgaagaaaaaatatcagatatttgtgagttagttcataaacatggtggtcaggtttatatggatggtgcaaatctaaatgcattagtgggaattgctaaaccaggaaattttggtccagacgtttgtcatattaatttacataaaacgttttgtattcctcatggtgggggaggacctggaatggggccaattgcttgtaaaaaacatttacaagtttacttgcccaaccacccagtaataaaagattgtgggccaacttctggaattggagcagtttctgcagccccttggggaagctcaagtattttatcaatttcttggatgtatattaaaatgatgggatcaactggattaaagcttgctacccaagttgcaatattgaatgcaaattatatagctcatagattaaaagatcactttccgattttgtacaaagggtcaaatggcaatgtggcacacgaatgtattattgatattagaaaaattaaatcagaaacaggaataacggaggaagatattgcgaaaagattaattgattatggttttcatgcaccaactatgtcctggcctgttgctggtacaatgatgatagaaccaactgaaagtgagagtcttaccgaaatagacagattttgtgaaactttaattaagattaaaaaagaaatagacatgattaagtccgggaagtttgataaagtagataacccaattaaaaatgcaccacatactgatcttgaactgtcttctgacgagtggaaacacaaatacacaagagaagaagcagcttatccatctaaatatttaaaaacaaataaattttggcctcctgtcgccagagttgataatgtttatggagataaaaatatattctgcacttgtccaagtattgatgaatttaaagaagatgcagcttaa

SEQ ID NO: 220453 - DNA, 1774 bp, Unknown
  Bacterial polypeptide expressing nucleotide sequence isolated from the Sargasso Sea
aataatgaaatctccaggtttttacgatgctgatatagttataggcagctcccaacgatttggtgtccctatgggatttggcggacctcatgcagcatttttcgcaacaaaagatgaatttaaaagattaatgcctggcagattaattggtgtctcagttgatagaaataataaaagatcttatagaatggctctgcaaacacgggagcaacatattcgaagagaaaaagcaactagcaatatttgtactgctcaagctttattggcaattattgctgcagcttatgctatttatcatggtcctgagagattaaaaaatattgcaacaactattaattataatgctcgatatcttaaaaaatcattggaaaaactaggttttaaaattttgtctcgtcgctattttgacactttagttattcaagataataaagctaaagaatggtttaacaaatcagttgaggagggtatgaattttagattaattgatgacaaaaccttctctctgacaattgatgaaacaacaactcttgaagacattgataatcttataatctttttcaatactgaaaacaaaacgttagacgctaagattattgaagaaaatcttgatgaaatttttaaagaagatgatttgctaagagatgataagatcttaacacaccctatatttaatatttatcattcagaaacagaaatgatgagatatttaaaaaaattagaaaataaagatattgcacttaacagatctatgattcctcttggatcatgcactatgaagttaaatgctgcttcagaaatgctgcctataactcttccaggatttgcaaatgctcatccttttttagaaaaacatcaaagagagggttataatcaaatgttgagagagttaatttcgatgttaaaagatataactggctttgatgctatatcattacagcctaatgctggagcacagggagagtttgcaggcttacttgctattaaaaaatatcatgaagctaacaaacaaggtgatagaaatatatgtttgatacctaatagtgctcatggtacaaatccagcaagcgcacaaatgtgtggtatggaagtttcaatagtaaaatgtgataatttagggaatgttgatttaaatcatttagacgaaaaaattaaagaagctggcaacaaattagcagctttaatgattacctatccatctacgcatggtgtttttgaggaatcaatctcaattatctgtgaaaaaattcataatgcaggaggtcaggtttacatggatggagctaacttaaacgccatggtaggaattgctaaacctggaaaatttggacctgatgtatcacatatgaatcttcataaaacattttgtataccccatggtggaggaggtcccggtatggggccaattggtgttaaatcacatttaaaaaattttttacctggacatcctattgtacaaaatgaattaggacttacaagtttagatgcagtttctgcagctccgtggggcagtccttcgattttaccaatttcttattcatatatttcaatgatgggagatgaaggattaaaacttgctacacaagtagcgatattaaatgctaattatataaaagaaaaactattagatttttttccgctattatattctggtaaaaatggaatggtagctcatgaatgtataattgatattagaccaattaaagaagaattgaatatatctgaagaggatattgcaaaaagacttatagattatggtttccatgcgccaact

SEQ ID NO: 220454 - DNA, 598 bp, Unknown
  Bacterial polypeptide expressing nucleotide sequence isolated from the Sargasso Sea
atgttgccaaattcagaaaaagattttttaataagacatattgggccttctaaagaagaccaatcaaaaatgttaaaagaattaaattatcaatcactagatgatttaattgataatactgttccagaaaaaataaagtttaaaggcgaactaaatattggtgagtcgaattcagagtatgaagcgttaagaaaattaagagctatttcaaaaaaaaatcaagtttactcaaattttattggtatgggatattatggaacgtatacaccgtatgtaattttaagaaatatactagaaaatccaggttggtatacttcatacacaccttatcagccagaggtagcacaaggaagacttgaaatgttattgaactttcaacaaatgatagttgattttacaggaatggatattgctaatgcttctttattagatgagggcacagcggcagcagaggctatgggtctttgtcacagattaaataaaaaagacagtaatttagtttttgtatctgaggattgtcatcctcaaacaatagatgtaattcaaacaagagctgaaccaataagtttaaaagttttggttggtaaagaaagatgaa

SEQ ID NO: 220455 - DNA, 955 bp, Unknown
  Bacterial polypeptide expressing nucleotide sequence isolated from the Sargasso Sea
tatgttgacttatccctctactcatggagttttgaaattacaaatcagaaagatatgtgatttaattcattctgtgggaggatttgtctatttagatggagcaaatttgaatgctcaggttggattatgcaaacctggaaactatggagttgatgtttgtcatttgaatttacataaaacattctgcattccacatggaggaggtggtccaggagtaggtccagttgctgcatcagaaactttaagcccataccttcctactcattccttaatggataattatttatctaatagttttaatttcgtatcttctgccaagcatgggagtgcaagtattcttccaataagttggatgtatataaaaatggcaggtcttagtgggttaaggaaagcaacttctcacgcaatattatctgcaaattatattgcgcattccttaaaacataaattcaagatcctctataaaggaaaaaataattttgtcgcacatgaatgcattttagattttagagatttaaaatccaaaactggattgagtgtcaatgatttagctaaacgattaattgattatagttttcatgccccaactattagttggcctgttccagaaaccataatgatagagcccactgaaagtgaaagtttggcagaagtagatagattttgtgaggctatgctattgattggagaagaaatcagtgaaatagaaaataatcatgagttaaaaaataataatgtaataagcaatgcaccccatacgctgaaagagttaattgctgataattggcaatatccttattcaaaagaaaaggcttctttcccttataaaactccaacaactattaagttttggtcttcagtttcaaggatcaataatgcttacggagatcgcaatttaatttgttcttgcaatgtaaatcaagatgagactttagaagaaaaaaaatgtgcttaa

SEQ ID NO: 220456 - DNA, 466 bp, Unknown
  Bacterial polypeptide expressing nucleotide sequence isolated from the Sargasso Sea
atgattgacgataattccaaagaatttattaaaagacatattggtccttcagaagaagatcaatctaaaatgctgcaatacatcggatataagtcgcttgaagaactgatggaaaatactgtgccggaaaagatcttgttgaaagatgaactaaaaattgaccagccgatgtcggaaaatgatgctttaaaaaaattaaaatctatatctaaaaaaaataaaatttttagaaattttataggaatgggatattataactcaattacacctaacgtaattttaagaaatattttagaaaatcctggatggtatacttcttatacaccttatcagcctgaagtagcgcaaggtcgacttgaaatgcttttaaattttcaacaatcaataattgacttaacaggtatggatattgctaatgcctctttattagatgaagcaacagcaacagcagaagcagtaggttaag

SEQ ID NO: 220457 - DNA, 802 bp, Unknown
  Bacterial polypeptide expressing nucleotide sequence isolated from the Sargasso Sea
atgaaagaaagtcgtttttacaaccgtcatattggtcctaataggaatgaaattaataaaatgctctcaaccctggaattaaattctttagatgagcttttaaatcaaacagtgccagagggaataagacttaaaaagccactatcaatagaagaggatatatccgaaaatgagtttttaaatgaaatgcaagaacatgctgaaaaaaataaatgttttgacacatacattggccaaggttatcatccaacgattactccagcagtaataaaaagaaacatacttgaaaacccaggttggtatacttcatacactccttaccaggcggaaattgctcaaggtagattagaagcattatttaattttcagagtgtagtttcagatttgactggaatggaaatagcaaatgcctctcttctggatgaaagttcagctgcagctgaggctatgactatgcttttttatcttagagattctgttcaaaaaaaaaataattcaataaagttttttgtctcagaccaagttttgcctcaaacaatttctgttctcaaaacaagggcaaaccctttaggtattaaattaatgattggttccattgatagtgtaaatctttctgatggttttttcggagttttaattcaatacccaggtaaatatggtgaaataattgatcttggaactgctataaaaaaagcaaaaaaagtaaatgtaaaagttgttgttgctgctgaccttcttagtctaactgttcttgaagcacccagggaattacgatgtagatgttgttgttggtacaacccaa

SEQ ID NO: 220458 - DNA, 1103 bp, Unknown
  Bacterial polypeptide expressing nucleotide sequence isolated from the Sargasso Sea
tttattaagaacttcaaaatatttagaacaccctgtttttaattcatatcactcagagacagagatgcttagatatcttaaaaaattagaggataaggatatagctcttaatagaacaatgattgctctaggttcatgtactatgaaattaaatgctactgcagaaatgatacctatttcttggagagaattggctgagcctcacccattcgtacctgtcgaacagatggagggatatagagaaatgttcacagatcttaaaaattggttaagatctattaccggtttttctggtgtttcacttcagccaaatgcgggagcccaaggtgagtatgctggcttaatggtaataagaaagtatcatttagatagaggggataaaaatagaaatatatgtttaattccaagctcagcacatggaactaatccagcaagtgcacagatggttggaatgaaagttgtcgttgttgattgtgacaaagaaggaaatgttgattttgaggatttaaagaaaaaagcagaattgcattcagacaatcttggtgcattaatggtaacttacccatcaactcatggcgtatttgaggaaaaaattaaagatatatgtgaagtaattcatgaacatggtggtcaagtttatatggatggagcaaacctaaacgcacttgttggagttgcaaaaccaggaaattttggtcctgatgtttgtcatataaacttgcataaaacattttgtattccgcatggtggaggaggacctggaatgggacctatcgcatgtaaaagacatctacaagtttatctgcctaatcatccagtcgtaaaagattgtggacctgcaagtggaataggtgccgtttcagcagctccttggggaagctcaagtattttatcaatttcttggatgtacattaagatgatgggatccgaaggtgtaaaacttgcaacacaaattgcaatcctaaatgcaaattacatagcaaatagattaaaagaccattacccaattctttataaaggttcaaatggtaatgttgctcatgagtgtattattgatattagatcaattaaaagcgaaacaggtaatcagaagaagatatagc

SEQ ID NO: 220459 - DNA, 1067 bp, Unknown
  Bacterial polypeptide expressing nucleotide sequence isolated from the Sargasso Sea
aaaaaatggaaaagcagtattagtgtgtgatctacttgctttagccaagctaaaaacacctgcagagctgggagcagatatagcagtaggaagttcacaacgatttggaattcccatgggctatggtggtccacatgctgcattttttgctaccaaagatgagtttaaaaggtcaatgccaggaagaattataggagtctcagttgatagacatggcaataaagcttatagacttgctcttcagacaagagaacaacatataagaagagacaaagctactagtaatatttgtactgctcaagctttactggcaattgtttcagcagcttatgctatttatcatggccctaatggtataagaaaaatttcagaaagagtttcacaattagcaaataattttgccgataagataaaaaaatctggttacgaaatatattctaacaatttttttgatacagttgtaattaaaacaaaagataaaacagaaaaaatatttaaaaatgctttagatcaaaaagtaaatattagaaaagtcaattccgaaatgttagcagtttcttttgatgaaaagaaaaatgtttacagagctaaccagcttttaaaaatatttaattgtgctgaatcaataaaagataatccaactgaaagtttgccaaatttgcctaaaaatcttttaagaacatcaaagtatttagagcatacagttttcaatagttatcactccgaaactgaaatgcttagatacttaaaaagactagaggataaggatattgcacttaatcgttcaatgattgctttgggatcatgtactatgaaattaaatgcagttgcagagatgatacctatatcttggagagaattttcagaaccacatccttttgtaccaattgaacaaatggaaggttttagaactctttttacagatttaaaaaattggttaagatctattacaggtttttcaggagtttcattacaaccaaatgctggcgcacagggtgaatatgctggcttaatggttataagaaaatatcatattgaaagaggtgaagaaaataggaatgtttgct

SEQ ID NO: 220460 - DNA, 1117 bp, Unknown
  Bacterial polypeptide expressing nucleotide sequence isolated from the Sargasso Sea
taatcgtaacgtctgtctaattccagactcagctcatggaactaatccagcaagtgcccaaatgtgtgggatgaaagtggttgtagtcaattgtgacgacgatggaaacgtggatataaacgaccttaaaaacaaagctgaaaaacactcaaaagatttagctgctttaatggtaacttatccttctactcatggagtattcgaggaaaaaatcatggatatttgtgaggttattcataagcacggtggacaagtttatatggatggagcaaatctaaatgcgcttgtaggtgttgcaaaaccagggaaatttggaccggatgtttgtcatattaatttacataaaacattttgtatacctcacggtggaggcggaccaggaatgggtccaatagcttgtgctgagcacttagcagattttttaccaacacatgaaattatcaaagaagccggccctaaaaatggaatgggagctgtatcagctgctccttggggtagctcaagtatacttccaatatcttggatgtatataaagatgatgggtgctgaaggattgaaaaaagcttcacaagtttcaattttaaatgcaaattatatatcaaaaaaattatctaaagattatgaagttctttatactggtaaaaatggaaatgttgcacatgaatgcataattgatatcagaccaataaaagcaagttcaggaatttccgaggaagatttagcaaaaaggctaattgactttggctaccatgctccaacaatgtcatggcctgttgctggtacaattatgattgagccaactgaaagtgaaaatttggaggaaattgataaattttgtaatgcacttataaaaattaaaaaagaaattaatttagtggagtcatcgaagtttgacaaaatagataacccgctgaaaaatgcacctcatacttatctcgaattagcttctagtgagtggaagcatgcttactcaagagaggaagcagcttttccaactgagtatgtgaaaaataataaatattgggcaccagttgctagagtagataacgttttcggagatagaaatttagtatgttcatgtccttcaatggatgaatataaagatgaagcagcttaa

SEQ ID NO: 220461 - DNA, 1326 bp, Unknown
  Bacterial polypeptide expressing nucleotide sequence isolated from the Sargasso Sea
agaattcatttatcgtcatattggcccttcagaggaagagcagaaaacaatgcttaaagcagtaggatacagctctttagaggatttaatggaaaatacagttccagaaaaaattcttcttaaaaatgagttaaagattagtgactcactatcagaaaatgatgctcttaaaaaattaaaatctatatcaaaacaaaacaagatctttagaaattttataggtatgggatattataattcctttactcctaatgtgattttaagaaatatattggaaaatccaggttggtatacttcatacacaccttatcagcctgaagtagctcaaggtcgattagaaatgcttttaaatttccaacagttaattattgatttaacaggtatggatatagcaaacgcctctttgttagacgaggcaacagctgctgccgaagctgtgggtctaagtcaacgtctagacaaaaatgactcaaaaaaaatatttgtatcaagttcatgtaatccacaaactatcgatcttataaaaacaagaacagaaccattcggtctaacgttaattataggaaatgaaaaagaagatttaacaaatataaacgaaaatattatttgtggtgttttagcttatccaggaacattaggagatatacaagatcctagtgagagcataagtcaaattcacaagaagaacggtaaagcaattttaatttgtgatctattagcgcttacaagattaaaaactcctgcagagttaggcgcagatattgctgtaggaagcgctcaaagatttggaattccaatgggctatggtggccctcatgcagctttttttgcaacaaaggaggaattcaaaaggtctatgccaggaagaattataggtgtttcagtagataggcatggaaagaaagcatatcgtttatcactacaaactagagaacaacatataagaagagacaaagctacaagtaatatctgcacagcccaggccttattagcaattatatctgcagcctttgcaatttatcatggaccaaaaggaatattaaaaatagctaacagaacctcaactttagcaaaattatttgctgacgggattaaaagcgaatttgaaattttaagtgaaaattttttcgatacagtaacaattaaaacaaaaaataaaactgaagctatttttaaaaaagctttagatgaaaatattaatttaagaaaagttgataatgaaactttgtcagtcgcatttgatgaggctaaaaaactagatgacgtgaatatattgtttaagatttttagtattaaaaaaactttagaccaaaattcaaaagtaga

SEQ ID NO: 220462 - DNA, 1054 bp, Unknown
  Bacterial polypeptide expressing nucleotide sequence isolated from the Sargasso Sea
tttggaaaatttaaataaaataaatctcttttcaaaacgccacctaggctctggtgagaccgatattaatcatatgcttaaggaggttggatacgactccatgagctcttttattgactcagtagttcctggatcaatcctcaagagaaatgctgttcaaataggtgaagaaaagactgaagaagaagttttggaagagttgagagcaatagcttctaaaaataaggtattcaaaagttttattggtcaaggtcattataataatttcacaccatctgtaatccttagaaatgtttttgaaaatcctgggtggtacacctcgtatacaccctatcaaccagaaatatctcaaggaagattagaagctttaatcaactttcaaacaatgattagtgatcttaccgccatggaattatctaatgcttctttacttgatgaagcaactgcagccgcagaagcgatgacattagcgaagcgctcatctaaatcaaaatctgactcttttttcgtagatgagaatagttttgagaatacaataaatgttctcaaaactcgagccgagcctctgggcataaagcttatatttgggaaccctattgatctttcaagctatgagatctttggtgcattccttcagtatccaggttcaaacggaaaaattactgatatgagccaacatattaaatcatgccatgaccaatctgctttagccgtaataggttctgatcttttggcattaacaatcctgaaaccccccggggaaatgggggcagatattgtcattgggtcctcacagagatttggcgtacctttaggatgcggaggaccgcatgcagcttttatggcagtaagcgacaaattgaaaagatccatgccaggcagaatagttggagcatcagtagattccaatggagatgttgcctacagattagctctccaaactagagaacaacatataagacgagaaaaggctaccagtaacatctgcactgctcaggcattattggcattatgggcagtttttattcgatctatcatggcaaagaaggactga

SEQ ID NO: 220463 - DNA, 1351 bp, Unknown
  Bacterial polypeptide expressing nucleotide sequence isolated from the Sargasso Sea
tatgataccgttaggatcttgtactatgaagctgaatgcaactgttgaaatgattccaattagttggccagaatttaattctattcacccttttgctccattaaatcaggctaaaggttataaaaaaatcattaatgaactggaagaaatgctctataaagttactgggtttgatgctgtatcttttcaaccaaattctggtgctcaaggagagtatgcagggctattaagtattagagaatatcataaagcaaataattcaaatagggatatatgtttaatacctgaatctgcacacggaacaaatccagcaagtgcaattatggcaggacttaaagttgtaatagtaagatgtgatgatcatggtaatatagattttaaagatttaagtaaaaaagttgatgaagctggtgatagactatcatcattgatggttacttatccatccacacacggtgtatttgaacataatatcgatcaaatatgtgatttgattcattcaaatggtggattagtctatatggacggagcaaacttaaatgcaatggttggtgtatgtaaaccaggaaagtttggagcagatgttatgcatattaatcttcataaaactttttgtataccacatggtggaggtgggccaggcatgggtccaatttgtgtaaatgaaaaattaaaaccacatctaccacagcatagttttacggataaagatttttcctactcagtatcatcgtccccatttggtagtgctagtatacttttaatttcttatatctatatgaaattgatggcagcaaatggtcttttaaaagcatctcaagtggcaattttatctgcaaattacatggcaaaaagattagaaaaagattattctattctttataaaggtaaaagcggattaaatgcacatgagtttatcgttgattgcagatcgtttaaatcaacagccaatataactaatgaagatattgctaaaagattaattgattatggttttcatgcacctactatgtcttggccaataccaggaacattgatgattgagccgacagagagtgaagcaaaatctgagcttgataaattttgtgatgccatgattgcaatcagaaaagaaattgaagaaatagaatcaggtaaaatgccacaagaggataatgttttagttaattcccctcatacagttcatgatatttgtgatgattggaatcatccgtattcaaaagaaaatgcggttttccctacaaaatggaataaagaaaataaattctggccatatgtatctagaatagataacgcttttggagatagaaatttcttttgtgtttgtccagatattgattcttataagtaa

SEQ ID NO: 220464 - DNA, 627 bp, Unknown
  Bacterial polypeptide expressing nucleotide sequence isolated from the Sargasso Sea
catgccatttacaccaacagactatttaccctacgattttgcaaacagaagacatatcggcccttcaccggctgagatggcacatatgctggagacactaggcttatccaacctggacagtctaattgatgaaactcttccaaaatcaatacgccagaaaaatcctttaaactttggaaagccaaaatcagaaagggctcttttaagtcacatgcgggtaactgcttcaaaaaataaagttctgacaagtcttatcggccaaggttatcatggaacagtgactcctccagtaattcagagaaacattttagaaaaccctgcgtggtatacggcgtatacaccttatcaacctgagataagtcaggggcggttggaagcattattaaattatcaaacaatgatatccgatcttaccggcctagaaatcgccaatgcttctctcttggacgaagccacagcttgtgctgaagcaatgacaatggctgaaagagttgccaagtcaaaagcaaaagcttttttcattgatgagaattgtcatatacaaaacattgaagttatgaaaaccagagcgcgtcctttgggtatagaaattgttactggcgatcctgacaaacttaatccagcaga

SEQ ID NO: 220465 - DNA, 1138 bp, Unknown
  Bacterial polypeptide expressing nucleotide sequence isolated from the Sargasso Sea
ttcggggctcttcatccatttgtacctttaaatcaagcgcaaggatataagcatttatttgatgatctctgtaattggctgggggatataactggcttacctggtgtttctttacaaccaaactctggtgcacagggtgaatatgctggtttaatggtaatccgagcatttcatctttcaaaaggtgatacaaatcgaactatatgtcttatacctgaatcagcgcatggaacaaacccagcaagtgcaattatgtgtggcatggaagttgttgttgttaaatgtgatagcaatggaaatgtagatttaaatgatttgaaaaataaagcctcgcaatatcaaaacaacctttctgctctaatgattacatacccatcaacacatggtgtatttgaaaatactattcaagaaatctgttctatagttcatagttatgatggtcaagtatatatggatggtgctaatctaaatgcaatggtaggaattagtaaggtgtctgatatcggtgttgatgtctgccatattaacttacataaaacattttcaattccacatggtggtggaggtccaggaatgggtccaatttgttctgcagaacacttagctccatttcttccttcgcacgatgttattccatgtaacaattcttctaaatcaatatctgccgtttctgctgcgccctggggaagcgctggtgtattacctataagctggagttatatgtctctattggggaatattggaatgaaaaaagcaacatctatcgcaatcttaaatgcaaactacatggctaaattactagaagatcatttcccaatattatatagaggtgaaaaaggatttaacgcacatgagtttattattgatttacgtcctataagaaaagaatctgggattacggatgaagatattgcaaaaagattaatggattatggtttccatgcaccaacgatgtcatggccagttcctggtactttaatgatagaacctacagaaagtgaatcaaaaactgaacttgacaaattttgttcggcaatgatttctataaagaaagaaatagatgatgtaaagaatggaaaggctgatccagaagataatttgcttaaaaatgctccacatactgcagaaagtattgcaa

SEQ ID NO: 220466 - DNA, 844 bp, Unknown
  Bacterial polypeptide expressing nucleotide sequence isolated from the Sargasso Sea
atgtttaaagaaaattttactcgaagacatataggccctaattcttctgatttaaataaaattcttagtacaataggtgtcaattctattgaacaacttcttaagcagactattccagaaaagattagattaaaaaaagacttgaatatacctgaaggtatttctgaaatggaatttttaaaagagataaaaaaattatcatctttgaatcagaagtttaaaacttatattggacttggttatcatgacacatttaccccttctgtcattcaaagaaatattctagaaaatcctgggtggtacacagcttatactccttatcaagccgaaatttctcagggaagacttgaggctttattaaatttccaaacaatggtttgcgatattactaaaatggagatagctaacgcctcacttttagatgaaggcacttctgctgctgaagcgatgataatgatgtataataatagatcaaaagatcaaaagttaacaaatcaaaataagttttatgtagattctaatatatttccacaaactttagctgtactatcaacaagagctaagccacttaatattgaattagtagtaggtgatttaaaagaattaaatgaaaatgagttttttggatgtattattcaatatcctggaaaggatggaaaactagaggaaatagataatctgttagaatccataaataatgaaaatcttaaagtagttattgctgttgatttaatgtcaatagttttaattgaacctcctaataccgataaaattgatgttgttgttggaacaactcaaagatttggaatacctcttggttatggaggacctcatgctgcttttt

SEQ ID NO: 220467 - DNA, 2890 bp, Unknown
  Bacterial polypeptide expressing nucleotide sequence isolated from the Sargasso Sea
atgaccaagcaaaccctcactcagttagaacagcacgatttattcttacgtcgccatatcggcccggatagcagccaacaacaagaaatgttgaactacgttggtgctgagtctctggacgatctgactgcgcaaatcgtgcctgagtcgatccgtttaagccaagagttgagcattggtgattcctgcggcgaagccgaaggcattgcttacattcgtggtttagccaaacaaaaccaagtcttcaaaagctacattggtatgggttactacggtacccaagtacctaatgtaattttacgtaacgtcttcgaaaatccaggttggtacacggcgtacacgccatatcagccagagatcgctcaaggccgtttagaagccattctaaacttccaacaagtgtcgatggatttaactggtttagatttagcgtcagcatcactgctggacgaagcgactgccgctgccgaagcgatggcgctggctaagcgtgtgtctaaagctaaaaaagccaacatcttcttcgtagccgatgacgtattcccacaaaccttagacgtagtgaagactcgcgctgagtgttttggttttgaagtagtagtaggtcctgcccatgaagcggtaaaccacgaactgtttggtgccctgttccagtattcaaaccgtttcggtcaaatcactgacttcacagacttattcgccgaattacgcgcgaagaacgtgattgtgactgtcgctgccgacatcatggcattagtgttacttaagtcaccgggtgccatgggcgccgacgtggtcttcggtagcgcgcagcgcttcggtgtgccgatgggctttggtggtccacacgcggccttcttcgtggcccgtgacgagcacaaacgctctatgcctggccgtatcatcggtgtgtcaaaggacacccgtggtaaccgcgcactgcgtatggcgatgcaaactcgtgagcaacatatccgccgcgaaaaagccaactcaaacatttgtaccgcacaaattctgttagcgaacatggcgtctttctacgccgtattccacggcccacaaggcctgaaaaccatcgcatcacgcatcaaccgcttcaccgatatcctagccgctggcttacaagctaaaggcgtgagcttagtgaacaacacttggttcgataccatcagcatcaaaggcttagacgttgcagcagtgaatgcgcgcgcactggccgctgagatgaacctgcgtttcgatgctgacggcatcgtcggcgtgagcttagatgaaaccactatccgcaccgatatcgaagccctgttcgatgtgattttaggtgctggccatggcttagacgttgccgctctagatgcgcaaatcgtggcgcaaggtagccaatcgattccagcttctttggtgcgtcaagacgccatcctgagccacccaaccttcaatcgctaccaaagcgaaaccgagatgatgcgttatatcaagcgtctcgaaagcaaagacttagcactgaactactcaatgatttcattgggttcgtgcaccatgaagttaaacgctgcggttgaaatgatcccagtcagctggccagaatttgctaacatgcacccattctgcccactggatcaagccaagggttacactcaactgattgaagaactgtcttcatggttagtgaatgtcacaggttacgatgccgtgtgtatccaacctaactctggcgcacagggtgaatacgcgggtctgctggcgattcgtaaataccacgagtctcgcggcgaagcccacagaaacatctgcttaatcccacaatctgcccacggcactaacccagcatcggcgcaattagccggtatgcaagtggtcgtgactgcctgtgacaagcaaggtaacgtagatttagaagatctgaaggctaaagcggctgaagtggcagaaaacctgtcatgtatcatgatcacttacccatcgacccacggtgtgtacgaagaatctatccgcgaaatctgcaacatagtgcaccagcacggtggtcaagtgtacttggacggcgccaacatgaacgcccaagttggcttaacctcaccaggctttatcggtgccgacgtatcgcaccttaacctgcacaaaaccttcgcgattccacacggcggcggtggtccaggtatgggcccaatcggcgtgaaagcgcacttagcgccgttcgtcgcgggtcacgtcgtggtgaaaccaggccgcgaaagcgataacaacggtgcagtttctgccgcgccatacggcagtgctggcattctgccaatcagctggatgtacattaagctgctcggttcaaacggcctgaaaaagtcgacgcaaaccgcgctgttaaacgctaactacgtgatgaagaagctgtctgaacactacccagtactgttccgtggccgtaacgatcgcgtcgcgcacgaatgtattatcgacctgcgccccatcaaagaagcctctggcgtgaccgaaatggatatcgctaagcgtctgaacgactacggtttccacgcgccaaccatgagcttccctgttgcgggcacgctgatgattgagccaaccgaatctgagtctaaggttgaactggaccgctttatcgacgctatggtgtcaatccgcgccgaaatcgctaaggtggaagcaggcgagtggccagcggacaacaacccgctgcacaacgcgccacacactatggccgatattatggacccagcgttcgattcacgcccatacagccgtgaagtggccgtgttcccaagtgccgcagtgcgtactaacaagttctggccaaccgtgaaccgtattgatgacgtttacggcgaccgtaatttgttctgtgcttgtgtgccgttatcagactatgagtagg

SEQ ID NO: 220468 - DNA, 1355 bp, Unknown
  Bacterial polypeptide expressing nucleotide sequence isolated from the Sargasso Sea
ctccaacgttattttaagaaatatacttttgagaacccgggatggtatactcagtacactccatatcaacccgaaatatctcaaggtagattagaagctcttttaaactatcaaacaatgattactcaaattacagctttaccaattgctaatgcctcccttttagatgaaggaactgcagcgagcgaagcaatgttaatgctttatcgcaaaaataaatctgaaaagacacaatttttagttgataaagagtgttttcaacaaactatagacgttattatttcaagagctgaaccgttaaatattgaaattattgtaacagactttaaaaattttgattttaccaatgcttttggctgtattgtacaatatccaaatagatatggacaaatttcatctgacaatgattacaaacgcgttgtatcagacgcacataattcaaattgtaaagtaatctttgctagtgacctaatgtgcctacagctttttgaagctccaggtaatttaggagcagatattgctgttggtaatagtcaacgtttcggtgttccactgggatacggaggccctcatgctgcatttatgtctactagtgaagaatttaaaagagatattccaggaagaattgtaggagtatcacaagatcgcagaggtaatcaagcttatagacttacgctccaaactagagaacaacacattagaagagaaaaagcaacttcaaatatttgtacagcacaagtgttgcttgctatcatttcaggaatgtatgcattatttcatggccctgatgatttgaaaaatattgccaaaagaatacatagccatacaaaagaactggccgataaaatttcaaaattaggtcacgaaatagtaactaacgataattcattttttgatacagtagtaataaaattatcaaatatgagtatagatagtttaaaggataaggccttagagcataattttaatttaatgtatcatgataatggacttgttggtatttctttagatgaaaaaacaaattatagcgaagttgagacgcttgcaaatctatttgatgtaagcaatgattctaaaaattcttataatatttttaaaccaaacagagtgggggatattttaactcatcctatttttcatagtgttaattctgaaacagaaatgctgagatatatcaacaaattagaaaaaagagatctttccttaaactatagcatgataccattagggtcctgtactatgaaacttaatgcaactgttgaaatgattccaattagttggccagaattcaattctatccacccttttgctccattaaatcaagctaaaggttataaaaaaatcattaatgaact

SEQ ID NO: 220469 - DNA, 1180 bp, Unknown
  Bacterial polypeptide expressing nucleotide sequence isolated from the Sargasso Sea
aatgttaaaaaacgctcaaaaggattttattcaaagacatattggtccttcagaagaagagcaaaatataatgcttcaagaattaggatttaaaaatctagatgaattaattaaaaacactgtaccagaaaaaattctttttaaagatgatttaggtattggtgatcctaattctgaatataaagcactaagaaagctaaaaaacatttcaaaaaaaaataaagtatattctagttttattggcatggggtactacggaacttatactccatatgtaatattaagaaacattttagaaaatccaggatggtacacttcatatacaccatatcaaccagaggtagctcaaggaagacttgagatgttattaaactttcaacaaatggtaattgattttacaggaatggatattgctaatgcatctttattggatgaaggtactgctgcagctgaagcagtaggtttaagttatagaattactaaatctaaaacaaaaaaagtttttgtttcaaaaaattgtcatccacaaactatcgaagttgttaaaacaagagcagaacctttaggattagaaataatagttggtgatgaagataaagatattaaagaagaagttatttgtggtattattcaatatccaggaacattaggtgacattaaagatccaagtgaagctataagtaaaattcataaacataatggtaaagccgtactagtttgtgacttattagctttagcaaaattaaaaacgccggcagaattaggcgcagatattgcggttggtagctctcaaagatttggcataccgatgggatatggtggtccacatgcagcattttttgctactaaagatgagtacaaaagatcaatgccaggaagaatagtaggtgtttcagtagatcgacatggaaaaaaagcttacagactttctcttcaaacaagggaacaacatattagaagagataaagctactagtaatatctgtaccgctcaagctttgttagcaatagtttccgcagcctatgcaatttatcatggtccaaaaggtattagaaaaatatcagaaagtgtttcacaattaacaaaaaattttgcagacaagttaaaacaatcaggttacgaactttattcaaatcatttttttgatactataacaggaattaagaagagaccaacttga

SEQ ID NO: 220470 - DNA, 1703 bp, Unknown
  Bacterial polypeptide expressing nucleotide sequence isolated from the Sargasso Sea
cccagcattgttagcaattgtgtcagcagcatatgctatttatcatggcccagtgggtatcaaaattattgcagagagagtttctcaattagctaaaaattttgcagataaattaaaacaatcaggatatgaaatttattcagatcatttttttgatacagttacaattgttactaaagataaaactgatcaaatctataaaaatgctttagatcaaaaagtaaatatcagaaaagtaaattctgaaatgctagcagtttctttcgatgaaaagaaaaatgtttatagagtaaatcaattactaaaaatttttaatgcagctgagtcaattaaaaaagaagatccaacagtaagtttacctaatttaccaaaaaatttgttaagaacttcaaaatatttagagcacccagtttttaattcttatcattcagaaactgagatgcttagatatttaaaaaagttagaagataaagatatagctcttaatagaactatgattgcacttggttcatgtaccatgaaattaaatgctactgcagaaatgatacctatttcatggagagaattagctgagcctcatccatttgtgccaattgagcaaatggaaggatatagagatttattcactgatcttaaaaattggcttagatcaattactggtttctctggtgtttcacttcagccaaatgcaggcgctcaaggggaatatgcaggattaatggttattagaaagtatcatttagatagaggtgaggaaaatagaaatatatgtttaataccaagttcggcacatggaactaatcctgctagtgctcaaatggttggaatgaaagttgttgttgtcgattgcgataaagagggaaatgttgattttgaggatttaaagaaaaaagcagaaatacattctgaaaatcttggagcattaatggtcacttacccgtctactcatggtgtatttgaggaaaaaattacggaaatatgtgagttaattcacaaacatggtggtcaagtttatatggatggtgcaaatctaaatgcacttgttggtatagcaagacctggaaattttggtccagatgtttgtcatattaatttacataaaacattctgcattccacatggtggcggagggcctggaatggggccaattgcatgtaaaagacatttacaagtttatctgcccaatcatccagttgttaaagactgtggacctgcaacgggaattggagcagtttcagcagcaccttggggaagttcaagtattttatcaatttcttggatgtatattaaaatgatgggtgccgaaggtttaaaactagctacccaagttgcaatacttaatgcaaattatatagctcacagactcaaagaccattatccaattctttataaaggctcaaatggaaatgtagcacacgaatgtataattgatataagatctattaaaagtgaaacagggattaccgaagaagatatagctaaaagattgattgattatggttttcatgcaccaacaatgtcatggcctgtagcaggtacaatgatgattgaaccaactgaaagcgagagtttatccgaacttgatagattttgtgatactttaattagtattaaatcagaaatagatatgatcaagttaggaaaatttgataaagttgataacccaattaaaaaaatgcgcctcatactgatattgaattagc

SEQ ID NO: 220471 - DNA, 667 bp, Unknown
  Bacterial polypeptide expressing nucleotide sequence isolated from the Sargasso Sea
atgataaaagattttcccaatcgccatattggcccaagagatgaccaaattcaagaaatgttatctgaattaggcttttcatccttggaagacctatcaaataaagtaatccctccaaatataattcttgattcaaagatggatcttccaaataaaatgagcgagcctgaaacaataaataggttacgtgagcttgctaatgagaactccgtttacaattcattcattggtatgggatactatggaacattcctacctgctgtaatccagcgaaatatactagagaaccctggttggtatacacaatacactccatatcaggctgaaatcagtcagggaagattggaagctcttttgaattttcaaacaatggtatcagatattaccggacttccaatggcgaatgcatcgcttttggatgaagcaactgctgcggctgaggcaatgctaatgttttttaataccacaaaaaacaatgaaaaacgtgtatttcttgtttcagaaagttgccatccacaaacaatagatgtcttaaaaacgcgagcagagcccttaggtataactttgaagatcattgaaataacaacgcagcattttaatcaagatgtttttggtgcgatcgttcagtatcctgacactaatggttctatccatagatcaaactgaa

SEQ ID NO: 220472 - DNA, 716 bp, Unknown
  Bacterial polypeptide expressing nucleotide sequence isolated from the Sargasso Sea
gttgggcaaactctctctaaaaatggagaaaagtctcttaagactagcattgcaaacaagagagcaacatattagaagggaaaaggccaccagtaatatttgtactgctcaatctttattagccataatttcttctttttatgctatttatcatggaccctctggattaacgcaaattgctaagagattagttgagttgagaataaatttagaatcaagtttagctgctttaggttttgatattcctgatgggattagatttgatagtgttgatgtttattctgagcactcccagaggatccataatgaagctttaaaaaatggctataacttaagaattttgccgttgggatcaactattgaaaattcaactggctttgggatctctttagatgagcttagtaatgaaaaagaaataaaagatattttgactttcatagcaaaccttatagaaaaagaagaagatttagagcatataaaatttgataaagaatttcatcttgaaagtttagctttgagatctagtgcatggatgcagcaagatatattcacaaattaccaaagtgaaactgaattaatgagatatatattccgacttgctgaaaaagatttttctttggtagatgggatgatgccattggggagctgtaccatgaagttaaattctgcagcagagttaaatccagtctcttgggctattttatcttccatgcatc

SEQ ID NO: 220473 - DNA, 1672 bp, Unknown
  Bacterial polypeptide expressing nucleotide sequence isolated from the Sargasso Sea
aaagctaaaattaactttagttatattgatgatgaaacagtcagtatttcattaaacgagacaactaacaaaaaaagtttaaataaaatatttaatgtttttaatctttataaaaatatatcagtcaaaaaaaatattattgtaaatgtagattcggtattaaaaattagagaatcaatgcatagaataagttcttttatgactcaggacgtatttaactcttatcactccgaaacatctctaatgaggtatgttaaaagtcttgaattaaaagatttagcacttaatcattccatgatttctcttggttcatgcactatgaaattaaatgctgcagcagaaatgcttccgttaagttcttctaactggaataacattcatccatttgctcctgttaatcaggctaaaggctatcataaagttttaaattttttgaccgctcaattaaatgaaataactggattccatgccacctcaattcaaccaaattctggagcccaaggagaatatgctgggttgatggttataagggcataccatttttcaaaaggtaatccaaaccgaaatatttgtttaattcctgcctctgcacatggaacaaatcctgcctcagccattatggcaggtatgaaagttgttgttattaaaaccgatcaaaatggtaatattgacctagaagatttaaaagaaaaagtaaaaactcacaaagataatctagctgctttaatgataacttacccatctactcatggtgtttttgaagttgaaataaaaaatataacaaagctgattcatgacaatggaggacaggtttatatggatggagctaacatgaacgcccaagttggattaactaatccttcaataattggtgccgacgtatgtcatttaaacttacataaaacttttgctattccacatggaggcggtggtcctggagtaggtccaatatgtgtagcgaagcacttatctaagtttcttccatcaaatccaattatcaaaactggagggaaaaatccaataaaggggatttccggggctccatggggttctgcacttgcttgtataatttcctacgggtatataaaaatgcttggaaaaagaggattaaaaaaatcaaccgaaattgcaattttgaatgctaactacataaaaaaatcccttgaaggagcctatgaaatattatatacaggagaaaataatagatctggacatgaattaattatcgattgcagaagttttagaaaaaaaaatattggagtaattgatatagctaaaagattgatggactatggttttcatgctcctactgtctcctttcctgtcgctgaaactatgatgattgaacctacagagagtgagaatttatgtgagattgatcgtttttgtcaagctatgatatcaattagattggaaatagaaagtgataatccagaggatattgaaattcttaaaaatgctccacatactttatctatgattacaaatgacaattggccatacaaatacaccagaaaaaaagcagcttttccattagattttgtgcaaaaaaataaattttggccaagtgttagaagagtaaacgaagcatttggggatcgtaatctaatctgtagctgtccctctattgaagattttaaaaatactgatttacagtcaattaaaaagtaat

SEQ ID NO: 220474 - DNA, 722 bp, Unknown
  Bacterial polypeptide expressing nucleotide sequence isolated from the Sargasso Sea
tgccgtggcagctcatctggccccattcctgccaggtcacccactggtgccctgtggcggggagcaggccattggtcctgtctcagcggctccttggggtagcgccagcattcttcccatcagttggatgtacatccgcctaatgggtggagctggtctgcgccaagccacagctgtggcgctcttggccgccaatgatttggcagagcgactagagccccatttccctgtgctctatcgcggcgccaatggacgcgttgcccacgagtgcatccttgatttgcgtccgctcaagcgcagcgctggcctggaggtggacgatctcgctaagcgcttgatggattacggcttccatgcccccacggtctcttggccggtggctggcaccgtgatggtggagcccaccgaaagtgaatcgctgctggagctcgatcgttttgtcgaagcgatgatggcgattcgcgccgaggctgctgcgatcgaagcaggcctgtgtgatcgcgatgacaatcccctgcgccgtgctccccacaccctggcggctgtgacggcggatgtttgggaccgtccctacagccgcgagcaggcggcttatccggtgcaagggctgcggtccaacaaactctggcctgcggtttcaaggatcgataacgcctttggtgatcgcaacctggtttgcacttgcccgtcggtggaggagttggctggagcggccagttaag

SEQ ID NO: 220475 - DNA, 1173 bp, Unknown
  Bacterial polypeptide expressing nucleotide sequence isolated from the Sargasso Sea
ccggttcgcaaggtgagtacgcgggcctgctgatcatccacgcttaccacgcatcgcgcggcgaagcgcatcgcaacgtctgtctgattcctgcttcggcgcacggcacgaatccggcgtcggcgcaaatggcgggcatgcaggtggtcgtggtggcttgcgacgcgcaaggcaacgtcgatatcgaagacctgaagaagaaggccgatcagcacgccgacaagctcgcggcgatcatgatcacgtatccgtccacgcacggcgtgttcgaggcgaacgttcgcgaaatctgcgagatcgtgcatgcgcacggcggccaggtctacgtggatggcgcgaatatgaacgcgatggtcggcctgtgcgcgccgggccagttcggcggcgatgtctcgcacctgaatctgcacaagaccttctgtattccgcacggcggcggcggcccgggcgtcggcccggtcgcggtcggcgcgcatctcgcgcaattcctgcccaatcagattgcagcgggctacgagcgcgcgccgaacggtatcggcgcggtgtcgggcgcaccgtacggttccgcatcgatcctgccgatttcgtggatgtacatcgcgatgatgggcgcgaagaacctcaccgcagccaccgaaaccgcaatcctgaacgcgaactacgtcgcgaaaaaactcgcgccgcattatccggtgctgtattcgggcccgggcggactggtcgcgcacgagtgcattctcgatctgcgtccgatcaaggaaaccagcggcatcaccgtcgacgacgtcgccaagcgtctcgccgactacggcttccacgcaccgaccatgagcttcccggtgccgggcacgctgatggtcgagccgaccgaatcggaatcgaaagaggaactcgaccgcttcatcgaagcgatgatcgcgatccgcgatgaaattcgcgccgtcgaggaaggccgctcggaccgtgaagacaatccgctcaagcacgcgccgcacacggcagcggtggtgattgccaacgaatggaagcatgcgtatgcgcgcgaaaccgccgcgtacccgctgcctacactgatcgcgaagaagtactggccgccggtcggccgggcggacaacgtgtatggcgaccgcaatctgttctgctcctgcgtgccgatcgccgactacgagtaag

SEQ ID NO: 220476 - DNA, 1270 bp, Unknown
  Bacterial polypeptide expressing nucleotide sequence isolated from the Sargasso Sea
gcaatttatcatggacctgaaggaattttaaaaatagctaataggacatcaaagttagcaaaaatttttgctgacggactgaaatcaggtggttaccaactacactctgaaaatttttttgatacagttactgtcaaaacaaatgagaaaacagacactataaataacaaggctttatcagaaaaaattaatttgagggtagtagataaaaatacattatctgtagcttttgatgaggttaagagagttgatcatgtaaatactctactaaaaatattcggaataaaaaaaacatttagtaatactgataaagttgatttaactaatttaccaaaaaatcttttaagaacatctaaataccttactcatcctatttttcataaatatcattcagaaactgagatgcttcgttatttaaaaagattagaggattgtgatattgctttaaatagatctatgattgcacttggttcatgtacgatgaagctaaatgctacagctgagcttatccctgtgacttggaaagaattttcattaccacacccttttgtaccccaagatcaaatgaaaggttataaggttttatttaatgacctagttaatgatttaaaagaaatcacaggttttgacgcggtttctcttcaaccaaattctggtgctcaaggtgaatattcaggattaatgactattcgtaagtttcatttaaataataatcaaaaaaatagaaacgtatgtttaataccagagtcagcacatggtacgaatcctgcaagtgcacaaatgtgtggtatgaaagtagtagttattaattgtgatgatgaagggaatgttgatttggaagatttaaaagataaggttaataagcattcaaaagatcttgctgcactgatggtgacttacccatcaacacatggagtattcgaagaaaaaattagtgaaatttgtgattatgtccataaagctggcggtcaagtttatatggatggtgcaaaccttaatgcactagttggtattgcaaaacctggaaaatttggaccagatgtttgtcatattaacttacacaaaactttttgtattccacatggaggaggagggccaggcatgggcccaatcgcatgcgcaaaacacttaaaagattttttaccaaatcataacattactaaaaataatagatccgagaaaagtttaggctctgtatctgctgcgccatggggaagtgcgagtatattaccaatttcttggatgtatataaagatgatgggagctgaag

SEQ ID NO: 220477 - DNA, 478 bp, Unknown
  Bacterial polypeptide expressing nucleotide sequence isolated from the Sargasso Sea
aaaaaatggaaatgttgcacacgaatgtattatagatcttagaccaataaaatctaaatccggaatttcagaggaagatatcgccaaaagattaatagattacggttatcacgccccaacaatgtcctggcctgttgctggaacattaatgattgaaccaacggagagtgaaaatcttgcagagataaatcgtttttgtaatgcattaatatctattaaaaatgaaattgacaaagttgataatggtagttttgacaaaaaagacaatcctttgaaaaatgccccgcacacacatcttgagctaagcgcagatgaatggaaacacttatataaaagagaagaagccgcatttccaaatgaatatttgaaagataataagttttggccaccagttggaagagttgataatgtttttggtgatagaaacttagtttgctcctgccctagtcttcaagaatataaagaagaggcagcttaa

SEQ ID NO: 220478 - DNA, 761 bp, Unknown
  Bacterial polypeptide expressing nucleotide sequence isolated from the Sargasso Sea
tcacggaggaggtgggcctggagttggagctataggattaaaaaaacatttagcagattttgctcctggacatcccatatttaaaaatgaaattggtttaacaactcaagaggcagtttctgcagctccttggggcagcgcatctattttacctatttcatattcctatatttctatgatgggtgacgatggtttaaaattagcaactcaagttgcaattttaaatgctaattatattaaagaaagattaaaaaattattaccctattttatatactggtaagaataatatggtggcacacgaatttattattgatatcaggccgtttaaacaagaattaaatatttcagacgaagatattgctaaaagactaatcgattatggatttcatgcacccacaatgtcttttcctgttcccggcactctgatgattgagcctactgaaagtgaatcaaaagaggaactagatagattttgtgaggcaatgatttctattcacaatgaaattactatgattagagatggtaaatttgataaagtagataatcctataaaaaatgcccctcataccattgaagaagtatcttctgacaattgggatcacaaatattcccgaaaagatgctgcctacccgcatgcttatttgataaataataaatactggagtccagttagtagaattgataatgtatacggtgatagaaatttattttgtgtttgtcctccaattgatgaatatgaagaggttaaaacaggataat

SEQ ID NO: 220479 - DNA, 1046 bp, Unknown
  Bacterial polypeptide expressing nucleotide sequence isolated from the Sargasso Sea
aatggttggaatgaaggttgttgtagttaattgcgacaaagaaggaaatgtagactttgaagatttaaaaaaaaaagctgaaattcattcagaaaatcttggtgcactaatggtaacttatccttcaacccatggagtttttgaggaaaaaattacagatatatgtgatttaattcatgagcatggtggacaagtttatatggatggtgcaaatttaaatgcacttgttggaatagcaaaaccaggaaactttggacctgacgtttgtcatataaacttacacaaaacattttgtattcctcatggtggcggtggaccaggcatgggaccaattgcatgtaagagacatttagaaatttatttacctaatcatccggtagtaaaagattgtggtcctgcaacaggaataggcccagtatcagctgcaccttggggcagttcaagtattttgtcaatttcttggatgtatattaaaatgatgggatcggaaggtcttaaacacgctactcaaattgctattttaaatgcaaattatttagcaagaagattaaaagatcattatccaatattatataaaggaaccaaaggtaatgtcgctcatgaatgcattatagatataagatctattaaatcagaaacaggtatcacagaagaagatattgcaaaaagattgatagattttggatttcatgcacctacaatgtcttggcccgtagcaggaacaatgatgattgagccaaccgaaagtgaaagtttatcagagttagatagattttgtgacactttgataaaaatcaaatctgagattgataaaattaaatccggacactttgataaagttgacaaccctataaaaaatgctccacatactgatttagagttagcatcagatgtctgggatcataaatattctagagaagaagcggcatatccagctaaatttttgcgtgcaaataaattttggccaccagtagctagagttgataatgtatatggagataagaatatattttgtacctgtcctagtatggatgatttcaaaggaa

SEQ ID NO: 220480 - DNA, 1222 bp, Unknown
  Bacterial polypeptide expressing nucleotide sequence isolated from the Sargasso Sea
atcactggtttttcaggtgtttctctacaacctaacgcaggtgctcagggtgaatatgcaggattaatggttatccgaaagtatcatttagatagaggtgaggctaatcgtaatatttgtttaattccaagttcagcacatggcactaatccagctagtgcacaaatggttggaatgaaagtggttgttgttaattgtgataaagagggaaatgttgattttgatgatttaaagaaaaaagcagaacaacactctgaaaaccttggggcattaatggtaacttatccatccacccatggagtatttgaagagaaaataactgatatttgtgagttagttcataaacatggtggccaggtctacatggatggagcaaatttaaacgccctagtaggagttgcaaagcctggaaattttggtccagatgtttgccatattaatttgcataaaacattttgtattcctcatggcgggggaggacctggaatgggacccattgcctgtaaaagacatttgcaagtttatctgcctaatcatccagtaataaaagattgtggaccaactactgggattggagcagtgtcagcagctccttggggcagttcaagtattctatcaatctcttggatgtatattaaaatgatgggatctgcaggattaaagcttgcttctcaagttgcaatattaaatgccaattatatcgctcatagactaaaagatcactttcctattttgtataaagggtcaaacggtaatgttgcacacgaatgtattattgatattagaaatattaaatcagaaacaggagtaacggaggaagatattgcaaaaagattaatagatttcggatttcatgcgccaacaatgtcatggcctgtagctggtactatgatgatagaaccaaccgaaagtgaagggttgtcagaacttgatagattttgtgatactttaattaagattaaacaagaaatagaaaaaatcaaatcaggtgaatttgacaaactagataatccaataaaaaatgctccacacactgatagtgaacttgcctctgataattggacacataattattcaagagaggaagctgcttatccagcaaaattccttcgagctaataaattttggcctccagttgcaagagtagataatgtatatggagataaaaatattttttgtacttgtccaagcatggatgagtttaaagaagatgctgcataat

SEQ ID NO: 220481 - DNA, 465 bp, Unknown
  Bacterial polypeptide expressing nucleotide sequence isolated from the Sargasso Sea
ttgctcatgagtgtattattgatattagaaaaatcaaaatagatactggtatcactgaagaagatatagctaaaagacttattgattttgggtatcatgctccaacaatgtcttggccagttgctggaacgatgatgattgaacctacagagagtgaaagtttaaatgaaattaatagattttgttcagctcttcaaaaaattaaacaagaaattgataaagttaagtcaggcgattatgataaagtagataatccacttaaaaatgcgccacatacacacgttgaattaagttcaaacaaatgggaacataagtatgaaagggaagaagcagcttatccatctgaaattttaaaaacagttaaatattggccaccagttgctagagtagataatgtttatggagataaaaatttattttgtacttgcccatcaatggatgaatacgaggactcagcagcttaaa

SEQ ID NO: 220482 - DNA, 1483 bp, Unknown
  Bacterial polypeptide expressing nucleotide sequence isolated from the Sargasso Sea
attgtttcagcagcttatgctatttatcatggacctaatggtataaaaaaaatttcagaaagagtttctcaattagcaaataattttgccgataagataaaaaaatctggttatgaaatatattccaacaatttttttgatacagttgtaattaaaacaaaagataaaacagaaaaaatatttaaaaatgctttagatcaaaaagtaaatattagaaaagttaattcagaaatgctagcagtttcttttgatgagaagaaaaatgtttatagggctaaccagctattaaaaatatttaattgcgctgaatcaataaaagataatccaaccgaaagcttaccaaacttacctaagaatcttttaagaacatcaaagtatttagagcacacagttttcaatagctatcattccgaaactgaaatgcttaggtatttaaaaagattagaggacaaggatattgcgcttaatcgttcaatgattgctttaggatcatgtacaatgaaattaaatgcagttgcagagatgatacctatatcttggagagaattttcagaaccacatccttttgtaccaattgaacaaatggacggttttagaacacttttcacagatttaaaaaattggttaagatctattacaggtttttcaggtgtttcattacaaccgaatgctggtgctcaaggagaatatgcaggcttaatggttataagaaaatatcatatagaaaggggtgaaaaaaatagaaatgtttgtttaatcccaagttctgcacatggcacaaatcctgctagcgctcaaatggttggaatgaaagttgttgtagttaattgtgataaagaaggcaatgttgattttgaagatttaaaaaagaaatcagaacttcattcagaaaatctcggcgctcttatggtaacttatccatctacgcatggagtattcgaagaaaaaatatcagatatttgtgaattgatccataaacatggtggacaagtatatatggacggtgcaaatttaaatgcgctggttgggatagcgaagcctggaaattttggaccagatgtttgtcacataaatttacataaaacattctgtataccacatggaggaggtggaccaggcatgggaccaattgcatgtaaaaaacatttggaaatttatctacccaaacatccagttgttgaagattgtgggccggctacaggtataggcccagtttctgctgcgccatggggaagctcaagtattttgtcaatatcttggatgtatataaaaatgatgggatctgaaggattaaaattagcaacacaaattgcaatattaaatgcaaattatattgcgcatagattaaaaaatcattttccaattttatacaaaggaagcaaaggtaatgtagctcatgaatgtattatagatattagaacgattaagaacgaaactggaattacagaagaagatattgcaaaaagattaattgattttggat

SEQ ID NO: 220483 - DNA, 2077 bp, Unknown
  Bacterial polypeptide expressing nucleotide sequence isolated from the Sargasso Sea
aatgtaatttttagaaatattttagaaaatccaggttggtacacctcttatacaccttatcagcctgaagtggcgcaaggtcgacttgaaatgcttttaaattttcaacaatcaataattgacttgacgggtatggatatagctaatgcctctttattagatgaagcaactgcaacagcagaagcagtgggtttaagccagagattagataagactaattcaaaaaaaatatttatctcaagcaattgtaatcctcaaacaattgatctcataaaaacaagaacaaatccttttggtttagaattgatcattggtgatgaaaaaaaagatcttactaaaattaacgaagatattatttgcggagttttatcataccctggaactttaggtgagataaacgatcctagtgaaagtattagtcaaatacacaaaaaaaatggaaaagctattttggtttgtgatctattagctttagctagattaaaaactccagctgaacttggagctgacattgctgttggcagcgctcaaagatttggtattccaatgggatacggtggacctcatgcagcattttttgcaactaaagaggaatttaaaagatcaatgccgggaagaattataggtgtttcaaaagatagacacggaaaaaaagcttacaggctttctttacaaactagggagcaacacattagaagagataaagcaacaagcaatatttgtactgctcaagcattattggctatcatttctgctgcctttgcgatttatcacggacctgaaggaatacttaaaatagcgaatagaacttcgaaattagctaaaatttttgctgataacattaaaacaggtggttacaagattttatcagatcatttctttgataccgttacaattaagaccaatgaaaaaacaagctctatctatgaagctgcattaaaagaaaatataaatcttagaaaagtcgataaagagcatttatcagttgctttcgatgaagcaaaaaagcttgatgatgttaatttactattaaagttatttggagtttctaaaattataaaacaagatgtaaaggttgaactagacaatcttccaaaaaatcttttaagaacttcaaaatacttaacccatccagtttttaataaataccattccgaaactgagatgctgagatatttaaagaaacttgaagattgtgatattgcacttaatagatcaatgattgctttgggatcttgtacaatgaaactcaacgcaacagcagaattaattcctattacctggaaagagttttcacttccacatccttttgttcctacgaaccaaatggaaggttataaaatactttttaatgatctaataaatgatctcaaagaaattacaggatatgacgcagtttctctacagcctaactctggcgctcaaggagagtatgcaggtctaatgaccataagaaaattccataagaataataaacaagaaaatcgtaacgtttgtctaattcctgactcagctcatggaactaatccagcgagtgcacaaatgtgcgggatgaaagtggttgtagttaattgtgacgaagatggaaacgttgatatagatgaccttaaaaataaagcagaaaaatactcaaaagatttagctgctttaatggtaacttacccctcaactcatggagtatttgaggaaaaaatcatggatatctgtgaggttattcataatcacggcggacaagtttatatggatggggcaaatttaaacgcacttgtgggtgttgcaaaaccagggaaatttggaccggatgtttgtcatattaatttacacaaaacattttgtatacctcatggtggtggcggaccaggaatgggcccaatcgcttgtgctaagcatctagctgattttttaccaacacacgaaattattaaagaggcaggccctaagaatggaatgggggctgtatcagctgcaccttggggcagttcaagcatacttccaatatcttggatgtatataaagatgatgggtgcagaaggattgaaaaaagcctcacaagtttcgattttaaatgcaaattata

SEQ ID NO: 220484 - DNA, 1454 bp, Unknown
  Bacterial polypeptide expressing nucleotide sequence isolated from the Sargasso Sea
aatgattgatgataattcaaaagaatttataaaaagacacattggaccttcagataacaagcagtcaaaaatgcttcaacacgtaggatatagttcgcttgaagatttgatgaaaaatacagttccagaaaaaattttattaaaagatgatcttaatatagatgagcctatgtctgaaaatgatgctttaaaaaaattaaaatctatatctaaaaaaaataaaatttttagaaactttattggtatggggtactataattctattactccaaatgtaattttaagaaatatcttagaaaacccaggctggtatacttcatatacaccttaccaacctgaagtagcccagggacgtcttgaaatgcttttaaattttcaacaaacaattattgatcttacaggaatggatattgctaacgcatctttacttgacgaagcaactgctacagcagaagcagtcggcttatctcaaagattagataaaacaaacgcaaaaaaaatatttatctcaagtaattgcaacccacagacaattgatcttattaaaactcgtacaaagccttttggattagaacttataattggcgatgaaaaaaaggagttattaaacattaatcaaaatattatttgtggagttttagcctatccaggaactctaggtgagataattgatcccagcgaaagtataagtcaaattcataaaagaaatggaaaagcaattttaatatgtgatttattatctttagccagattaaaaactccagcagaacttggtgctgatatagctgtaggtagcgctcaaaggttcggtattcctatgggttatggcgggccacatgcagcattttttgctactaaagaagaatttaaaagatcaatgccgggtagaattataggtgtatcgaaagacagacatgggaaaaaagcatacagactttctttacaaacaagggaacaacatatcagacgagataaagctacaagtaacatatgcacggctcaagcattgttggctataatatctgcagcctttgctatttatcatgggcctgatggaatacttaaaatagctaataggacttctaaattagcaaaattatttgctgatgaaattaaaaaaggtggtttccaaattttatcagactatttttttgatacagtaacaattaaaacaaacgacaagacaaattctatttatcaaagtgctttaaataaaaatattaatttaagaaaagttgataacaaacacatatcagttgcatttgatgaagcaaaaaaactgaatgatgtaaatatattattaaaaatatttggagtttctaaagtaattaatcaagatgtaaaagttgagcttaataatcttcctaaaaatcttttaagaacatcaaagtatctagctcatccagttttcaacaaatatcattcagaaacagagatgctaaggtatttaaaaa

SEQ ID NO: 220485 - DNA, 1118 bp, Unknown
  Bacterial polypeptide expressing nucleotide sequence isolated from the Sargasso Sea
agggtataaaattctatttaatgacctgataaacgatttaaaagaaatcactggatacgacgcagtttctttacaaccaaattctggtgcccagggtgaatacgccgggttaatgacaataagaaaatttcatgaaagcaataaacaaggtgatcgagatgtatgtttaattccaaactcagcgcacggaactaatccagcaagtgctcaaatgagtgggatgaaagtagttgttgtaaactgtgacgaagacggtaacgtggacctagacgatttgaaaaacaaagcagaaaaatattcaaaaaatttagccgctttaatggttacttacccttctactcatggagtatttgaagaaaaaattattgaaatttgcgatgtaattcacaaacatggtggtcaggtatatatggatggagcaaatttaaatgctctagttggcattgcaaaaccaggaaaatttggaccagatgtctgtcatattaatttgcacaaaacattttgcataccacatggaggcggaggaccaggaatgggaccaattgcgtgcgcaaaacatttagctgattttcttccaactcatgaaataataaaagacgcaggaccaaaaaatggaatgggggctgtttcggctgcaccgtggggaagttcaagcattttacctatatcttggatgtatataaagatgatgggagctgagggtttaaaaaaagcttcacaaatttcaattttaaacgcaaattatatttcaaagaaattatccaaagactacaaagttttatatactggtaaaaatggaaatgtagcccatgagtgcataatagatattagaccaattaaagctagttcaggaatttcagaagaagatttagctaaaagattaatcgattttggttatcatgctccaactatgtcttggccggttgcaggaacaataatgatagagcccacagaaagtgaaaatttagaagaaatagataagttttgtaatgcattaattaaaataaaaaaagaaattgatttagtggagtcatcaaaatttgataaaattgacaatccattaaaaagtgctccccacacttacattgagttagcctcaaatgactggagtcataaat

SEQ ID NO: 220486 - DNA, 433 bp, Unknown
  Bacterial polypeptide expressing nucleotide sequence isolated from the Sargasso Sea
cttagggaaataaaaaatcaatacggtgtcagtgaagaagacatcgcaaaaagattaatggattatggattccatgccccaactatgtcttggccagttaatgggaccatgatgatagagcctactgaaagtgagtcaagagaagaaattgatcgtttttgtgaggctctgatttcaatcaaagatgaaattttaaaaatagctgatggtaaataccataaaaatgacaatccattaaaaaatgcaccacacactgcatcacatatagcctctgatgattggcctcatgcatactcacgcaatgaagctgcatatccagccaatcatttaaaaaaccataagtactggccaccagtaggaagaattgataatgctttcggagatagaaatctaatatgcacctgtccgcctgcaagtgagtatagtgattaat

SEQ ID NO: 220487 - DNA, 1978 bp, Unknown
  Bacterial polypeptide expressing nucleotide sequence isolated from the Sargasso Sea
aaaagagaagtttagtagaaaaatgccagggagattagtaggcgtttctcaagataaaacaggtctcaaagcatacagacttgcacttcaaacaagggaacagcatatcagaagagaaaaggccacttccaatatttgcacagcccaagcattattggccataatggctggattatatggagtgtggcatggaccaaatggccttaaaaatattgccatgaaagtcaatcaatatgcatcaaaatttgctaacttagctttagaggcaggttttgatataagacatgacgatttctttgacacagtggttgttgaaactaatgataaaaccgatgaatatgtaaaaagagctttaaatgaaaatataaatatccgcaaacttgaaaatgcagtttctttaagttttgatgaattatttaatgatgaagtcattgataaattaaaaattgcatttaacataaatgataaaataaaagtaaaaaataattttcatataaacccctcattacacagaaaagaaggatttttagagcatcctattttttcatcaatatcatctgaaaccgaaatgcttagatacataaggcatctatcagatcgagatttagctttagacagaacaatgatacctttgggctcttgcactatgaaattaaatgcatcaactgaaatgatgccaataacatggccagagttttcaaatattcacccttttgctcctaaggatcaaactcttggctataaaaagctaattgatgaactcgaaatttcgctttgcacacttactggctatgacggtatttcattacaacctaatgctggatcacaaggtgaatttgctggtttattggcaattagaaaattccatcagtctaatggggaaaataatcgaaacatttgtttaatcccctcctctgcgcatggaactaatcctgcgtctgccgtaatggcagggatgacagttgttgttgtttcatgtgacaaaaatggcaatattgatgttaatgatctagaagaaaaagccagagaacataaagaaaaccttgctgctatgatggtaacttatccatctacacatggtgtatttgaaaaagatattaaaaaagtttgtgaaataattcataaatatggaggacaagtatacgttgatggagcaaatttaaatgcattaataggattagtctctcttactgagattggtgcagacgttagtcatttaaatcttcataagacattttgcatacctcacggtggtggtggaccaggtgtaggtccagtagcagttaaaaaacatttgatcccatttctaccaggaaatgtgtttgatgaaactagcgctatatcatcaacaacttatggaagtgctggtatcttacctatttcttggtcttatatatccatgatgggagaagaaggtttgagagaagcaacaaaaacagcaattctttcagctaattacattgcaaataagttacgtccttattatccaattcttttcactgatgaaaaaggtatggtagctcatgaatgtattttagatattaatgaaatcacttctaacacaaacataactaacgaagacatttcaaaaagattaattgattacggctttcatgctcctacaatgtcttggccagttcctaatactttgatggttgaacccactgagtcagaaccaatgtcagaggttgataggttttgcgacgcaatgatttcaattgcaaaggaaattgatgaagtaaaaaatgggaattggtctaaagaagacaatccagtaattaatgcgcctcatactgttgagacattaactcaagaaaattggtcacatccttattcaagacaaattgcattagctaatctatcagaaaaaagtaataaatattttccaccagtaggcagaatagataatgtatttggtgatagaaatttagtttgtagttgtcctccaattgaagcatatgagcatgaacaaacttag

SEQ ID NO: 220488 - DNA, 2106 bp, Unknown
  Bacterial polypeptide expressing nucleotide sequence isolated from the Sargasso Sea
agtgaagcaaaacaaatgcttcaggatcttggttataacgatatggataagtttctgaaagatttaatgcctgaatcaatctttgatcttagtgccctaaagttacctaaacctcttgatgaagcttcggccttaaaaaatttaaaagcaatatcaaagaaaaataaagtttataaatcatttatagggcaggggttctatggttgtaatgtgccaaccgttatcaaaagaaatgtctttgaaaacccaggctggtacacatcctatacgccttatcagcctgagatcgctcagggtcgtttagaggctctaatgaactaccaaactatggttgctgatttaacaggcatggatatttcaaatgcctccttgctggatgaaccaaccgctgccgctgaagcaatgatgttggcaaacagagtggctaaatctaaatcgaatgtgtttttcattcacgagaatagctttcctcaatcgattgccattatgaagtctcgagcaaaacctctaggcattgaaattgaagttggtaaagaaatggattctaaaaaagaatattttggttgttacgttcaatatcctggcgatgatggatcaataatagatttctctgctgtttcagaatcaattcatgcacaaggtggtttgctcatagttggttctgatttattggctttaactcttttaaaacctccgagtgagtttggcgctgacatagtggttggctcttcgcaaaggtttggtgtgccgatgggttttggtggacctcacgcaggctttatagcagtaaaagatagtcataaaagatcacttccgggaaggctaattggtttaagtaaagatcagcaagatagaccttgttatagattagctctgcaaacaagagaacaacatataagaagagagaaggctacgagcaatatatgcacagcacaggcattgctggctattatgtcgggcttctatgctatatatcatggacctgaagggctaaaagagattgcaattagaataaatggtttaactaaagacctagccaacaaactaattgataaaggtttagaaattaaatctgaaactttctttgatactttggtagttaaagttaaggacgctaaaaaaatacatgaaaaagccaatgcaaatggcatgaatcttcgtgatatttctaatgactctgttggaattagtctagatgaaactagcaccgaagatgatgtcaaagccatcattgaaatatttgataatgaacagaacaagaacagcaagatcgaacagagttggagcaaagaatttaatagagcaacagattttttaactcatgaagtatttaattctcatcattctgagactcaaatattgcgctacattagaagtctggctgacaaggatatagctttagatagatctatgattcctcttgggtcatgcactatgaaattaaatgcaacaactgagatgataccagtaggctggaatggttttgccaacatgcatccgcatgcaccagaggatcaagctcaaggctatctagaaataataaatgatttagagaattggcttactcaaataaccggttataaagctatctctctgcaacctaacgctggctcacaaggtgaatatgctggtttattagcaattgatggttatcacaaagctaacaaggatctttctagaaacatttgtctcattccagaatcagcgcatggaactaatcctgcttcagcacaaatggttggatatgaagttgtggttatcgattgtgatgaaaatggagacatagatatgaaggatctaaagaaaaaggccgatcttcataataagaatatagctgcaatgatgattacttacccttcaactcatggggtctttgaggaaagagtaaaagaggtctgtgagctaatacatggtcatggtggtttcatttacatcgatggcgctaattttaatgccatggtaggaatgtgttatccaggtcaatttggcggagatgtatcgcatctaaatctgcataaaactttttgtatacctcacggaggaggaggtcctggagtaggtccaattggcgtagtcaaagaacttgttccttatttgccagctgat

SEQ ID NO: 220489 - DNA, 780 bp, Unknown
  Bacterial polypeptide expressing nucleotide sequence isolated from the Sargasso Sea
tacataaaactttttgtattcctcatggtggtggaggacctggaatgggacccattgcttgtaaaagacatttacaagtttatttgcctaaccacccagtcataaaagattgtggaccgacatctggaattggagcagtttctgcagcgccttggggaagttcaagtattttatcaatttcttggatgtatattaaaatgatgggatcagcaggattaaagcttgctactcaagttgcgatactgaatgcaaattatatagctcacagattaaaagatcactttcccattttgtacaaagggtcaaatggtaacgtggcacacgaatgtattattgatattagaaatattaaatcagaaacaggaataacagaggaggatattgcgaaaagattaattgattacggttttcatgcaccaactatgtcctggcctgtcgctggcactatgatgatagaaccaactgagagtgaaaatttgagagagataaatagattctgtgatacacttattaaaatcaaatctgagattgataatataaaatctggtaaatttgataaaatagacaatcctataaagaatgcacctcacacagatttagagctctcgtctgataaatggagccataaatacacacgtgaagaggcagcttacccatctaaatatttgaaaagcaataaattttggccacctgttgctagagtagataacgtatatggagataaaaatatattctgtacttgtccaagtatggatgaatttaaagaagacgcagcttaaa

SEQ ID NO: 220490 - DNA, 820 bp, Unknown
  Bacterial polypeptide expressing nucleotide sequence isolated from the Sargasso Sea
aacccaggaaattttggtcctgacgtttgtcatataaatttgcataaaacattttgtattccacatggtggaggaggacctggaatgggacctatcgcatgtaaaagacatttacaagtttatctgcctaatcatccagtcgtaaaagattgtggacctgcaagtggaataggtgccgtttcagcagctccttggggaagctcaagtattttatcaatttcttggatgtacattaagatgatgggatccgaaggtgtaaaacttgcaacacaaattgcaatcctaaatgcaaattacatagcaaatagattaaaagaccattacccaattctttataaaggttcaaatggcaatgttgctcatgagtgtattattgatattagatcaattaaaagcgaaacaggtatttcagaagaagatatagctaaaagattaattgattatggatttcatgcgccaacaatgtcatggccagttgctggaacaatgatgattgaaccaacagagagtgagagtttatctgaactggatagattttgtgacacattgattagcattaaagaggaaatagatatggttaagtcaggtaagtttgacaaagtagataaccctattaaaaatgcacctcacaccgatattgaattagcttcagatgaatggaatcataaatattcaagagagcaagctgcatatcctgcaaaattcttaaaagcaaataaattttggcctccggttgcaagagttgataacgtgtatggagataaaaatattttttgtacttgtccaagtatggatgagtttaaagaagatgcagcataat

SEQ ID NO: 220491 - DNA, 2124 bp, Unknown
  Bacterial polypeptide expressing nucleotide sequence isolated from the Sargasso Sea
attgtaaggttatatttgcgagtgatttaatgtgcttacaactttttgaagctccgggtaatttaggagctgacatagctgttggtaatagtcaacgatttggtgtgccacttgggtacggcgggcctcatgctgcatttatgtctacaagtgaagaatttaaaagagatattcctgggagaattgtaggcgtatctcaagaccgtagaggaaatcaagcttatagacttacacttcaaaccagagaacagcatattagaagagaaaaagcaacttcaaatatttgtacagctcaagtattacttgctatcatttcaggaatgtatgcattatttcacggtccagatgatttaaaaaatattgcaagacgaattcatagtcatacaaaagaacttgccgataaaattgcaaatctaggtcatgagattgtaactaatgataattcattttttgatacaatagtaatcaaattatcgaacatgagtattgatagtttaaaagatagggcattaaagcataattttaatttgatgtatcatgataatggacttattggtatctctttggatgagaaaacagattttgctgaagttgagacgcttgcaaatctatttgatgcacataatgattctaaaaattcttataatatttttaaaccgaatagagtaggagatattttaactcatcctatttttcatagcattaattcagaaacagaaatgcttagatacatcaataagttagaaaaaagggatctgtccttgaactatagtatgataccattagggtcttgtactatgaaactgaatgcgactgttgaaatgattccaattagttggccagaattcaattctatccacccttttgcaccattaagtcaggctaagggttatgaaaaaatcattaatgaactagaagaaatgctttataaggttactggatttgatgccgtatcgtttcaaccaaattctggtgctcaaggagaatatgctggattattaagcattagagagtatcataaagcgaataattcaaaaagagatatttgtctaatacctgaatctgcccatggaacaaatcctgcaagtgcaataatggctggacttaaagttgtgatagtaaaatgtgatgaccatggaaatatagattttaaagatttaagcgcaaaagttgatgaggctggtgacaggttgtcatcattaatggttacttacccctcaacccatggtgtatttgaacataacattgatgaaatatgtaatttaattcacgaaaatggtggcctagtctacatggatggagccaacttgaacgccatggttggtgtatgtaaaccaggtaaatttggagctgatgttatgcacattaatcttcataaaactttttgtataccgcatggtggaggaggtccaggtatgggtccaatttgtgtgaatgaaaaattaaaaccacatcttccaaaacatagtttcactgatgaagatttttcttattctgtatcgtcatcaccatttggtagtgcaagtattctattaatttcttatatctatatgaaattaatggcagcaaatggtttattgaaagcatcccaagttgcaattttatctgcaaactatatggctaagagactagaaaatgattatagcattctatatcgcggtaagagcggattaaatgcgcatgagttcattgttgattgtagatcatttaaatccactgctaatattactaatgaggatattgcaaaaagattaattgactatgggtttcatgctcctactatgtcttggccgattccaggaacacttatgattgaaccgactgaaagtgaaacaaaatctgaacttgataaattttgtgatgcaatgattgcaattaaacaagaaattgttgacatagaatcaggcaaaatgcctcaagaagataatgttttagttaatgctcctcatactgtaaatgatatttgtgatgattggaatcatccttattcaaaagaaagtgctgtttttccaactcaatggaataaagaaaataagttttggccatatgtttctagaattgataatgcttttggagatagaaattttttctgcgtatgtcccgatataaattcatataaatgaa

SEQ ID NO: 220492 - DNA, 1194 bp, Unknown
  Bacterial polypeptide expressing nucleotide sequence isolated from the Sargasso Sea
tatggccaaaaattcaacacaaaatttttctcaccgtcatatcggtccaaatgatcatgaaatcaatgaaatgctttcatttcttggctatgaatcaattgatgaattaatacacaaaacgatccctgataatattttactaaaagataaattggatgtaggtgatgggcttagtgagcatgagttcttgaaaacaattaaatcagttgccaggaaaaataaaattgtgaaatcatttattgggatgggatattatggaacaattacaccaccagtaatcctgagaaatattcttgaaaatccaggctggtatactgcctacactccttatcaagcggaaatatcgcaaggtagattagaagcattgcttaattttcaaacaatggtaaccgatatgacaggtttagaaattgcaaacgcttccctccttgatgaggctactgctgctgcagaggcgatggttttaatgtatcgctcatccaaaaatggagatcaattttttgtagcagatgactgccaccctcaaactattgatgtgcttaaaactcgcgcggagcccattggtattcaattggttattgattccccaaacaaatttaattttacagatcaagtttttggatatttaattcaatgccctacaactgatggaaaggtttttgattatagcgtgatttgcgataaggcccatcaggttggagcttttgtcgcagtagctacagacttattaagtcttgctattattcctgaacctggttcattcgatgcagatatagcgattggtaactcgcaaagattcggagttccattaggatttggaggtcctcatgctgcattcttagctgcaaaagaaaattttaaacgtaaaatgcccggcaggatcattggtttatcaaaagattcccatgataatcaagcgcttcgaatggcgctgcaaactagagaacagcatattagaagagataaggcaacatctaatatttgcacagctcaggttttgctttctgtaatcgccggtatgtatgctgtatatcatggaccaaaaggaatttatcaaattgctcatagcgttcatagcaatgcaagaaaactagcaactgcattaacaaatggtggttataaaattgttcatgatcaattttttgataccatccgtatttctttaaatggtaaaaatcctgagttagaaaaagc

SEQ ID NO: 220493 - DNA, 1240 bp, Unknown
  Bacterial polypeptide expressing nucleotide sequence isolated from the Sargasso Sea
attgtttgaatcgctttctaagtggttagttgatattaccgggcttcattcctgctctttgcaaccaaattcaggagcgcaaggagaatacgctgggctgatggttataagagcctatcatcgagataatggagataataacagaactgtttgcttaatacctgaatcagctcatggaactaaccccgcgagcgcagtgatggcagggatggatgttgtagtaattaaatgtgatgaatctggaaacatagatgttcaagatttgaaagaaaagtctatggcaaataaaagcaacttatctgccctgatgataacctatccatctacacatggtgttttcgaagaatccgtttctgaaatctgcgatataattcattccaatggcggacaagtctatttggatggtgctaatttaaacgcaatggtagggctttcacggttaggtgattttggtgcagatgtttgccatataaatcttcataaaacatttgctattccgcatgggggtggtgggccagggatggggccaatctgcgtaggtgaacacctttctccttatttacctggacatccagttcttagtaatgattcaaaatcaatatcagcgatttctgctgccccgtttggtagcgcaggaatattgcctatatcatggggatatatttctatgcttggcaatgaaggagtaaaaagagcatctcagatcgctattttaaatgctaattatatggccaaaagacttgaaaatgattataagattttatttagaggtgtcaatggaacctcagcgcacgagtttattattgatttaagaggcttaaaaaatgataccggaataagtgatgaagacattgcaaaacgattaattgattatgggtttcacgccccaacaatgtcttggccggttccaggaacattaatgattgaaccaactgaaagtgaatctaaaaaagaactggataggttttgcgatgcaatggtatcaattaaaaaagagattgatgatgttgtaaatggaaaatttgattctgaagataacccattgaaaaatgcgccccataccgcgctttcaataatgaatgataattggaatcacaagtatagtagagaagcagctgcttatccagctgcttggcttaaagattacaaatattggcctagtgttggcagagtagataacgcatttggagatagaaatttaatatgcacctgcccaccaattgacgattataataaataa

SEQ ID NO: 220494 - DNA, 1257 bp, Unknown
  Bacterial polypeptide expressing nucleotide sequence isolated from the Sargasso Sea
tttcattaaacaatagcatgataccccttgggtcatgtacaatgaaattaaatggcactacagaaatgattcctgtaacatggcaaaacttttgtgacattcatccgttctctcctttagatcaaacgaaaggatattctagattaatagatgaacttagcagctggttatcaagattaactggttttgattcatgctcaatgcagcccaattctggtgcacagggtgaatatgcaggattgcttgttattagagcatatcatataaaaaatggagatggccaccgtaatatatgtcttgtgcctgaatcagcccatggtacaaatccagctagtgcaattatggccggaatgaaagttgagatagtctcttgtgattctaaaggtaatatcaatttaaatgaattaaagggaaagtctgaaaaacattcaaataatctttctgctattatgttaacctatccttcaacacatggggtttttgaaaacgatattgaagaggcatgtgaaattgttcatagaaatggaggtcaggtatatattgatggtgcaaacctaaatgcaatggttgggttatgtaagcccggtgaatttggtggtgatgttatgcatatcaatctacacaaaacgttttgtatccctcatggaggtggcggcccaggaatgggtccaattgtttgtaaaaaccatttaaaagaatttttgccatctcatgtcatttatgagaaaactaaatattctgcaggtgctgtctctgcttccccttttgggagtagtagtattttagttatttcttgggcctatattgccatgcttaactcccttggattacagctagccactaagttagcaatattgaatgcgaattacatggcaaagaggcttgagggccactatccaatacttttcaagggagaaaatggcttcaatgctcacgagtttattattgatcttagggaaataaaaaatcaatacggtgtcactgaagaagatattgcaaaaagattaatggattatggttaccatgccccaactatgtcttggccggttaatgggactatgatgatagagcctactgaaagtgaatcaaaagaagaaattgatcgtttttgtgaggctctgatttcaatcaaagatgaaattttaaaaatagctgatggtagataccatcaaagtgacaatccaataaaaaacgcgccacacactgcaacaaatatagcatctgataattggccccaccagatactcacgcaatgaa

SEQ ID NO: 220495 - DNA, 772 bp, Unknown
  Bacterial polypeptide expressing nucleotide sequence isolated from the Sargasso Sea
actttttgtattccacatggaggaggagggccaggcatgggtccaatcgcatgcgcaaaacacttaaaagattttttaccaaatcataacattactaaaaataacaggtccgagaaaagtttaggctctgtatctgctgcgccatggggaagtgcgagtatattaccaatttcctggatgtatataaagatgatgggagctgaaggtttaagaaaagcatctgaggtagcaattttaaacgcaaattacatatcaaaaaaattatctgatcattataaagttctctacaaaggaaaaaatggaaatgttgcacacgaatgtattatagatcttagaccaataaaatctaaatccggaatttcagaggaagatatcgccaaaagattaatagattacggttatcacgccccaacaatgtcctggcctgttgctggaacattaatgattgaaccaacagagagtgaaaatctggcagagataaatcgtttttgtaatgcattaatatctattaaaaaagaaattgacaaagttgataatggcagttttgataaaaaagacaatcctttgaaaaatgccccacacacacatcttgagcttagtgcagatgaatggaaacacttatacaaaagagaagaagccgcatttccaaatgaatatttgaaagttaataagttttggccaccagttggaagagttgataatgtttttggtgatagaaatttagtttgctcttgtccaactcttcaagagtataaagaagatgcagcttaaa

SEQ ID NO: 220496 - DNA, 817 bp, Unknown
  Bacterial polypeptide expressing nucleotide sequence isolated from the Sargasso Sea
cttgcgcatggacccggcccagtggcgctggctgctggcattcaccctggcttgccggcgtagcgtcaatcgccgtaatgccgggcaattacttgagctggcgctttacagtcaggccgttctggcgcaatggcgcaaggagcagaacctgggggattttgcctggcggcgcaatggcaagctggtggcatttcgcagtgaacgggcctttgctcaaggccgggaacagttgacggacccgaccagtcagcaggtgctggcggctgccgagctgcgcgggctggagcctgccctggatggcgtaccgtttgtgggcggtgtgttcacggcaggcgaagaggttggcgattgccacttgttttgcttgcggctggaggcgctgttgcgcgcgtcggggcagtgccgtttcctgcttggccggccggtgacgcaattggttcagcgccagggccaggtcgtggcactgcaactgggcgatcagcaactggacgtggagcagttggtgctgtgtgccgggcatcgcggcccaggcttggcattaccgggagtgcagataccggtttacccgctgaagggctacagcctgaccgcgccgatcagcgccgggcacctgccccctgaggtgagccttaccgactatgagcgcaagatcgtctatgcacgcctggggcagcagctgcgggtagcggcgatggtggacattgtcgggttcgatgagtcggtggacatgcgccgtttgcagagcatgcggcggctggcgctggagacgttgccaagggcggcggattatggccaggcggtggagtgggcggggatg

SEQ ID NO: 220497 - DNA, 868 bp, Unknown
  Bacterial polypeptide expressing nucleotide sequence isolated from the Sargasso Sea
atgaggaaaaaatttgaatttaatttattaaaaaagggattacttcatatttacgacaatgaaaatgaattgcaagctgctagggaaaaaaagaattggattgagcaagatggaatggaatgggattatttagatcttgatgagattgaggacttggagccagcattcaaaacagaaaaaaatacaaaaaaaattgtcggcggtatttatacaaaatcagatgcaagtggagatatccataaattctgcgtgaatcttcataaggtgcttgaagataaatataaactcgattctaaatttaattctgaggtagaaacaatttataaagagaaagattgtgtcattgtttcaatttctgatgggaatattactgaaggtttggagtttgataaggtggcgatttgtgcaggtgtcgacactcaaaagtttgccaatgtattaggcgatagaatgcaagtctatcctgtaaaaggttacagcgttaccatcaatctaaatgatcaagtttctcaggaagcagcccctaaagtttccttgatcgatgatccagtaaaaattgtttcaagtagattaggcaataggcttagggttgcaggaacagcggagttagcaggatataacaaagatataaggcaagatagggtcagacctttactaaactgggtaaaaaaatattttccagatgtgagtactgagagctatacaccttgggcaggacttaggccaatgaccccagatatgatgccgcttctttttgaaagcaatcttggagatattttttataacactggtcatggacatcttggatggacacttagtgcagagaccgcagaaatattagctaaaaaaatattaaatgagacttgaa

SEQ ID NO: 220498 - DNA, 847 bp, Unknown
  Bacterial polypeptide expressing nucleotide sequence isolated from the Sargasso Sea
tctccaaaggcactcaaaatttggatcaaaactttgtttcatgatcatcctgtattcaggatgaatttgagtttggaccctcaactagttcgttggggatttaaatttttggcccagtgtacaaactcgatggcagtgcagaattctctagataaacacagaatttctacttactcacagaagattctgaatcaggttgttgcagaaacgggagttaaatatgaacaaaatacaaaaggtctgctttttctttatagaaatcagcaggcttttgaagaagggattaaacatatcgaattgcttaagggtgtaggccaaaaattggaaactgctgataaagatcgtgtgttggaaataattcctgaactgcaaagttcagaagatcaaatttccggaggaattttttctccggatgatgagtctggggactccagaatattttgtcaacaactgatggatatttgcaggagtatgggaggtatttttttgcatgatgtaacaatagaacggctagaagcatccggaggtttaataaagagagttgtttcaaacaagggtgtttacactgctgatcgttatgtgctttgtttaggttcttggagccctttactggtaaggtcttcactgggtatccggcttacaatttatcctgtcaagggttactctatcacagtgccagtagaaaatcatcatacaccgccagtaattgggggattgcatgaagaagattttctgggatttgctccaatgggagatcatttcaggatcagttccgtctcagaattttccggatacgatgttggtcacactcccgaagattttgaacacatctttaaatgtgcaaaaa

SEQ ID NO: 220499 - DNA, 787 bp, Unknown
  Bacterial polypeptide expressing nucleotide sequence isolated from the Sargasso Sea
actgcttaccaacttttagaaagaggttatactgtatctgtttttgataaaaaccgttatgctgctatggaaacaagttttgcaaatggaggccaattatctgcttgtaacgctgaagtgtggaataattggtctacaatcgttaaagggattcaatggatgttaaaaaaagatgcaccattgctattcagtccaaagctaaacttacataaaattagctggataatagattttataagtaatattccaaaccacaaaaaaaatacaattttaacagctaaaatggctatcaatagtagggatgaatttaaaagaattctaaaaaaagaaaatattgaactagatcttgaagagagaggtattatgcatttatgtgagtgtgatgcgtcattaaaacatggtagacaggttaataaatggcttttagaagcaggattagacagaaaagaaatatctaaagatgagatgttatctattgaaccaactttaaatcttaagaattttattggaggattttatacaaaaagcgatatgtcaggtgatattcataaatttacaaaattgcttgctgatgcttgtgaaaaaaaaggtgtaaaattcttttacgaaacagaaattgttaaagtcattcatgacaacaaacaaccaatactttcctttagtcaatcaaatgaaattcataaacaaaatttcgatgggattgtagtttgtgctggtgttaacagtaaatttatagctaataacttaggtgacaaaatcaatatatatcctgtaaagggatattcga

SEQ ID NO: 220500 - DNA, 856 bp, Unknown
  Bacterial polypeptide expressing nucleotide sequence isolated from the Sargasso Sea
tcatttgccaacggtgggcagctttctgcgtcaaacgccgaggtgtggaacagctgggcgaccatgctcaagggtgtcaagtggatgttccagtctgacgcgccgctgctcatgaacccgtggccctcgtggcacaagtacagttggatggccgagttcgccgcacagattccatacgctcgagccaacaccgtcgagacggtgcggctcgccatctcggcacgtcagcttctcctcgaccacgccgcgaagtacgacttcgatttcaacgccgagcaccgcgggatcctccatttctacgcgaccgagaaggaatatcatcacgccgagaaggtgacgaagctctatgcggagggcggcctcgagcgatacgccgtcacgccaaaggagatccacgacctcgaacccgcgctcgacccttcaaagtacatcggcggcttcttcacgccgtcggacttcaccggcgatatacaccgctacacgaaggggctcgccgcaggcatcgccaaggagggcgtgcggtttcgttgcggagtcgacgtggggcgcgtgcagaagctggtcgcgcgcgacggagtcatcgacgttgtcttgggcgaccccaccggcttttttgagggacccaccttctacgggggtcatggctctatgtatgcgcgcatgccgacctctccggcgggcgagacggagacgcttacttttgacggagtcgtcgtgtgcgcgggcgtgcgctcgcgcgacttcgcggcacagctgggggaccgcgtcaacatctgtaacactcgcggctggagtccgaacccgcgcgaccgtgcagcagacctgccgcgcttactgccgccgcacgcactcacgc

SEQ ID NO: 220501 - DNA, 490 bp, Unknown
  Bacterial polypeptide expressing nucleotide sequence isolated from the Sargasso Sea
atgaacgccattactcgtttcgatatgacccccaagcagatcgctttgatcaaggatacgatcgccaaggattgcaaccgagatgaattcgacctgttttgcgaggtggcgaaagccaagggacttgatcccttcctcgggcaaatcattccaatggtcttttccaagactgacgccgaaaagcggaaaatgaccatcatcatcacccgcgatggtcagcgcgtcattgcgcagcgttgcggcgattatcgtgcagcatccaaaccgcctacctacgagatcgacaaagacttggtgtctcctaccaacccgctcgggattgtttcggcaactgtctatctctggaaacaagacccgaagacgagcgagtggcatgaaatcgccggacaagcgtattgggatgagttcgcgccgatcaaacagatgccgaccggcggctacgagtatgtcgataccggagaagtctgggccgacagcggaaagccgaaga

SEQ ID NO: 220502 - DNA, 185 bp, Unknown
  Bacterial polypeptide expressing nucleotide sequence isolated from the Sargasso Sea
tatgcgagttgtcatactgggaagtggtgtcgttggcgtgaccagcgcctggtacttaagtcaggctggacacgatgtcaccgtcattgatcgtgagcccggtccggcactggaaaccagtgcggcgaacgcggggcaaatatctccaggttatgcggcaccatgggcggcaccaggcgtaccgc

SEQ ID NO: 220503 - DNA, 786 bp, Unknown
  Bacterial polypeptide expressing nucleotide sequence isolated from the Sargasso Sea
catgcatgccttgatctgcggtgccggcttgatcggcgtgaccactgcctattacctggctaaagctggccatgaggtgactgttgtggatcgccgcgacggcccggccgaagagagcagcttcgccaatggagggcagctctcgccaagctatgtggacccatgggggtcttcggggaatcttaagcgtatgctgggttggatcggccggcgtcacgcgcgcttactttatcggctgcgccttgacccgcgactgtgggaatggacagtccggtttcttgccagttgcacggagaagagcctcgcccggaacacggaacgcatgctgcgcattgccatgtatagccttagccaactacaagccctgcgtgaagagttgggaatcgagtacggtcaagatacaaacggtatccttcatatcttccgctcgcgggatgccttcgaacgggcgcttctacaggctcagcgtgtgacggatctgggctgtagccgcgagcccatcggacgcgacgaatgtctcatactggagccggcgctcgcgcacgccgtggacacactggcaggcgccttttacagtcctcttgatgagatcggtgatgcccatgccttctgtcttgcgctcgccgaaaaatgcgaggccatgggtgtgcggttctattttgacacatctatttcgtcgatcacccggcgcgagttcaagatcgttgacatccgaaccaccaagggcccgtttcgcgccgattcctttgtgatcgcgctcggtagctattcggcgcttgttgctaa

SEQ ID NO: 220504 - DNA, 769 bp, Unknown
  Bacterial polypeptide expressing nucleotide sequence isolated from the Sargasso Sea
gatgaacccccaagacaatccgctttcacacctgttcgacaacaacgacgcctgggtcaagcacaagctcgaggacgacccgcaattcttcgcgcgtctcgcccaccagcaggcgccggaatatctgtggatcggctgctcggattcgcgcgtgcccgcgaacgagatcatcggcctgccgccgggcgaagtgttcgtccaccgcaatatcgcgaacgtggtcgtgcacagcgacctgaactgcctgtcggtgatccagttcgcggtcgatatcctgcgcgtgaagcacatcatggtcgtcggccactacggctgctcgggcgtgaatgccgccctgctcaaccgccgcgtcggcctcgccgacaactggctgcatcacgtgcaggacgtgcgcgaacgccacacggcgctgctcgacgcatggccggtgggcgaagcgcgctatcgtcgcctgatcgagttgaacgcgatcgagcaggtcgtcaacgtgtgccgcacgacgatcgtcaacgacgcgtgggcgcgcggccagtcgcttaccgtgcacgggctcgtgtatggcgtgcacgacggccggatgcgcaacctcgggatggccgtgtcgagcttcgacgcgctcgacgagacctacaagcgctgcgtggccgcactcgtcgccggcggcgagcatgcaccggacaacgacatgatcgcggcggacgccgcgcggctcgaaggcgtcgcgcaggctgtcgccgccacgctgaagccgtgcgacgacgcgaagtaa

SEQ ID NO: 220505 - DNA, 1234 bp, Unknown
  Bacterial polypeptide expressing nucleotide sequence isolated from the Sargasso Sea
atgaaaaatatagctattattggtgcaggaataaccggaataactactgcctatcaacttttagaaagaggatattcagtttctgtattcgataaaaatcgttatgcagctatggaaactagttttgcaaatggaggccaattatctgcatgcaacgctgaagtttggaatagttggtcaacaatagctaagggtattcaatggatgttaaaaaaggatgcacctttattatttaatcctaaattgaattttcataaaattggttggttactaagttttatttctaatatccccaatcataaaaaaaatacaatcttaactgctaaaatggcgatagaaagtagaaatgaatttaaaagaattttaaaaattgaaaaaattaatctagatcttgaagaaaagggtattatgcatctgtgcgataatcatgattctttaaaacacggaagaagagtgaatagttggcttgctgaagctggattaattcgcacagaagttacattggatgaaatgttgtccattgaaccaactttgaacttaaaaaactttgttggtggattttatacaaaaagtgatatgtctggagacattcataaatttaccaaactacttgctgatgcctgtgaaaaaaaaggtgcaaagtttttttatgagactgaaataactagagttagtcacaacaatcaacaacctttaatcacttttaaaaaatctgatcaattacaaaaacaaaattatgactgtattgttatctgcgcaggagttaatagtaaatttatagctactgaactaggagatatcgtaaatatatatccagtgaaaggttattcaattacattattacttaatgataaagaaagcattaataatgctccatatgtttcattacttgatgacaaagcaaaaatagtctcaagccgtttgggaaaaaatagatttagggtagcaggtactgctgagtttaatggttataataaggatattagagcggatagaataaaccccttagttaaatggtgtaatgaactttttccaaaagtgtctactgagcatgcaattccttgggcggggttaaggccaatgacacctagtatgattccaaaagttgggagtggtaatttgccaggtgtattttataatactggtcatggacatcttgggtggaccttaagtgcattcacttctcaacaaatttcagatcatattgttagaaaagataactatactgactaga

SEQ ID NO: 220506 - DNA, 1213 bp, Unknown
  Bacterial polypeptide expressing nucleotide sequence isolated from the Sargasso Sea
atgtcacgaatcgccattatcggcgccggcattaccggcgtcacgactgctcacgccctcgcgcagcgcggccaccacgtcaccgtgttcgagcgtcatcgctatgctgcgatggagacctcgttcgccaatggcgggcagttgtccgccagcaatgccgaagtctggaacagcgccgccaccgtactgaggggcctgcgctggatgctcacgcgcgacgccccgctgctgctcaatcccatgcccacgtggcacaagtattcgtggatgggggagtttctgcggcagattccgcattaccgcgcgaacacagtcgagaccgttcggctcgcgattgcggcgcgcgagcatctgttttcgattgccgagcgcgaagggatcgacttcgatctggagcggcgcggcattctgcacatctacaagacccgcaaggaattcgacgcggcgaacaaggtgaatgcgttgttgcgcgaaggcggcctcgatcgcaatccggtgacggccacggagttgcagcggatcgagcctacgctgcatggcgattttttcggcgggttcttcacgccctccgactcgaccggcgacattcataaattcacacgaggcctcgccgacgcctgcgcgcggcacggcgtcgagtttcattacgatgccgagatcacagcgatcgagcagccggccgaaggacggttttcgctgacggtcaatctcgcgggcgagtcgcagcgttttgcctttgagcggatcgtcgtgtgcgcgggagtgaagagccgcgactttgcggcgatgctgggcgatcacgtgaacgtctatccggtgaagggctattcgatcaccgtatgcctcgacgatgaagtcagccaacagcgcgcgccgtgggtgagcctgctcgacgacagcgcgaagatcgtgacgagccggctcggcgtcgatcgtttccgcgtggcgggcacggcggagatcaacggctttaaccgcgatatccgctcggaccggatcgctccgctggtggactggacgcgccggcattttcccgaggtgtcgacttcgcgcgtgattccgtgggcgggcttgcggccgatgttgccgagcatgctgcccaaggtgggccgcggcaaacggtgtggagtgttctacaacaccggccacgggcatctgggctggacgttgtcggcagccacggcgcaggcggtagccggggttattgaatagg

SEQ ID NO: 220507 - DNA, 1183 bp, Unknown
  Bacterial polypeptide expressing nucleotide sequence isolated from the Sargasso Sea
aaaagggtcacaaaagttacaattttagactctagaagatatcctgccatggcaacaagttacgccaatggtgggcagctaagtgcaagtaatgctgagacttggaatactacaaagaatgtaattgatggcttcaaatggatgtttactccagatgccccattgttatttaacccttctccagaaattcaaaaatacaaatggatgttcggcttcttgttagcaactcttaaaagtgaacataaaaaaaatacattagaaacgatagatgtagcaaaaaaggctagagaaatatatttcagaatagccgatgaagaaggcatagaatttgagttattaaaaaaaggtattcttagattctatgattcagaaaaagaatttaaactggataagaataaagcttcgtggcttaaccaagatggcatggaatgggacatacttacgacagaggaagttataaatcttgaaccagcgttcagaaataacaaaaacttcgataaaattttaggtggaatttatacaaaatcagatgctagtggagatattcataagttttgtaccaatctggagcaggtgctcgtagataaatatgatgccaatctccaactaagcgcaacagttgagcagataaataaacaaaataaggagttgattgtttcaatcaagaaagaggatgcagtaatccaagaggcttttgataatgtgatagtttgtgctggcgtgaatacacaaaaatttgcaaatatgctcggtgataaaatgaatgtgtatccggttaaaggatatagcgtaacgataaacctcaaagacgatacttcaaaagaatgtgcaccgtctgtttctttgattgatcaaccggtaaaaattgtagctagtagattaggagatagattcagggttgcaggcactgccgaactagcaggaatcaatactgatataaggcaagacagaattaggccattattaaaatggatagaaaaatattttccacaagtaagtactgaaacatatacgccgtgggcagggttaaggccgatgacaccgaatatgatgcccattactagcgaaagtaaaataagaggtattttttaccatacgggtcatggtcatttgggttggactttaagtgctcaaacagcaaagatagtagctgataagctcgattataatatgaataactagt

SEQ ID NO: 220508 - DNA, 1240 bp, Unknown
  Bacterial polypeptide expressing nucleotide sequence isolated from the Sargasso Sea
atgaaaagaattggtgtcataggttcaggtatagcaggaattacaactgcctattcattagctaaaaggggtcatgaagttacgcttatagatgctagaagatatcctgcaatggccaccagttatgcaaatgggggtcaattaagtgccagtaatgctgaaacttggaacacagcaaaaaatttattcaatggaataaaatggatgttccagaaggatgctcctcttctcttcaatccaaccccaaacataaataagtacaaatggatgcttggatttcttgcagcaactttttccggtaagcacaaatctaatacgctaaaaacaatagatatggcaaaaaaagcaagagagcattacttcaaaattgctgatgatgaaaaaattgaatttaatttattaaaaaagggactacttcatatttacgataatgaaaatgaattgcaagctgctagagaaaaaaagaattggattgagcaagatggaatggaatgggattatttagatcttgatgagattgaggacttggagccagcattcagaacagacaaaaatacaaaaaaaattgtcggcggtatttatacaaaatcagatgcgagcggagatatccataaattctgcgcgaatcttcataaggtgcttgaagataaatacaaactcatttctaaatttaattctgaggtagaaacaatttataaagagaaagattgtgtcattgtttcaatttctgatggaaatattactgaaggtttggagtttgataaggtggcgatttgtgcgggtgtcgatactcaaaagtttgccaatgtattaggcgatagaatgcaagtctatccagtaaaaggttatagcgtaaccatcaatctaaacgatcaagtttctcaggaagcagcccccaaagtttctttgatcgatgatccagtaaaaattgtttcaagtagattaggcaataggcttagggtcgcaggaacagcagagctagcaggatacaacaaagatataagacaagatagggtcagaccattattaaactgggtaaaaaaatattttccagatgtgagtacagaaagctacacgccttgggcaggacttaggccaatgactccagacatgatgccgcttctttttgaaagcaatcttggagatattttttataatacaggtcacggacatcttggatggacacttagtgcagagactgcagaaatattagctaaaaaaatattaaatgagacttgaa

SEQ ID NO: 220509 - DNA, 476 bp, Unknown
  Bacterial polypeptide expressing nucleotide sequence isolated from the Sargasso Sea
aatgcgcgttctggtcttgggtagcggcgtcattggggtgaccagtgcctactatttggcgcgggccggcttcgacgttgtggtggttgatcgtcagcctgccgctgccatggaaaccagtttcgctaatgccggtcaggtgtcccctggctacgcgtcgccatgggccgcgccgggtgtgccgctcaaggccatcaaatggctgcttcagcgccacgcgccgctggcgatcaaggccaccgccgatatcgaccaatacctgtggatggcgcagatgctgcgcaactgcacggctagccgctacgcggtgaacaaggaacgcatggtgcgcctgtccgagtacagccgcgactgccttgacgaattgcgcgccgagaccggcattgcctacgaagggcgcagcctcgggactactcaactgttccgcacccaggcccagctcgatggcgccgccaaggacatcgccgtgctgaaag

SEQ ID NO: 220510 - DNA, 850 bp, Unknown
  Bacterial polypeptide expressing nucleotide sequence isolated from the Sargasso Sea
gctcacgggcgacgtcgaccagtacctgtggatggcacagatgctgcgcaactgcaccgccagccgttacgcggtgaacaaggagcgcatggtgcgcctgtccgagtacagccgtgactgcctcgacgagctgcgcgccgaaaccggcatcaactacgaaaaccgcagcctgggcaccacccagctgttccgcacccaggcccaggtcgatgcagcggccaaggatattgccgtactcgaacagtccggtgtgccctacgagctgctcgatcgcgacggcattgcccgcgtcgaacccgccctggccggcgtgaaagatatcctggccggcgccctgcgcctgccgaacgaccagactggcgactgccagctgtttaccaccaagctcgccgacatggcgttgaagctgggcgtggagttccgcttcggccaggatatccagcgcctggacttcgccggtgaccgcatcaatggcgtatggatcgacggcaagctggagacggcagaccgctatgtgctggcgctgggcagctactcgccacagatgctcaagccactgggcatcaaggccccggtgtacccgctgaaaggttattcgctgaccgtgccgatcaccaacagcgacatggccccgacttcgaccattctcgacgagacctacaaggttgccatcacccgtttcgacaaccgcatccgcgttgggggcatggctgaaatcgccggttttgacctgtcgctgaacccgcgccggcgcgaaacgctggagatgatcgtcaacgacctttatcctcgcggcggtgacctgagccaggccagcttctggaccggcttgcgcccggcgaccccggac

SEQ ID NO: 220511 - DNA, 752 bp, Unknown
  Bacterial polypeptide expressing nucleotide sequence isolated from the Sargasso Sea
catgcgtgttctggttctcggcagcggtgtgattggtaccgccagtgcttactacctcgcccgtcagggtttcgaggtggtggtggtcgaccgtcagaacggcccggcgctggaaaccagcttcgccaacgctggccaggtttctccgggctacgcttcgccctgggccgccccgggcgtgccgctgaaggccatcaagtggctgctgcagaaacacgcgccgctggcgatcaaggccactggtgacgtcgaccagtacctgtggatggcgcagatgctgcgcaactgcaccgccagccgctatgcgatcaacaaggagcgcatggtgcgcctgtccgagtacagccgcgattgcctcgacgagctgcgcgccgagaccggcatcgcctacgaaggccgtcagctcggtaccacccagctgttccgcacccaggcccaggtcgatgccgctgccaaggacatcgccgtgctggaagcctccggcgtacccttcgagctgcttgaccgcgatggcatcgctcgcgtcgagccggccctggctggtgtcaaacacaagctggccggtgccctgcgcctgcccaacgaccagaccggcgattgccagatgttcaccaccaagctggcggacatggccaaggcgctcggcgtcgagttccgtttcggccagaacatccagcgcctggacgccgtgggcgaccgtatcaacggcgtgtggatcgacggcaagctggaaaccgccgaccgctatgtgc

SEQ ID NO: 220512 - DNA, 1255 bp, Unknown
  Bacterial polypeptide expressing nucleotide sequence isolated from the Sargasso Sea
gatggacatagtggtactcggtggtggcgtggtcggcgtgaccagcgcctggtatctggccaaggcgggtcacaaggtgacgctgctggagcggcgtgacggggtggcccttgaaaccagccacgccaatgccggccagatctcccccggttacgcggccccctgggcggcccccggcattcccctcaaggccgccaagtggctgctgcaaaagcatgcccccttcacggtgcgaccgacctcggatcccttccagctgcgctggatgctgaagatgtttgccaactgcaccccggcggcctatgcggtcaacaaggggcgcatggtgcggctggccgaatacagccgcgactgcatgaagctgctgcgcgacgagctgagcatcgattatgaagggcgccagctcggcaccctgcagctgtttcgcagtcaggcccagctcgatgccagcaagcgcgacatcgaggtgctggaagagtacggcgtgccctaccagtccctcgatgccgctggctgtgaaggggcagaaccggcgctggcccgggtacgcggcaagatagtgggcggcctgcgcctgccgggcgatgagaccggcgactgcttccgtttcaccaaggccatggcagcggaagcgcagcgactgggggtcaagttcgtgttcaactgcgccatcgacgagatcgagctggcgcagggacgcgccgtggcggtgcgggccggcgagcagcgcttcaaggccgacgccatcgtctgtgccctcggcagctatgccaccgggttcctgcgcccgctcgggctcgatctgcccgtctacccggtcaagggctactccctcaccctgccgatgatcaacgccgaggcctcgccgcgcagtaccgtgctggacgaaacctacaaggtggccatcacccgtttcgatgagcggatccgggtcggcggcatggcggagctgtcgggctacaacctggccctcaacccgaaacggcacgacaccctggccatggtggtcggtgatctcttccccgaggggggcgacatcagccgcgccgacttctggaccgggctgcgccccatgacgccggacggcaccccgctagtgggcccaagccccatccccggcctctggctcaacaccggccacggcaccctgggctggaccatggcggcgggctcgggccagctgctgtgcgatctcatcagtggcagcgacaccgccatcagcgacgaagggctcaccctggctcgctacggctga

SEQ ID NO: 220513 - DNA, 1288 bp, Unknown
  Bacterial polypeptide expressing nucleotide sequence isolated from the Sargasso Sea
atgcgagtcgtcattctgggcagcggtgtggtgggcgtggcaagcgcgtattacctcgcgcgcgccggccatgaagtcacggtgatcgaccgggaagccggcccggcgctcgagacgagcttcgcgaacgcaggccagatctcccccggctatgccgcgccgtgggctgcacccggcgtgccgctgaaggccgtcaagtggatgttcgaaaaacacgcgccgctcgcgattcgcctcgacggcacgcgcttccagctccagtggatgtatcagatgctgcgcaactgcacggccgagcgctacgcggtcaacaaggggcgcatggttcgcctcgccgaatacagccgcgactgcctgcaggcattgcgcgccgacaccggcatccagtacgaaggccgcacgggcggcacgctgcaacttttccgcacgcagcagcaactcgacggcgcggcgaaggacatcgccgtcctgcaggaagcgaacgtgccgttcgaactgctttccccggccgacctgaagaaagccgaaccggcgcttgccgccgtctcgcacaagctgacgggcggcctgcgcctgccgggtgacgaaacgggcgactgccagctgttcacgacgcgccttgcagcgctcgccgaatcgcttggcgtgaagttccgctacaacacgccgatcgacgcgctcgcgatcgccggcggcaagatcgccggcgtgcagtgcggcagcgagacggtgcgcgcggacgcgtacgtcgtcgcgctcggctcgtactcgaccagcctcatctcgaacctgatgaagatccccgtctatccgctgaaggggtattcgatcaccgcgccgatcgtcaacgaagcggccgcgcccgtgtcgaccgtgctcgacgagacctacaagatcgcgatcacgcgtttcgaccagcgcatccgcgtcggcggcatggcggaaatcgtcggcttcgacaagaagctgcgcgccgcgcgccgcgaaacgctcgaaatgtgcgtgaacgacctgttcccggggggcggcgacacgtcgaaggcaacgttctggacgggcctgcgcccgatgacgccggacggcacgccgatcgtcggccgcacgccggtgtcgaacctgttcctgaacaccggccacggcacgctcggctggacgatgtcgtgcggttcgggccagctgctcgcagacctgatctcgggcaagatgccggcgatccaggccgacgacctgtcggtgcatcgctacctgaaagacgtggccggccagacgcgcccggcatacgcataag

SEQ ID NO: 220514 - DNA, 958 bp, Unknown
  Bacterial polypeptide expressing nucleotide sequence isolated from the Sargasso Sea
ccgcgactgcctgatggacctgcgcaccgacagcggcgtcgattacgaacaccgcgagcagggcaccctgcaggtcttccgcacccagaagcagatggatgccgccgccaaggacatcgccgtgctggagcgctgcggcgtgccctacgaggtcctcgaccgtgacggctgcgtgcgcgccgaacccggcctggccgccagtgccgacaagatcgtcggcggcctgcgcctgcccaacgacgagaccggtgattgccacttgttcaccacccgcctggccgccaaagctgccgagctgggcgtcacattccgctacaactgtgcaatcgatgagctgcatagcgacggcaagcaaatcactggtgtgcgcctgcaaaacggcgaagtcctgaccgccgaccgttacgtgctggcccttggcagcttctcgccgaaactggcccgcccgctcggctttgacctgccgatctacccggtcaagggctactcgctaaccctgccggtggcagacgatgccatggctccggtttccaccatcatggatgaaacctacaaggtggccgtaacccgctttgccgaccgcatccgcgtcggcggcatggccgagctgaccggctttgacgacacgctgaaagagaagcgccgcgccacgctggaaatggtcgtctccgacctgttcccgcaaggtggcaaggtcgccgaggccaccttctggaccgggttccgcccgatgaccccggacggtacgccgatcattggcgccagcagcctgcgcaatctgtatttcaacaccgggcacggcaccctgggctggaccatgtcctgcggctccagcaaactgctggccgacctgctgtccggcgaaaagcccgcgcttaacgccggcgattacagctttgaccgttactccaaccacaaggaacaccagcaccatggccatccagcgtctgcacactaa

SEQ ID NO: 220515 - DNA, 445 bp, Unknown
  Bacterial polypeptide expressing nucleotide sequence isolated from the Sargasso Sea
cgtcaacgaagcggcggcgccggtttcgaccgtgctcgacgaaacctacaagatcgcgatcacgcgctttgacgaccggattcgtgtcggcggcatggcggagatcgtcggcttcgacaaatcgttgcgtgaggcgcgccgcgaaacgctggaactgtgcgtgaacgatctgttcccgggcggtggcgacacgtcgaaagccaccttctggaccggcctgcgtccgatgacgccggacggtacgccgatcgtcggccgcacccctctgccgaacctgttcctgaacacgggtcacggcacgctgggttggacgatgtcgtgcggctcgggtcaactgctggccgacgtgatgtcaggcaagcagccggcgatcaaggcggacgatctgtcggtgcatcgctatctcggcgaaacagccggcgcacatcgcccggcttatgcataa

SEQ ID NO: 220516 - DNA, 864 bp, Unknown
  Bacterial polypeptide expressing nucleotide sequence isolated from the Sargasso Sea
cccagcaacagctcgacggcgccgcgaacgacatcgccgtgctcgagcgcgccggcgtgccgtacgaactgctttcgcgcgaagacctcgtgcgcagtgaaccgggcctggcctcgacccgccacaagctggccggtggcttgcgccttcccaatgacgaaacgggcgattgccagctcttcaccacgcgcctggccgcgatggcggaaaagctcggcgtgcgcttccgtttcaacagcacgatcaacagcctcatcttcaagaacgacgccgtccgcggggcgctggtcgacggccagccgatcgacgccgatctcgtggtcgtggcgctgggcagctacagcacaccgttcctgaagaacctggtgaacgtgccggtctacccgctcaagggtttctcgatcaccgtaccgatgacagatgcggggaagagccccgtatccaccatcctggacgagacctacaaagtggccgtgacgcgctttgacgaccgaatccgcgtgggcggcatggcgcagattgtcggctacgacaagcgcctcgacccaggcaagcgcaagacgctggagttcgtggtcaacgatctgttcccgggtgccggggatgtctcgcgcgcgacgttctggaccggcctgcgcccgatgacgccggacggcacgcccatcgtgggccagacgcccgtgcgtggcctgtggctcaacactggccacggcacgctgggttggaccatggcctgcggctcgggcaagctgctgtcggatctggtgtcgggccgctcgcctgccatccgctcggatgacctttctgtgtatcgctacctgggtggcacccagatgccggcaaccaagcctgcgctggcctgat

SEQ ID NO: 220517 - DNA, 892 bp, Unknown
  Bacterial polypeptide expressing nucleotide sequence isolated from the Sargasso Sea
agtggcagagagtatttaaatttggaacacaaaaatggtcttgaaccaggcaaaaatggacaaactctttattcatataatctatcaactatagatattgtcgatgacgcagtaagaattgcaaaatttgaacaaaataattgggagaaaacaagcatagaaaatataaaggaaataatgggtaaatgtgcaacaataatggaagaaaatagacctcgattgattgctgcgatgataagagacggtggaaaaactatttcagaggcagacccggaaatttcagaggctattgattttgttagattttattctttagcagcggagaagcttgatgaagaatcctcacctttgggtgttgtcgttgttgcaccaccttggaactttccctatgcgataccaatgggaggaattgtagctgctttagtttcaggtaacactgttatttttaaaccacccccagagacagtattggtagcttgggaactagtaaatcaactatgggaagctggagtaccaaaatcagttttacattttttgcctacagacgaaaacgagattggcaaacatcttattactcataatgatgttgattccattgttctaacaggatcttatgaaacggcactcttatttaaaaaatggaatccatctttaagattgcttgcagaaacaagtggtaaaaattcaatcgtcgttaccgcaagtgctgacatagacgctgccgtcaaggacattattgattctgcttttggtcatgctggacagaaatgttcggctgcaagccttgtaatcgttgagcaatctatttataacaatccaaatttttttaaacagttaaaggacgctgtcacatcacttaaggtaggagacccagcagacttctctacctcag

SEQ ID NO: 220518 - DNA, 970 bp, Unknown
  Bacterial polypeptide expressing nucleotide sequence isolated from the Sargasso Sea
gcactaagactgtgcgaatgtttctggaaaggtggtatttcccgcaaaacgcttcaactggttccctgtatgggctcggttgccggacaacaattagtaaacgatccggcagttgccgctgtcgtcttgacgggtgcaacgaaaactgcccgatcattattaaaacataatccgaaactccgactttttgcagaaacaggcgggaaaaatgcaacgatcgtcacatcgctcgctgaccgcgaattggcaatcaagcacatcattgaatcggcttttgcgcacagcgggcagaagtgctcagcgacttcacttctcgttctcgaggctgaagtttttgatgacccccacttcaaatccgcacttatcgatgcggcctccagcctatcggtgggatctgcctggaacttatcaacccgcgttggccccctgatcgatcctcctaatgagaatctacaaaagggacttacagaacttgatgacggtgaagcgtgggcattacaaccggaaattgataaagataatccgcggcttatcagccccggcatcaagtggggtgttcggtcagggtcgtacagccatcaaactgaatttttcgggccgctactaagcgtcctacgcgcagatgatctaccgcacgccattaagattgccaatcagacaccctacggattgacctcggggcttgaaagcctcgacgaccgggaacaagaactttggacgcgttctattcaagccggaaacctttatatcaatcggccaaccaccggcgcgattgtactgcgacagccatttggcggaattctcaacagttcatttggcccggaaatcaaagccgggggaccgcactacgttaatctgttcacccgttttgaaaattgcggattcgaagttgaagagaaaccaagcggggcactcgaacagctatatgacagtctcgccaatgaggcatctcactggaagctatcgactg

SEQ ID NO: 220519 - DNA, 841 bp, Unknown
  Bacterial polypeptide expressing nucleotide sequence isolated from the Sargasso Sea
aaaaatgtagaccgttatgtcatgctcggagatgtctgtgcgaaatctgctgaattgatgagagatccagaaattgaactcttttttgcaaaattaatccaaagagtaatgccaaaaagcatcaatcagtgcctaggtgaagtgcgggtcactagaatatttcttgagaattttgcaggtgatggtgtgagatttcttgccagagggttcagcaatcctggagatcacgatggtcaagaatccaaagggtatcgatggcctttcggtccagttgtcctgatcgctccctttaattttccactggaaatacccgtattgcagtttatgggtgctcttttcatgggcaataggccacttgtaaagacagactcaaaagtcagtatcgtttttgaacaatttttaagaatggccattcattgcggtctacctgcttctgattcagactttattcactgtgatggaaagaatatggatcaactgattactgatggcaaagaatatatcagacatctccaattcactggctcttctgatgttgcagaacatcttgcaaataagatggatggaagaatcaaaatagaagatgcaggttttgattggaaaataattgggcctgattttgagcaagattggctagattatgttgcatggcaatgcgacgaggatgcatacaatgcatcgggtcagaaatgttcagcacaaagtattttatttgtgcacaataattggtctgaacatttgataccaaaaatctcagagcttgcaaaaagaaggaatctagacaatctgacggtgggacctattctcacttgggataatgttcaaataaaatcacatattg

SEQ ID NO: 220520 - DNA, 850 bp, Unknown
  Bacterial polypeptide expressing nucleotide sequence isolated from the Sargasso Sea
catgggaaatacagtagtctggaaagcctcaagaactcaaatttattctgctgatgtaattatgaaagtttttaaagaggctggtttacctgatggtgtaattaatctagttcatactagtgggagaacagctggtgaagttatctttaaacatccagattttgggggcatacatttcacaggaagtactgctgtttttcaacacttttggaaagaaattggtgataatattagtacctataaatcttatccgcgtattgtaggtgaaacaggagggaaagactttattattgctcataaatcagcagatcccttagcagtatcaacagcaataattagaggagggtttgaatttcaagggcagaaatgcagtgctccttcaagagtatatattcctaataatttatggtcaaaaattaaacaaaatttagtagatgaaatttcaactataaaaattggtaacccagaagacttctcaaattttatgaatgctgtaattgatgaaaaagcatttaataatattacttcttatattgattatgcaaaaaatagtgataatcatgaagtattgattggagggaaatatgataaatcaaagggttattttatagaacctactataattttatcatcaaatccaaaaagtaagcttatgtgtgaagaaatttttggacctattgttacaatttatatttatgatgctgaaaaatatgaagaaacaattgcattagtaaatgaaacttcaccatatgcacttaccggagctgtattttcaaataataaagaagctattgatattgccagcaaaaaattagagaatgcggctggaaatttttacataaatgataag

SEQ ID NO: 220521 - DNA, 762 bp, Unknown
  Bacterial polypeptide expressing nucleotide sequence isolated from the Sargasso Sea
gcagtttatgcttgttatttcttgatggaattacttaaagaagcgggtttacctgatggggtaataaattttttgcccggctctggctctactgtgggtgacccaatattaaatcattcttcattagcaggtgttcattttacaggatctacaaatacttttaattatatatggaaaacgattggatcaaatattggtcaatacaaaacgtatccaaggattgttggagaaactggtggcaaagattattgtttagctcatgaatcttgcgacattgatgtcttggttactgcgatggtaagaggagcatatgaataccaaggacaaaagtgttctgctatgtcccgcgcctatattccaaaatcattatggccagaggtaaaagaaaaatttatcgctgaagtaaagaccattaaagttggttctccaaaagatttttctaatttcatgaacgcggtaattgataaatctgcttttgatacaatttcagaatacattcattttgcaaaagaccatgatgatgcagaaattgtcgctggcggaaattgtgatgactccataggatatttcattgaacctactgcaatcttaaccactgacccaaaatttaaaacaatgaaagatgaaatatttggtccagttctaactatatatctttatgatactaataaatgggatgaaacaatcaaactagttgacacaacatcagaatatgggctaacggggtgtataattgctagtgatgaaaaaataatcaagcaa

SEQ ID NO: 220522 - DNA, 1468 bp, Unknown
  Bacterial polypeptide expressing nucleotide sequence isolated from the Sargasso Sea
tttgggtgttgtcgttgttgcaccaccttggaactttccctatgcgataccaatgggaggaattgtagctgctttagtttcaggtaacactgttatttttaaaccacccccagagacagtactggtagcttgggaactagtaaatcaactatgggaagctggagtaccaaaatcagttttacattttttgcctacagacgaaaacgagattggcaaacatcttattactcataatgatgttgattccattgttctaacaggatcttatgaaacggcactcttatttaaaaaatggaatccatctttaagattgcttgcagaaacaagtggtaaaaattcaatcgtcgttactgcaagcgctgacatagacgctgccgtcaaggacattattgattctgcttttggtcatgctggacagaaatgttcagctgcaagccttgtaatcgttgagcaatctatttacaataatccacatttttttaaacagttaaaagacgctgtcacatcacttaaggtaggagacccagcagacttctctacctcagtaggtccattgataagtccagtgaataaaaatctatcaaaagtcatagaagagcttgaagagggtgaagaatggcttgttgaacctaaacaacttgaaagtgtatatttatggtctccaggtgtaaaaataaatgttcagccaggatcttggacgcaccagaatgaatggtttggaccagtgctcgggataatgaatgcaaaagatttagaacaagcagttgattggcaaaattctgttccgtatggacttacagctggaatacaatctctaaatgaaaaagaatgtgaatactggatcgaaaatgtagaagcaggaaatctttatgtaaacagaacaacaacaggggcagttgttgacagacatccatttggcggttggaagaaaagtagttttggcccaactgcaaaaacaggaggaagtcactatgtttcaatgtttcgtgaataccaaccggtagaaaatatagaaagtttaaaatatgaatttaaactgacatgggaggagattggtaataagtcaataaaactaggagacacagagtctgaaagaaatttcaaacgttacgttccgtacaagagtatcttgttagttactgaagaagacttttcaaaagatttagaaagctttatattttggatatccgatttattgaatataaacataaagataatatctcaagagactctattaggtcctgattcaaatttagatctttctctttttgaaaaaataagatggacagcaacgagtcaagaaataccaactcagatatttagttcaggagcaactgttgatgagagagggttatctcaaaatggtaaacaagagcttctttgttgggtgaaagagcaatctatatcaataacaaatcatcgttatggcaatattggatctggccctcagccatttaataactggtaa

SEQ ID NO: 220523 - DNA, 1390 bp, Unknown
  Bacterial polypeptide expressing nucleotide sequence isolated from the Sargasso Sea
aatgaacaaaaatacacctgctcgctgtcaaaacttagtcagtggtgaatggaaagatgatgacaatgaatataccaagatacctgatccccttaatggggatgattttattttggtacctaataccactgatgcaactgagttcatcgaaaacctgagaaattgtccaaaaagtggtctgcataaccccatcaaaaatgtataccgttatgtaatgctcggggatgtctgtgcgaaatctgctgaattgatgagagacccagaaattgaactcttttttgcaaaattaatccaaagagtgatgccaaaaagcatcaatcagtgcctaggtgaagtgagggtcacaagagtctttcttgagaattttgcaggcgatggtgtgagatttcttgcaagagggttcagcaatcctggagatcacgatggtcaagaatccaaagggtatcgatggccttttggtccagttgtcctgatcgctccctttaattttccactggaaatacccgtattgcagtttatgggtgctcttttcatgggcaataggccacttgtaaagtcagactcaaaagtcagtatcgtttttgaacaatttttaagaatggccattcattgcggtctacctgcttctgattcagactttattcactgtgatggaaagaatatggatcaactgattactgatggcaaagaatatatcagacatctccaattcactggctcttctgatgttgcagaacatcttgcaaataagatggatggaagaatcaaaatagaagatgcaggttttgattggaaaataattgggcctgattttgagcaagattggctagattatgttgcatggcaatgcgacgaggatgcatacaatgcatcgggtcagaaatgttcagcacaaagtattttgttcgttcacaataattggtctgaacatttgataccaaaaatctcagagcttgcaaatagaaggaatctagacaatctgacggtgggacctgttctcacttgggataatgttcaaataaaatcacatattgatgcattattgaaaattgatggatcaagtgttctctttggaaatgagaaactggaaaatcatcaaatcccagaagtttatggatcaataaaaccaacagctgtccagattcccatagaggcactccttacagatcattttgagctcatcacaactgaattatttggcccatttcaagtagtgatcgagtacagcgatgatcaactatctatcgttttggatgcacttgagcggattgaaatgaatcttacggcagcagttgtatcaaatgatcttgcattccaacaaaagattctgggcaatactgtcaatggaacaacttatactggcatgagagcaagaacgactggggcacca

SEQ ID NO: 220524 - DNA, 931 bp, Unknown
  Bacterial polypeptide expressing nucleotide sequence isolated from the Sargasso Sea
ggcggtctacctgcttctgattcagactttattcactgtgatggcaagaatatggatcaactgattactgatggcaaagaatatatcagacatctccaattcactggctcttctgatgttgcagaacatcttgcaaataagatggatggaagaatcaaaatagaagatgcaggttttgattggaaaataattgggcctgattttgagcaagattggctagattatgttgcatggcaatgcgacgaggatgcatacaatgcatcgggccagaaatgttcagcacaaagtattttgttcgttcacaataactggtccgaatatttgataccaaaaatcacagagcttgcaaatagaaggaatctagacaatctgtcggtgggacctgttctcacttgggataatgttcaaataaaatcacatattaatgcattattgaaaattgatggatcaagtgttctttttggaaatgagaaattggaagatcatcaaatcccagaagtttatggatcaataaaaccgacagctgtccagattcccatagaggcactccttacagatcattttgagctcatcacaactgaattatttggcccatttcaagtagtgatcgagtacagcgatgatcaactctccatcgttttggatgcacttgagcggattgaaatgaatctcacggcagcagttgtatcaaatgatcttgcattccaacaaaagattctaggccatactgtcaatggaacaacttatactggcatgagagcaagaacgactggagcaccacaaaatcattggttcgggccttcaggagatcccagagcagcagggataggcacacctgaagcaatcattaatacttggagtggccacagagaaatcatttatgacattggcccaataaagacagattggaacataccggaatcacaataaa

SEQ ID NO: 220525 - DNA, 1540 bp, Unknown
  Bacterial polypeptide expressing nucleotide sequence isolated from the Sargasso Sea
aatgaacaataattcacctgctcgttgccaaaatttagtcagtggcgaatggaaaaatgacgaaagtgagtattcaaaaatccctgacccattaaccggagaggactttttattggtccccaatacatccgatacagctgaattcataaaaaatctaagcaattgccctaaaagcgggcttcacaatccgataaaaaatgtagaacgatacgtcatgcttggcgatgtttgtgcaaaatctgcagaactgatgagggatccagaaatagagttattttttgcaaaattgattcagagagtcatgccaaaaagcatcaatcagtgcattggagaagtgagagtcactagagtctttttagaaaactttgcaggtgatggtgttaggtttcttgccagaggattcagtaatcctggagaccacaacggacaagaatcgaatggttatcgatggccatttggatctgttgtattaattgcacccttcaacttcccattggaaatacccgttctccaatttatgggtgctttattcatgggcaacaggccgcttgtaaaatcagactcaaaagtaagcattgttttcgaacaattcctaagaatggcaatacattgcggtttgcctgcctctgatacagatttgattcactgcgatggagccaccatggatcaactcataaaaaaagggaaagaacacatcaggcagattcaattcactggatcctcggctgtggccgagcatctcgcgaaagaagtgaatggaaaaatcaaaattgaggatgcgggctttgactggaaaatcatcgggcctgatttcaagcctgaatggctcgattatgttgcgtggcaatgcgatgaagacgcttataatgcctcaggacaaaaatgctctgctcaaagcatcttatttgtgcacagcaattggtacgatcaactcatcccaaaaatcactgaactagcgaatcgaagaaatcttgagaatctaaccgtgggaccggttttaacctggaataatgaccggataaaatctcatattgacgatttactggagattaaaggatcaaaagttttgtttggtaatgaaaagctggaaaatcacgaaatcccagaggtttatggttcaattaaaccaacggctattcaagttccaatagaggcattgctctctgagcactttgagctaattacaacagaattgtttggtccatttcaggtaataataaaatacgaagatcatgatctatcgatcgtaatgactgctcttgaaaagattcggatgaatctcactgctgctgttgtatcgaatgatcttcaattccaacaaaaaattctaggtaatacagtgaatggaactacgtatgctggtatgagagctaggactactggcgcgcctcagaatcattggtttggtccttctggagaccccaggtcagctggaattggtacaccggaggcaataatcaatacatggagtggtcacagagaaattattcatgacgttggaccaataaaaagcgattgggaaacaccggagtcacaataa

SEQ ID NO: 220526 - DNA, 957 bp, Unknown
  Bacterial polypeptide expressing nucleotide sequence isolated from the Sargasso Sea
ccccgagatccgccccctggaggggttcgtactctcaatcacaccgttcaacttcaccagcatcgccgccaacctaccgagcgcacccgcaatcgtgggttgcacctccgtctggaagccgagcaggaactcgtaccactccaactacgtcctgatgcagctgatgatggacgcgggactgcctccgggggtgatcaacttcctcccaggctcgggagcggagatcacaggggcggccctgtccaatccggacttcgccggattgcacttcaccggctcgacatcgaccttccaggggctctggcaggagatcgccaaggcactgcccgacctgaggtcctaccctcggatagtgggcgagacgggaggcaaggacttcgtagtagcccatcctgactgcgaccaccggggcctgttggttgccctcctgagaggctcgttcgagtaccaggggcagaagtgcagcgcagccagcagggcgtacatcccctcatcggtgtgggatgcgataggggacgacctgtgctccgaggtctccaagatcaagatgggcgatgccagggacttcaccaacttcatgaccgccgtcatcgaccagagggccttcgacaagatatccggctacatcgagagggccaaggaagacgattcctgcgaggtggtcgtcggagggggccacgacgactccaccggctggttcatcgagccgacgataatagtcacgaccaacccggcctccgagaccatgtgcgaggagatcttcgggccggtcctgaccgtctacgtctacgaggacgacgacttcgaaggggccctggagacgtgcgacaagggatcaccgtacgccctcaccggatccatcttcgccaacaacgaggaggacgtccagagggcgttcgaggctctgcgcttcgcagccgggaacttctacatccacgacaagtcaactcggagccg

SEQ ID NO: 220527 - DNA, 529 bp, Unknown
  Bacterial polypeptide expressing nucleotide sequence isolated from the Sargasso Sea
ttcgccggattgcacttcaccggctcgacatcgaccttccaggggctctggcaggagatcgccaaggcactgcccgacctgaggtcctaccctaggatagtgggcgagacgggaggcaaggacttcgtcgtggcccatccggactgcgaccatcggggcctgttggttgccctcctgaggggctcgttcgagtaccaggggcagaagtgcagcgcggccagcagggcgtacatcccctcatctgtgtgggatgcgataggggacgacctatgctctgaggtctccaagatcaagatgggcgatgcccgggacttcacgaacttcatgaccgccgtcatcgaccagagggccttcgacaagatatccggctacatcgagagggccaaggacgacgattcctgcgaggtggtcgtcggagggggccacgacgactccaccggttggttcatcgagccgacgataatagtcacgaccaacccggcctccgagacgatgtgcgaggagatcttcgggccggtcctgaccgtgt

SEQ ID NO: 220528 - DNA, 691 bp, Unknown
  Bacterial polypeptide expressing nucleotide sequence isolated from the Sargasso Sea
tccgtctggaagccgagcaggaactcgtaccactccaactacgtcctgatgcagctgatgatggatgcgggactgcctccgggggtcatcaacttcctacccggatcgggagcggagatcacaggggcggccctgtccaatcctgacttcgccggattgcacttcaccggctcgacatcgaccttccaggggctctggcaggagatcgccaaggcactgcccgacctgaggtcctaccctcggatagtgggcgagacgggaggcaaggacttcgtcgtggcccatccggactgcgaccaccggggcctgttggtggctctcctgaggggctctttcgagtaccaggggcagaagtgcagcgcggccagcagggcttacatcccctcatcggtgtgggatgcgataggggacgacctgtgctccgaggtctccaggatcaggatgggcgatgcccgggacttcacgaacttcatgaccgccgtcatcgaccagagggccttcgacaagatctccggatacatcgagagggccaaggaagacgattcctgcgaggtggtcgtcggagggggccacgacgactccaccggctggttcatcgagccgacgataatagtcacgaccaacccggcctccgagaccatgtgcgaggagatcttcgggccggtcctgaccgtctacgtctacgaggacg

SEQ ID NO: 220529 - DNA, 691 bp, Unknown
  Bacterial polypeptide expressing nucleotide sequence isolated from the Sargasso Sea
catggttcgtggtgcttttgagtatcaaggacaaaaatgttctgcgttgtctcgtgcctatatccccacatcaatttggccagagcttagtaaaagttatctcaaaaaagtaaatgaaattaaagttggagatgttgaaaacttttcaaattttatgaatgcagttatagataaagctgcatttgattcaattaaatcatatattgaaaatgcaaagaatgatgctgatgctgaaataatcactggcggagattatgatgaatcggtgggttattttatagaaccaactacaattttaacaaatgatccaaaatacacgacaatgtgtgaagaaatatttgggccggttttaacagtatatctttatgatccaaaaaaatgggaagaaacacttcatttagtaaatacgacttctccttatgctctcactggatgtgtatggggtaaggatagtgaagcaattaattttgctacagaaaaactaacccatgcagctggaaacttttatataaatgataaacctacaggggcagttgtaggtcaacaaccatttggtggtagtcgagcgtcaggaacaaatgataaagctggttctatttttaatttaattagatgggtttcgatgaggaccattaaggaaacctttgacccaccaaaagattttgaatatccgtttatgaatgatgagtaa

SEQ ID NO: 220530 - DNA, 952 bp, Unknown
  Bacterial polypeptide expressing nucleotide sequence isolated from the Sargasso Sea
tataatgaatttaacaattggactaatttatcaataaaaaggagatctgaattattattaaaagccgcctatttattaaagattaatagaggaaaacttatttatacgattgtaaatgatgttggaaaaattattactcaagcagatagcgaagtatctgaatcaatagattttattcattattatgttaatcaagcaataaaaagctgggaaattgatggtattaaatttaaatctaagggtcctgttcttgtaacaactccatggaattttccctgtgctatacctattggttgtatttgtgctgcattggttactggaaatacagttatttttaaaccggctccagaggcagaaaaagtaggttttgaaatagtgcaattattttggatggctggtataccgaaaaatgtcttacaatttgttgtttgcccagaagataaagtaggtatgagtctattaaaagattctcgtattaaagttttatctttaactggatcaacgaagacagcaaaattattccaaacatcaaacccttcagctcagttaattgccgaaacaggggggaaaaatactattattattagtaatcaggcagatattgatcttgccatcaaaggattagttgattcagcttttggtttttcaggtcaaaaatgtagtgcggcaagtttatgtatttgtcataaagatgtctatgagagtgattattttaaatcaaaattgaaagatgcggttactagcttaattgtgggattaagtgatgatgtaaaaacagatatttctcctttgatttctagaccaaacttaagattacagcgtacatttttacattgtgatgataatgaattttggttagtagaaccaaaacagagttcttataatcctcaactatggtctcctgggattaagtatggagttaaagcaggctcttttttcatcaaacagagtg

SEQ ID NO: 220531 - DNA, 499 bp, Unknown
  Bacterial polypeptide expressing nucleotide sequence isolated from the Sargasso Sea
tatcatatattttgaatttgctaaaaaatctaaagatgcaagtatactatctggtggaggctacgatgattcaaaaggatatttcattcaaccaactactattctgaccacagatccccattttaaaactatggaaaaagaaatttttggacctgtgctaacaatttatatttatgatccaaaaaattgggatcatgttataaatcttgttaattctacttctccgtatgctttaacaggctgtataatgggttatgaaaaaaaagcaatggatgaagcaaaaaatagattgatacactctgctggcaatttctatataaatgataagccaactggtgctgtagtaggtcagcaaccatttggtggtagcagagcttctggaacaaatgataaagcaggatctgatttgaatcttcaaagatgggtttcagttcgaactgtaaaagagacatttgatacaccaatagattatagatatccttttttacaagatgattga

SEQ ID NO: 220532 - DNA, 913 bp, Unknown
  Bacterial polypeptide expressing nucleotide sequence isolated from the Sargasso Sea
tctgccagaaggagttataaacttagtttcaggtgatccagaaatgataagtgaaatagctcttaaacattctgaattttcaggattacattttacgggatcaacttcagtatttagagatttgtggaagaaaattggcaataatatttctttatacagagattacccaagaattgtaggagaaacaggtggaaaagattttatcttttgtcacccaacagcaaatattgatgcaacttcgacagccatcataaggggagcttttgaatttcaaggtcaaaaatgctcagctgcatcaagaatatatataccagaatctatttctaaaaaattaattgataaagtaattgatcaaacaaaaactatcaaaataggttccccaattgactttaataattttatgacagctgtaattcatgaaaatgcttttgatagaatttccaattatattgattttgcaaaatcaagtgatgattgcgtaatattacatggtggcaactatgataaatctgttggatattttgttgaaccaactattttacttactaaaaatcatcaatttaaaacaatgcaagaagaaatttttggacctgttgttactatgtttatatataaagatgaagaatggctagaaatgcttgatattgttgataaaacatcagattatgctttaaccggagcttttatatctgaaaatgaagacagcattgatattgcattaaataaattaagatatagcgctggaaacttttatataaatgataagccatctggagctgttgttggtcagcaacccttcggcggctgtagagcatcaggcactgatgataaagctggttcaaaactaaatctattaagatgggtaagcccaagactagtcagcaggactcataatccgccgactaaatatcca

SEQ ID NO: 220533 - DNA, 793 bp, Unknown
  Bacterial polypeptide expressing nucleotide sequence isolated from the Sargasso Sea
ttggtcgatataaaacgtaccccaagaattgtgggggaaactggcggaaaagattattgtttagcacatgaatcttgtgatattgatgttcttgtaactgccatgattagaggagcgtttgaatatcagggacaaaagtgttctgctatgtctcgcgcctatattccaaaatcattatggccgaaggtaaaagaaaaatttatctctgaggtaaagaccattaaagttggctcccccaaagattttactaatttcatgaatgcggtaattgataaatcagcttttgatacaatttcaaattacatccaatttgcaaaagaacatgatgatgcagaaattgttactggcggcagttgtgatgactctttgggatatttcatcgaccctactgctattcttaccactgacccacaatttaaaacaatgaaagaggaaatatttggtccagtgctgactatatatctttatgataatgataaatgggatgaaacaatcagacttgtcgatacaacatcagaatttgggctaacagggtgtattattgctagtgatgatgaaatcataaagcaaactacaaaaaaactcactcactctgctggaaatttttatattaatgataaacctacaggagcggttgttgggcaacaaccatttggtggaagcagagcatctggcacaaatgataaggcaggctctgaattgaatttattaagatgggtatctgtaagaacaataaaagaaaactttgaacctcccaagaattatcggtatccttttcttgagaatgaataaa

SEQ ID NO: 220534 - DNA, 891 bp, Unknown
  Bacterial polypeptide expressing nucleotide sequence isolated from the Sargasso Sea
cgcccactcgagggattcgtcctctcaatcaccccgttcaacttcaccagcatcgccgccaacctaccgagcgcacccgcaatcgtgggctgcacctccgtctggaagccgagtaggaactcgtaccactccaactacgtcctgatgcagctgatgatggacgcgggacttcctccgggggtgattaacttcctcccaggctcgggagcggagatcacaggggcggccctgtccaatccggacttcgccggattgcacttcaccggctcgacatcgaccttccaggggctctggcaggagatcgccaaggcactgcccgacctgaggtcctaccctaggatagtgggcgagacgggaggcaaggacttcgtcgtggcccatccggactgcgaccatcggggcctgttggttgccctcctgaggggctcgttcgagtaccaggggcagaagtgcagcgcggccagcagggcgtacatcccctcatctgtgtgggatgcgataggggacgacctatgctccgaggtctccaagatcaagatgggcgatgcccgggacttcacgaacttcatgaccgccgtcatcgaccagagggccttcgacaagatatccggctacatcgagagggccaaggacgacgattcctgcgaggtggtcgtcggagggggccacgacgactccaccggctggttcatcgagccgacgataatagtcacgaccaacccggcctccgagacgatgtgcgaggagatcttcgggccggtcctgaccgtctacgtctacgatgacgacgacttcgagggggcactggagacgtgcgacaagggatccccgtacgccctcacaggatccatcttcgccaacaacgaggaagacgtccagagggcgttcgag

SEQ ID NO: 220535 - DNA, 706 bp, Unknown
  Bacterial polypeptide expressing nucleotide sequence isolated from the Sargasso Sea
gggcttttggtcgccctcctcagagggtcattcgagtaccaggggcagaagtgcagcgcggccagtagggcgtacatccccgcgtcggtgtgggatgcgatcggggacgacctgtgctcggaggtttccaagatcaagatgggcgatgccgccgacttcaccaacttcatgaccgctgtgatcgaccagagggccttcgacaagatctcaggctacatacagagggctagggatgatgatgcctgcgaggtggtcgtcggaggcggtcacgacgactctgccggctggttcatcgaaccgacaataatagtcacttccaacccggtctccgagactatgtgcgaggagatattcggcccggtgctgaccgtcttcgtctacgaagacgaagacttcgagggggctctggaaatgtgcgacaagggctccccttacgccctgaccgggtcaatcttcgccaacaacgaggaggacgtcaagagggccttcgacgcgcttcgcttcgcggcggggaacttctacatcaacgacaagccaaccggcgccgtggtggcccagcagccgttcggtggtgcgagggcaagcggcaccaatgacaaggcgggaggtccgctcaacctcctgcgttggatcagcccacgctccgtcaagcggaccctggacatccctcaggactggggttacccgttcatggagcctgagtgag

SEQ ID NO: 220536 - DNA, 855 bp, Unknown
  Bacterial polypeptide expressing nucleotide sequence isolated from the Sargasso Sea
atacagatcattagagggatttgtttttgctattgctccatttaattttacatctatcgcaggtaaccttcctgctgcacctgccctaatgggcaatgtttctttatggaaacctgcatcatcagctatacttgcttgttattaccttatggagatgtttaaagaagctggcttgccagatggtgtaattaatttcttacctggtgatggaaaaattgtcggggatccaatattaaataattctaacctagctggagttcatttcacaggatctactaaaacatttaatcatatatggaaaacaataggttccaatatagataattataaaacatatcctagaatagtcggagaaacaggtggaaaagatttttgtctagctcacagttcatctgatgaggaagttctcgttacagctatggtaagaggtgcctttgaatatcaaggtcaaaaatgttcggcaatgtctagagcctatatcccttcatccatttggccttcagttgaagataagctaattagtgaattagatacaattaaagttggatctccaagagactgttcaaattttatgaatgcagtaatagataaatctgcattcgataatattactagctacattgattatgcaatgaaagataatgatgcaaagataatttttggtggcggatgtaatgactctaaaggatattttatagagccaacagttattctaacaacaaatcctaattttaaaacaatggaagaggaaatcttcggcccggttttaacaatctttgtttatgaggatgaagattgggaagaaacaataaatttagttgatgccactagttcttatgctctaacagggtgtat

SEQ ID NO: 220537 - DNA, 1396 bp, Unknown
  Bacterial polypeptide expressing nucleotide sequence isolated from the Sargasso Sea
ggtaaacctagcgattgaatcttctatggacgcatgggatagttggtcaaaaatagaactaaatgagcgttgtgcaatttttaacaaagcggctgatcttttatcgacaaaatggcgagatactatcaatgctgcaacaatgttaaatatgagtaaaaatgtttatcagtcagaaattgatgcagcttgcgaaatgattgatttttttcgtttcaattcatggtatgcatatgaattatctaagcaacaaccaatgtattcatcagaatttgtaaaaaattcccttgagatgagacccttggaggggtttatttttgcagtttctccttttaattttgcatcaattggtggaaaccttccctcctccccggctttaatgggaaatgtagcattatggaaaccagcatccagtgcagttttgccagcttattacataatgaaacttcttcaagaagctggattaccagatggggtgattaatttcattcctggctcaggatcaaaaatcggtccacaagttatggatagtccaaatttagcaggaatacattttaccggctcaactactgtatttaaaggcatgtgggaaactattggaaaaaatattaacaaatataaatcctatccaagaattgttggtgaaacaggtggaaaagatttctgcattgctcatgaatctgcaaatattgaggttctgactacagcaatgattagaggagcttttgaatatcaaggtcaaaaatgttctgctatgtctagggcatatattccctcaagtatttggccgaccttaaaagatcttttattagatgaagtagaaaaaattacagtaggaagccctgaagattttacaaattttatgaatgccgtaattgatcgacctgcttatgaatctataaaagaatacgtagaaatctgtaagtcgtcatctgatgctgagataatttctggtggcaactgcgatgatactaaaggatattttatagaaccaacaatagttttgacatcaaatccaaagtttagaacaatgtgtgaagaaatatttggaccagtgctaactatctttacatatgaccctaaagactggtctaaaacattagatttaattgataatacatctgattatgctttaaccgggtgcgttatatcagataataaagatgctattttagaagctaaaaatacattaaatcatgcagctggaaacttttatataaatgataaacctacaggtgcagttgttggtcaacagccatttggaggaagcagggcatctggtacaaatgataaggctggatcaatgtttaacctaattcgctgggtctctatgcgcacgattaaagaagtcctagattcgcccaaagattatagatatccatttatggatgaatcgtaa

SEQ ID NO: 220538 - DNA, 1624 bp, Unknown
  Bacterial polypeptide expressing nucleotide sequence isolated from the Sargasso Sea
catgagcagcataccaaagcctattaacgaacccatacgaaactatgaaccgggttcaccagaaaaagcaagcttaaaagaaaaacttgcagagctaagtcaaaaagaaatagaaatccctcttattattggaggtcaagaaattcgaacaggtgatacgggaaaatgtatcatgccccataatcatggtcatgtattagcaacctttcatcaagcaggagaaaaagaagtaacgcaagcaattgaatcttctcaagctgcctggaaacaatggtccacgaccccattacaagaacgtgctgctattttccttaaaatggcagaattacttactgggccgtatcgtgatacaattaatgcagcaaccatgctcaatatgagtaaaaatgtgtttcaggcagaaatcgatgctgcttgcgaattaattgacttctggaattttaattgttggtttgcacaagaattatataatcatcaaccaatgtattcacctgagcctactaagaattccatggagcaccgatctctggaaggctttgttttcgcagtcactcctttcaattttaccagtattgctgcgaatttaccatcggcgcctgctcttatgggtaatgttgctatttggaagccagcaagtagtacagtatacccagcatatttcatcatgaaactttttaaagaagctggacttccagatggagttattaactttattccaggaagaggatctgtagtggggccattagtaatggatcatccaaatcttgctggcgtacactttactggatccacatctgtatttcagaacatgtgggaacatattgggggtaatatcaagcaatatgcgagttatccacgtattgtaggtgaaacaggtgggaaagatttttgcatagctcatgagtctgtaaataaagaagctttggtaacagcaatggttcgtggcgcatatgaatttcaaggacaaaaatgttctgcaatgtccagagcgtatattccttcatcaatttggtctgatatcgaagaaaaattactaacagaaatggctacaataaccatgggagatccaagtgatttctctaactttatgaatgctgtaattgacaaaaatgcatttgattctataaaagaattcatcgatgatgctgcacgcgcagatgatgcagaaattatttttggtggaaaatgtgatgattctattgggtattttattgaaccaacaattattatcactaaaaatcctatgtttcgcaccatgtgtgaagaaatttttggacctgttcttaccatatatatatatgattcttctgagtggaaagaaacactcaaattggttgattctacatccccttatgcattaacgggctgtgtcatggctaatgatactcatgcaattgcagaagcttctacgatattgaaacacgcagcaggaaatttttatataaatgataaaccaactggagctgttgtgggccaacaaccgtttggtggaagtcgcgcatcgggaacgaatgataaagctggttcaatgttcaacttagcaaggtgggtatctcaaagaactattaaagaaaactttgatccccctactgattaccgttatccatttatggaagaaaaataa

SEQ ID NO: 220539 - DNA, 1066 bp, Unknown
  Bacterial polypeptide expressing nucleotide sequence isolated from the Sargasso Sea
gccatttaattttacagcaatagcagcaaatttatgtgctgcgccagctttaatggggaatgttgttgtttggaaaccctctcaatcacaaatatattctgcccaagttattgtagagctttttaaagaagcaggcttgcctgatggtgtcgttaacatggtaactgtcggaggaaaagaagcgggagatgtaatttttaatcataaagaatttgcgggcttacattttacaggttcgacaactgttttcagaaacctttggaaaggaattggaaataatcttgaaaaatacagaagctatccacgaattgtaggagaaacagggggcaaagattttgttgttgctcataaaacagcaaagccatctcatgttgccactgctttatcaagaggagcatttgaatatcaaggtcaaaaatgttccgctgcatcaagagcatatattccggataatatatgggaggaggtaaaagaaattcttgtcaaacaggtttcttcttttaaaatgggctccccagaggacacgaataactttattaatgcagttattgatgccaaatcgtttaataacattaaagattacttagcttatagtaaggattctagtgaagcagaagtcattgttggtggaaactgttatggagacgagggctattttgtggaaccgacagtaattgtaacaacaaacccttcatttaaaacaatggtagaagaaatatttggaccagtattaaccatttatgtttacaatgccaataaatttgaagaaacattggatttagtcgattccacttcagaatatgcattaacaggagcaataatctctcaagatagagaagcgataaggttagcatcaaaaaagctggttaattctgcaggaaacttttatataaacgataaaccgactggtgctgttgttggtcagcaaccatttggaggtgctagaggttctggaacaaatgataaagccggggcatcgatgaatctattaaggtgggtttcagcaagaacaataaaagaaacatttgacactccttcagattataaatatccttttttaggataa

SEQ ID NO: 220540 - DNA, 868 bp, Unknown
  Bacterial polypeptide expressing nucleotide sequence isolated from the Sargasso Sea
tccttctttagcaggtgttcactttacaggatcaacaaatacttttaaccatatttggaaaacgattgggtcaaatattgatcaatataaaacgtaccccagaattgttggggaaactggcggcaaagattattgtttagcacatgaatcatgtgatattgatgttcttgttactgctatggtgagaggagcatttgaataccaaggacaaaagtgttctgccatgtcccgcgcctatattccaaaatcattatggcctgaggtaaaagaaaaatttatctctgaggtaaagaccattaaagtcggttctccgaaagattttactaatttcatgaatgcggtaattgataaatcagcttttgatgcaatttcaaattacattcaatttgcaaaagaacatgatgatgcagaaattgttactggcggcaattgtgatgactctttgggatatttcatcgatcctactgctattcttaccactgacccacaatttaaaacaatgaaagaggaaatatttggcccagtgctgactatatacctttatgatactgataaatgggatgaaacaatcgatcttgttgatacaacatcagaatatgggctgacagggtgtatcattgctagtgatgatgaaatcataaaaaaaactacaaaaaagctcactcactctgcgggaaatttttatatcaatgataaacccacaggagcggttgttgggcaacaaccatttggaggaagcagagcatctggtacaaatgataaggcaggctctgaattgaatttattaagatgggtatctgttagaacaataaaagaaaactttgagcctcctaagaattatcgatatccttttcttgagaaaaaataa

SEQ ID NO: 220541 - DNA, 1624 bp, Unknown
  Bacterial polypeptide expressing nucleotide sequence isolated from the Sargasso Sea
atggataaaaattttaaagcaattaacgaaccaattatagattttgaacctggttcagagcatagaaaattacttcttgaagagattgaaagacagtcaagcagacagaaagatattccgattatcatcaatggtaaagaaataagaactggaaatacaaaaccttgtacaaaacctcaagatcatggacatattttaggtcattatcatgaagcaggtcctgaagaaattcaaatggctatagattcttctttaaatgcatggaaaacttggtctaatacatctttagaagaaagatcaaaaatttttaagaaagttgcagacttaattgcaggtccatatagatataaaattaatgctgcagcaatgttagatattggtaaaagtgtttttcaagctgaagtagatgcgtcatgtgagttaattgattttttaaattttaatattgaatttgctcatacaatgcaaaattcttttactcctatatcgcctgatggaatgaaaaatgaattagaatttagacctttagagggctttgtttttgcaattgctccatttaatttttttagtattggtggtaatttagctatatcccctgctattgttggaaatacagtcctatggaaaccagccccaagcgctgtttactcagcttactatattatggaactttacaaagaagcaggtcttcctgatggagttattaattttattccaggtgatgggccaagcataggtgatcaagtattaagccataaagaattagctggtgtgcattttacaggatctacaaaaacatttaaacatctttggaaaaaagtatctaataatttagatatttatagaaattatccaaaaattgttggcgaaacaggtggtaaagacttttgtatagcacatgaatcagctgatattcaaggcttagtaacagcgatggttagaggagcttttgaatatcaaggacaaaagtgttcagctatgtcaagagcatatttacctaaatcaaaatgggcagaaattcacgaaaaactagtaagtgaaatcgaaacaattgatgttggaccgcctgaagattttaaaaacttcgtaaatgctgtcattgatgaaacagcatttgataaaattgcatcgtatttagactatgcaaaaacaagtaatgattgtgaaatactttgtggcggtggttacgataaatccaagggatactttgtagaaccaactgttattttggcaaaagatccacactttaaaactcttgaagaagaaattttcggtcctgtacttaccatttttgtttatgaaaacgaaaattgggatgaaacactggagttgattgataatacttctccatatgcgcttacaggctgtgttttttctgaagatagagatatagttgatgaagttagatctaaattgagattttcagctggaaatttctatattaatgacaaaccaactggtgctgttgttggtcaacaaccttttggaggaagcagagcatctggtacaaatgataaaggtggctcaatgttaaacttattgagatggacatctccaagaaccatcaaagaaacctttgaacctcctcataattacagatatccatttatggatgaagaataga

SEQ ID NO: 220542 - DNA, 1555 bp, Unknown
  Bacterial polypeptide expressing nucleotide sequence isolated from the Sargasso Sea
attacttttagaagaaattgaaagacaatcaagtagacaaaaagatattcctattatcattaatggaaaagagataagaacaggtaatacaaaaccatgtacaaaacctcaagaacatggacatattctaggtcattatcatgaagcaggtcctgaagaaattcaaatggctattgattcttcattagaagcttggaaaacatggtctaatacatctttagaagaaagagcaaaaatttttaaaaaagttgcagacttaattgcaggtccatataggtataaaattaatgctgcagcaatgctagatattggtaaaagtgtttttcaagctgaagttgatgcatcatgtgaattaatcgattttttaaactttaatatcgaatttgcctatacaatgcaaaactcttttactcctatatctcctgacggaatgaaaaatgaattggaattcagaccactggaaggttttgtttttgctattgctccatttaatttctttagcattggaggtaatctagccatctctcctgctattgtgggaaatacagtcctttggaagccggcaccaagcgctgtttattcagcttactacatcatggaactatataaagaagcgggtcttccagacggagttattaattttattccaggtgacggaccaagcataggtgatcaagtattaggtcataaagaattagctggagtgcatttcactggatctacgaaaacttttaaacatctttggaaaaaagtgtctgataacttagatatttacagaaattatccaaaaattgttggtgagacaggtggtaaagatttttgtatagcacatgaatcagctgatatacagggtctagtaacagcaatggttagaggagcttttgaatatcaaggacaaaaatgttctgcgatgtcaagagcgtatctaccaaaatcaaaatggaacgagatacaagaaaaactattgaatgaaatcaaaacaatagatgttggaccacctgaagattttaagaattttgttaatgctgtaattgatgaaacagcctttgataaaattgcctcttacttagattatgctaaagagagtaacgattgtgaagttctttgcggaggcggatatgataaatctaagggttattttgtggaaccaacggtcattttaaccaccgatccacactttaaaactcttgaggaagaaatatttggtccagtacttaccatttttgtatatgaaaacgaaaattggaatgaaacattagaattaattgataatacatctccatatgctcttacaggttgtgtgttttcagaagatagggatattgttgaagaagtaagatctaaattgagattttcagctggaaatttctatattaatgacaaacctacaggtgctgttgttggacaacagccatttggaggaagtagagcatctggtacaaatgataaaggtggctctatgcttaacctattaagatggacatccccaagaacaatcaaagaaacttttgaacctcctcataactatagatatccatttatggatgaagaatag

SEQ ID NO: 220543 - DNA, 1072 bp, Unknown
  Bacterial polypeptide expressing nucleotide sequence isolated from the Sargasso Sea
ccttttaactttacatccatagctggtaatcttccatgcgcaccggcgttaatggggaatgtcgcgatatggaagcctgcctcaagcgctgttttgccatgttactatttaatggagatgctcaaggaagctggcttacctgatggtgttattaattttctgcctggttcgggatcaaaagtgggagacccagtcctcaccaatccaaatctatctggtgtgcattttactggttcaacccagacttttcagcatatttggaagacgattggaaaaaatatcgaccgctacaaaacctatcctagaattgttggtgaaacaggtggaaaagatttttgccttgctcacgaatcagtgaacatagatcaacttgcaaccgctatgatcagaggtgcctttgagtttcagggccagaaatgttccgcaatgtcaagagcatatattccaaccagtatatggggaaagttgaaaacaacttatttatccgaattggggtccgtaaaagttggtaaccccagggattttaccaatttcatgaatgcggtaattgacaagaatgccttcgattcaattacggaatatattgaatacgcaaaagaatctcctgatgctgaaataatttctggcggaacatatgatgactccactggttacttcatagatccaactaccataattactacagacccaaactttaaaacaatggaagaggaaatttttggtcccgtacttactgtatatttatacgaaccctctgattgggaaaggacgatggatcttgtcgatcaaacatcaccatacgcattaactggttgtgtaatgggcaacgaccaatctgcaatcaaaaaggcaaaagatcgactaactcactcggcaggtaacttctatattaatgataaaccaactggagccgtagttggccagcaaccttttggaggtagtagagcatcaggtacgaacgataaagctggttccgaattaaatttacagagatggatatctataaggactatcaaagaaacatttgacactccgactgattacagatatccatttcttgaagaggattgat

SEQ ID NO: 220544 - DNA, 1624 bp, Unknown
  Bacterial polypeptide expressing nucleotide sequence isolated from the Sargasso Sea
atgaatcaaaaaaagtatgcagtaaacgaacctgtgaaatcttatgagccaggtagccaagagcgacataatatccagaaaaagtatgatgagatggcaaatcaatccattgatataccaataattattaatggtaaagaatacagaactgaggaaattggtgaatgtattatgcctcatgatcaccaaaatatcattgctacgtttcacaaagcaggtaaaaaggaagcagagcttgcaataaataacgctttagaagtttggaaaacatggtcaagaacgtcattagaagaacgaacagaaatctttaaaagagctgcagagttactacaggggaaatggcgggatacaattaatgctgcgacgatgcttaatcaaagcaaaaatgtttaccaagcagaaattgattctgcatgtgaattaattgatttttttaatttcaactctcaatatgctgaagaaatctataataaccagccattaatttcccctgatggagtaaaaaaccacctagaataccgtcctctagaaggatttatttttgctattacgccatttaattttacttcaatagctggcaatctaccctctgctccagcactcatgggtaatgttgcattatggaagcctgcatcaagcgctgtcctcccatgttactatttaatgaaaatgcttgaggaagcaggacttcctaatggcgttattaacttccttcccgggtctggaggaaaagttggcaatcccgtactgtcaaatccaaatcttgcaggagttcattttacaggttctacagaaacatttcagcatatttggaaatctatcgggaataacatcaataattataaaacctatccaagaattgttggtgaaactggaggtaaggatttttgtattgcccatgaatcagttgatattgaggaattatctaccgcaatgattcgtggggcattcgaatttcaaggccaaaaatgttctgctatgtctagggcctacatacctacaaatatttgggagcaactaaaaaaggtatacctatctgaaattgaaactattaaggtaggttcccctagagacttcagtaattttgtaaatgcagtaatagataagaatgcatttgattcaataacgaattacattgaatttgcaagaaatgctgcatcagcagatattatttctggaggtagctatgatgatagtaagggatattttattgagcctacgacaatattaacaactgacccttattttaagaccatggtagaagagatcttcggaccagtattgactatttatctttataaccctgaagattggaattctactcttgatctagtagataagacttcaccttatgccctaacaggttgtgttatgggaaaagataaaaatgcgattcaaaaagcaaaagaccacctgacacattctgctggtaatttttatataaatgataaaccaacgggtgcagttgtagggcaacaaccttttggtgggagtagggcctcaggaacaaatgataaagcaggatcagaactaaatctgcaacggtggatatctattaggactgttaaagagacatttgatccaccaaaggattatcgatatccttttttaaatgaggattagt

SEQ ID NO: 220545 - DNA, 1010 bp, Unknown
  Bacterial polypeptide expressing nucleotide sequence isolated from the Sargasso Sea
taatgttgtttatgggaaaccaagcgataatcaagtacttactgcaaaaataccatgggatattttaaagaaagcaggtcttcttgatggagtaattaatatggttactggagaccctgaaatgataactgatattgctcttaaacatcctgaattttctggactacatttcactggatcaacatctgtttttagggatttatggaaaaaaattggaaataatatcaatctgtacagagattatccaagaatagttggagaaactggtggtaaagattttattttttgtcacccaagtgcaaatattgatgcaacatccacagctataattagaggtgcatttgaataccaaggtcaaaagtgttctgcagcatcaagaatatatatcccaaattcgatttctaaaaatctaattaacaaggttattgatgaaacaaaaaccattaaaatgggctcgcctattgattttaataatttcatgacagcagtaatacacaaaggtgcatttgaaagaatatcaagctatatagattatgcaaaatcaagtgatgattgtgagattctatgtggaggtaattatgatgatacagtaggatattttgttgaacctacaattatactaactacgaaccaccaatttaaaacaatgaaagaagaaatatttggacctgtagttacactatatgtatatgatgatgaaaattgggaagagatgcttgacattgttgataaaacatctgattatgctttaacaggtgcatttatatctcaagacgaggaaagtattgaacttgcacttaataaattgaaatacagcgcaggtaatttttatgtgaatgataaaccatcgggagctgttgtaggtcaacaaccttttggtggatgtagggcttctggaacagatgataaagcaggttcaaagcttaatttattgagatgggttagtcctaggttagtgagcagaactcataatcctccaactagctatccatatgactatatggattagg

SEQ ID NO: 220546 - DNA, 806 bp, Unknown
  Bacterial polypeptide expressing nucleotide sequence isolated from the Sargasso Sea
catggtttcttacgcacaaggtatcgatgcattaaaccagtccctgtcggaactgcgtgatattgatgtatcttttgaattctttccgcctaaaacggaagccatggaacagaccctgtggaagtcagttgaacgtctcgcgccactaaagccaagctacatgtcggtaacctacggcgcgaatagcggtgagcgtgacagaacccacgacgttgtaaaacgcattcagcagcaaaccggtgtcgcggcggttcctcacttgacctgtgttgatgctagccgtgatgagcttaagcaaattgcaaaagactactgggactcaggtattcgccgtattgttgcgcttcgtggcgatttaccgccaggagtagaaaagacagagatgtatgcctctgatcttgttgccttgctaaaagacgttgccgattttgatatttctgttgctgcctatccagagaagcaccctgaagcaccaaatgcgcagtttgatttactaaaccttaagcgcaaagcagaagcaggtgccacagaagcgataacccagttctttttcgatacgagtgtgtaccttcgatttagagaccgtgcagccgcagcgggtgtcgacttagatatcgttccgggtattttgccggtaaccaactaccaaacactggtgaaatttgcggggttcacaaatgttcatgtgccgggatggttacacaaaatgttcgacggccttgatgccgacgaccaagccacacgtaacctaataggtgctaacatcgccatggatcaggtaaaggtattggctaaagaaggggtaa

SEQ ID NO: 220547 - DNA, 895 bp, Unknown
  Bacterial polypeptide expressing nucleotide sequence isolated from the Sargasso Sea
ataattttaaatatcgagagaattatggaagaaaaattaaaaataattactaagttacaaaaaaactcaaaccctaatgtttcctttgaattttttccacctaaatctcaacaaatggaaatacaattatggaattcaattaatagattgatgcctttagagtctaaatttgtttcggtaacttatggtgctggtggtagtacaagagaaagaacacataacacagtagtcaaaattttaaaagaaacaaaattaattccagctgctcacttaacatgtgtagattctagtaaaagtgaagttaataaagttgccacctcatattggaattcaggtgttaggaagatagttgctttaagaggagattctccaattaaaggaaaaaattttgagcctcaccctttgggatataataatgcagctgacttagttggtggtttaaaaaaaattgcagattttgatattattgttgcctcttatccagagattcatgtggaatcaaaagatcttaaatctgatctcgataatttgaaaaagaaaattgatgcaggtgcttctcaaactataactcaattattttttgatgtagatatttatctcaaatggttagataaagttcgttctgcaggaatatctataccagttatacctggtattatgcctattacaaattttaataatgctgaaaagttttgtaaaatgtgtggtgcatctatacctatttggttaaaaaaaatttttcaagggcttgatgatgattctgaaactagaaaattgattggagctactatagctgcggagcagtgcagaattcttcagtctgaaggtataaatgattttcatttttatactctaaatagagctgaccttacatatgctatttgtcatattttag

SEQ ID NO: 220548 - DNA, 598 bp, Unknown
  Bacterial polypeptide expressing nucleotide sequence isolated from the Sargasso Sea
tgttagatctggcgaacattactggaaatcggggatccgcgacatagtggcactgcgtggcgatttgcctgcgggcagcccaaaaccgactcgctttgcggcggatttagtgcgtttactgcgctcagtggccgactttgacatttcggtcgccgcttaccctgaagtacatccagatgcggctaacgctcaggccgatttgattaaccttaagcgtaaaatcgatgccggtgcgagccgtgctattacccagtttttcttcgatgttgaatcttacctgcgttttcgcgaccgctgtgttgcggcagggattgatgtcgaaatcgtccccggcattttacccgtgactaacttcactcagttaaaacgcttcgcgggtatgaccaatgtgagcctgccgagctggctgcataagcaatttgatggcctagagaatgatgcgggaacccgtcagctggtgggggctaacgtggcgatcgatatggtcaaagtgttatcccgtgaaggtgttaaagatttccacttctacaccctcaaccgcgcagagctgacctatgcgatttgccataccttaggggttcgcccaaaggcggtataa

SEQ ID NO: 220549 - DNA, 835 bp, Unknown
  Bacterial polypeptide expressing nucleotide sequence isolated from the Sargasso Sea
tatggatatttcttttgaattctttccgccgagctctgaaacggctgaaattgtattatgggactcaataaagctacttgaacccttaaatccaagtttcgtgtctgtaacttatggcgctggaggaactacacgagatagaacacataattgtgtaaaaaagattattgacgaaactaccctagagcctgcagctcatctaacttgtgtcaactctactaaagatgaaataaaggaaataacagatagatataagaaaataggcgttaaacatattgttgcagttagaggggacatgccaaattttgataattttaaaccgcaccctaaaggttataaaacatccattgatttagttaaaaaccttagtgaacaaaactttaatgtaactgtaagtgcttatcctgagaaacatccagacgccctatcatttgatgaggatattgaatttttgaaaagaaaaattgatgcaggtgcaactcaggcaattactcaattctgttttgattttcaaattattctcgcttatcgagatctacttcaaaagcataatataaatattcctataatacctggattaatgccaactactaattttaaaggtattcagaaaatgtctaaacagtgttcgacatctataccaaaatggcttgaaaataaatataatggtttagaagacaggcttgatgaaagaaaaaaagtttctaaagaagttgcgattgatttttgtcaaaaacttatcagcaatgactttagggcaattcacttctatacattaaaccagtctgagttaactctatcagtttgccaaagtttaaatattagtgatgaataa

SEQ ID NO: 220550 - DNA, 835 bp, Unknown
  Bacterial polypeptide expressing nucleotide sequence isolated from the Sargasso Sea
atgagcgctgatccaactgtcagttttgagtttttcccgccgagggatgaaatcggagaacaaaaactgatcaacgaggtactccctcatctggcgatgttcaatccagaattcgtttctgtgacttatggcgcaggaggatcgacaaaaaaaggcacattttccgttattagaaaattgcggagccaaaaattagacccaatccctcatttgtctgtgggtaatgatagcgatcatgagattatcgaagtgatacatgcctatcgaaagctaggggtaactaatattttagcgttaagaggagatgcgccatcaggctatggagcaagccagataaagaatgcagcttatctcgttcgcttaattcgaaaagaattcggcgatgatctaggaatcctagtcgctgcttatcccgagattcaccctgagtcagaaactctcgagatagacatttccttttttaaagaaaaagtagaggcgggggccgactccgcaataacccaatttttctacaacccagatgcgtatgacaattttttaaacgttattgacaaaaaaaatattcggatcccaattgtccctggtgttatgccgatacaaaacgtcgatggtctactaagaatgtcaaagcaatgcaaagcggaaatacctcgctggctggaatattctttaaaaaatcagcaggaagacctacaaaaatttgctatcgaactagttactcggctctgtgacagattgatagaacttggggcacctggtttgcacttctataccctgaaccgctggggcgcggtgtctagaatctgtaaaaaccttaatctgcagcgtgaataaa

SEQ ID NO: 220551 - DNA, 835 bp, Unknown
  Bacterial polypeptide expressing nucleotide sequence isolated from the Sargasso Sea
tatggatatttcttttgaattttttccgccaaacactagtcaggcagaaacagtgttatgggactcgattaaactactcgaaccccttaaacctaattttgtatctgtgacatatggggctgggggaactacacgaaatagaacgcacaattgtgtaaaaaaaataatcgaagaaacaaatcttgagcctgcagctcatttgacatgtgtaaactcatcaaaaaatgaaataaagctaataactgacgattataaaaaaataggagttaaacacattgttgctcttagaggagatatgccaaattttgaaaattttaaaccgcatccaaatggttataaatcatccattgatttagtgcataatttaagtcaggagaactttattgttactgtaagtgcttatcccgaaaaacaccctgattctggatcaatagaagaagatatcgaattcttaaaaagaaaaattgatgctggagcaactcaggctattactcaattttgttttgattttgaaattatacttgcttatagagacctacttcaaaaaaataatataaacatacctataattcctggaataatgcctactactaactttaaaggggttaagaaaatgtctaaacaatgttcgacctcaataccaaaatggattgaaaaaaaatacaaaggtttagaaaataatcttagcgaaaggaagaaagtagcaaaagaaattgctatagatttttgtcagaaacttatgattaatgactttaaagcaatacacttttatacattaaaccagtccgaattaactctctcagtttgccaagatttaaatattagttatgaataa

SEQ ID NO: 220552 - DNA, 1618 bp, Unknown
  Bacterial polypeptide expressing nucleotide sequence isolated from the Sargasso Sea
tataacttggggagcaggtggaagtactgctgatagaacgctggatatgagcaaaactattcaaaaatattttggtttagatgttatgatgcatcttacatgtactaatatgtctatagacttaattaacagtgttcttttagaagctaaaaaaaataatatttataacatattagctctaagaggagatcctccagaaggaagtaaagaatggcaaaagaaaaatcaagcctttaattatggagctgatttagtccgttatatcaggaaaaattttgatgacacttttttcttggcagttggaggatatcctgaaactcatcaggaacaaactgatccgaacctggatattcaatatttaaaagagaaagtagatgctggagttgatatggttgttacgcagctattctatgatatagacaaatttttaacttttcgagataaatgtatatcaaatggaatagatgtgccaattattccaggtataatgccaattcacaattatgctagatttaaaaaatttactcagttttgcaacgtaaaaattcctaatagtattattaaaaaaattgaaccaataaaaaatgatgattcaagtgtaattaattatggtattgaacagggcgccacaatgtgtgaaaaacttataaaagaaggagtccctggattacatttttatactctcaatctagagcattctgtcaaagaaattttaaattctattggacttgtttcagatgaaaaagcaaatagagatttaccctggagacaatcttcagatcaaaaccggaaatcagctgaagatgtccgtccaatattttggagcaatcgtccaataagctatcttactcgtacagaaaactgggatgactttccaaacggacggtggggggatataagtagccctacttttggtgaactaaaccaatatcatgcaataagagctggatcaaaaattaatgaaatcagaaagaaacggaagagaatttggggtgaaccgaagtcaataaaagatatatctaatgtttttgtatctttttgtaagggtgatatcaattcattgccgtggtgcgaaacaaagcttgccattgaaagtgaacatatttctaaagagttagtaactttaaataaagcggggtgttttactattaattcacaaccaaatgtaaatggaatctcttcagctgatcctaattttggttggggttctgaagatggaatggtttatcaaaaagcatatttagagttttttacttctaaaaataatctagatgcgatactagaaaaaattaaaagtaataagaatatttcttatcaagctgttaataaatctggagatataatttctaatgtaaaaagagataatgtaaacgttgtgacttggggagtgtttccaggagagaaaataaaacaacctacaatagttgatgctatgtcttttatgatttggaaagatgaagcatttagtttatggataaatgattgggcatttatctatgaaaaagattcaatttcttactcaataataaataatatttatgaaaactattttttggtaaatatagttgataatgactttatttctagtaatatgattaagcagttacttgaaaaatga

SEQ ID NO: 220553 - DNA, 835 bp, Unknown
  Bacterial polypeptide expressing nucleotide sequence isolated from the Sargasso Sea
atggatatttcttttgaattctttcctccaagctctaataaagctgaaactgtattatgggaatcaattaaaatacttgaacctttaaagcctaattttgtatcagtaacttatggcgcaggaggcactactcgcgaaagaacacataattgtgtcaaaaaaataattgatgaaacaaatcttgaacctgcagctcatctaacatgtgttaactcctctaaagatgagataaaagaaataactgatagttataaaaaaataggcgttaaacacatagttgctcttagaggggatatgccaaactttgaggattttgaaccacatcctaaaggttataaatcatccattgatttagttaaaaatttaagtcaacaagacttcaatgttactgtaagcgcatatcctgaaaaacacccagatgcctcatcatttgatgaagatatagaattcttaaaaagaaaaattgatgcaggtgcaactcaggcaattactcaattctgttttgattttcaaatcattctcgcttatcgagatctacttcaaaagcataatataaacatccctataatacctggattaatgccaactactaattttaaaggtattcagaaaatgtctaaacagtgttcaacatctataccaaaatggcttgaaaataaatataatggtttagaggacaggcttgatgaaagaaaaaaagtttctaaagaaattgcgattgatttttgtcaaaaacttatcagcaatgactttagagcaattcacttctatacattaaaccagtctgagttaactctatcagtttgccaaagtttaaatattagtgatgaataat

SEQ ID NO: 220554 - DNA, 832 bp, Unknown
  Bacterial polypeptide expressing nucleotide sequence isolated from the Sargasso Sea
catgaacccgatcgaactttcattcgaattcttcccgccgaaaacgcaggaaggcgtcgacaagctgcgcgccacccgcgcgcagcttgcgccactcaagcccaagttcgtgtccgtcacgttcggcgccggcggctcgacgcaacagggcaccctcgataccgtcgtcgatatggcgaaggaagggctcgaagcggcgccgcacgtgtcgtgcatcggctcgtcgaaagagagcctgcgcgcgatcttgaacgagtatcgcgcgcatggcatccgccatatcgtcgcgctgcgcggcgatctgccgtccggtatgggcgaagtcggcgagttgcgctatgcgtcggaactggtgagctttattcgcgccgagtttggcgactggttctgggtcgaagtggccggctatccggagtaccacccgcagtcgcgctcgccgcgtcacgatctggaaaatttcgcccacaaggtgaaggcaggcgctaattcggcgattacgcaatatttcttcaacgcggacgcctatttccgtttcgtcgacgacgcgcgcaagcttggcgtcgacgtgccgatcgtgccgggcatcatgccgatcacgaacttctcgcagctgatgcgtttctcggagatgtgcggcgcggaagtgccgcgctggatcgcgcgccgtctggaaagcttcggcgacgaccgcgagtcgattcgcgcgttcgggctggatgcggtgacggacctgtgccagcgtctcatcgacgcgaaagtaccgggtctgcacttctacacgcttaatggggcggcggcgaccaaggccatctgcgaacggctgggcgcttga

SEQ ID NO: 220555 - DNA, 898 bp, Unknown
  Bacterial polypeptide expressing nucleotide sequence isolated from the Sargasso Sea
atgggatttcacagcgcacgtcaggttgaggcactcaaccagagtctggcagatttgagtggcgacatatcggtcagtttcgagttttttccgcccaacagcgaagggatggaaaataccctgtggcaatccatcgagcgcctgaaagtgctggagcccaagtttgtgtcggtgacctatggcgccaactcgggtacccgggatcgcacgcacaaggtgatcaaggacatcaaggagcggaccggtctgatcgccgcgccgcacctgacctgtatcgacgccagccgcgacgagctgcgcaccattgctcgcgattactggaacagcggtatccgccatatcgtggcgctgcgcggtgacctgccccaggggctggagaagccggagatgtatgccaccgacctggtggctctgctcaaggccgaagcggacttcgatatttcggtggccgcctacccggaagggcacccggaagcgcgcagtgcgcagtcggatctgctcaatctcaaacgcaagatcgatgccggtgccaaccgcgccattacccagttcttctttgacgtcgagacctacctgcgctttcgggatcgctgcgccgccatcggcatcgatgccgaaatcgtgccggggatcctgccggtctccaactaccagaccctggccaagtttgccggcttcaccaacgtgaagatcccgcgctggatgcatcagcgcttcgaagggctggatgatgatcagatgacccgcaacatggtgggggccagcatcgccatagatcaggtgcgggtgctgagtcaggaaggggtgaaggatttccacttctataccctgaaccgctccgaactgacctacgccatctgccataccctgggggtgaggccgaaaggccagccgtaac

SEQ ID NO: 220556 - DNA, 859 bp, Unknown
  Bacterial polypeptide expressing nucleotide sequence isolated from the Sargasso Sea
cctgcaggatgtggcaggcaaggtcaacgttagctttgagttttttccgcctaaaacagaacagatggaaaacactttatggcaatcgattgaacgtttagcgcctttggcaccttcttttgtttctgtgacttatggtgccaactcaggcgaacgtgaccgtacccacgacattattaaatcgattaaacaacgtaccggcttaatagctgcaccgcatttaacttgtgtggatgccagccgtgctgaacttgagcgtattgctaaagactattgggacaatggcattcggcatattgtcgctttgcgtggtgatttaccgccaggcaataaagaaaaaccagctttgtatgccgcggatttagttgaaattttacgttcagtggctgactttgatatttcagtggcggcttaccctgaagttcaccctgaatcacccaatgcgcagtttgatttactgaacttaaaacgcaaagtcgatgctggcgcgtcccgtgctattacccagttcttttttgaccctgaaaaatacttacgttaccgcgaccgctgtgctgctattggtatagatgtagaaatagtaccgggcattttgcctgtgaccaacttccagcagctgcaaaaattcgccactatgaccaatgtggctataccaagctggatgaataaggcctacgaaggactggagcaggatgccactacccgtaaccttgtggccgccaacatcgccatggagatggtcaaagtattaagccgtgaaggcgtgaatcacttccacttctacactttgaaccgcagtgaactgacttacgctatttgccatttattgggtgtacggccgcagagtgccattgcctga

SEQ ID NO: 220557 - DNA, 502 bp, Unknown
  Bacterial polypeptide expressing nucleotide sequence isolated from the Sargasso Sea
tatgtatgcttctgacctggtgacgctactgaaagacgttgcagactttgatatctccgttgcggcttacccggaagtgcacccggaagcgaagagcgctcaggccgatttgctgaacctgaagcgtaaggttgatgccggtgcgaaccgggcgatcacccagttcttcttcgatgtagaaagctatctgcgttttcgcgatcgctgcgtgtctgcgggtatcgatgtggaaattattccgggtatcctgccagtctccaactttaagcaggcgaaaaaatttgccgacatgaccaacgtccgcattccggcgtggatgtcgaccatgtttgatggtctggatgatgacgcggaaacccgcaagctggtgggcgctaatatcgccatggacatggtgaagattctcagccgcgaaggggtgaaagattttcacttctatacccttaatcgtgccgagatgagctacgctatttgtcacacactgggtgtaagaccgaactaa

SEQ ID NO: 220558 - DNA, 895 bp, Unknown
  Bacterial polypeptide expressing nucleotide sequence isolated from the Sargasso Sea
atggcttttcatcacgcacaacattcacattcgctaaaccaaagtttgtctgaacttaatggcgatattaatgtttcttttgagtttttcccgccatcaacccccgaaatggaacagatcctgtggaactctattcgtcgtttagagccgctgaatcctaaatttgtgtctgtgacctatggggcaaactcgggcgtgcgtgaccgtacccacggtgtgattgaacgtattcaacaagaaaccaacctagttgctgcgccgcacttaaccttagtggatgcgagtgatgaagagctgttagatctggcaaagcattactggaaatcgggtattcgcgatattgtggcgctgcgtggtgacttgcctgcgggcagcccaaaaccgactcgctttgcggtggatctagtgcgtctgctgcgctcagtagctgactttgatatttcggtcgccgcttacccagaggtgcacccagatgcggctaacgctcaggcggatttgattaaccttaagcgtaaaatcgatgccggtgcgagccgcgctattactcagtttttcttcgatgtggaatcttacctgcgtttccgtgaccgctgtgttgcggcggggattgatgtcgaaatcgttcccggcattctgcccgtgactaattttacccagttaaagcgttttgcgggcatgaccaatgtgagcttaccaagctggttacataagcagttcgatggccttgaaaatgatgccggaacccgtcagctggtgggcgcaaacgtggcgatcgatatggtgaaagtgttgtcccgcgaaggggtgaaggatttccacttctacaccttaaaccgtgcggaattgacctatgcgatttgccataccttaggggtgcgcccaaaggcggtataac

SEQ ID NO: 220559 - DNA, 895 bp, Unknown
  Bacterial polypeptide expressing nucleotide sequence isolated from the Sargasso Sea
atggcttttcatcacgcacaacattcacattcgctaaaccaaagtttgtctgaacttaatggcgatattaatgtttcttttgagtttttcccgccatcaacccccgaaatggaacagatcctgtggaactctatccgccgtttagagccgttgaatcctaagtttgtttcagtgacctatggtgcaaactcgggcgtgcgtgaccgcacccacggcgttattgaacgtattcaaaaagaaaccaatctggttgctgcgccgcatttaaccttagtggatgccagcgatgaagagctgttagatctggcgaagcattactggaaatcggggatccgcgacatagttgcactgcgtggcgatttgcctgcgggcagcccaaaaccgactcgctttgcggcggatttagtgcgcctgctgcgctcagtggccgactttgatatttcggtcgccgcttaccctgaagtgcacccagatgcggctaacgctcaggccgatttgattaaccttaagcgtaaaatcgatgctggtgcgagccgtgctattacccagtttttcttcgatgttgagtcttacctgcgtttccgcgaccgctgcgttgcggcgggaattgatgtcgaaatcgtccccggcattctgcctgtgactaactttacccagttaaaacgtttcgcgggcatgaccaatgtgagcttaccgagctggttacataagcagttcgatggccttgaaaatgatgccggaacccgtcagctggtgggcgctaacgtggcgatcgatatggtcaaagtgttatcccgtgaaggtgttaaagatttccacttctacaccctcaaccgcgccgagctgacctatgcgatttgccataccttaggggttcgcccaaaggcggtataac

SEQ ID NO: 220560 - DNA, 884 bp, Unknown
  Bacterial polypeptide expressing nucleotide sequence isolated from the Sargasso Sea
tatgagcttttttcacgccaatcagcgggaagccctgaatcagagcctggcagaagtgcagggccagattaacgtgtcctttgaattctttccgccgcgcaccagtgaaatggagcaaaccttgtggaagtccatcgatcgcttaagcagcctgaagccaaagtttgtctcggtgacctatggcgccaactccggcgagcgcgatcgtacccatagcatcattaagggtattaaagagcgtaccggtctggaagcggcaccgcatctgacctgtattgacgccagccgcgatgaactgcgcgcgatcgccgaagactactggaacaacggtattcgccacatcgttgccctgcgcggcgacctgccgccgggtagcggtaagcctgatatgtatgcggcggacctggtgacgctgttgaaagaggtcggagattttgatatttccgttgcggcctatcctgaagttcacccggaagccaaaagcgcgcaggccgatctgctgaacctgaagcggaaagtcgaagccggcgcgaaccgcgcgattacccagtttttctttgacgttgaaagctatctacgctttcgcgatcgctgcgtgtctgccgggatcgatgtcgaaattatcccgggcatcctgccggtttctaacttcaaacaggcgaaaaagtttgccgacatgaccaacgtgcgtattccaacgtggatgtcaaaaatgttcgagggtctggataacgatgcggaaactcgccagctggtcggtgccaacattgcgatggacatggtgaaaattttaagccgtgaaggggtgaaggatttccacttctacacgctgaaccgtgccgagatgagctacgccatctgtcacaccctgggcgtgcgtccgg

SEQ ID NO: 220561 - DNA, 508 bp, Unknown
  Bacterial polypeptide expressing nucleotide sequence isolated from the Sargasso Sea
catgaagcctgaagtagtgctggttgttgccgttgctgccaacggagttataggaatgacgggggggcttccctggcatctaccccaggatctctccagagtaaaggcgattaccatgggaaagccattgatcatgggacgaaaaacctatgaatctattggacgaccgctccctggcagaaagaccatagttataacaagggctaagatatcgtttcccccggaagttaaagttgtgaaaagtttcggttgcgctgtaagatatgcagaagagtatgcgaatgatatgggggtggacgaaatagttgcttttgggggtgcgcgggtctatgaatctgctatcccaattgcaaaaaaaatttataaaactgaagttgacttgcatccagatggcgacacattttttcctgaatataaaagggatgaatggcgtgaggttgccaggacagattttgctgcacaaaataactcttttgcttatagttacgtgcaactggaccggatttaa

SEQ ID NO: 220562 - DNA, 437 bp, Unknown
  Bacterial polypeptide expressing nucleotide sequence isolated from the Sargasso Sea
gatgaaaactatctcccatcttgttgctgtttcaaatgatcttgtgattggggtggataatgatctgccatggaatttgaaagatgatcttgctcattttaaaaaatatactctcaataaaataatcatcatgggaagaaaaacatatgagtcaattgggagacctcttcctaatcgaataaattatgtaatatctagaactctaaaaaaaattgatggtgcttatgtatttaataatttagaaaatgctatgaatagtgccgaaaagcataacaagaaagaaaatcaaaataatgaaataataattattggtggtggttatcttttcaaacagacctcatcttctgtaaataagcttgtcattactagggttgactgcaatgttaaaggagatatctattatccaaaaattgatatgtctaactggaagaaatttc

SEQ ID NO: 220563 - DNA, 577 bp, Unknown
  Bacterial polypeptide expressing nucleotide sequence isolated from the Sargasso Sea
atgcgcgcggaaccggcgcgtgccgccgttccggtaaaatcgacgccattccggttcttctttcccccgaccttcatgacgacgttgaccctgatcgtcgcgcgtgcccgcaacggcatcatcggccgcgacaaccagttgccctggaaacttcccgaggatctggccttcttcaagcgcacgacgatgggcgcaccgatcgtgatgggccgcaagacccacgagtcgatcggccggccgctgccgggccgccgcaatatcgtggtcacgcgtgacgcgacgcgtcgcttcgacggctgcgacacggtcacgtcgctcggcgatgcgctgacgctcgccgcgcgcgacggcgtgcccgaggcgttcctgatcggtggcgcgcagctctacacggaaggtctcgcactcgccgacaagctggtcgtcaccgagatcgatgccgacttcgacggcgatgcgtcgttcccggcacccgacgccgcgcagtggcaggaagtgtcgcgcgatgcgcatcaggcggccgcgccgaatacgttcggctatgcattcgtcgtgtacgagcgcaagcgcggctgac

SEQ ID NO: 220564 - DNA, 487 bp, Unknown
  Bacterial polypeptide expressing nucleotide sequence isolated from the Sargasso Sea
aatgaagataattcttattgcagctttagataaaggtagagttataggtagcgaagggtctatcccttggaacattcaagaggacctcaattactttaaagaaaaaacaacaaataaagccataattatgggcagaaagacttatgagtccattggaaggcctttgccaaatagattaaatatagttatgactagatcaatagaagaaataaaaggggtaaaaattgcgttagataaagaaaaagctttagaagaagcaaaaagattttcctcagaaatttttatcatcggaggggaattcatttataaagaatttatggaattggcttctgtgatgcttctcacagagatagatttaaagactaagggagatgctttctttcctaaatggaataaatctgaatggaaagagacttcaagacattcaagaatagatgttttggagaatataagttacgattttgttagatacgaaaggaaaaattag

SEQ ID NO: 220565 - DNA, 484 bp, Unknown
  Bacterial polypeptide expressing nucleotide sequence isolated from the Sargasso Sea
catgcgcattgctatgatagccgcgatggcaaacaatcgagtcatcggaaaagacaataaaatgccatggcatctgccagaagatttacgccactttaaagccatgaccttaggcaaacctgtggtgatggggcgtaaaaccttcgaatccattggtagaccccttcctgggcgccacaatattgtgatttctcgccaagcggatttgcagattgaaggcgtgacctgcgtgacctcatttgaagacgctaaactggcggctggtgattgcgaagagttagtcgttattggtggggggcaattgtatcaacaattattacctcaggccgacagactttacctgacgcaaattagcttagaggttgacggtgatacctttttccccgcatgggatagcgataaatggcaagaaaccgaatcgctcactagtataaatgctgatgggctggaatatcgctttatcaatttggcaaaaaaatgttaa

SEQ ID NO: 220566 - DNA, 484 bp, Unknown
  Bacterial polypeptide expressing nucleotide sequence isolated from the Sargasso Sea
catgcgcattgctatgatagccgcgatggcaaacaatcgagtcatcggaaaagacaataaaatgccatggcatctacccgaagatttacgccattttaaagccatgaccttaggtaagccagttgtgatgggccgtaaaacctttgaatcaatcggtcgacctttacctgggcgtcataatattgtgatttctcgccaagcggatttattgatcgagggcgtaacctgtgtcacatcatttgaagctgccaaagaggcggctggcgattgtgaagagttggtggtcattggcggtggacaattgtatcaacagctattaccccaagccgataggctctatctaactcaaattaacttagacgttgaaggtgatacctttttccctgcttggaaaaacgatgagtggcaagaaaccgaatccgtagcagctataaatgctgatgggctggaatatcgctttatcaatttggcaaaaaaatgttaa

SEQ ID NO: 220567 - DNA, 505 bp, Unknown
  Bacterial polypeptide expressing nucleotide sequence isolated from the Sargasso Sea
tatgattatctctgcagtagttgcaatgaattccagcttgctcattggaaaggacaacgatctcccatggaaattaaaagatgatcttgaacactttaagacttatacgcttggtaagccaataattatgggtagaaagacttatgaatcaattggaagacctcttcccgatagacttaatgttgtggtttctagaactatcaatgaaatagataatcttatcactgttacaagtctcaagaaggcaataaatgaagcaagaatttattgtgaaagtcatggacagaatgaaattgtgttgataggaggagcagggatatttaaagaaggtcttaaaatattaaacaagctagtcatcacatgggttgatgcagatgatcttgagggtgatgtctattttcctagttttaatatcaatgagtggaaagaaatagactcaaaggatttttctcgttcggcagataaccagtttgattttactgttaaagaatacctgaaattatga

SEQ ID NO: 220568 - DNA, 490 bp, Unknown
  Bacterial polypeptide expressing nucleotide sequence isolated from the Sargasso Sea
tatgaataatttatcaataattgttgcttattcaaaaaatagagcgattggaaaaaacaatcaacttccttggaagctttcagaagatcttaaaaattttaaaaagattacaatgggtaattcaataataatgggtagaaaaacttttgaatccattggttttatacttaagggtaggcaaaatattgtgatatcaaaaacttcaaaatttcagggtgttacaatgtcttcatcaattactgatagcattaataaagcaaaaaaaagcaaagaaattttttttatcggtggccaggatatttttgaacaaacaatctcgcttgtagataaaatttacttgactagaattaatgaagaaatcgatggtgatagatttttcccagaatttgattttaatcagtgggaagttatagaaaaaaaagaattttctaaaaatgaatttaatagtcatagtttttcatttgatgttttaaaaagacttaacacttaa

SEQ ID NO: 220569 - DNA, 511 bp, Unknown
  Bacterial polypeptide expressing nucleotide sequence isolated from the Sargasso Sea
atgaatattatcatttctcatgtcgttgctttatcaaataataacgtcataggtgttgataataatctaccatggaatctcaaaacagacttaaaccattttaaaaactacacaactaacaaaataattgttatgggcagaaaaacctttgaatctataggaaggcctcttccaaatagattaaattttgtagtatccagaaccattgatgaaattgaaaatgcctttgtgtttaaaagcacaaaagaagccatagatgcggctaaaaaaaaatgtttggatgatggaaattataatgaaattgtcataattgggggtggctatctttttaaagatactctagaaataactaacaaattagtattaaccaatgttgactgcgatatcaatggagatgtgtattatccagatattgattttaagttttggaaagaaaaaagttctgaaaatttttcaagaaatgaagataatgattacaactttactgttaaagtttatgaaaagatttaag

SEQ ID NO: 220570 - DNA, 508 bp, Unknown
  Bacterial polypeptide expressing nucleotide sequence isolated from the Sargasso Sea
atgaaaataatttctcatgtcgttgctctatcaaataacaatgttattggtgtagataatgatctgccttggaacctcaaaagagatttattgcactttaaagaatacacaacaaataaaataattattatgggtagaaagacatatgagtctatcggaagacctttgcctaatagaattaattatgttgtttcaagaactatagataaaattgaaggtgcttttgtttttgatagtattgatgatgcaatttgtgatgcaaaagcttattgtattgaacttaatctagaagaaatagttataattgggggaggtttcttatttagagatactttatcaattacaaataaattagtacttacaagagtagattgtaatgttgaaggagatgtcttttatccagatattaatcttaaagaatgggatgaaattagctcagaaaattttactaaaaactcagagaatgagtatgactttgctgttgtgacttataaaaggattacgtaga

SEQ ID NO: 220571 - DNA, 508 bp, Unknown
  Bacterial polypeptide expressing nucleotide sequence isolated from the Sargasso Sea
atgaaaactataatctctcacgttgttgctttatcaaataatagagtcattggtaaagacaatgatctaccatggaatttaaaaaccgaccttaaacattttaaagaatatacaacaaataagatcttacttatggggagaaaaacatttgaatcaattggaagacctctaccaaatagaacaaatattatcgtttcaaacactattcaaagcatagagggcgctgaagtcttctcagatttaaactctgcgcttagtaaagcaaaagaaaaatgtgaaactcttgataaaaacgaaatagtcattatcggtggtggttttctttttaacgatactctggatattgtaaataaacttgtccttacaagagttgattgtgaaatagatggcgatatcttttatcctgaaattgatcttatgaattggaataaaattagcagtgagaggtatttaaaagataatgagaacgaatttgattttgttgttgaggtgtttacaaaaaattaag

SEQ ID NO: 220572 - DNA, 262 bp, Unknown
  Bacterial polypeptide expressing nucleotide sequence isolated from the Sargasso Sea
atgataatttcacatttagtagcattatctaataacaatgtaataggcgtggacaatgatttgccatggagattaaagaaagaccttcaacactttagtgcttatactcaaaacaaagtcattgtaatgggaaggaaaacatttgaatcaattggcagaccgctaccaaatagaaaaaatattgttatatcctcaacaatctcatcaacaagtgaagttcaagtagtaaattcattagaacaagcaatttctgaggcaagaa

SEQ ID NO: 220573 - DNA, 487 bp, Unknown
  Bacterial polypeptide expressing nucleotide sequence isolated from the Sargasso Sea
atgaagataattcttattgcagctttagataaaggcagagttataggtagcgaagggtctattccttggaacattcaagaggacctcaattactttaaagaaaagacaacaaacaaagcaattattatgggaagaaagacttttgagtctataggaaggccattgccaaataggctaaatatagttatgactaggtctaaagaacaaatagatgatgtcatcattgccccaaatagagaagttgctatcgagcaaggaaggggtttttcttctgaaatctttgtcattggaggagaatatatttataaggaattcttagaaatggcttctgagatgcttctcacagaaattgatttagatacagagggagatacttatttccctaaatgggaagagtctgaatggttagaggtttctagggaagccaaaaaagatgattcccaaaaaattaattacgaatttgtaagatataaaagaaaaaattaaa

SEQ ID NO: 220574 - DNA, 263 bp, Unknown
  Bacterial polypeptide expressing nucleotide sequence isolated from the Sargasso Sea
tatgatctcaatatcaattatagttgcgcatgcatcgaactatgtgattggcaaggatgggaagctgccatggcacatacccgctgacctaaaatattttaaagaacttacttatggaagccccatcattatgggacggaaaacttttgagtcgataggcagaccactacccggtcggcataatataataataactagaaatagcgaatatcacaatgatgattgcgctgtggtatttgatttttcagcagctctgaaagaag

SEQ ID NO: 220575 - DNA, 508 bp, Unknown
  Bacterial polypeptide expressing nucleotide sequence isolated from the Sargasso Sea
tatgaaaaccataatctctcacgttgttgctttgtcaaataatagagtcataggtaaagataatgatttgccatggaatttaaaaaccgatcttaaacattttaaagaatatacaacaaataagatcttaattatggggagaaaaacattcgaatcaattggaagacctctaccaaatagaacaaatattatagtttcaaaaactattgaaagcatagagggcgctgaagtcttttcagatctaaattctgcacttaataaagctaaagaaagttgtgaaactcttgataaaaacgaaatagtcattatcggtggtggttttctttttaacgatactctagatattgtaaataaacttgtccttacaagagtcgattgtgagatagatggcgatatcttctatcctgagattaatcttatgaattggaacaaaattagcagtgaggagtatttaaaagataatgaaaacgaatttgatttcgttgttgaggtgtttacaaaaaattaa

SEQ ID NO: 220576 - DNA, 490 bp, Unknown
  Bacterial polypeptide expressing nucleotide sequence isolated from the Sargasso Sea
atgatttccatgattgccgccatggcccacgatcgggtgatagggctggacaaccagatgccctggcacttgccggcggacctggcccacttcaagcgggtgaccctgggcaagccggtgctgatggggcgcaagacctttgaatccatcgggcggccgctgcctggtcgccgcaatctggtgatcagccgcaaccccgactaccgggccgacggcgtggaggttatcgactcggtggaggcggcgctggcgctgctggccggcagcgacgtggccgagctgatggtgatcgggggcggtcatctctacggtcagctgttgccacgggccgacaggctctatctgacccgcatcgatctggcggtggagggggatacccgcttcccggccttcgacgagggcgactggtcgtgcatcgagcgcgagtcacatcagcccgacgaaaagaacccccactcctactgtttcgagacttggcagcggcgctgac

SEQ ID NO: 220577 - DNA, 532 bp, Unknown
  Bacterial polypeptide expressing nucleotide sequence isolated from the Sargasso Sea
ttgaaaaatgtttttccattaacctgtattgtcgcagtttctagtgacaaaataattggagatggtgaaaagttgttatggcatatcccagaagacttaaaaaggttaaaattaatgacaatgggtaacccattaattatgggaaggaagacctttgaaagtattggcagaccacttcctggcagagcaaatatcgttattactaggaaccaaaattttaaatctgaaggtgcatatattgttaatagtttagactcagctatagaaaaatcaaattcatggatttacgaaaattttaataatagagagataaaatcaaaaaaaatttttctttttggtggaggtcaaatttacaatctcgcattaaaattttgtagatctatagaaatgactattgttgatattgtagtaggaaaaggaataaaatttccaaatataaatgaaaatgaatggtctaaacagttaaaacaaaaaaaaaaatcaaaacaaaaaaatctgcattttagttattggacttttacgagaaaataat

SEQ ID NO: 220578 - DNA, 481 bp, Unknown
  Bacterial polypeptide expressing nucleotide sequence isolated from the Sargasso Sea
aatgattgccgctatggcaaataaccgtgttattggtcttgataataaaatgccgtggcatttacctgcagatctccaacattttaaagccgttactacaggtaagcctgtgatcatgggtcgtaaaacttttgagtctattggccgtcctttacctggtagacgcaatattattattacgcgcaacactgaatataaggccgagggtattgaaactgtaacaagcccagaggccgcgctgagcttggtttgtggtgttgaagaagtgatgattataggcggtggaaatgtttatcagcaatttttaacacaagctgagcgcttatatttaacctttattgatctcgatgtagaaggtgatacacagttccctgattaccaagctattgcaaattgggaagtgaaagaagagcaagtaaaacagcctgacgaaaaaaataaacatagttataaattcgtaactttatataaatactgctaa

SEQ ID NO: 220579 - DNA, 508 bp, Unknown
  Bacterial polypeptide expressing nucleotide sequence isolated from the Sargasso Sea
aatgatcataatttcacatgtcgttgctctttctaataatagagtaattggtgttaataacgatcttccttggagccttaaaaaagatttagctcattttaaggcatacacgactaacaaaattataattatgggtagaaaaacttttgaatctattggtcgacctctaccaaatagaataaattttgttgtttcaactactattacagaaatagaaggtgctaaggtatttaaaagtaccgaagaagccctgtctgaggcgaataagttatgcattgaattgaattatgaagaaattgtaatcattggtggaggttatctatttagagacactttaagcattgtaaataaacttgtattaacagaggttgactgtgagattaatggcgatgtttactatcctgatattgacctagattcatggcaaaatactgaaacgtctgaacataaaaaagattcagaaaatgaatttgattttaaagttttagtgtatgaaaaaattaagtag

SEQ ID NO: 220580 - DNA, 505 bp, Unknown
  Bacterial polypeptide expressing nucleotide sequence isolated from the Sargasso Sea
atgattatttcaattctcgttgctatgaacgaagagcttctcataggggtcaataatgatttgccatggaaattacaagacgatctggaacactttaaaaattattcgcttaataaaccaataattatggggagaaagacatttgaatcaatcggaagaccattgccaaatagaaaaaatattgttgtttcttcgtcaatgaaagagcaagacggtattaaggtgttcaacaatctaaatgacgctatagctttttctaaaaaatataacgaagaaaatgatattgatgagattattttaattgggggtgccaaagtctttgctgaaggccttaagcaaaccacaaaacttgtcattagttgggtagatgcaaatagcattaaaggagatgtttactttcctgagtttaataaacaagagtggagagaagttgattcaaaaaaatttttaaaatcagaaaaaaatcagtatgattttgaaattaaagaatatttaagaaagtgat

SEQ ID NO: 220581 - DNA, 505 bp, Unknown
  Bacterial polypeptide expressing nucleotide sequence isolated from the Sargasso Sea
gatgattatttcccatttagtagccctatccaacaactttgttataggtgtgaacaatgatttgccttggaagttaaaaaaagatcttcagcatttcagtgcttatactcaaaataaagccattgtcatgggaaggaaaacttttgaatcaattggaagaccattaccaaatagaaagaatatagttatctcatctacattgaatgctcaagatggcatagaaatagtacccacccttgatcaaggaatagaactagccagtcaatggaataaaaatactacaggaagcaaagaagttgtattaataggaggcggctatgtttttgaagaaagtaaaaatatagtcaataaactagttttaactagagttaaatgcgaaattgaaggggatgtgttttatcctcaaatagatttaagcaactgggaaaaagtttcgactgaatcattcaagagagatgatgaaaatgaatacgagtttagcgtagaaacttttataaaaaactag

SEQ ID NO: 220582 - DNA, 592 bp, Unknown
  Bacterial polypeptide expressing nucleotide sequence isolated from the Sargasso Sea
cctggccggggacacccgaccaggcacccgaccggggcgcgccctttcgcctcaggtagaatcatcctggttacgttcccctttccattcgatgacgacgctcaccctgatcgtcgctcgcgccaataacggcgtgatcggccgcgacaaccagttgccctggcgacttcccgaagacctcgcgttcttcaagcgcaccacgatgggcgcgcccatcatcatgggccgcaagacgcatgaatcgatcggccggccgttgccgggacgccgcaacattgtcgtgacacgggacgccacgcggcgctttcagggctgcgacgcggccaccacgctcgcagacgcgctcaagctcgccgcccaggaccaggcgccggaagcgtttctgatcggcggcgcgcaactgtatgcggaaggcttgcgtcaggcagacaagctgatcgtcaccgaaatctccgcggatttcgaaggcgacgccaccttcccggagctcgacgaaaacgaatgggaagaggtcgcgcatgaaacccatcgcgcggatgcaccgaacgacttcgattacgccttcgtgacctataagcgtaagggcgcgtga

SEQ ID NO: 220583 - DNA, 490 bp, Unknown
  Bacterial polypeptide expressing nucleotide sequence isolated from the Sargasso Sea
atgatttccatgattgccgccatggcccacgatcgggtgatagggctggacaaccagatgccctggcacttgccggcggatctggcccacttcaagcgggtgaccctgggcaagccggtgctgatggggcgcaagacctttgaatccatcggacggccgctgcctggccgccgcaatctggtgatcagccgcaaccccgactaccgggccgacggcgtggaggtcatcgattcggtggaggcggcgctggcgttgctggccggcagcgacgtggccgagctgatggtgatcgggggcggtcatctctacggccagctgttgccacgggccgacagactctatctgacccgcatcgatctggctgtggagggggatacccgcttcccggccttcgatgagggcgactggtcctgcatcgagcgcgagtcacatcagcctgacgagaagaacccccacccctactgtttcgagacctggcagcggcgctgac

SEQ ID NO: 220584 - DNA, 928 bp, Unknown
  Bacterial polypeptide expressing nucleotide sequence isolated from the Sargasso Sea
ggggaggctcatttctttatctattttggacaaaaccaagtttcaataggttatgttgttcaccttaattacactaacccttatgtttctccatttgacgaatttcaacagtataagacccatccttcagttaaaaaagttttggagggtggaaaaagaatatcatacggagcaagagcaataactgcagggggttatcaatcagttccaaaattattttttccagggggtgctttaataggttgttctgcagggtttttaaattatccaaaaataaaaggaacccataacgctatggagtcaggtattcttgctgctgaatctattgttgaaaattttattaatggaaatcaagctgatgatctatcaaattatcaggaaaagtataaaaaaagtaaaatagcaaaagaattaaaaaaggttcgtaatgttaaaccatttcaatccaggtatggagtgcttttaggaactattttaagtggtttagatatgtggttaaataccttcggacttacattgccattcacattaggtcatattaaacctgactataaaacactacgaaaagcatctgaatgtaaggaaataatatatccaaaaccagatggagaattttcttttgataaattatcttcagtttttctttcaagcactaatcatgaagaggatcaaccagctcatttaacactaaaagatagcaatataccgattaaagtaaatctagttgaatacgatgagcctgcacaaagatactgtcctgcaggagtttatgaggttctatcagcagatgagaatagtgagccagtttttcagatcaatgctcagaattgtgtgcattgtaaaacttgtgatataaaagatccctcacaaaatattaattgggttgtaccacaaggtggagaaggtcctctatatggtggtatgtaat

SEQ ID NO: 220585 - DNA, 1042 bp, Unknown
  Bacterial polypeptide expressing nucleotide sequence isolated from the Sargasso Sea
atggaaatttttgcaaatgagtctactgtttttgcagagggatgtagaggaaatcttggaaaacaattgattaaaaagttcgggctagataagggaaaagatccacaacattacgggataggttttaaggaaatctgggaagtagataatgaacatcattcagaaggtttggtgatgcacacaaatggatggccattaccggacgatacacctggaggatcatacatgtatcacgctgaaaataagcaagtattactaggtttagttgttcccctagattataaaaatccacatttaagtccttatgatgaatttcaaagatggaaaacacaccccagtatcaagaaatatcttaaaaaaggaaaaagactttcatatggagctagggcattgataaaaggtggattgcaaagtcttccaagcatggacttcccaggaggacatttaattggttgtaacgctgggactctaaacttttctaagattaaaggatcacatacagctatgaaatctggtattgaagctgcaaaggttatttctgaaaagattgatggcaaagatgtaactcttgataaacagcttaaagatacatggctctacaaagagctgtataaatcaagaaactttaatccgttctttcataaatttggtggcttaattggagcagctatgaacgttttagatcaattaatatttagggggaagcttccatttacattaaatcatcctgttccagatcatgattgccttaaagaagctaaagactgtaagaaaattgaatatcctaaatatgacaacgaaataacattcgataaattaagttcagtttatttatcaaacacataccatgaagaggatcagccttgtcacctagttttaaaagatcctgatttaccaattatgcataatcttgagaaatatgatgagcctgcacaaagatattgtcctgcaggagtttatgaagttgttgaggagaatggagaaaaaagatttcaaattaattctcaaaactgcatacactgtaaaacttgtgacataaaag

SEQ ID NO: 220586 - DNA, 194 bp, Unknown
  Bacterial polypeptide expressing nucleotide sequence isolated from the Sargasso Sea
cgcgccggaacagcgctactgcccggccggcgtctatgagatcgtccgcgaggaggacggcagcaacccgcgcctccagatcaacgcgcagaactgtgttcactgcaagacttgcgatatcaaggatccgggccaaaatattgtatgggtaacgccggaaggcggtggcgggccgaattacccgaatatgtagg

SEQ ID NO: 220587 - DNA, 532 bp, Unknown
  Bacterial polypeptide expressing nucleotide sequence isolated from the Sargasso Sea
tatgaatcctcatgtgctttacaaagaattatacaaaacaagaaactttggacccgctctcaataaatatggaacaattcttggcggtgctttcgcttttgttgatcaaaatattatgcaaggaagatttccatttacatggcataacaaaaatccagatcatgaggcaataagttattctaaagattctgaggagataaattatccaaaaccggatggaattataagttttgatcggctctcttctgtatttttatcaagtacaaatcatgaagaagatcagccatcccatttgaaactgatagatcagactgttccaataaaatataaccttccaaattacgacgaacctgcacaaagatattgtcctgcaggtgtttatgaggtcgtgagtgacaatgacactcctcgctttcagattaatgctcaaaactgcgttcattgcaaaacctgcgacatcaaagacccgactcagaatataatttggactgttccagaaggcggaggcgggccgaactactccggtatgtag

SEQ ID NO: 220588 - DNA, 944 bp, Unknown
  Bacterial polypeptide expressing nucleotide sequence isolated from the Sargasso Sea
ccttcatgaagaaggcttagtgatgcacaccaatggttggcctctacccgatgacactcctggagggtcttatatgtatcacacagacaagaaacaaattttattgggacttgttatacctcttgattataaaaacccttacttgagtccttacgatgaatttcagagatggaaatcacatccagcaatcaaaaaatacttaaagaatggtagaaggatttcttatggtgctagagccttgataaaagggggattacagagtttgcccagcatggagtttccaggtggatatctcattggttgtaatgctggtactatgaatttttccaagattaaaggatctcatacagctatgaaatccggaattgaagctgcaaaggtaattgcctcaaatattgaaggagatacaaaaagcttagatgaagaagtcaaaaaaagctggttgtacacagaactttacagatctagaaacttcaatccctttttccataaatttgggggtttaataggtgctggaatgaatgtaatagatcaatttatttttagaggcaatctgcccttcacgttgaatcatcccacacctgatcatgaatcgttaaaatttgccaaagattgtaagaaaattgattatcctaaatatgacaacgagattactttcgacaagctaagttcagtgtatctatcaaatacttatcatgaagaagagcaaccctgtcatctggtgctaaaagacccggacctgccaatagctaaaacccttgaattatatgatgagcctgcgcagagatattgtcctgctggagtttatgaaatagttgaggaagatgggaagaaaagatttcaaattaattctcaaaactgcattcactgcaaaacatgtgacataaaagagccatcgcaaaatatcaattgggtttcaccagaggggtggtggtggccctaat

SEQ ID NO: 220589 - DNA, 850 bp, Unknown
  Bacterial polypeptide expressing nucleotide sequence isolated from the Sargasso Sea
atagtagttccattagattatgcaaaccctcatttaagcccctatgacgaattccaaaaatggaaatctcatgccaacgttaagaaatatttaaagaatggaaaaaggctttcttatggtgctagagctttgattaaaggcgggttacaaagtctaccaagcatggaatttcctggcggctatatagttggttgcaacgctggaacaatgaatttttctaagatcaaaggatctcatactgccatgaaatctggtatggaagcagcaaaagttatagcagcaaacatcaatggagaaaacaaaagccttgatgcagaaatcaaaaattcttggctttataccgaactatataaatcaagaaactttggtcctttcttccacaaatttggtggactaattggtgcagctttcaatgctatagatcaatttatttttcgaggaaatcttccttttacattgaatcatccagtgcctgatcatgaatgcctgaagccagctaaggattgcaagaaaattgaataccctaagtacgacaatgaatttactttcgataaattaagttcggtgtatctttccaatacttaccatgaagaagaacaaccatgccatttagttttaaaagatataactattccaattgaaaagaatcttgagctttatgacgagccagcgcagagatattgtccagctggagtttatgaagtggttgaagaagatggcgctaaacgcttccaaataaactctcaaaattgcgttcattgcaaaacctgcgacatcaaggaaccatctcaaaatatcgattgggtttcacctgaaggcggcggcggacccaattatccaaatatgtagt

SEQ ID NO: 220590 - DNA, 918 bp, Unknown
  Bacterial polypeptide expressing nucleotide sequence isolated from the Sargasso Sea
ttaaatggtgatactagcggtggtgcatttatgtatcatatcgaaaataatcaggtcgttgttggcttaattgttgatttaaattacacaaacccgcatttaagcccgtttgatgaattccagcgaatgaaacatcatcctgtttttaaacaagtacttgaaggcggtgagcgtattgcttatggcgcgcgcgctattgcaaaaggtggattacactctttgcctaaaatgcattttactggcgggttattagtaggctgtgatgcaggcacattaaattttgcaaaaattaagggaaatcacacagcaatgaaatcgggcatgatagccgctgaagtcatttttgaagcattagaaaatgaacaagctaatactgatttagtaaattaccacacgcagtttgaacaatcttgggcttataaagagctttatcagtctcgtaattttggtccggtgatgcataagctaggtaaatttttagggggtgcatataacacgctcgatcaaaatgtattcaacggtgctttaccatttacctttaaagatgatgtaccagattactctacgctggttgatgctaacattgctgaaaaaatagcttaccctaagcctgatggttcactgagttttgataaactttcaagtgtgtttttatcaaacactaaccatgaagagtctcaaccttgtcacctaaaacttaaaaacgcagcaataccaataaaagttaatcttgtgaaatttgatgaacctgcgcagcgctattgcccagcaggtgtttatgaggtgcaagaaatagaaggtaacaacgagtttgtaattaatgcacaaaactgtgttcactgtaaaacctgtgacattaaagatccgagccaaaacatcacgtgggttaccccagagggcgctggcggccctaattac

SEQ ID NO: 220591 - DNA, 691 bp, Unknown
  Bacterial polypeptide expressing nucleotide sequence isolated from the Sargasso Sea
atgtttatgccaggagcattgctcgttggttgtgatgcggggactttaaacatgcctaaaattaaaggttctcatacagctatgaaaagtggaatgatagctgctgaaactattaatgagcatttaaaagaaaataaagatttatccatatttgatcaaaagtttaaaaatagttggctttacaaagaattgtttgaagcaagaaatgtcaaacctagttttggttggggattaattttaggaataatatttacaggtatagatcaaattttatttaggggaaaattgcctttcactcttaaacataaacatgcggatcacgaaactttaaaacctgctaaagatatgccaaaaatagattacccaaaatacgacaatgttttaacttttgataaaacaagttcagtttatttaacgggtacaaatcatgcagataatcagccagttcatttaaaacttaaagaccctaatttaccaattaattatactttagaaaaatttgatgaacctgctcaaagatattgtcctgcaggtgtttatgaagttcaaaaagaaaatgatgcaaataaatttgtgatcaattctcaaaattgtattcattgtaaaacttgtgatatcaaagaaccttcacaaaatattgtgtgggtaactccagaaggtggaggtggaccaaaatacggaaatatgtaaa

SEQ ID NO: 220592 - DNA, 683 bp, Unknown
  Bacterial polypeptide expressing nucleotide sequence isolated from the Sargasso Sea
tccaggtggtttgttaattggatgtaatgctggaactcttgtcttttcaaaaataaaggggtcgcatacagcaatgaagtcaggtgaactggctggtgaatatacgtacaacaaattgcacggagttgaacaagatgtatatgacaaacagattgagaagtcatggataaataaagaactttataaatcaagaaattttggcccactatttcataaatttggagcattatttggtgctgcgtttaatgtaattgatcaattaatctttagaggaaacctaccattcacacttaaccaccctattcctgatcatgcttgcttaaaaaaagcagatgaattacctaaaattgactatcccaaacctgatgggatttattcatttgataaactatcctctgtttatctctcaaatactaaccatgaagaggatcaaccatgtcatcttcaattaagagactcatcaattccgataagcgttaatctcccaatgtatgatgagcctgcacaacgatattgtcctgcaggtgtatatgaggttgttaaaaaaaatggcgaaaataaatttgttattaacgcacaaaattgtgtacattgtaagacgtgcgatatcaaggatccgtctcaaaacataacatgggtatcgccagagggacctggtggacctaattatcctaatatgtaat

SEQ ID NO: 220593 - DNA, 670 bp, Unknown
  Bacterial polypeptide expressing nucleotide sequence isolated from the Sargasso Sea
attagttggatgtgatgctgggactttgaatatgccaaaaataaaagggtcacatacagctatgaaaagtggaataattgctgcagagacaatttttgaaagtttaatagaaaataaagaactttctgtatttgaagaaaaatttaaaaaaagttggctatatgaggaattgtataaggcgagaaatgttaaaccaagttttagctggggtttaattttaggaataatatttactggaatagatcaaattttatttagaggaagattaccattcacattaaaacataaacatgcagatcatgagactttactatccgcaaatgaaatgccaaaaattgattatcctaaaccagataatgtcataacatttgataaaacatcatctgtttacctaacaggaactaaccatgctgataatcaacctgttcatttaaaactaaaggatcctaacttgccaataagttacactttagaaaagtttgacgaaccagcccagaggtattgtccagctggtgtttatgaaatacagaaggagaatgatataaataaatttgttatcaattcccaaaattgtattcactgtaagacttgtgatattaaagaaccttctcaaaatattacttgggttactccagaaggtggaggtggacctaaatatggaaatatgtaa

SEQ ID NO: 220594 - DNA, 760 bp, Unknown
  Bacterial polypeptide expressing nucleotide sequence isolated from the Sargasso Sea
tactggcggaaaaagaatttcatatggtgctagagcgttaattgagggtggtcttcaaagtcttcctaaaatgtatatgcctggagctttactagttggatgcgatgctgggactttaaacatgccaaaaattaaaggttcccacactgcaatgaagagtggaatgattgctgcagaaacaataattgaatatgttaaagaaaataaagaattatctggttacgaaaaaaaatttaaaaatagttgggtttataaagaacttcatgctgcacgtaatgtaaaacccagttttagctggggtttaattcttggaataatatttactggaattgatcaaattttatttagagggaaattaccttttacattaaagcataagcatgccgatcacgagactttgaaaccagcaaatgaaatgccaaagatagattatccaaaatatgataatgttctcacatttgataaaaccagctctgtatatttaacaggtaccaatcatgctgataatcaaccggtacatttaaaacttaaagatcctaatttgccaattagttatacattagagaaatttgatgaacctgcccaaaggtattgtccagcaggtgtttacgaagttcaaaaagaaaatgatataaataaatttgtaattaattctcaaaattgtattcactgtaaaacttgtgatataaaggaaccttctcaaaatattacctgggtgacacctgaagggagtggtggacctaaatatggaaatatgtag

SEQ ID NO: 220595 - DNA, 655 bp, Unknown
  Bacterial polypeptide expressing nucleotide sequence isolated from the Sargasso Sea
ggcaccttaaatatgccaaagattaaaggttcacatactgctatgaaaagtggaattatagctgctgaaacaattaatgattatttaagtaaatctgtatctcttgcagcatatgaagataaatttaaaagttcatggctttataaagaattgttttcagcaaggaatgtaaaacctagttttaattggggactaatacctgcaataatatttacaggtattgatcaaataatatttaggggcaagcttccttttacactaaaacacaaacatgctgatcatgaagctttacaattagcaaaagattcaaaaaaaatagattatccaaaatatgatggaatatttacttttgataaaaccagttctgtttatttgactggaactaaccatgaagctgatcagccagttcatttacaattaaaggataaggaattaccaataaaatttactttaaatgcttatgatgagccatctcaaagatattgtcctgctggtgtatatgagattgataagacagatattcaaaatcctaaatttgtaattaatgcacaaaactgtattcattgtaaaacatgcgatattaaagagccatcacaaaacataaattgggttgtacctgaaggtagtggggggccaaattatgcaaatatgtaat

SEQ ID NO: 220596 - DNA, 667 bp, Unknown
  Bacterial polypeptide expressing nucleotide sequence isolated from the Sargasso Sea
tggttgtgatgcaggcactttaaatatgccaaaaattaaaggatctcatactgcgatgaagagtggcattattgcgggagaaacaattgttgaccacttaactaattcgagaccactttcagaatttgagaaaaaatttacaaaatcttggctgtataaggaactgcatgcagcaagaaatgtaaaacctagttttaattggggtttgatacctgcaataatttttacaggtatagatcagataatttttaggggtaaattgccttttactttaaaacataaacatgccgatcatcaatcattaaaattagctaaagactcaaaaaaaattgaatatccaaaatatgatggagtatatacttttgataaaacaagttctgtctatttaacaggcactaaccatgaagccgaccagcctgttcatttaaaacttaaggataacgatcttcctattaattataccttaaataaatatgatgaacctgcacaaagatattgcccagctggagtttacgaagtagataaaacaaaccctgcattaccgaaatttgttataaatgcccaaaattgtattcattgtaaaacatgtgatattaaagaaccctctcaaaatatcacttgggttgtaccagagggtagtggtggtccaaattacgcaaatatgtaa

SEQ ID NO: 220597 - DNA, 720 bp, Unknown
  Bacterial polypeptide expressing nucleotide sequence isolated from the Sargasso Sea
tgaaggagggatacaaagtttaccccaagatgtatatgccgggtgcattattagttggttgtgacgcaggaacactgaatatgccaaaaattaaaggttctcatactgcaatgaaaagtggaatgatagcagcagagacaatttatgagcatctttcgaaaaatttaaatttatcaacatacgaattaaaatttaaagaaagctgggtttataaagaattatatcaagcaagaaacgtaaaacctagtttctcatggggtctaattttaggaattctatttactggaattgatcagatattattcaaaggtaaattaccttttacacttaatcataaacatgctgatcatgaagctttgaaaccagcagctgaaatgccgaaaattgaatatcctaagcctgataatgtgtttacttttgataaaactagttcagtttatctaacgggaaccatacatgatgacaatcagccggttcaccttaaacttaaagatccgaatctacctataaattacaccctagaaaagtatgatgaacctgcccaaagatactgcccagcgggagtttatgaggttcaaacagtaaattcagaacaaaaattcgttataaacgcacagaattgtatacactgcaaaacttgcgatattaaagaaccctctcaaaatataacttgggtcacacctgaaggtggcgggggacctaaatacggaaatatgtaat

SEQ ID NO: 220598 - DNA, 775 bp, Unknown
  Bacterial polypeptide expressing nucleotide sequence isolated from the Sargasso Sea
attaaaaaaattatagaaggtggaaaaagaatttcttacggcgcaagagctttaattgaaggtggatttcaaagtttgccaaaaatgttcatgcccggagctttgttggttggttgtgatgctggaactttaaatatgccaaaaattaaaggctctcatacagctatgaaaagtgggattattgcagccgaaactattaatgaacacttaaaagaaaacaaagatttatctatttatgaagataaatttaaaaatagctggttacataaagagctttatgaagctcggaatgtgaaacctagttttagctggggattaattttaggaataattttcacaggtattgatcaaattttatttagaggaaaatttccttttacacttaaacataaacatgctgatcatgaaacattaaaacctgcaaatcaaatgccaaaaatagattatccaaaatacgataatgtaataacttttgataaaacaagttcagtttatctaacaggaaccaatcatgcagacaatcaaccagttcatttaaaacttaaagatcctgatttaccaataaattatactttagaaaaatttgatgaacctgcacaaagatattgtcccgcaggtgtgtatgaagtccaaaaagaaaatgatgtaaataaatttgtcattaattctcaaaattgtattcattgtaaaacttgtgatattaaagaaccatctcaaaatattacttgggttactccagaaggcagtggtggtccaagatatggaaatatgtaaa

SEQ ID NO: 220599 - DNA, 586 bp, Unknown
  Bacterial polypeptide expressing nucleotide sequence isolated from the Sargasso Sea
gtcttcgaagcgatatcacaagataaagtggaagcgtcaacatatcacgagaaactgcatgatagctggttgtggagtgaattatacagagttcgcaatattcgaccctctttttcaaagggatttgttccaggcatgatttactctgcattggacacttatattttcaaaggaaatgctccgtggacattcaggcatcatgcagatcaccttcagctaaaagaggcaaaactatgcaaaaaaatagattatccaaagccagataatgttgtcagctttgatagaaattcatctgtttatttgtcctcaactaatcatgaggaaaaccagcctgcacatttgaaattgattgataacacaattcctattgatgtaaaccttgagaaatacgattctccagaacaacgatattgtcctgctggtgtttatgagattgtgcaagctgaggataattcagatccatacctgcaaataaacgcccaaaattgtgtacattgtaaaacctgtgatatcaaagatccaactcaaaacataagttgggtaacccccgaaggtggcggaggaccaaattatccaaatatgtaat

SEQ ID NO: 220600 - DNA, 597 bp, Unknown
  Bacterial polypeptide expressing nucleotide sequence isolated from the Sargasso Sea
taattgcagcagaaacaattaatgaccatattgtatcaggaaaagatttatctatttatggggaaaaatttaaaaatagttggctttataaagaattgcatgaagcaagaaatgtaaaaccaagttttggctggggcttgattttaggaattatttttacaggaatagatcaaatactgtttagaggtaaattgccttttacgttgaaacacaaacatgcagatcatgaaactttaaaacctgcaaatgaaatgcccaaaatagaatatccaaaacctgataatataattacatttgacaaaactagctcagtttatttaacaggaactaatcatgcagataatcaacctgttcatttacaactaaaagatccaaatttgcctattaattatactttagaaaaatttgatgagcctgcccaaagatattgccctgcaggagtttatgaaattcagaaagaaaacgacgttaataaatttgttataaattcacaaaactgtattcattgtaaaacctgtgatattaaagaaccttctcaaaatatcacttgggtcacaccagaaggtggtggtggaccaaaatatgggaatatgtaat

SEQ ID NO: 220601 - DNA, 790 bp, Unknown
  Bacterial polypeptide expressing nucleotide sequence isolated from the Sargasso Sea
gcatactgcgggatggccattagataatgcaacttatggcggcagtttttgttatcatgctgaaaataaacaaatatttttaggatacgtaatcggtcttgattataaaaatccatatttatccccttatgacgaatttcaaaaatttaaaacccacccagcaatcaagaaaattctcactaatggaaaacgtattgcttatggagcaagggcacttattgaaggtggtattcaaagcttacctaaaatgtacatgccaggtgcattactagttggatgtgatgcaggtactttaaatatgccaaagattaaaggatctcatactgcaatgaaaagtggaattatagctgcagaaacaattaatgattatttaaataagtctgcacctctttcattatatgaagataaatttaaaagttcatggctttataaagaattgtttgctgcaagaaacgtaaaacctagttttaattggggattaatacctgcaataatatttacaggaattgatcaaataatatttagaggtaagcttccttttactctaaaacacaaacatgctgatcatgaagctttacaattagcaaaagattcaaaaaaaatagattatccaaaatatgatggaatatttacttttgataaaaccagttctgtttatttgactggaactaaccatgaagctgatcagccagtgcatttacaattaaaggataaggaattgccaataacatttactttaaatgcttatgatgagccatctcaaagatattgtcctgctggtgtatatgag

SEQ ID NO: 220602 - DNA, 700 bp, Unknown
  Bacterial polypeptide expressing nucleotide sequence isolated from the Sargasso Sea
cctacctaaaatggaatttccaggtggtttgttaattggatgtaatgttggaactcttgtcttttcaaaaataaaggggtcgcatacagcaatgaagtcaggtgaactggctggtgaatatacgtacaacaaattgcacggagttgaacaagatgtatatgacaaacagattgagaagtcatggataaataaagaactttataaatcaagaaattttggcccactatttcataaatttggagcattatttggtgctgcgtttaatgtaattgatcaattaatctttagaggaaacctaccattcacacttaaccaccctattcctgatcatgcttgcttaaaaaaagcagatgaattacctaaaattgactatcccaaacctgatgggatttattcatttgataaactatcctctgtttatctctcaaatactaaccatgaagaggatcaaccatgtcatcttcaattaagagactcatcaattccgataagcgttaatctcccaatgtatgatgagcctgcacaacgatattgtcctgcaggtgtatatgaggttgttaaaaaaaatggcgaaaataaatttgttattaacgcacaaaattgtgtacattgtaagacgtgcgatatcaaggatccgtctcaaaacataacatgggtatcgccagagggacctggtggacctaattatcctaatatgtaa

SEQ ID NO: 220603 - DNA, 863 bp, Unknown
  Bacterial polypeptide expressing nucleotide sequence isolated from the Sargasso Sea
ttttttagggtatgtcattggtttagattacaaaaaccctcatttatctccgtatgatgagtttcagagatttaaaactcatccggctatcaggaaaattatagagggtgagaaaagaatttcatacggtgcaagagctttaatagaaggaggttttcaaagtttacctcagatgtttatgccaggagcattgttggttggctgtgatgcgggaactttaaatatgccaaaaatcaaaggttcccatacagctatgaaaagtggaatgatagctgctgagactataaatgagcatttaaaggataataaagatttatctataattgaacaaaaatttaaaaatagttggctttataaagaattatttgaggcaagaaatgtcaaacctagttttagatggggattaattttaggaataatttttacaggtatagatcaaattttatttagaggaaaaatgccttttacacttaagcataaacatgctgatcatgaaaccctaagacccgcaaaagatatgccaaaaatagattatccaaaatatgataatgttttaacttttgataaaacaagttcagtttatttaacaggtacaaatcatgctgataatcagccagttcatttgaaacttaaagaccctaatttaccaattaattatactttggaaaaatttgacgaaccagctcaaagatattgtcctgcaggagtttatgaggttcaaaaagaaaatgaagtaaataaatttgttataaatgctcaaaattgtattcattgtaaaacttgtgacatcaaagaaccttcacaaaatatcatttgggtaactccagagggtggaggtggacccaagtatggaaatatgtgag

SEQ ID NO: 220604 - DNA, 647 bp, Unknown
  Bacterial polypeptide expressing nucleotide sequence isolated from the Sargasso Sea
tttaaatatgccaaaaatcaaaggttctcatacagctatgaaaagtggaatgatagctgctgaaactattaatgaacatttaaaagaaaataaagatttatccatatttgatcaaaagtttaaaaatagttggctttacaaagaattgtttgaagcaagaaatgtcaaacctagttttagttggggattaattttaggaataatatttacaggtatagatcaaattttatttagaggaaaattgcctttcactcttaaacataaacatgcggatcacgaaactttaaaacctgctaaagatatgccaaaaatagattacccaaaatacgacaatgttttaacttttgataaaacaagttcagtttatttaacaggtacaaatcatacagataatcagccagttcatttaaaacttaaagaccctaatataccaattaattatactttagaaaaatttgatgaacctgctcaaagatattgtcccgcaggtgtttatgaagttcaaaaagaaaatgatgcaaataaatttgtgatcaattctcaaaattgtattcattgtaaaacttgtgatatcaaagaaccttcacaaaatattgtgtgggtaactccagaaggtggaggtggaccaaaatacggaaatatgtaaa

SEQ ID NO: 220605 - DNA, 643 bp, Unknown
  Bacterial polypeptide expressing nucleotide sequence isolated from the Sargasso Sea
gttttttctaaaattaaaggttctcacacagcaatgaaatctggtgaagtagctggtcaacatatttttgaagaactacaagaatcatctaatgaatcatatgactcaagaattaagaactcatggatttatgatgagctttataaatctagaaactttggcccattttttcataagtatggtgctcttattggagctgcatttaatgcagtggaccaattcatctttagaggaaaattgccatttactctcaatcatccaactcctgactatgcatgtctgaaaaaagctgatgaaatgccgaagatagaatattcaaaaccagacgggatatattcgttcgataagttatcatcagtttatctatctaatacaaatcatgaggaagatcaaccctgtcatcttcaattaaaagactcatcaattcctataagcgttaatcttccaatgtatgatgaaccagcacaaagatactgccctgctggtgtctatgaggttgtagaaaaagataacgagaaaaaatttgtaattaatgctcaaaactgcgttcactgtaaaacttgtgatattaaagacccatcacaaaatataaattgggtgactcctgagggtcctggaggccctaattatccaaacatgtaag

SEQ ID NO: 220606 - DNA, 631 bp, Unknown
  Bacterial polypeptide expressing nucleotide sequence isolated from the Sargasso Sea
attaaaggttctcatacagcgatgaaaagcgggatgattgcagctgatactattaatgaacatttaaaagaaaacaaagatttatcaatttatgaaaataaatttaaaaatagttggttatataaagaactttatgaagccagaaatgtaaaacctagttttagttgggggctaattttaggaattatttttactggaatagatcaaattttatttagaggaaaacttccttttactcttaaacataaacatgctgatcatgaaacattaaaacctgcaaaccaaatgcctaaaataaattatccaaaatatgataatgtaattacttttgacaaaacaagttcagtttatctaacaggaacaaatcatacagacaatcaaccagttcacttaaaacttaaagatcctgatttaccaatcaattatactttagaaaaatttgatgaacctgcacaaagatattgtcctgcaggggtttatgaggttcaaaaagaaaatgatataaataaatttgtaatcaattctcaaaattgtatccactgtaaaacatgtgatattaaagaaccgtctcaaaacataacttgggttacaccagaaggaagcggtggtccaagatatggaaatatgtaat

SEQ ID NO: 220607 - DNA, 807 bp, Unknown
  Bacterial polypeptide expressing nucleotide sequence isolated from the Sargasso Sea
taccctgggtttccggcgagtgaagtgctcttcaatgatagaggggcagttaaaggcgtggcgacaggagagatgggccggggcagggagggggaacctaaagcggcctacgaacccggtatggaacttcacgccaaatacacggtcttcgcagagggctgtcgtgggcatctgggcaaacaactgatcaaacaatacgcactggatcacgatgcctcaccccaacactacggcattggcctgaaggagctttggcgaattgatccggcactgcaccagccgggtcttgtcgttcacggtgcgggctggccgctttcagaacaaggggcatcgggcggcgcctttctctatcacctggaagactgccaggttgcgctgggactcattgtcgatctgaactatgacaacccctatctgagcccgttcgatgaattgcagcgcttcaagacccactcgaagattgcaccgaccctagctggaggcgaacggctctcttacggcgctcgggccatcaccaaaggtggtttcaattcgctgccaaaaatgtctctgcccggcgcctttatcgtgggatgcgatgccggtacgctgaatttcgcgaagatcaaagggacgcatacggcaatgaagtcaggaatgctcgctgccgatacgatcatggaggtattgccggacggagacccaggcggcaaggatcacacccactacgactcgcatctgcgctcttcctggctctatccggaactcaaagtggcacgcaactttgggccagcgctccacaagttcgggccgtatatcggcggagcc

SEQ ID NO: 220608 - DNA, 730 bp, Unknown
  Bacterial polypeptide expressing nucleotide sequence isolated from the Sargasso Sea
cagagcattaattaaaggcggacttcaatcattaccaaaaatggaatttcctggcggcttgttagttggagataatgcaggaacacttaatttttctaagattaaaggatcgcatacagccatgaagtctggcatattggccggtgagcatatcttcgaatctttacaaaatactgtaactaaaacatttgatgaaaagattaataactcatggatttatgatgagctatataaatctagaaattttggtcctatatttcataaattcggtgcttttattggagcagcacttaatgcaatagatcagtttatttttagaggcaatttacctttaactcttaatcaccccactcctgatcatgcatgcatgaaagagtcaaataaaatgccaaaaatagattatccaaaaccagatggaatttattcatttgataaattatcttcagtttatctatcaaacaccaatcatgaggaagatcaaccttgtcatctacaattaaaagattcgtctatacctattagtataaatttacctatgtatgatgaacctgctcaaagatattgtcctgcaggcgtctatgaagttgttgaaaagaataatgaacataaatttgttattaatggtcaaaattgtgttcattgcaaaacttgcgacatcaaagacccttctcaaaatattaactgggttacacccgaaggaccgggtggaccaaactatccaaatatgtaa

SEQ ID NO: 220609 - DNA, 967 bp, Unknown
  Bacterial polypeptide expressing nucleotide sequence isolated from the Sargasso Sea
gctctaaatgaattaattccggattggaaagaaaaaaactgcccgctaaatgttccagttaaaaaagataaattaatgtttctctttaaaaaatttggaatatctatcccctcttttgtcatgcctcctatgaataatcatggtaactacgtgacaagtttaggaaatctttgtcgctggctcgctacccaagctgaagatatgggtatagagatctttcctggattcccagcaagcgagattctgtatgaaaatgataaagtcgttggcgttcgaactggcgacatgggagttggccaagatggcgagcaaaagcctggatttgaagctggtattgatatcaaagctaaatacactatctttggagaaggatgtcggggtcatctagggaagcagcttatagctaaatatgaattggacaaggataaagatcctcagcactatggcattggttttaaagaggtctggaaaattaaagatgaggttcatgaagaaggattggtgatacataccaatggatggccaagcgcaaaaaatactccagctggatcctatctataccatgctgataataatgaagtctatctaggctatgttgttcctctcgattatgaaaatcctcatttaagtccttttgatgagtttcaaacatggaaaacacacccatcaattaagccatacttagaaggcggtgaaagactgacctatggagcaagagctttgattaaaggcggtattcagtctcttcctagcatggaattccctggaggagtattggtaggagataatgcaggaacacttaacttctcaaaaattaaaggctctcatactgcaatgaaatcaggaatgcttgccgcagaagcaatctttaataacattgattctgaaggtaccttgcaatttgatgaaatgattgcagggagctggatacatgcagaacttcataaatctagaaattttggtccaa

SEQ ID NO: 220610 - DNA, 784 bp, Unknown
  Bacterial polypeptide expressing nucleotide sequence isolated from the Sargasso Sea
gatgtaaaaaaattacttcaaggcgggaagagaatttcttatggagcaagagctctaatcgaaggtggtttacaaagtctccctcaaatgcatatgcctggagcacttttaataggctgtgatgcaggcacactgaatatgcctaaaattaaaggttcccatactgccatgaagagtggaatcatagctgcagaagtaattgaaaatcacatctctaaaaatgaggatttatcatcatatgaagataaatttaaaaattcttgggtccataaagaactacatcaagctcgcaatgtgaaaccaagtttccaatggggtttaattcctgcgatgatatttactggcattgatcaaaaattatttggggggaagcttccttttactcttcaacacaaacatgcagaccatgaaacattaattcctgccaaggatgcaaaaaaaataacatatcctaagtacgatggagtattaacttttgacaaacctagttcagtatatttatctggaactaatcattcagatgaccaaccatgtcatttacttctcaatgataaagatttatcaactacatacacaattgaggagtatgatgaacctgctcaaagatactgtccagcgggtgtttatgaagtggaatttgatgaggaaattcaaaaaaaagtcttaaaaattaattctcaaaattgtattcattgtaagacctgcgatattaaagaaccatcacagaacatagagtgggtaacacccgagggtggtggtggtccaatttactctggaacttagc

SEQ ID NO: 220611 - DNA, 680 bp, Unknown
  Bacterial polypeptide expressing nucleotide sequence isolated from the Sargasso Sea
cggtgcgttacttgttggatgtgatgcgggcacattaaacatgccaaaaattaaaggttctcacactgcaatgaaaagtggaatgatagcagctgagacaattcatgaacattttaaagacaataaagatttatcagtttttgaagaaaaatttaataacagttggttaaagaaggaattatatgaagctagaaatgtaaagccaagttttagttggggacttattcttggaattatatttactggtatagaccaaatcttatttagaggaaaacttccattcactttgaaacacaaacatgctgatcatgaaactttaaaactagcaaaagagatgccaaaaattgattaccctaaacctgataatgtaattacatttgacaaaacaagttcggtttatttaacgggaacaaatcatacagataatcaaccagttcatttaaagttaaaagatcctgatttaccaataaaatacactttagaaaaatttgatgaacctgctcaaagatattgtccagcgggagtttatgaggtccaaaaagaaaataatattcataaatttattattaattcacaaaactgtattcactgcaaaacatgtgatattaaagaaccatctcaaaatataacttgggtcacacctgagggtggaggcggtcctaagtatggaaatatgtaat

SEQ ID NO: 220612 - DNA, 640 bp, Unknown
  Bacterial polypeptide expressing nucleotide sequence isolated from the Sargasso Sea
tatgccaaaaataaaaggatctcacactgctatgaaaagtggaattttagctgcagaggctatcaatgaacatattcagtctaaaaaagatttatcattatacgaggaattatttaaaaaaagctggttatataaagaactgtatcaagcaagaaatgtaaaacctagttttagttggggtttaattttaggaataatttttacaggaattgatcaaattttatttagaggaaaacttccatttacattaagacataagcatgcagatcatgaaacgttaaaacctgcagataaaatgccaaaaattgattatccaaaacctgacaatgtgattacttttgataaaacaagctcagtttatttgactgggactaatcacgaggataatcagccagtgcatttacaactaaaagataaagatctaccaataaaatatactcttgagaaatatgacgaaccagcacaaagatattgcccagcaggtgtttacgaggttcaaaaggagaataatattaataaatttgttattaacgctcagaactgtattcattgtaaaacttgcgatattaaagaaccttctcaaaatataatttgggttacccctgagggaggtggtggaccaaagtatggaaatatgtaa

SEQ ID NO: 220613 - DNA, 826 bp, Unknown
  Bacterial polypeptide expressing nucleotide sequence isolated from the Sargasso Sea
ctgtgccgctggctggcgcaacaggccgagaacctcggcgtcgagatctatcccggcttcgccgcccaggaagcgctgatcgacgagaacggcgtggtacgcggcatcgtcaccggcgatctgggcgtggaccgcgaaggcaatcccaaggaaggctactacacccccggcatggagctgcgcgccaagtacaccctgttcgccgaaggctgccgtggccacatcggcaagcagctgatcaagaagtacaacctcgacagcgaagccgacgcccagcactacggcatcggcatcaaggaaatctgggacatcgatccggccaagcacgagcaaggcctggtggtgcataccgcaggctggccgatggacatcatgggcaccgagaacaccggcggttccttcctctatcacctggaaaacaaccaggtggtggtcggcctgatcatcgacctgtcctacgccaacccgcacctgtccccgttcgacgagttccagcgctacaagcaccatccggtgatcgccaagtacctggaaggcggcaagcgcgtcgcctacggcgcccgcgccatctgcaagggcggcatcaactcgctgccgaagatggtcttccccggcggcgcgctgatcggctgcgacctcggcaccctgaacttcgccaagatcaagggcagccacacggcgatgaagtccggcatgctcgccgccgacgcgatcgccgaagcactggccgccggccgcgagggtggcgacgagctgaacaactatgtcgacggcttcaaggccagctggctgtacgacgagctgttccgcagccgcaacttcggcg

SEQ ID NO: 220614 - DNA, 229 bp, Unknown
  Bacterial polypeptide expressing nucleotide sequence isolated from the Sargasso Sea
tgaccccgatgttcctatgtcttacaactatcccgagttttctggtcccgaagaacgatattgccccgcgggtgtgtatgagtatgtattggtggagaacaacacaaaactgcagattaacgctcaaaattgtgtccattgtaaaacctgcgatatcaaagacccttctcaaaatataaattggatcgtgccggaaggtggaggcggtccaaattaccctaatatgtag

SEQ ID NO: 220615 - DNA, 819 bp, Unknown
  Bacterial polypeptide expressing nucleotide sequence isolated from the Sargasso Sea
cgtatgatgaatttcaacgttttaaaacacattctgcaattagtaaatttctaaagggaggaaaaagattatcttatggagctagagcattaatagaaggaggaatacaaagtttgcctcaaatgtatatgccaggtggtttacttattggatgtgatgcaggaactttgaatatgccaaaaattaaaggttcacatactgctatgaaaagtggaatcttagctgctgaaagcgcatatgattttattaagaataaaacacctttatcttcttatgaaaaaaaatttaacaattcttgggcatataaagaattatatttagcaagaaatgtcaaaccaagcttcaactggggattaatacctgcaattatttttacaggtttagatcaagttatttttagaggaaaacttcctttcacattaaaacatcctcatgcagatcatgaaaccttaattccagcaaataaagctaaaaaaattcaatatccaaagtatgataatattttgacttttgataaaactagctctgtttatttgactgggactaatcatgaagaaaaccaacctgttcatttacagctaaaagatcaaaacttaccaattagttattgtttagaaaaatatgatgaaccttcacaaagatattgtccagctggagtttatgaaattcaaaaagattctgaagaattaaacccaaaatttgtaattaatgctcaaaactgcatccattgtaaaacatgtgatattaaagaaccatctcaaaatattaattgggttacacctgaaggagcaggaggacctaattatgcaaatatgtaat

SEQ ID NO: 220616 - DNA, 859 bp, Unknown
  Bacterial polypeptide expressing nucleotide sequence isolated from the Sargasso Sea
ttttcttggttatgtaataggtttagattacaaaaatcctcatctttctccttatgatgaatttcagagatttaaaacacatccagcaattaaaaaaattatagaaggcggaaaaagaatttcttacggagcaagagctttaatagagggtggatttcaaagtttgccaaaaatgtttatgcctggagctttgcttgttggttgtgatgctggaactttaaatatgccaaaaattaaaggctctcatacagccatgaaaagcggattgattgcagctgaaactattaatgaacatttaaaagaaaacaaagatttatctatttacgaggataaatttaaaaatagttggttatataaagagctttacgaggctcggaacgtgaaacctagttttagctggggattaattctaggaattattttcacaggaatagatcaaattttatttagaggcaagcttccttttactctaaaacacaaacatgctgatcatgaaaccttaaaacctgcaaatcaaatgccgaaaatagattatccaaaatatgataatatcataacttttgacaaaactagctcagtatatctcacaggaactaatcacgcagataatcagcctgttcatttgaagcttaaagaccctgatttaccaatcaattatacgttaaaaaaatttgacgaacccgctcaaagatattgtcctgcaggagtttatgaagttcaaaaagaaaatgatgtaaataaatttgtaataaattctcaaaattgtattcattgtaaaacatgcgatattaaagaaccttctcaaaatattacttgggttacaccagaaggaagcggtggtccaagatatggaaatatg

SEQ ID NO: 220617 - DNA, 769 bp, Unknown
  Bacterial polypeptide expressing nucleotide sequence isolated from the Sargasso Sea
aaaaattatagaaggtggaaaaagaatttcttacggcgcaagagcattaattgaaggtggatttcaaagcttgccaaaaatgttcatgccaggagctttattagttggttgtgatgcagggactttgaatatgccaaaaatcaaaggttcacatacagcgatgaaaagtggaatgattgctgctgaaacaattaatgaacacttaaaagaaaacaaaaatttatctatttatgaagaaaaatttaaaaatacctggttacataaagagctttatcaagctcgaaacgttaaacctagttttagttggggtttaattttaggaataatttttacaggtattgatcagattttatttagaggcaagcttccttttacacttaaacataaacatgctgatcatgagacattaaagcctgcaaatcaaatgccaaaaatagattatccaaaatatgataatattattacatttgacaaaacaacttcagtatatttaacaggaacaaatcacgcagataatcaaccaatacatttaaagcttaaagacccagatttaccaatcaaatatacattagaaaaatatgacgaacctgcccaaagatattgtccagcaggagtttatgaagttcaaaatgaaaatgatgtaaacaaatttgtaattaattctcaaaattgtatacattgtaaaacttgtgatattaaagaaccttctcaaaacataacttgggtgacaccagaaagtaatggtggtcccagatatggaaatatgtaa

SEQ ID NO: 220618 - DNA, 445 bp, Unknown
  Bacterial polypeptide expressing nucleotide sequence isolated from the Sargasso Sea
gctttcaatacgctagaacaaaatttctttaacggtaatttgttcttcactatgaaagatgaacacaaagattatgcgcagcttaaggaagcaaaagacgcgaaagaaatttcttatccaaagccggacggtgtactcagctttgacaaattatcttccgtatttttgtcgaatacgaatcacgaagaagaccagccttgtcacttaaaattaaaagatccgtctattcctttgcaggttaatttacctaaatttgcagagccagcacagcgctactgccctgctggtgtatatgaagtaattgaagaggaaggtgaaaaacggttccaaattaatgcacaaaactgtgttcactgtaaaacctgcgacataaaagacccaagtcaaaatattaaatgggtagttccggaaggtgccggcggaccaaattacccgaacatgtaat

SEQ ID NO: 220619 - DNA, 384 bp, Unknown
  Bacterial polypeptide expressing nucleotide sequence isolated from the Sargasso Sea
atgtacctgatcacgcttgtcttaaagaagcaaatcagatgcctaagatagaatatccaaaaccagatggagttattagctttgacaaattatcttctgtttttttatccaacactaatcatgaagaggatcaaccctgtcatctagtcttaaaagatccctctatccctctagatataaatctacccaaatatgatgagccagcacaacgatactgccctgcaggtgtttatgaaatagttgaaaaagatggcgaaaaatcgtttcaaattaacgctcaaaattgtgttcactgcaagacatgtgacataaaagatccatctcaaaatataaattgggttactccagaaggtgcaggtggtccgaactacccaaatatgtaat

SEQ ID NO: 220620 - DNA, 901 bp, Unknown
  Bacterial polypeptide expressing nucleotide sequence isolated from the Sargasso Sea
aagacttataaatcatttaagctgagacaaaattctcaacaccagacatacggaatggatttgaaggagctatgggaggttaaacccgaaaactctaatcctggagaagtatttcactcgattggctggcctttggacaatgaaacatatggtgggtcttttttataccatttagataaaaatttagtttcatttggttttgtcatcggattagattataaaaacccacacttgtctccatatgaggaatttcagagatttaagctacatccaaaaataaaacacattttcgaaggtggtagaagaatctcttatggtgcaagagcattgaatgagggagggtttcaatcattacccaaactttcttttccaggaggagctattctaggttgtgatgctggaacacttaatacaccaaaaattaaaggaacacatactgcaatgaaatcaggcatgatagcatcagatttggtttttaaagaattggtatcagagagtcgaaatgatgagatatcaaatttaaataaatcatttatgaattcatgggcaggtcaagagctcaaaaatgcgaggaatgtaagaccatcctttaaatacggcttgaaggttggtatgatactctctggaatagatcaaataattttcagaggaaaagctccttggactttaaaacacgctgaagaggatcaccttgcgttgaaaaagaaagatgaagccaaaataattaaatatcccaagccagatggaaaaattacttttgacagattaacaaatgtttcttacacttcaacttaccacgaagaaaaccaaccgtgtcatttgaagttaaatgatgaaaaacttccaatttcaaacaaccttttactatacgactcaccagaacaacgatattgtcctgctg

SEQ ID NO: 220621 - DNA, 934 bp, Unknown
  Bacterial polypeptide expressing nucleotide sequence isolated from the Sargasso Sea
caagataagtcaccacaacaatacggaattgggtttaaagaaatatgggagatagacaacagtcaacatgaagaaggtcttgtcatgcatactgcgggatggccattagataatgcaacttatggcggcagtttttgttatcatgctgaaaataaacaaatatttttaggatacgtaatcggtcttgattataaaaatccttatttatctccttatgatgaatttcaaaaatttaaaactcacccagcaattaagaaaattctcactaatggaaaacgtattgcttatggagcaagggcacttattgaaggtggtattcaaagtttacctaaaatgtttatgccaggtgcattactagttggatgtgatgcaggaactttaaatatgccaaagattaaaggatcacacactgcaatgaaaagtggaattatagctgctgaaacaattaatgattatttaagtaaatctgcacctcttgcagcatatgaagataaatttaaacgttcatggctttataaagaattgtttgcagcgagaaatgtgaaacctagttttaattgggggctaatacctgcaataatatttacaggtattgatcaaataatatttagaggcaagcttccttttacacttaaacacagacattctgatcatgaagctttacaattagcaaaagattcaaaaaaaatagattatccaaaatatgatggaatatttacttttgataaaaccagttctgtttatttgactggaactaaccatgaagctgatcagccagtgcatttacaattaaaggataaggaattaccaataaaatttactttaaatgcttatgatgagccatctcaaagatattgtcctgctggtgtatatgagattgataagacagatattcaaaatcctaaatttgtaattaatgcgcaaaactgcattc

SEQ ID NO: 220622 - DNA, 487 bp, Unknown
  Bacterial polypeptide expressing nucleotide sequence isolated from the Sargasso Sea
tatgggagctcttttccacaaatacggtattgccttgggtggattgatattaggtatcgaacaatttcttttcagaggaaaaatgccttttacttggagacataagactcctgattatgcttgtatgaagaaagctaaagaagcaaaaaaaatagattatcctaagccggacggtgtcgtaagttttgacaagctttcatcagtttttttatcaaatacaaatcatgaagaagatcaaccttgtcacttaactcttaaagacgcatctattccgattgcagttaacctgcctgaatatgatgagcccgctcagagatattgtcctgctggagtgtatgaagtcgtagaaaaagaaggtgagaaaaagtttcagattaatgctcaaaattgtgtgcattgtaaaacttgcgacattaaagatccaagtcaaaatatagtttgggtaactcctgaaggaatgggtggccctaattatccaaacatgtaa

SEQ ID NO: 220623 - DNA, 696 bp, Unknown
  Bacterial polypeptide expressing nucleotide sequence isolated from the Sargasso Sea
aaatgtttatgccaggtgcattactagttgggtgtgatgcaggtactttaaatatgccaaagattaaaggttcacatactgcaatgaaaagtggaatcatagctgctgaaacaattaatgattatttaagtaaatctgtacctcttgcagcatatgaagataaatttaaacgttcatggctttataaagaattgtttgctgcaaggaatgtaaaacctagttttaattggggactaataccagcaataatatttacaggaattgatcaaataatatttagaggcaagcttccttttacattaaaacacaaacatgctgatcatgaatctttacaattagcaaaagattcaaaaaaaatagattatccaaaatatgatggaatttttacttttgataaaaccagctctgtttatttgactggaactaaccacgaagctgatcagccaatacatttacaattaaaagataaggaattgccaataaaatttactttaaatgcttatgatgagccatctcaaagatattgtcctgctggtgtatatgagattgataagacagatattcaaaatcctaaatttgtaattaatgcacaaaactgtattcattgtaaaacatgtgatattaaagagccatcacaaaacataaattgggttgtacctgaaggtagtgggggaccaaattatgcaaatatgtaat

SEQ ID NO: 220624 - DNA, 694 bp, Unknown
  Bacterial polypeptide expressing nucleotide sequence isolated from the Sargasso Sea
tttcctggaggtgcgattttagggtgtaatgcaggtactttaaacactcccaaaattaatggaactcatactgcaatgaaatccggtatgattgcagctcaagaggtatttgaaaatttacagaataatattgagagttatgaattaaagaaattaaattcaaatttcttgaaatcatgggctggcaaagaattaaaatccgcaagaaatgtaaggccatcttttaattttggtctcaagattggaatgattttaactggtattgatcaattaatttttcgtggaaatgctccatggacattgaaacacggtgagcccgatcacgaagctttgagaagcaaagataaaagcaaaaaaattgattaccctaaacctgacggtgtattgacttttgatagattaactaatgtttcattctcttcaacttaccatgaagaaaatcagccatgtcatttaaaaataattaatgaagaaatccctatttctaataattataaaatttatgactctccagagcaaaggtattgtccagcgggtgtttatgaagttctgttcgataaggaaattccaaaacttcaaatcaattcacaaaactgcattcattgtaaaacttgtgatataaaagacccaaaacaaaatatcatgtgggttgcccccgagggaggaggtggaccaaattatacgaatatgtagc

SEQ ID NO: 220625 - DNA, 208 bp, Unknown
  Bacterial polypeptide expressing nucleotide sequence isolated from the Sargasso Sea
ctggttgaatacgatgagcctgcacaaagatactgtcctgcaggagtttatgaggttctctcatccgatgagaatagcgagccagtttttcagataaatgcgcagaattgtgtgcattgtaaaacttgcgatataaaggatccttcacaaaatattaattgggttgtaccgcaaggtggagaaggccctttatatggtggtatgtaat

SEQ ID NO: 220626 - DNA, 630 bp, Unknown
  Bacterial polypeptide expressing nucleotide sequence isolated from the Sargasso Sea
aaggctcacatactgctatgaagagtggaattatagctgctgaaacaattaatgattacttgtataacgattccccactttctaaatatgaagtaaattttcacaaatcttgggcatataaagaactttataaagctcgaaatgtaaaaccaagttttagttgggggcttataccagctataatatttacaggaatagaccaaattatttttagaggttatttgcccattaccttaaaacattctcatgctgaccatgaaacactcttaccagcaagaaaatccaaaaaaattgaatatcctaaatatgatggcaaaattacttttgataagactagctctgtttatttaacaggtactaatcatgaagaaaaccaacctgttcatttaagattaatagatgaaaatcttcctattaaatatacattagaagaatatgatgagcctgctcagagatattgtcctgcaggagtatatgagattgataggtcattagaggagaaacctaaatttattataaatgctcaaaattgtatacactgcaaaacttgtgacattaaagaaccttctcaaaatattaaatgggttacaccagaaggtgccggtggtccaaattatgcaaatatgtaaa

SEQ ID NO: 220627 - DNA, 871 bp, Unknown
  Bacterial polypeptide expressing nucleotide sequence isolated from the Sargasso Sea
aaataaacaagtttttttaggttatgtaattggactagattataaaaatcctcacctctctccatttgatgaatttcaaagatttaaaactcatccagcaattagaaaggtaatttctggaggaaaaagaatttcatatggtgctagagctttaattgaaggagggctacaaagtcttccaaaaatgtatatgccaggagcattattggttggatgtgatgcaggtacattaaatatgcctaagataaaaggttctcatactgcaatgaaaagtggaatgattgcagctgaaactataattgaaaatattaaagaaaataaagatttatcaaattatgaagaaaaatttaaaaatagttgggtatataaagagcttcatgcagcaagaaatgttaaaccaagttttagctggggtttaattcttggcattatatttacaggaattgatcaaattctattcaaaggaaagctgccttttactctaaaacataagcacgcggatcatgaaactttaaaaccagcaaacgaaatgccaaaaatagaatatccaaaatatgataatgttataacatttgataaaactagttcggtatatcttactggaactaaccatgaagacaatcaaccagttcatttaaaacttaaagatccaaatttaccaattaattatactttagaaaaatttgatgaacctgctcaaagatattgtcctgcaggtgtttatgaaattcaaaaagaaaatgatgtgaataaatttgtaatcaattctcaaaactgtattcactgtaaaacttgtgatattaaagagccttctcaaaatattacatgggtaactcctgaagggagtggcggacctaaatacggaaatatg

SEQ ID NO: 220628 - DNA, 808 bp, Unknown
  Bacterial polypeptide expressing nucleotide sequence isolated from the Sargasso Sea
gatgaattccaaagatttaaaactcatccagcaatataaaaaaattattgagggagggaaaagaatttcttacggtgcaagagcattaattgaaggtggctttcagagtttgccaaaaatgtatatgccaggtgccttactcataggatgtgacgctggaacactgaacatgccaaaaattaaaggatctcatacagcaatgaaaagtggtataatcgcagctgaaaccataaatgaacatataaaatctgaaaaaaaattatctttatatgaagaaaagtttaaaaaaagttggctacatgaagaactctataaagcgagaaatgtaaaaccaagttttagctggggattgattttaggaattatatttacaggaatagaccagattttgtttagaggaaaattaccctttaccttaaaacataaacatgcagatcatgaaactttaaaaccagcaaatgaaatgccaaaaattgagtatccaaaaccagataataaaattacttttgataaaacaacatcagtttatttgactggaactaatcatgctgataatcaaccagtccatttaaaactaaaagatccaaacttaccaatagattatactttacaaaaatttgatgagcctgcgcaaagatattgtccagctggtgtttatgaagttcaaaaagaaaacgaagtaaacaagtttgttattaattctcaaaattgtatacattgtaaaacttgtgatattaaagaaccttctcaaaatattacttgggttacaccagagggaggtggtggaccaaaatacggaaatatgtaa

SEQ ID NO: 220629 - DNA, 982 bp, Unknown
  Bacterial polypeptide expressing nucleotide sequence isolated from the Sargasso Sea
ctcctatgataaccatggtaactatgtcacaagtttaggaaatctttgtcgctggctcgctacccaggctgaagatatgggtatagagatctttcctggatttcctgccagcgagattctttatgaaaatgataaagttgttggcgttcgaactggtgacatgggagttggtctagatggcgagcaaaaacctggatttgaagctggtattgatatcaaagccaaatacacaatttttggagaaggttgtcgaggtcatctagggaagcagcttatagctaaatatgaattggacaaggataaagatcctcagcactatggcattggttttaaagaggtctggaaaattaaagacgaggttcatgcagaaggattggttatacatacaaatggatggcccagcgcaaaaaatactccagctggatcctatctctaccatgctgacaataatgaagtttacctaggttatgtggtccctcttgattatgaaaaccctcatttaagtcccttcgaggagtttcaaacatggaaaacacacccatcaattaaaaaatacttagaaggtggtgaaagactaacttatggagcaagggccttgatcaaaggaggcattcagtctcttcctagcatggaattccctggcggagtaattgtaggagataatgcaggaacactcaatttctcaaaaattaaaggctctcatactgcaatgaaatcaggaatgcttgccgcagaagcaatctttaataacattgattctgaagataccttgcaatttgatgaaatgattgcagggagctggatatatgcagaactccataaatctagaaattttggtccaatgtttcataaatttggtgcgctaataggagctgcttttaatgctatcgatcaacttatttttagaggcaatttaccttttactttgcatcacacaaccccagattatgcttgcttaaacctgcagctgatatgccggtga

SEQ ID NO: 220630 - DNA, 813 bp, Unknown
  Bacterial polypeptide expressing nucleotide sequence isolated from the Sargasso Sea
tgttttagagcaagagctttaaacgagcttttcccagattggaaagaaagaggcgctcccttaaataccccggttacaagtgatcaatttttatttttaactcagaacaatagtttcaaactaccgacgccgccacagatgaataatcatggcaattttatcattagtttgggtaacttatgccgctggttggctgaacaagctgaagcactaggggtcgaaatataccctgggtttgccgcatcagaaatattattcagtgaggacgggtctgtgaagggcgtggctaccggtgatatgggtcgtgggaaagatggcacagaaactgaaaattttacgcctggtatagaacttcacgccaaacaaactattttctccgagggaagcagagggtcgcttacaaagatccttttcgacaaattcgatttaagaagtgatgcagacccgcaaacatatgctattggcataaaagagctatgggaagttgaaccagaaaaacatcagaaagggcttgcgctccatagtgttggatggccaattgatggctcaacatacggaggatctttcatttatcacttagaaggtaatcaagtctccgttggttacgtcataggtttagattataaaaatcctcacctgagcccctttgacgaatttcagcgattcaaaacgcatccgaaaataagacctctattcgaaggaggaagaagggttgcttatggggcccgagcgttgaatgaaggtggtttccagagcattccaaaactgacttttcccggaggcttaatcgtgggatgcggagctggttttctt

SEQ ID NO: 220631 - DNA, 787 bp, Unknown
  Bacterial polypeptide expressing nucleotide sequence isolated from the Sargasso Sea
aacacatcctgcaatttcaaaaatgcttaatggaggtaaaagaatatcttatggtgcaagagcgttaattgaaggtggtatccaaagtttacctaaaatgcatatgcccggtgctttactaattggatgtgatgctggtactttaaatatgcctaaaataaaaggttcacacactgcaatgaaaagtggattaattgcagctgagacaatagttgagcatttaaaagataaaaaagatttatccatttatgaggaaaaattcaaaaaaagttgggcttacaaagaattatacgaagcaagaaacgtaaaaccaagtttcagttggggtttaattttaggaataatttttactgggattgaccaaatattatttagaggaaaattaccattcacattaaaacacaaacacgcagatcacgagactttaaaactagcaagtgaaatgcctgtaatcgaatatcctaaacctgataatgtgttgacttttgataaaacaagttctgtttatctaacaggcacaaatcatgaggataaccagccagttcatttacaacttaaggataaggaattacctataaaatatactttagaaaagtacgatgaacctgcgcaaagatattgtcctgcaggagtttatgaagttcaaattgaaaataatatacctaaatttgttataaacgctcaaaactgtatccattgtaaaacttgtgatattaaagaaccatcccagaatattacatgggtaactccagagggaagtggtggtccaagatatggtaatatgtaa

SEQ ID NO: 220632 - DNA, 295 bp, Unknown
  Bacterial polypeptide expressing nucleotide sequence isolated from the Sargasso Sea
acagattctgtatatctttctggaactaatcatgaagaaaatcaaccgatccacttacagatcagggattcaaaagtcccaattgaacataatcttaaaatttatgatgctcctgaacaaagatattgcccagcaggtgtttatgaaatcatttcatctgatgaaggggatgtattacaaattaatgctcaaaattgtgttcattgtaaaacatgtgatatcaaagaccctttacaaaatattaactgggttacacctgagggtggaggcggtccgaactatcctaacatgtaaa

SEQ ID NO: 220633 - DNA, 868 bp, Unknown
  Bacterial polypeptide expressing nucleotide sequence isolated from the Sargasso Sea
ggtggaagttttgtttatcatgctgagaacaaggaggtttatctaggatatgtaattggtttagactatcaaaatcctcatctatctccatttgatgaatttcaaagatttaaaacacatcctgctatttcaaaaatgcttaatggaggtaaaagaatttcgtacggtgcaagagctttaattgaaggtggtatccaaagtttacccaaaatgtatatgcctggtgcgctattaatcggatgtgatgcaggaactttaaatatgcctaaaataaaaggttcacatacagcaatgaaaagtggtttgatagctgcagaaacaatagttgagcatctaaaagataaaaaagatttatcaatttatgaggaaaaatttaaaaaaagttgggtatatgatgaattacatgctgcaagaaatgttaaaccaagcttcagttggggtttaatcctaggcattatttttacaggaattgaccaaatattgtttagaggaaagctaccatttactttgaaacataagcatgcagatcatgaaactttaaaaccagcaaataaaatgccagttatagagtacccaaaaccagataacatcttaacttttgacaaaactagctctgtatatttgactggaacaaatcatgaggacaatcagccagtccatctccagctaaaagataaagaattaccaataaaatatactttagaaaaatacgatgaacctgcacaaagatattgtccagcaggagtttacgaagttcaaattgaaaataatgtacccaaatttgtcataaattcacaaaactgtattcatagtaaaacttgtgatattaaagaaccatcacagaatattacgtgggtaactcccgagg

SEQ ID NO: 220634 - DNA, 640 bp, Unknown
  Bacterial polypeptide expressing nucleotide sequence isolated from the Sargasso Sea
cctaagattaaaggatctcatactgcaatgaaaagtggcatgattgctgcggaaacaataaatgaatatattactaaaaatatatctttgtctgaatatgaaaataaatttaaaaattcatgggtttataatgaattatataaggcacgaaatgtaaaaccaagttttaaatggagtttaattccagcaattatatttactggcatagatcaaattatttttagaggatatttaccttttactttaaaacattctcacgctgattatgaaagtttaatttctgcaagaaaagctacaaaaattgattatccaaaatatgatggaaaacttacatttgataaaactagctctgtatttttaactggcactaatcatgaatctgatcaaccagttcatttaaaattaaaacaaccagaactaccaattaattacactttaaaagaatttgatgaacctgcgcaaaggtattgccctgcaggagtttacgaagttgatagaagtgaagataataaaccaaaatttgtaataaatgcacagaattgcattcattgtaaaacgtgtgatattaaagaaccttcacaaaatataacatgggtaactccagaaggagcaggaggaccaaattatgctaatatgtaaa

SEQ ID NO: 220635 - DNA, 837 bp, Unknown
  Bacterial polypeptide expressing nucleotide sequence isolated from the Sargasso Sea
attataaaaatcctcacctctctccatttgatgaatttcaaagatttaaaactcatccagcaattagaaagataatttctggaggaaaaagaatttcatatggtgctagagctttaattgaaggagggctacaaagtcttccaaaaatgtatatgccaggagcattattggttggatgtgatgcaggcacattaaatatgcctaagataaaaggttctcatactgcaatgaaaagtggaatgattgcagctgaaactataattgaaaatattaaagaaaataaagatttatcaaattatgaagaaaaatttaaaaatagttgggtatataaagagcttcatgcagcaagaaatgttaaaccaagttttagctggggtttaattcttggcattatatttacaggaattgatcaaattctattcaaaggaaagctgccttttactctaaaacataagcacgcggatcatgaaactttaaaaccagcaaacgaaatgccaaaaatagaatatccaaaatatgataatgttataacatttgataaaactagttcggtatatctcactggaactaaccatgaagataatcaaccagttcatttaaagcttaaagatccaaatttaccaattaattatacactagaaaaatttgatgaacctgcccaaagatattgtccagcaggtgtttatgaggttcaaaaagaaaatgatgttaataaatttgtaattaattctcaaaactgtattcactgtaaaacttgcgatattaaagaaccttctcaaaatattacgtgggtaactcctgaagggagtggcggacctaaatacggaaatatgtaaa

SEQ ID NO: 220636 - DNA, 880 bp, Unknown
  Bacterial polypeptide expressing nucleotide sequence isolated from the Sargasso Sea
aaccacgaagaaggtttagtaatgcatacagctggctggcctttagataataacacctatggtggaagttttatttatcacgcacaaaataaacaaatttttttaggatatgtaattggtttagattataaaaacccccatttatccccctttgatgagtttcaaagatttaaaactcatccggctataaagaagataatacataatggaaaaagaatttcctatggagcgagagctttaattgaaggtggatttcaaagtttaccaaaaatgtttatgcctggagcattgttaataggttgtgatgctggaacattaaatatgccaaagataaagggttcacatacagctatgaaaagtggattgatagctgctgaagccattaatgagcatttaaaagatagtaaagatttatccaactttgagcaaaaatttaaagaaagttggttatttgaggaattgtttaaggcaagaaacgttaaaccaagtttcagttgggggctaattataggaataatatttactgggatcgatcaaattttgtttagaggaaaactcccatttacattgaaacataaacatgcagatcatgagacactaaaatctgcaaaagagatgcctaagattgattatccgaaaccagataatgtgattacctttgataaaacaagctcagtttatctttctggtaccaatcatgctgagaatcaacctattcatttgcaattaaaagatccaaatttaccaattagctatactttagaggagtatgatgaaccagctcaaagatattgtcctgctggtgtttacgaggttcaaagagagaatggtgttaataaatttgttataaattctcaaaaattgcatcccattgtaaaac

SEQ ID NO: 220637 - DNA, 850 bp, Unknown
  Bacterial polypeptide expressing nucleotide sequence isolated from the Sargasso Sea
cgtaattggattagattaccaaaatcctcatctctcatttttcgatgaattccaaagatttaaaactcatccagatataaaaaaaataattgaaggtggaaaaagaattacttatggcgcaagagctttaattgagggaggtatacagagtttacctcagatgtttatgccaggtgctttgttagttggatgtgacgcgggaacattaaatatgcctaaaataaaagggtcacatactgcaatgaagagtggaatgatcgctgctgaaacaatttatgagcatcttacaaaaaatttaaatttatctacatatgaacaaaaatttaaagaaagttgggtttataaagaattacatgaggcaagaaatgtaaaaccaagtttctcctggggattaattttgggtatattatttactggaattgatcagattttatttagaggaaagcttcctttcacattaaagcataaacatgctgatcatgaagctttaaaaccagcagataaaatgccaaaaattgattatcctaagcctgataacgttattacatttgataaaactagttcggtttatttaacgggtacaattcatgatgataatcaaccagtacatttaaaacttaaagatccagatttgcctataaaatatactttagagaaatttgatgagcccgcacaaagatattgtccagcaggagtttatgaagtccaagaagtaaattctgttcaaaaatttgtaatcaatgctcaaaattgcatacattgtaaaacttgtgatattaaagagccatctcaaaatattacttgggtcactccagaaggtgggggtggacctaaatatggaaatatgtag

SEQ ID NO: 220638 - DNA, 1121 bp, Unknown
  Bacterial polypeptide expressing nucleotide sequence isolated from the Sargasso Sea
ggagcttagaggtaaatacactgtctttgctgaaggctgccgcggccatttaggtaaagagctgattgcacgttttgagctggataaagactgttctcctcagcattatgctttaggctttaaagaaatctgggatgtgcctgcagagcagcatcaacaaggtttagtagtccatagcgctggctggccattgcaacaagataccagcggcggtggctatttgtaccacgccgaaggtcagcaggttgtggtcggtttaattgtcgatttgaactacagcaatccacatctgagcccttttgaagaatttcagcgttacaaacagcatccggtcattaaacagtacctgcaaggcggcaaacgggtgtcttatggcgcccgcgctattgccaaaggcggcctgaacagcctgcctaagatgactttccctggtggtgttttggttggctgtgacgctggtaccttgaattttgccaaaattaaaggcaaccataccgcgatgaaatccggcatgttggctgcagaaactatttttgcggcattgcagcaagacaaaaccggtgctgatctcactgaatttgctgagcatttcaagcaaagctggttatttgatgagttgttcagaagccgcaactttggccctgctatgcataaatttggttcattctggggtggcgcttttaatacactggatcagaatatcttcgctggcaaactgcccttcacgttaaaagataacactgttgatcatttgacgttaagaacagcggccgaagcgcctaaaattaagtatgcgaaaccagacaatcaattgagctttgaccgtttgtcgtcggtgtatttatccaacactaaccatgaagaagatcagccttgccatttaaaactggctgacgcttctattcctgtcactgtgaacttagctttgtatgatgaacctgcccagcgttattgccctgcaggtgtttacgaaatcattgaagagaataatcagccaagactgcagatcaatgcacagaactgtattcactgtaaaacctgcgatattaaagacccacgtcagaacatcacctgggtgacacctgaaggtgccggtggtccaaactatccgaatatgtagg

SEQ ID NO: 220639 - DNA, 717 bp, Unknown
  Bacterial polypeptide expressing nucleotide sequence isolated from the Sargasso Sea
aaggaggtcttcagtcattgcctaaaatggattttccaggtggtcttttgattggatgtaatgctggaactttagttttctcaaaaataaaaggctctcatacagcaatgaaatcaggtgaattagcaggtaagcatgcctttgataaaattcataataatattgaaacaagtttcgattcagtcataaaagaatcttggatatataatgaactatataaatcaagaaactttggtccaatctttcataaatttggtgctttgttaggtgcagccattaatgtaatagatcaatttatatttagaggaaacatgcctatcactatgcgtcatgctactcctgattacgcctgtcttaaaaaagctaatgaaatgcctaaaatagaatatgaaaaaccagatggtatttattcatttgataaactatcatcagtttatctttccaatacaaatcatgaagaagatcaaccttgtcatttacaactaaaagatccgagtatacccatattagtaaatttacctatgtatgatgaaccagcacaaaggtattgtcctgctggtgtatatgaggttgttgaaaaaaacaatgagaaaaaatttgttataaatgcacaaaactgtgtgcattgcaaaacatgtgatattaaagacccatcgcaaaatataaattgggttagtccagagggcccaggtgggccaaattatcctaacatgtaga

SEQ ID NO: 220640 - DNA, 1603 bp, Unknown
  Bacterial polypeptide expressing nucleotide sequence isolated from the Sargasso Sea
atggaagtaaatcgtgagtcaatggaatatgatgtagttattgttggagcgggaccatcgggtttagcaactgcaatcaaaattaagcaattaaatcctgaaaccaacgtttgtattttagagaaaggatctgaagttggtgctcatatattaagtggaaatgtatttgaaactagagccctagatgaattaatacctgattggaaaataaaaaatgcacctataaaaacaaaagttaaaaaagaaaaatttctttttttatctaataacagttcattaagttggcctacttggcttttaccatctgttcagaaaaatcataataattacatcattagtttagctaacttatgtaggtggcttgctactgaggctgaaaatttgggagtagaaatatttccaggatttgcagcatccaaaattctattctcagatgatgatcaaatcattggtgttcaaacaggagatatgggtgttgataaagagggaaacaaaaaagagagttttgaacctggtattaacattatggccaaagtaacagtattggccgaaggatgcagaggacatttaggaaaagagttaattaaaaaatataatctatcaaaaggaaaatccccacagcaatatggaataggttttaaagaaatttgggaagttgaagaaagtcaacatgatgaaggtcttgtaatgcatacagcaggatggccattggataattcaacttacggtggaagtttttgttatcatgctgatagtaggcaagtatttttaggatatgtcataggacttgactataaaaatccatacttatccccttatgatgaatttcaaaaatttaaaactcatccatcaataaagaaaattcttactaatggtaaacgaattgcttatggcgcaagagctttaattgagggtggtattcaaagtttaccaaaaatgtatatgccaggagcactattggtaggatgtgatgcaggaacattaaatatgccaaagataaaaggatcacatactgcaatgaagagtggaattttagctgcagagacaatcatcgactatttaaataaatcaattcctctatcatcatatgaaaaaaaatttaaaaaatcttggctttatactgaattatttactgcaagaaatgtcaaaccaagttttaattggggtttaatacctgctataatttttacaggtatagatcagattatatttaggggaagactgccatttactttaaaacataaacattcagatcatgaatcattacaatctgcaaaaaattctaaacagatcgattatccaaaatatgatggagtgtttacttttgataaaactagttctgtatatttaacaggcaccaatcatgaagctgatcagcctgttcatttacaacttaaagataaagatcttcccattagttatactttaaatgaatatgatgaaccttcacagagatattgtccggctggagtttatgaagtagataaaacagatcctgaagtaccaaaatttattataaatgctcaaaattgtattcattgtaaaacatgcgatataaaagaaccatcgcaaaatattacttggggttgtaccagagggtagt

SEQ ID NO: 220641 - DNA, 1651 bp, Unknown
  Bacterial polypeptide expressing nucleotide sequence isolated from the Sargasso Sea
gatggaacgcgaatcaatggaattcgatgttgttatcgtcggcgcaggcccagctggcttggccactgcgtgtcggttgatgcagatatcacagagttcaggtaaagagattaccgtctgcgtggtagaaaagggctccgaagtgggtgcgcatattctatctggcgccgtattcgaaccacgagtgttagatgagctattcagcgactggcgcgattcaggcgctcccgtcaccacagctgtgacccacgatgaaatctatctgctcaactccgccaccgacagcaagttgatgcccaatgcgtttgtgcctaaaaccatgcacaacgaaggcaactatattgtcagcgtaggtaacctctgccgttggctcgcgacccgcgccgaagcgctcggcgtagaaatcttccctggctttgccgccagcgaactactcttcaatgaagataacagcgtgaagggtatcctgattggtgacatgggcgtcggtgccgacggtcagccgaaagacagctttatgcccggcatggaactacacgccaaatataccgtgttctcagaaggttgccgtggtcacttaggcaaacagctgatcgcgaaataccacttagataatggcaagacaccacagcattacggtctaggctttaaagaaatctggaaagttcccgccgaacaacacgagcaaggtaaagtggtgcacacaggtggttggccactaaccgatggcgcatcgggtggcggcttcctctaccatatggaagacaaccaaattgccgtgggtctgattatcgacctcaactacaagaatccccatttaagcccattcgatgagttccaacgttataagactcaccctgtcatcgccaaatacttaactggcagcgagcgtttgacctatggtgctcgtgcaatcactaagggtggcctgaactcactgccgaagatgagcttccccggcggtctgctgattggttgcgatgcgggtaccttaaactttgccaagatcaaaggcacccacaccgccatgaagagcggtattgtcgcggcagaaaccttagccaaagcgatgctggccgaggtcgaaggcggtaaagatctggattgtttccaaacccatctggaagaaagctggttacacgaagagttgtataagtcgcgcaactttggcccagcaatgcacaagtttggcactttcctcggcggcgcatttaactatatagatcaaaactggttcggcggtaagttccccatcactctgcgtgatgaacacccagactacgcacaaatggccccagtcagtgcctacaacaagattgattatcccaagcccgatggcaaactcagcttcgataagctctcttcggtctacctgtcgagcacttatcatgaggaagatcagccttgccatctgcgcttaaaagacaacagcatcccgctcgggataaacctgacgcaatttaacgagccagcccagcgttactgtcctgctggcgtgtacgaaatcgttgaagaagcaggccagcctaagtttgtgatcaatgcgcaaaactgcatccactgcaaaacctgcgacattaaagaccctagccaaaatattacttgggtcacgcccgagggcggcggtggtccaaactacccgaatatgtaa

SEQ ID NO: 220642 - DNA, 883 bp, Unknown
  Bacterial polypeptide expressing nucleotide sequence isolated from the Sargasso Sea
catggcggaaaataaacaagtttttttaggttatgttattggtttagattacaaaaaccctcatttatctccctatgatgaatttcaaaggtttaaaacacatccagaaattaaaaaaattttagaaggcggaaaaagaatttcttacggcgcaagagctttaatagaaggtggatttcaaagtttgccaaaaatgtttatgcctggagctttgttgattggttgtgatgctggaactttaaatatgccaaaaattaaaggttctcatactgctatgaaaagtggaattattgctgctgatacaataaatgaacatttaaaagaaaacaaagatctatctatttatgaagataaatttaaaaatagctggttacataaagagctttatcaagctcggaacgtgaaacctagttttagctggggattaattttaggaataattttcacaggtatcgatcaaattttatttagaggaaaacttccttttacacttaaacacaaacatgctgatcatgaaacattaaaacctgcaaatcaaatgccaaaaatagattatccaaaatacgataatgtaataacttttgataaaacaagttcagtttatctaacaggaaccaatcatgcagacaatcaaccagttcatctaaaacttaaagatcctgatttaccaataaattatactttagaaaaatttgatgaacctgctcaaagatattgtcctgcaggtgtgtatgaagttcaaaaagaaaatgatgtaaataaatttgtgatcaattctcaaaattgtattcattgtaaaacttgtgatattaaagaaccatctcaaaatataacttgggttactccagagggtagcggcggtccaagatatggaaatatgtaa

SEQ ID NO: 220643 - DNA, 1624 bp, Unknown
  Bacterial polypeptide expressing nucleotide sequence isolated from the Sargasso Sea
tatgcacagagaaacaatggaatatgatgtagttatcgtaggtggtgggccatctggtcttgctgcatcgataaaatttgcacaactaaataaaaaaaataatacaaactattctatctgccttttagaaaaaggatcagaaataggtgcacatatactctcaggaaatgtatttcaacccaatgcccttgatgaattgatcccaaactggaaagaactaaatgctcctttaaatgttcctgttaaaaaagacaaaattatgtatcttttaaagaatattggaattccagtaccttcatttttaatgccaactatgaataatcatggaaactatgtaataagtcttggaaatttatgcagatggttaagtgaacaggctgaatcacttggtgttgaagtatttcctggattccctgctagtaaattaataattgaaaatgatgaggttgttggtgttcaaactggtgacatgggtatttctgaatcaggcgatttgaagccaggtcacgaagctggtatagaaattagggctaaatatacagttttaggtgaaggatgtagaggacatcttggaaaacagattatagaaaaatataaattatctgataataaagacccacaacattatgggattggttttaaagaagtatggaagattgatccaaagctacatcaagagggattagttattcatacaaatggatggccatgttcagacattgcagctgggtcttatttttatcatggtgaaaataatgaagcttatttaggatatgttattccgcttgattataaaaatcctcatttaagtccatttgatgaatttcaaagatggaaaacccatccatcaataaaaaaatatttagaaggtggtgaaagactatcctatggagcaagagcgttaattaaaggcggtcttcagtctttaccaaaaatgcaatttccaggtggtttgttaattggttgtaatgccggcactatggtattttctaaaattaaaggatctcatactgctatgaagtctggagaaattgcaggagagcatatatttgaatctttacaaggtaatatcaatgatgattatgattctaaaatagaaaaatcatggatatataaagaactatttagatctagaaattttggtccattatttcacaaatatggtgctttaattggtgctgcaatgaatgttatagaccagtttatatttagaggaaatttaccatttactttaaatcatcctactcctgattatgcttgtttaatgaaagcagatgaaatgaagaaaattgaatatccaaaaccagatggaatatattcttttgacaaattgtcatctgtatatttatcaaatactaaccatgaagaagatcaaccatgccatcttcagctaaaagattcttcaatacctataagtgttaatcttccaatgtatgatgagccagctcaaagatattgtcctgcaggtgtttatgaggtagttgaagaagagaatgagaaaaaatttgtaataaatgcgcaaaattgcgtacattgcaaaacctgcgatattaaagatccatctcaaaatattaactgggttacgcctgaggggccaggtggaccaaattatccaaatatgtag

SEQ ID NO: 220644 - DNA, 1280 bp, Unknown
  Bacterial polypeptide expressing nucleotide sequence isolated from the Sargasso Sea
tttatgcagatggcttgctgagcaagcggaagcactaggtgttgagatttttccaggtttcccagcttcagaaattctatacaaagaggatggatcagtgaagggcgttataactcaagacatgggtttagataaagaaggaaataaaaaagatggttatgagcctgggatggaactgcatgcgaaagttacagtatttgcagagggttgcagaggtcatttaggaaaacaattaattaaaaagtttgacttagataaaggaaaggaccctcaacaatatggaattggttttaaagaaatctggaagattgatgaaaaaaaccatcaagaaggtttagtaatgcatacagctggttggccactagataaaaatacctatggaggaagctttatatatcatgccgaaaataaagaggtttatttaggatatgttataggtttagattataaaaatccccatttatcaccttttgatgaatttcaaagatttaaaactcacccggctatcagaaaaatgctagatgggggaaagagaatatcttatggagcaagagctttaatcgaaggtggttttcaaagtttacctaaaatgtttatgcctaacgcccttttaattggatgtgatgcaggcactttgaatatgccaaaaattaaaggctcacatacagcaatgaaaagtggaatagtggcagccgaaactataattgagcatcttaacgatgcaaaagatctttctatttacgaagaaaaatttaaaaaaagctgggtttataaagaattattcgaagcacgaaatgtaaaaccaagttttagttggggattaatcttgggaattattttcacaggtatagaccaaataattttcagaggaaaattaccatttacacttaaacataaacacgcagatcatgaaactttaaaaccagcaaatgagatgccagtaatagattacccaaaacctgataatgtgattacattcgacaaaacaagctcagtttatcttacagggaccaatcacacagataatcaaccagttcatttgaaattgaaagataaagatttgccaataaggtatacattagatagatttgatgagcccgcacaaagatactgtcctgcaggcgtatacgaagtgcaagtcgaaaacgatgtacctaaatttgtaataaattctcaaaactgcattcattgtaagacttgtgatattaaagaaccttctcaaaatattacttgggtaacaccagagggaagcggtggtccaagatatgggaatatgtaat

SEQ ID NO: 220645 - DNA, 1377 bp, Unknown
  Bacterial polypeptide expressing nucleotide sequence isolated from the Sargasso Sea
tgtgtagttgagaaaggttctgaagttggagcccatattctttctggtaatgtgtttgatccaaaagctcttaatgaactcataccagattggaaagaactaggtgcaccactaaatactccagttaaaaaagattctgttagatatttaatcaatgaatccagtaacttctccatacctacattattcgctacaacttttaaaaatcatggaaactacatcatgagtttaggtaatttttgtagatggctaggagaatatgcagaaggacttgaaatagatatttttcctggatttacagcctctcaacttatatttgacaatgaaacagttataggagtttctacaggagatatgggtatagactcctctggtgagaaaaaacctagttttgaacctggaattgaccttttagctaaatatacagttttatctgaaggatgtagagggcatttaggaaagcaggttattaatagatttaatcttgatcgggatagtgatccccaacactatggcataggctttaaggaagtttgggatattaaacctgatctacatgaagaaggactggtagttcatacaatgggatggccggcagcaaaaggtgttctgtctggttcatatttctatcatggtgaaaataatcaagcatttttgggttatatagtgccactagattatgacaatccgcacataagtccttttgatgagttccagcaatggaagcaccaaacgtccatcaaaaaatatttagaaggcggaacaagaaccgcttatggcgctagagctcttataaaaggaggttaccagtcgataccgaaaatgcattttcctggagggctgcttgttggagatgatgcaggaactatgaattttcctagaattaaaggaacgcatactgctatgaaatcaggaatgattggagctgaaagtatttatgaagagttttttcaagaagagtcaaagaaagacctagctaattttaaaacaaatttggaatcttcatggttagaaaaagaattacataaagctaggaattttttaccatttatacataaatttgggaccctattaggtgttgcttttgcaggaatggatcaactcatattcagaggaaaattaccttttactcttcatcatgacgagcctgatcatcaatgtctcaaagaagcagatcaaatgccaaagatagaatacccaaaaccagatggggtaattagttttgataaactctcttcagtatttttatcaaatactaaccatgaagaagatcaaccctgtcatttagttttgaaagatccttctataccgatagacgttaatttacctaaatatgatgagcctgctcaaagatattgtcctgctggagtttatgaa

SEQ ID NO: 220646 - DNA, 1630 bp, Unknown
  Bacterial polypeptide expressing nucleotide sequence isolated from the Sargasso Sea
atggaaagagaatcaatggattacgatgtggtaattattggtggcggaccatctgggttcgggacagcaataaagctagctcaaatattcaaggaaacaaatcaagataagactatttgtgtgctcgaaaaaagcgcagaaattggtggccatatcctttctggtaacgtttttcagaccacggctctcgatgaactaattcctgactggaaagataaagatgctccaataaaagtagaggccaaaaaagacattcttaaattccttgttaatgaaaagttcagcttttctattccttcatttttaatgcctacaatgcagaatcacggaaattacatcattagtctaggtaatttatgtagatggcttgctgagcaagcagaagcattaggagttgatgttttccctggttttcctgcagctgaaataatttataaagatgatcgtgttgcgggtgtaattacaggagatatgggtgtcgacgctgaaggcaatcctaaagattcttttcaaccaggtatggaaataattgctaatgaagcaacagtatttgccgaaggttgtagaggccatcttggtaaagagttaattaagaaatttgctttagatgaaggcaaagatcctcagcattatggcatagggtttaaagaaatttgggaagtagacaatgatttacatgaagaaggattagtcatgcataccaatggttggccactaccaaatgatacgcctggtggttcgtatatgtatcatgcagagaacaaacagatactactaggaatagtagttccactagattattcaaacccacatttaagtccatacgatgaattccagaaatggaagtcacatgctgctattaagaaatacctaaagaatggaaaaagactttcttatggagctagggctcttattaaaggcggtctacagagtctacccagcatggaatttcctggaggatatttggtcggatgcaatgcaggcacaatgaacttttcgaaaataaaagggtcacatactgctatgaaatctggcatggaagcagcaaaagtaatagcagcaaacatcaatggcgaaaacaaaagtttagatgcagaaattaaaaattcttggctttatacagaactctacaaatcaagaaactttggtccattctttcataaatttggtgggtttatcggcgcagccttcaatgctatagatcagttcatctttcgaggtaatctgcccttcacgcttaatcacccagtccccgatcatgaatgtttgaagccagccaaggactgcaagaaaattgaataccctaaatacgacaatgaagttactttcgataaattaagttcggtgtatctctcaaatacctatcatgaagaagaacaaccctgccatttagtcctaaaagatataacaattcccattgaaaaaaatcttgaactttatgatgaaccagcccagagatattgccctgctggagtttatgaagtggtggaagaagctggctctaaacgtttccaaataaattctcagaattgcgttcattgcaaaacctgcgacattaaggagccatcccaaaacattgattgggtttcacctgaaggcggtggcggacccaattatccaaatatgtagt

SEQ ID NO: 220647 - DNA, 1460 bp, Unknown
  Bacterial polypeptide expressing nucleotide sequence isolated from the Sargasso Sea
ggctttagatgaactcattccaaattggaaagaactcaatagtccaatcagtacaccagtaacatcagaagattttttattttatacaaaaactaaaagtatgaaggtgccaaatttttttttaccaaatgttttaaaaaatcatggaaattacattattagcttatctaatctttgcaaatggttaggtgaatttgccgaaaacttaggagtggagatcttcccaggatttgcagctagtaaattactttatgataacgaacaaaaggtaattggtgttcaaacaggcgatatgggtttagacaaagattttaaacctaaagataattatgaacctgggattaatatcaaaggtaaagttacagttttatcagagggatgtagaggtcacctaggaaaagaggttcttaaaaaatttaatttagactccaacaacaaatctcctcaacaatacggtataggctttaaagaaatttgggagatcaactctgaaaatcaccaacttggtaaagtttcacatagtgtgggatggcctcttgaaagtgatacatatggaggtagtttttgttatcatgctgaaaataatcaaatatacctaggttacgtaatcggtttggattataagaatccatacctttctccttatgatgaatttcaacagtttaaaactcaccctgatatcaaaaaattattagatggtggtaaaagaatttcttatggagcaagagctctaatagagggaggattgcagagccttccacaaatgtatatgcctggggcattattgataggatgtgatgcaggtactctaaatatgccaaaaattaaaggatcacataccgcaatgaaaagtggaataattgctgcagaagtcatcaatgatcacataaatagtaataaagaactgtcagagtatgagtcaaaatttaaaaactcatgggtatttgaagaattatacaaagcaagaaatgtaaagcccagttttcaatggggcctgatacctgcaatgatttttactggattagatcaaaaaatatttggaggtaaacttccatttacccttcaacataagcacgctgatcatgaatctttgatcccagctaaaaaagcaaaaaaaattacctatcctaaatatgatggtgttattacttttgataaacccagctcagtttatctatcaggaactaaccacgcagatgatcaacctaaccatttgttacttaatgataaagatctgtcaactaattttactattgaagaatacgacgaacctgcccaaaggtattgccctgcaggtgtgtatgaagttgaatttgataatgacctccaaaaaaaaattttaaaaattaattctcaaaattgtattcattgtaagacatgcgatattaaagaaccttctcaaaatattgagtgggtaactcctgagggtgggggtggacctatttactctgggacctaat

SEQ ID NO: 220648 - DNA, 1630 bp, Unknown
  Bacterial polypeptide expressing nucleotide sequence isolated from the Sargasso Sea
tatggcaagggaatcaatggattatgatgtggttatcgtaggcggtggcccatcaggactgtctgctgcaataaagctagcacagctattcaaagaaaaaaaacaagaaaaaagcatttgtgtgcttgaaaaaagtgcagaaattggaggccacatactttctgggaatgtctttgaaacaacagcacttgatgagctaatacctgactggaaagaaaaaaatgccccattaaacgtccctgtcaaaaaagatgcaattaagtttcttctcaatgataaattaagcattcctgttccatcatttttgatgccaacaatgaataatcatggcaattacattatcagtcttgcaaatctttgtagatggctagctgaacaagctgaatctctaggagttgatattttccctggatttcctgctgcagaaatcatttacaaagaaggaaaagttgcaggagttattacgggtgatatggggaaagattcaaaaggaaatgaaaaagattcttttcaacctggtatggaaatttttgcaaatgagtctactgtttttgcagagggatgtagaggaaatcttggaaaacagttgattaaaaagttcgagctagataagggaaaagatccacaacattacgggataggctttaaagagatctgggaagttgataatgaacatcattcagaaggtttggtgatgcacacaaatggatggccattacccgacgatacacctggaggatcatacatgtatcacgcagaaaataagcaagtattattaggtttagttgttcccttagattataaaaatccacatttaagtccttatgatgaatttcaaagatggaaaacacaccccagtatcaagaaatatcttaaaaaaggaaaaagactttcatatggagctagagcattgataaaaggtggactgcaaagtcttccaagtatggacttcccgggaggacatttaattggttgtaatgctgggactcttaacttttctaagattaaaggatcacatacagctatgaaatctggtattgaagctgcaaaagttatttctgaaaagattgatggcaaagatgtgactcttgataaacagcttaaagagacatggctttacaaagagctatataaatcaagaaactttaatcccttctttcataaatttggtggcttaattggagcagctatgaacgttttagatcagttaatatttagggggaagcttccatttacattaaatcatcctgttccagatcatgattgtcttaaagaagctaaagactgcaagaaaattgaatatcctaaatatgataacgaaataacatttgataaattaagttcagtttacttatcaaatacatatcatgaagaggatcagccttgtcatctagttctaaaagatcctgatttaccaattatgcataatcttgagaaatatgatgagcctgcacaaagatattgtcctgcaggagtttatgaagttgttgaagagaatggagaaaaaagatttcaaattaattctcaaaactgcatacactgtaaaacttgtgacataaaagaaccttcacaaaacataaattggattacacctgaaggcggtggaggtccaaactacccaaatatgtaa

SEQ ID NO: 220649 - DNA, 1621 bp, Unknown
  Bacterial polypeptide expressing nucleotide sequence isolated from the Sargasso Sea
tatgtctagggaatcgatggaatatgacgtggtgatcattggtggggggccatcaggtttatcaacagcaataaaattaaaacaattagatcctaatctgaatgtttgcatacttgagaaagcttcagaaataggagcacatattttaagtggtaatgtttttgagacacgtgccttagatgaactactacctaattggagagaattaaattcaccaattaaaactaaggtaacaaaagaaaagtttttatttttaggaaaaacaaaatcattaagttggccaacttggttgctaccagcggtacaacaaaatcataaaaattatattataagtttagcaaatttatgtagatggcttgctgaacaagcagaaaatttaggtgtagaaatttttccaggatttccagctagtgaagttttatataatgatgatggatctgtaaaaggtgttgctactcaagatatgggtattgataaagagggaaataaaaaagacagttttgaaccaggcattgaattattaggaaaggttacagtttttgctgagggttgtagaggtcatttaggaaaagagctaattcaaaaatttgacttaaacaaaggtaaagatccacaacaatatggaataggctttaaagaaatttgggagatcgatgagaataatcacgaagaaggtctagtgatgcatacagccggatggccattagataacagtacttatggaggaagctttatgtatcatgcagaaaataaacagattttcttaggatatgtcattggtttagattacaaaaatcctcacttatccccatatgatgagtttcaaaaatttaaaactcatccagctattaagaaaattatagaaggtggaaaaagaatttcatacggtgcaagagctttaattgaagggggttttcaaagtttacctcagatgtttatgccaggagccttgctcgttggttgcgatgcggggactttaaacatgcctaaaattaaaggttctcatacagctatgaaaagtggaatgatagctgctgaaactattaatgagcatttaaaagaaaataaagatttatccatatttgatcaaaagtttaaaaatagttggctttacaaagaattgtttgaagcaagaaatgtcaaacctagttttagctggggattaattttaggaataatatttacaggaatagatcaaattttatttagaggaaaattaccttttactctaaaacataaacatgcggatcacgaaactttaaaacctgctaaagatatgccaaaaatagattacccaaaatacgacaatgttttaacttttgataaaacaagttcagtttatttaacaggtacaaatcatgcagacaatcagccagttcatttaaaacttaaagactctaatttaccaattaattatactttagaaaaatttgatgaacctgctcaaagatattgtcctgcaggtgtttatgaagttcaaaaagaaaatgatgtaaataaatttgtgatcaattctcaaaattgtattcattgtaaaacatgtgatatcaaagaaccttcacaaaatattgtgtgggtaactccagaaggtggaggtggaccaaaatacggaaatatgtaa

SEQ ID NO: 220650 - DNA, 1627 bp, Unknown
  Bacterial polypeptide expressing nucleotide sequence isolated from the Sargasso Sea
tatgcacagagaaactatggagtacgacgttgtaattgttggcggtggtccatcaggtctagctgcggcaattaaacttggtcaattaaataaagaacataatgctaatctagaaatatgtcttcttgaaaaaggttcagaaattggtgctcatatcctttcaggaaatgtatttcagccaaatgcattagatgaacttattcctgattggcatactctaagcgcaccattaaatacacctgtaaaaaaagataaattattgtttcttttaaaaaatataggtatacccattccaacatttgtaatgccgccaatgaataaccatggtaattatgtaattagtttaggtaacttgtgtagatggctgggacaacaagccgagaaccttggtattgaaatatttcctggctttcctgcaagtaaacttttatttgaaaatgataaagttgttggggttcaaacaggtgatatgggaatatcagaatcaggtgaattaaagccagggcatgagcctggtattgaaataagagcaaaatatacaattttaggtgaaggttgcagaggacatctagggaaacagattattaataaatacaacttaagtgatggaaaagacccgcaacactatggaattggatttaaagaagtttggaaattagataaaaatttacatgagcctggcttagttattcacaccaatggctggccaacatcatttgatacagcatctggctcttatttttatcatggcgaaaatgatgaggcctatataggatatgttgttcccttagattataaaaatcctcaccttagtccttttgatgaatttcaaatgtggaagactcatccatcaataaaaaaatatcttaaaggtggagaaagaatttcatatggagcaagagcattgataaaaggtgggctccagtcattaccaaaaatggaatttcctggtggattgctagttggagataatgctggaactcttaatttttctaaaattaaaggatcccatacagccatgaaatcaggcatattggccggcgaacatatatttaattctttacaaaataatgtaactaaaacatttgatgtaataattaataattcatggatttatgatgagctatataaatctagaaattttggacctatatttcataaatttggtgcttttcttggagcagcacttaatgcaattgatcagtttatttttagaggtaatttacccttaactctcaatcatcctactccagattatgcatgcatgaaagagtctaataaaatgccaaaaatagattatcctaaacctgatggaatttactcatttgataaattatcttctgtttatctgtctaacactaatcacgaagaagatcagccctgtcatcttcaattaaatgattcatctatacctattagtataaatttacctatgtatgatgaacctgctcaaagatattgtcctgcaggtgtgtatgaagttgtcgagaaggataatgagcataaatttgttattaatggtcaaaactgtgttcattgtaaaacttgcgacatcaaagacccttctcaaaatattaactgggttacgcctgaagggccaggtggaccaaactatccaaatatgtaa

SEQ ID NO: 220651 - DNA, 1595 bp, Unknown
  Bacterial polypeptide expressing nucleotide sequence isolated from the Sargasso Sea
tatggaatatgatgttttaattgttggggccgggcccgcaggtttatctgcggcaatacaaataaagcaattatctcaaaaaagtaacttagatatttctgtctgcgtacttgagaaagccagtgagattggtgctcacatattatctggcgctgttattgaaactagcgctcttgataaacttttacctaattggaaagaactggatagcccaattaaaacaaaggttaaaaaggataaactttcatacttaggtaaggattggtcaataaattttcctcaatttttacttccccctatgatgaaaaaccatggaaattatattgtaagcctgggaaatgtttgtaaatggttaagcgaggttgcagaaaatttaggtgttgaaatctaccctggttttagtgctgctgaagttcttattgatgacaatgggaaagtttatggtgttgctacaggcgatatgggtgtttccagagatggttcggctaaagactcttgggaatcaggaatggagcttcatgcaaaatatactcttttctcagaaggagccagaggatctctttctaaattcttaatcgataattttaatctttctgaagatagggatcatcaaaaatacgcaattggaattaaagaattgtgggagataaaagatgagaaccaccaagaaggtttagttgaacattcaatgggttggcctttaagtgatggaactgggggaggttcatttctttatcattttggacaaaatcaagtttcaataggttatgttgttcaccttaattatactaatccttatgtttctccatttgatgaatttcaacaatataagacacatccttcagttaaaaaagttttggagggtggaaaaagaatatcatatggagcaagagcaataactgcaggaggttatcaatcagtaccaaaattattttttccagggggtgctttaataggttgttctgcaggatttttaaattatccaaaaataaaaggaacccataacgctatggagtcaggtattcttgttgctgaatctattgttgaaaactttgttaatggaaatcaaactgatgatctatcaaattatcaggaaaaatatgaaaaaagcaaaatagcaaaagaattaaagaaggttcgtaatgttaaaccatttcaatccaggtatggagttattttaggcactattttaagtggtttagatatgtggttaaataccttcggaattactttaccattcacattaggtcatattaaacctgattataaaacattacgaaaagcatctgagtgtaaggaaataatatatccaaaacctgatggggagttttcttttgataaattatcttcagtctttctttcaagcactaatcatgaagaggatcaaccagctcatttaacattaaaagatagtaatatacctattaaagtgaatctagttgaatacgatgagcctgcacaaagatactgtcctgcaggagtttatgaggttctctcagctgatgagaatagtgagccagtttttcagattaatgcgcagaattgtgtgcattgtaaaacttgcgatataaaagatccctcacaaaatattaatt

SEQ ID NO: 220652 - DNA, 1356 bp, Unknown
  Bacterial polypeptide expressing nucleotide sequence isolated from the Sargasso Sea
aatctctaagttggccgactttgttgcttcctaaagttcaacaaaatcacaaaaattatatcataagtcttgcaaacttatgcagatggctgggaggacaagctgagtcattgggtgttgaaattttccctggttttcctgcaagtgaagttttgtataacgaagatggatcagttaaaggaattgccacccaagacatgggtttagataaacagggaaataaaaaagacagttatgaacctggcatggaattacatgcaaaagtaactgtatttgctgagggttgtagaggacatttaggtaaagaattaataaaaaaatttaatcttaatgaaggtaaagacccacaacaatacggaattggatttaaagaaatttgggaggttgatgaaaaaaatcatacagagggccttgtaatgcatacggcaggatggccgttagataatagtacatatggtggaagttttatgtaccatgctgaaaataaacaaatatttttagggtatgtaatcggtttagattacaaaaatccacacctttcaccttttgatgaatttcaaagatttaaaactcatccagcaattaaaaaaataattgaaggtggtaaaagaatttcatatggcgcaagagctcttattgaaggaggaattcaaagtttacctaaaatgtatatgcctggtgctcttctggttgggtgtgatgcaggtacattaaatatgccaaaaattaaaggttcacacactgcaatgaaaagtggaatgattgcggctgaaactattgttgatcattttaatttaaagaaaactttatctctatacgaagaaaaatttaaaaatagttgggtttataaagaattacatgaagcaagaaatgttaagccaagcttttcttgggggctaattcttggaataatatttacaggtatagatcagatattatttagaggaaaattaccttttactctaaaacacaagcatgctgatcacgaaactctaaaaccagcgaattctatgccaaaaatcgagtatcctaaacctgataatgtaataacatttgataaaacaagttcagtttatctaacaggtacaaatcatgcagataatcaaccggtacacttaaagttaaaagatccaaatttacctatcagttacacgttagagaaatttgatgagccagcacaaagatattgtccagcaggggtttatgaagttcagcaagaaaataatattaataaatttgttattaacgcacagaattgtattcattgtaaaacttgtgatatcaaagagccttcacagaatattacttgggttacccctgagggagggggtggacctaagtatggaaatatgtaat

SEQ ID NO: 220653 - DNA, 1039 bp, Unknown
  Bacterial polypeptide expressing nucleotide sequence isolated from the Sargasso Sea
aaaatttgaattaaataaaggtaaagatcctcaacaatacggaattggttttaaagaaatttgggaaatagaaaataaaaatcacgaagaaggcttagttatgcatacagctggatggccattagataacaatacatatggtggtagttttatgtatcacgcagaaaataagcaagtttttgtaggttatgtaataggtttagattacaaaaatcctcacttatctccttatgatgaatttcaaaggtttaaaacacatccagcaataaaaaaaataatagaaggcggaaaaagaatttcttatggtgcaagagccctaattgaaggtggatttcaaagtttgccgaaaatgtttatgcctggagctttattagttggttgtgatgctggaactttgaatatgccaaaaattaaaggatctcatacagcgatgaaaagtgggatgattgcagctgaaactattaatgaacatttaaaagaaaataaagatttatcaatttatgaaaagaaatttaaaaatagctggttacataaagagctttatgaggcccgaaatgtaaaacctagttttagctggggattaattttaggaataattttcacaggtattgatcaaattttatttagaggaaaacttccttttaccctaaaacataaacatgccgatcatgaaacattaaaacccgcaaaccaaatgcctaaaatagattatccaaaatacgataatgtaataacatttgacaaaacaagttcagtttatcttactggcacaaatcatgccgataatcagcctgttcatttaaagcttaaagatccggatttaccaattaattatacgttagaaaaatttgatgaacctgctcaaagatattgtcctgcaggcgtttatgaagttcaaaaagaaaatgatgtaaataaatttgtaattaattctcaaaattgtatccattgtaaaacatgtgatattaaagaaccttctcaaaatataacttgggttacaccagaaggaagtggtggtccaagatatggaaatatgtaa

SEQ ID NO: 220654 - DNA, 966 bp, Unknown
  Bacterial polypeptide expressing nucleotide sequence isolated from the Sargasso Sea
aggagcatgatgagggtatggttatgcataccacaggatggcctttagataattcagattatggtggaagtttttgttatcacgcagaaaaaaatcaagtttttattggctatgtcattggactagattatcaaaacccattcttatcaccttatgatgagtttcagcgttttaaaacacatcctgtaattgctaaaatactaaaagatggaaaaagaatttcttatggagcaagagcattaattgaaggaggttttcagagtttaccaactatgcatatgcctggcgcattaattgttggttgtgatgcaggaacacttaatatgcctaaaattaaaggctctcatactgctatgaaaagtggaatgattgcagctgaaactattaatgaatatataactgtaaataaacctctttcagaatatgaaaataaatttaaaacatcctgggtttacaaagaactatatactgcgcgtaatgttaaacctagttttcaatggagtttgataccagcaataatattcactggtatagaccaaattatctttagaggatatttacctttcacccttaaacattctcatgctgatcatgaaactttaattccagcccataaagctaaaaaaattgattaccctaaatatgatggaaaacttacctttgataaaactagttcagtttatttaactggcacaaatcatgaagccgatcaacctgtacatttaaaattaaaagatcctgatttaccaatcaattatactttaaatgaatttgatgaaccatctcaaagatattgtcctgcaggggtgtatgaagttgatagaaccatacaaaatgatcctaaatttgtaatcaatgctcaaaattgtatacattgtaagacatgtgatattaaagagccttctcaaaacataacatgggttacacctgaaggagcgggtgggccaaattatgcaaatatgtaaa

SEQ ID NO: 220655 - DNA, 717 bp, Unknown
  Bacterial polypeptide expressing nucleotide sequence isolated from the Sargasso Sea
aattatttttccctggtggtgcgcttataggttgttccgctggatttttaaattatccaaaaataaaaggaacccataatgctatggagtcaggaatgattgctgcagagtctatagttgaaaactttattagtggaagtgataacgaagatctatcaaattatcaggaaaaatatgaaaacagcagaatagccaaagaattaaagaaggtaagaaatgttaaaccatttcagtcaagatatggagcgcttctgggaactcttttaagtggtattgatatgtggttgaacacatttggaataactttaccatttacacttggtcatattaaacctgattataaaacattacgaaaagcatcagagtgtgagaagataatttatccaaagccagatggtcaattttcgttcgataaactctcttctgtttttctttcaagcactaatcatgaggaagatcagccagctcatttaacattaaaagatagcagcataccaattaaagtgaatcttgttgattatgatgagccagcacaaaggtattgtcctgctggtgtttatgaggttctttcatctgatgataacagtgaaccagtttttcaaataaatgctcaaaattgtgttcattgtaaaacatgtgatataaaagatccttcacaaaacattaattgggttgttccacaaggtggtgaaggccctctgtatggtggtatgtgag

SEQ ID NO: 220656 - DNA, 991 bp, Unknown
  Bacterial polypeptide expressing nucleotide sequence isolated from the Sargasso Sea
agttgaaccacataaacatcaaaaaggactcactcttcacagtgtggggtggcccatcgacgggtcaacgtatggaggctctttcatataccacctagagggaaatcaggtatccgttggatacgtaataggattggattataaaaacccgcatctaagtccattcgacgagttccaaaggttcaaaacccaccccaaaattaaacctttgttcgaaggcggtaggcgaatttcttatggagcaagggcactaaatgaaggcggattccaaagcatcccaaagctcacttttcccggcggtctaattgtagggtgcggagcaggttttctcaatgtgccaaaaataaagggaacacacacggctatgaagtcgggtataaccgccgcagaggcattggaggccgcatttcgactgcaggggattgaaccaggagccgaacttcatgattatgaggagcgactaaaaaaaacatggttatgggaggagctatataaggtcagaaatatacggccaggattccgagctgggctaacgttcggtctaattaacgccggcattgataccattttgtttaggggcagggccccgtggacgctccgaaaccatgacgaccacgactccctacaacttgcagcgcactgtcaaaaaattgattatcctaagcctgacggagttgttagtttcgacaaaccttcttcggtgtttctctcaaacacaaatcatgaagaaaatcagcctgttcaccttagacttaacgatccatcgataccggttgatctaaacctcaggctttatgatgcccccgagcaacgattttgcccagccggggtctacgaaataatagccgatgaggatggagacaatccccaattgcaaataaatgcacaaaattgtgtacactgcaaaacttgcgatataaaagacacatctcaaaatataaattgggtggtacccgagggtggaggtggaccaaattacccaaatatgtaa

SEQ ID NO: 220657 - DNA, 1444 bp, Unknown
  Bacterial polypeptide expressing nucleotide sequence isolated from the Sargasso Sea
agacgaattaattccaaattggaaagatttaaatccacctataaagacaaaagtcactaaggagaaatttttatttttaggaaaaacaaaatcattaagttggccaacatggttgttacctgctgttcaaaaaaatcataaaaattatataattagtcttgcaaatttatgtagatggcttgctgagcaagcagaagcacttggtgtagagatatttccaggatttcctgcaagtgagattttatttaatgatgatggttctgttaaaggtgtagccacgcaggacatgggcatagacaaacaaggaaatcaaaaagatagttttgagccaggcattgaacttattggtaaggtaacagtttttgctgaaggttgccgaggtcatttaggaaaacaattaataaaaaaatttaatcttaataaagacaaagatccccaacaatatggaattggatttaaagaaatttgggaaatagatgaaaaaaatcatgaggagggattagtgatgcatacagctggatggcctttagataaaaacacttatggtggaagttttatttatcatgctgaaaacaaacaagtgtttttaggatatgtaataggtttagattatcaaaatcctcacctttctccttttgatgagtttcaaagatttaaaacacatccatcaataaaaaaaattatagaaggtggaaaaagaatttcttatggcgctagagctttaattgaagggggtattcaaagtttaccaaaaatgtttatgccaggcgcattacttattggatgtgatgcgggaacattaaacatgccaaaaataaaaggatctcacactgctatgaaaagtggaattttagctgcagaggctattaatgaacatattcagtctaaaaaagatttatcattatatgaggaattatttaaaaaaagctggttatataaagaactgtatcaagcaagaaatgtaaaacctagttttaattggggtttaattttaggaataatttttacaggaattgatcaaattttatttagaggaaaacttccatttacattaggacacaagcattccgatcatgaaactttaaaacctgcagataaaatgccaaaaattgattatcctaaacctgacaatgtgattacttttgataaaacaagctcagtatatttgactgggactaatcatgaggataatcagccagtgcacttacagctaaaggatgaagatttacctataaaatatactcttgaaaaatatgacgaaccagcacaaagatattgtccagcaggagtttatgaggttcaaaaagaaaatgatataaacaaatttgttataaacgcacagaactgtattcattgtaaaacttgcgatattaaagaaccttctcaaaatatagtttgggtcactccagagggaggtggtggaccaaagtatggaaatatgtaa

SEQ ID NO: 220658 - DNA, 1621 bp, Unknown
  Bacterial polypeptide expressing nucleotide sequence isolated from the Sargasso Sea
atgtccagagagacaatggaatatgatgttgtaatagttggtggaggtccatcaggactatctacggcaataaaacttaaacaattagatccaaatttaaatgtttgtttattagaaaaagcatcagagataggtgcgcatattttaagcgggaatgtttttgaaactagagctttagatgaactcctgccaaattggcaagaacttaattcaccaatcaaaacaaaagtaacaaaagaaaagtttttgtttttgggtaaaaaaaaatctctaagctggccaacgtggttactgccatcagtacagcaaaatcataataattatattattagcttagcaaacttatgtagatggcttgcagaacaagcagagtcattaggtgtagaaatttttccagggttcccagctaatgaaattttgtataatgataatggttctgtaaaaggtgtagctactcaagatatggggattgataaagatggaaataaaaaagatagtttcgaacctggtatagaattgttgggtaaagttacagtttttgctgaagggtgtagaggtcatttaggaaaaaaattaattaaaaaatttgagttagataaaaataaagatcctcaacaatacggaattggttttaaagaaatttgggagatagatgaaaaaaatcatgaggaaggattagtaatgcacacagcaggctggccgttagataacaatacttatggtggtagttttatgtatcatgcagaaaacaaacaagtatttttaggctatgtgataggtttagattatcaaaacccacatctatctccgtttgatgaatttcaaagattcaaaacacatccggctataaagaaaattatcgaaggtggaaaaagaatttcttatggtgctagagctttgatagaaggaggtttccaaagtttaccaaaaatgtttatgccaggtgctttattaattggatgtgatgctggaactttgaatatgccaaaaattaaagggtctcatacagcgatgaaaagtggaattatcgctgctgaaactattattcaaaatattaaagaaaaaaaagacctttcaatttatgaagataatcttaaaaaaagttggttatatgaagagttatacaaagctagaaatgtaaaaccaagttttagttggggtttaattctaggtattatttttacaggtattgatcaaattttgtttcgaggcaaattgccatttactttaaaacataagcatgctgatcacgaaaccttaaaattagcaagtgaaatgccaaaaattgattaccctaaacctgacaatgtaattacttttgacaagacgagctcagtttacttgacaggtactaatcatgcagataatcaaccagtccatttacaattaaaagatcctaatttaccaataaattatactttagaaaaatatgatgaacctgctcaaagatattgtccagctggagtatatgaggtgcaaatagaaaacggatctaataaatttgttataaattcacaaaattgtattcattgcaaaacttgtgatattaaagaaccatcgcaaaatattacttgggttacccctgaaggtgggggtggtcctaaatatggaaatatgtaat

SEQ ID NO: 220659 - DNA, 1477 bp, Unknown
  Bacterial polypeptide expressing nucleotide sequence isolated from the Sargasso Sea
gtcacagcaataaaattaaaacaattagacgcaaatttaaatgtatgtgttttagaaaaagcgtcggaaataggtgcacatatattaagtggaaatgtttttgaaactagagctttagatgaattattacctaattggaaagatttaaaatcaccaattaaaactaaagtttcaaaagaaaaatttttatttttaggaaaaacaaaatctttaagttggccgacatggctacttccttctgttcaacaaaatcataaaaattatattattagtttagctaatttatgcagatggcttgctgaacaagctgaagccctaggtgttgaaatttttccaggatttccagctagtgaaattttgtatgatgacaaaggtgtagttaaaggtgttgtgacccaagatatgggtatcgataaagaaggaaataaaaaagatagttttgaacctggaatagaacttttaggaaaggtaacagtatttgctgagggttgtagaggtcatttgggaaaacaattgattaaaaaatttgagttagacaaaggtaaagatcctcaacaatatggaataggttttaaagaaatatgggaaattaacgaagaaaatcatgaagaaggcttggttatgcatactgcaggatggcctttagacaataatacatatggtggaagctttatttatcatgctgaaaataagcaagtttttttgggttatgttattggattagattataaaaatcctcatttatccccatttgatgaatttcaaagatttaaaacacatccagctataagaaagatgattcaaggtggaaaaagaatttcatatggagctagagcattaattgagggtggctttcaaagtttacctaaaatgtatatgcccggagcattactaataggatgtgatgctggaacattaaatatgccaaagataaaaggatcacatacagcaatgaaaagtgggatcattgcagctgagactattgttgaacattttaaatctaaaaaagatttatcgttatatgaagaaaattttaaaaaaagttggttatatgaagaactctataaagcaagaaacgttaaaccaagttttagctggggattgattttaggaataatatttacaggaatagatcaaatattatttaggggacgattacctttaacattaaagcacaaacatgccgatcatgaaacattaaaacctgcaaatgaaatgccaaaaattgagtatccaaaaccagataataaaatcacttttgataaaacaagctctgtttatttaactggaacaaatcatgcagataatcaaccagtacatttacaattaaaagatccaaatttaccaatcagttacacattagaaaaatttgacgaacccgctcaaagatattgtcctgcaggtgtttatgaaatacaaaaagagaatgatattaataaatttgtaattaactctcaaaaattgtattcaattgtaa

SEQ ID NO: 220660 - DNA, 970 bp, Unknown
  Bacterial polypeptide expressing nucleotide sequence isolated from the Sargasso Sea
ttacataaagaaggaacagttatgcatactgcaggttggccagcaaatggaacagtctcgggttcttattgctaccatggcaaaaataatcaactttatatgggttacgttattccattggattataaaaatccttatttaagtccatatgatgaatttcaacaatggaaacatcattctgggatatctaaacttcttaaggatggaactagagtagcttatggtgcaagagctcttataaagggcggttatcagtctagacctaaaatgtcattcaatggcggacttattgttggggataacgctggcacactcaattttcctaagataaagggaacacatacagcaatgaaatcagggatgattgcagcagaaactgtttttgatgcattagaaaataataatattggttccgatcttgttatttatgaagacaacattcaaaattcttggcttcaaaaagagttatataaagcaaggaactttggtcccttgttacatatgtttggtaactttgtgggacctattttagctgccattgatcaattcatatttagaggtaatctaccatttacattaaaccaccctactcctgattatgcttgcttagaagatgcttcaaaaatgtctaaaattgattatcccaaaccagatggagttatatcttttgataagttaagttctgtttacctttccaacactacacatgaagaagatcagccatgtcatttgaaattaaaagatgaaaacatcccaataagtgtaaatttacctaaatatgcagaaccagcccagagatattgtcctgcaggtgtttatgaggttgtaaatgagaataatcaagacaaatttgttataaatgctcagaattgcgttcactgcaagacatgtgacatcaaagatccgtcacaaaatattacttgggtaacacctgaaggcatgggtggtccaaattatctcaacatgtaat

SEQ ID NO: 220661 - DNA, 1576 bp, Unknown
  Bacterial polypeptide expressing nucleotide sequence isolated from the Sargasso Sea
tctggtcttgctgctgccattaaatttgcacaattgaataaagaaaataatacggattacagtatttgtcttttggaaaaaggatctgaaattggagctcacattctttctggaaatgtttttcagcccaatgcgctagacgagttaataccaaattggaaagaattaaatgctcctcttaatgttcctgttaaaaaagataaattattatttcttttagagaagattggtataccagtaccctcttttgtcatgcctccaatgaataatcatggtaactttgttattagtttaggtaatttatgtagatggcttggtgaacaagctgaacagatgggcgttgaaatatttcctggatttcctgctagtaaaattttaattgaagatgataaagttgttggtgttcaaactggtgatatgggtatttcagaatctggtgaagttaaaccaggacatgaacctggtattgaaattagagccagatacactattttaggagaaggttgtagaggtcatcttggcaaacaagtaattcagaaatttaacttatctgatggcaaggatccacagcattatggaataggttttaaagaagtatggaaaattaagcctgaacttcatgaagagggtttagttgtccatacaaatggctggcctactccgtttgatactccgtcgggctcatacttatatcatggtgaaaataatgaaatatatctgggttatgtaatacccttagattacaaaaatccacatctcagtccatttgatgaatttcagaaatggaaaacccacccatcaataaaaaaatatcttgaaggaggagaaaggattacatatggtgcaagagccctaattaaaggtggattacaatctctgccaaaaatggaatttcctggtggccttcttattggatgtaatgccggtacacttattttttctaaaattaaaggttctcacacagcaatgaaatctggtgaaatagctggtcaacatatttttgaagaactacaagaatcatctaacgaatcatatgactcaagaattaagaactcatggatttatgatgaactttataagtctagaaactttggtccatttttccataagtatggtgctcttatcggagctgcatttaatgcagtggaccaattcatcttcagaggaaaattgccatttactctcaatcatccgactcctgactatgcatgtcttaaaaaagctgatgaaatgccaaagatagaatattcaaaaccagacggggtatattcgttcgataagttatcatcagtttatctatccaatacaaatcatgaagaggatcaaccgtgtcatcttcaactaaaagatgcatcaattcctataagtgttaatcttccaatgtacgatgaaccagcacaaagatactgccctgctggtgtttacgaggttgtagaaaaagataaccagaaaaaatttgtagttaatgcccaaaactgcgttcactgtaaaacttgtgacattaaagatccgtctcaaaatattaactgggtttcacctgaaggtcctggaggacctaattatccaaatatgtaaa

SEQ ID NO: 220662 - DNA, 1651 bp, Unknown
  Bacterial polypeptide expressing nucleotide sequence isolated from the Sargasso Sea
gatggaacgcgaatcaatggaattcgatgttgttatcgtcggcgctggcccagctggcttggcgactgcgtgtcgattaatgcagatatcaaaggattcaggtaaagaaattaccgtttgcgtggtagaaaaaggctccgaagtgggcgcgcatattctatcaggcgccgtattcgaaccaagggtattagacgagctattcagcgactggcgtgataaaggcgcccccgtcaccaccgccgtgacccacgatgaaatctatctactcaactccgctaccgacagcaaactcatgcccaatgcatttgtgccgaaaaccatgcacaacgaaggcaactatattgtcagcgtaggtaatctctgtcgctggctcgcgacgcgtgctgaagaactcggcgtagaaattttccccggctttgccgccagcgaattactcttcaatgaagataacagcgtgaagggtatcctgattggcgatatgggcgtcggcaccgatggccaacccaaagacagctttatgcccggcatggagcttcacgccaaatataccgtgttctcagaaggctgccgtggtcacttaggcaaacagctgatcgcgaaataccacttagataatggtaaaacaccacaacattacggcctaggctttaaagaaatctggaaagtgcccgccgaacaacacgaacaaggtaaagtggtgcacacaggtggttggccattaaccgatggcgcctcgggtggtggcttcctctatcatatggaagacaaccaaattgccgtgggtctgattatcgacctcaattacaaaaacccccatttaagtccattcgatgagtttcagcgttataagactcacccagtcatcgccaaatacttaactggcggcgagcgtttgagctatggtgcacgtgctatcactaaaggtggcctgaactcactgccgaagatgagtttccccggcggtttgctgattggttgcgatgcgggcactttaaactttgccaagatcaaaggcacgcataccgccatgaagagcggcattgttgcggctgaaaccttagctaaggcaatgatggccgaggtcgaaggcggtaaagatctggattgtttccaaacccatctggaagaaagctggttacacgaagagctatataagtcgcgcaactttggcccggcaatgcataagtttggcactttccttggaggtgcatttaactacatagatcaaaactggttcggtggtaagttcccgatcaccctgcgtgatgaacacccagactatgcacaaatggccccagtaagtgcctacaacaagattgattatcccaaacccgatggcaaactcagcttcgataagctctcttcagtttacctgtcgagcacctatcatgaggaagaccagccttgccatctacgcttaaaagacaacagcattccgctcgggataaacctgacgcaatttaacgagcccgcccagcgttactgccctgctggcgtgtacgaaattgttgaggaagcgggtcaaccgaagtttgttatcaatgcgcaaaactgcatccattgcaaaacctgtgacattaaagatcctagccaaaatattacttgggtgacgcccgagggcggcggcggtccaaactacccgaatatgtaa

SEQ ID NO: 220663 - DNA, 1117 bp, Unknown
  Bacterial polypeptide expressing nucleotide sequence isolated from the Sargasso Sea
gcccggaattgaaattagggcaaaatacactatcttaggtgaaggttgccgcggccatcttggtaaacaaattattaaaaaatttaaccttagcgaagataaagatcctcaacattatggtattggttttaaagaagtatggaaaataaaaccagaattacatcaagaaggattggtaatacatactaatggctggccaacatctaccgacactccatctggttcatatttttatcatggtgaaaataatgaagcttacatcggctatgtcattccacttgattataaaaatcctcatctcagtccatttgatgaatttcaaaaatggaaaactcatccagctataaaaaaatatttaaaagatggtgaaagattatcttatggagctagagcactaatcaagggtggacttcagtctttgcctaaaatggaattccctggaggtttattagttggtgataacgctggtaccttaatattttctaaaattaagggatcgcatactgcaatgaagtctggagtaattgcaggagaacatatctttgaacttctggagggaaaatcctcaactacatttgatgagaaaattaaaaattcatggattcataaagaactatataaatcaagaaactttggtccaattttccataagtttggagcattgttgggagctgcttttaatgcaatagatcaatttatttttcgtggaaatttaccctttactttaaatcatgctactcctgatcatgcatgtttaaagaaagctgatgaaatgccaaaaatagaatatccaaaacctgatggaatttattcatttgataagctctcatcggtatatctatcaaataccaatcatgaagaagatcaaccatgtcatttacaattaaaagatcccacaattccaataagtgtcaatcttccaatgtatgatgaaccagcacagagatattgtccggcaggagtttatgaggtagttaataaagataatgaaaacaaatttgtaattaatgcacaaaattgtgttcattgtaaaacttgtgatatcaaggatccgtctcaaaatattaattgggtaagccctgaaggtcctggtggtccaaattatcctaatatgtaa

SEQ ID NO: 220664 - DNA, 895 bp, Unknown
  Bacterial polypeptide expressing nucleotide sequence isolated from the Sargasso Sea
atggggaaaaataatcaactttatatgggttacgttgttccattggattataaaaatccttatttaagtccatatgatgaatttcaacaatggaaacatcattctgggatatctaaacttcttaaagatggcactagagtagcttatggcgcaagagcacttataaaaggaggttaccagtctagacctaaaatgtctttcaatggaggacttattgtcggggataatgctggcacactaaattttcccaagataaagggaacgcatacagcaatgaaatcagggatgattgcagcagatactgtttttgatgcattagaaaataataattttggttccgatcttgttatttatgaagacaatattcgaaattcttggcttcaaaaagaattatataaagcaaggaactttggtcccttgttacataagtttggtaattttgttgggcctattttagctgccattgatcaattcatatttagaggtaatcttccatttacattaaaccaccctactcctgattatgcttgcttagaagatgcttcaaaaatgtctaaaattaaatatcccaaaccagatggagttatatcttttgataagttaagttctgtctacctttccaacactacacatgaagaagatcagccatgtcatttgaagttaaaagatgaaaacatcccaataagtgtaaatttacctaaatatgcagaaccagctcaaagatattgtcctgctggtgtttacgaggttgtaaatgagggcggtcaagacaagtttgtcataaatgctcaaaattgcgttcattgtaagacatgtgacatcaaagatccgtcacaaaatattacttgggtaacacctgaaggtatgggcggtccaaattacctcaatatgtaat

SEQ ID NO: 220665 - DNA, 1645 bp, Unknown
  Bacterial polypeptide expressing nucleotide sequence isolated from the Sargasso Sea
tatggaacgtgatgtaatggaatatgatgtccttgttgtgggtgctggacctgcaggactatctacagctataaaatttgcccaattaaataaaaaaaataatacaaatcattcgatatgcgttattgaaaaaggatctgaggttggtgctcatattttatctggcaatgtatttgagcctacagctctcaatgagcttattcccgattggaaggacaaagaggcaccacttgatacacccgtaaagaaagatattgttaggtacctagtaaatgaaaacatatccatacccgttcctctaccaggattttttatgcctaatttcaacaatcatggtaattacattatgagtcttgctaatttttgtagatggctcgcaaaagaggcagagtcacttggtgttgaaatatttgctggctttactgcttctgaaataattattgaaaatgatgagctgaagggaattgttactggtgaaatgggtgttagtaaggatggtgaaaaaaaaccatcatatcagcctagtatggagctaagagcaaaatacactgtcctttctgaaggttgtagaggtcatcttggtaagcagataattaaaaaatttaatttagatcaaggtaaagatccacaacattatgggataggttttaaagaaatatgggatatcaaacctgaattacataaagaagggaccgtgatgcatactgcaggttggccagctaaaggtacagcatctggatcttattgctaccatggtaaaaataatcaactctatatgggttatgtagttccattagattataagaatccttatctaagtccatatgatgaatttcaacaatggaaacataattctggtatatctaagcttctaaaagatggaaccagagtggcttatggtgcaagagcactcataaaaggtggtttccagtcacgaccaaaaatgtcatttaatggtggacttattgttggtgataatgcgggaacactgaatttccctaaaattaaaggtactcatacagcaatgaaatctgggatgattgctgctgaagttatatatgaggcaatagaaaacaataatattagttcagatcttgttctttatgaagatagaattcaaaagtcatggcttcaaaaagaactttacaaagcaaggaactttggtccgttattacataaatttggtaatctatttggccctatcttagcagctattgatcaatttgtttttagaggcaatcttccatttactttaaatcaccctactccagattatgcttgcttagaagatgcatctaagatgcctaaaattaattatcccaaaccagatggtgttatatcttttgataaactcagttctgtctatctatcgaatactacacatgaggaagatcagccatgtcatttgaaattaagagatgaaaatatcccaataagtgtaaatttacccaaatatgctgaaccagctcagagatattgtcctgcaggtgtttacgaggttgttaatgagaataatcaagataaatttgtcattaacgctcaaaattgtgttcattgtaaaacatgtgatattaaggacccatcgcaaaatattacttgggtaacacctgaaggtatgggtggtccaaattatcttaatatgtaa

SEQ ID NO: 220666 - DNA, 1476 bp, Unknown
  Bacterial polypeptide expressing nucleotide sequence isolated from the Sargasso Sea
aaccacgagtgttagatgagctattcagcgactggcgcgattcaggcgctcctgtcaccaccgccgtgacgcacgatgaaatctatctactcaactccgccaccgacagcaagttgatgcccaatgcgtttgtgcctaaaaccatgcacaacgaaggcaactatattgtcagcgtgggtaacctctgccgttggctcgcgacccgcgccgaagcgcttggcgtagaaatcttcccaggctttgccgccagcgaactactcttcaatgaagataacagcgtgaagggtatcctgattggcgatatgggcatcggtgccgatggccagccgaaagacagctttatgcccggcatggaactacacgccaaatataccgtgttctcagaaggttgccgtggtcacttaggcaaacagctgatcgcgaaataccacttagataatggcaagacaccacagcattacggtctaggctttaaagaaatctggaaagttcccgccgaacaacacgagcaaggtaaagtggtgcacacaggtggttggccactaaccgatggcgcatcgggtggcggcttcctttaccatatggaagacaaccaaattgccgtgggtctgattatcgacctcaactacaagaacccccatttaagcccattcgatgagttccaacgttataagactcacccagttatcgccaaatacttaactggcggcgagcgtttgacctatggtgctcgcgcaatcactaaaggcggcctgaactcactgccgaagatgagtttccccggcggtctgttgattggttgcgatgctggaaccttaaactttgccaagatcaaaggcacccacaccgccatgaagagcggtattgtcgcggctgaaaccttagccaaagcaatgctggccgaggttgaaggcggtaaagatctggattgtttccaaacccatctcgaagaaagctggttacacgaagagttgtataagtcgcgcaactttggcccagcaatgcacaagtttggcactttcctcggcggcgcatttaactacatagatcaaaactggttcggcggtaagttccccatcactctgcgtgatgagcacccagactatgcacaaatggccccagtcagtgcctactgcaagattgattatcctaagcccgatggcaagctcagcttcgataaactctcttcagtttatctgtcgagcacttatcatgaggaagaccagccttgccatctgcgcttaaaagacagcagcataccgcttggcataaacttgacgcaatttaacgaacccgcccagcgttactgccctgctggcgtgtacgaaatcgttgaagaagcaggccagcctaagtttgtgatcaatgcgcaaaactgcatccactgcaaaacctgcgacattaaagaccctagccaaaacattacttgggtgacacctgagggcggcggtggtccaaactacccgaatatgtaac

SEQ ID NO: 220667 - DNA, 1639 bp, Unknown
  Bacterial polypeptide expressing nucleotide sequence isolated from the Sargasso Sea
aatggttgaggaaataaaaagagaagtaatggaatatgatgttatcattgttggagctggtccagcaggactttctacagcaataaaattacggcaacttgactcggaaatttcagtttgtattttagaaaaaggttctgaagtcggtgctcatattcttagtggaaatgtttttgaaactagggctcttgatgagttaatccctacttggaaggaagaaggagctccaataaaaactaaggtaaaaaaagaaaaatttatgtttttaagccaaaattcatctttaagttggcctacgtggttattaccttcagttcaaaaaaatcataataattatattattagtcttggcaatctatgtcgatggcttgcagataaggcagaaagtttaggggtagaaatattcccaggatttgctgcttcaaaattattatacaattctgataattctcttaaaggcgttcaaacaggagacatgggcttagataaagacgggaatcaaaaagataattttgaaccaggaatagaaattcacggtaaggtaacaatattagctgaaggctgtagaggtcatttaggtaagcaggtaataaaaaaatttgaacttaataaaaataaatctcctcagcagtatggcattggttttaaagagatctgggaaattgataataataatcatgaagaaggtcttgtaatgcatacaactggatggcctttagataataaaacatatggtggaagtttttgttatcatgctgaaaataatcaagtttttattggctatgtaattggattagactacaaaaatccacatttatctccgtatgatgaatttcaacgttttaaaacacattcttcaattagcaaattactcaagggaggcaaaagattatcttatggagctagagcattaatagaaggaggaatacaaagtttgcctcaaatgtatatgccaggtggtttacttattggatgtgatgcaggaactttaaatatgccaaaaattaaaggttcacatactgctatgaaaagtggaatcctagctgctgaaagtgcatatgattttattaggaataaaacatctttatcatcttatgaaaaaaaatttaaaaattcttgggcatataaagaattgtacttagcaagaaatgtcaaaccaagcttcaattggggattaatacctgcaattatttttacaggtttagatcaagttatttttagaggaaaacttcctttcacactaaaacatccgcatgctgatcatgaaactttaattcctgcaaataaagcgaagaaaattcaatatccaaagtatgataatattttgacttttgataaaaccagctctgtttatttaactgggactaatcatgaagaaaaccaacctgttcatttacaattaaatgataaaaacttacctattaattattgtttagaaaaatatgatgaaccttcccagagatattgtcctgcaggagtgtatgaagtccaaaaagattcacagggactaaatcctcaatttgtaattaatgctcaaaattgtattcattgcaaaacttgtgatatcaaagaaccatctcaaaatattaattgggttacccctgaaggagcagggggtcctaattatgcgaatatgtaa

SEQ ID NO: 220668 - DNA, 1557 bp, Unknown
  Bacterial polypeptide expressing nucleotide sequence isolated from the Sargasso Sea
aacagcaataaaattaaaacaattagatcctaatctgaatgtttgcatacttgagaaagcttcagaaataggagcacatattttaagtggaaatgtttttgagacacgtgccttagatgaactactacctaattggagagaattaaattcaccaattaaaactaaggtaacaaaagaaaagtttttatttttaggaaaaacaaaatcattaagttggccaacttggttgctaccagcggtacaacaaaatcataaaaattatattataagcttagcaaatttatgtagatggcttgctgaacaagcagaaaatttaggtgtagaaatttttccaggatttccagctagtgaagttttatataatgatgatggatctgtaaaaggtgttgctactcaagatatgggtattgataaagagggaaataaaaaagacagttttgaaccaggcattgaattattaggaaaggttacagtttttgctgagggttgtagaggtcatttaggaaaagagctaattcaaaaatttgacttaaacaaaggtaaagatccacaacaatatggaataggctttaaagaaatttgggagatcgatgagaataatcacgaagaaggtctagtgatgcacaccgctggatggccattagataacagtacttatggaggaagctttatgtatcatgcagaaaataaacagattttcttaggatatgtcattggtttagattacaaaaatcctcacttatctccatatgatgagtttcaaagatttaaaactcatccagctattaagaaaattatagaaggtggaaaaagaatttcatacggtgcaagagctttaattgaagggggttttcaaagtttaccccagatgtttatgccaggagcattgctagttggttgtgatgcggggactttaaatatgccaaaaatcaaaggttctcatacagctatgaaaagtggaatgatagctgctgaaactattaatgaacatttaaaagaaaataaagatttatccatatttgatcaaaagtttaaaaatagttggctttacaaagaattgtttgaagcaagaaatgtcaaacctagttttagttggggattaattttaggaataatatttacaggtatagatcaaattttatttagaggaaaattgcctttcactcttaaacataaacatgcggatcacgaaactttaaaaactgctaaagatatgccaaaaatagattacccaaaatacgacaatgttttaacttttgataaaacaagttcagtttatttaacaggtacaaatcatgcagataatcagccagttcatttaaaacttaaagaccctaatttaccaattaattatactttagaaaaatttgatgaacctgctcaaagatattgtcctgcaggtgtttatgaagttcaaaaagaaaatgatgtaaataaatttgtgatcaattctcaaaattgtattcattgtaaaacatgtgatatcaaagaaccttcacaaaatattgtgtgggtaactccagaaggtgggaggtggaccaaaaatacggaaatatg

SEQ ID NO: 220669 - DNA, 1027 bp, Unknown
  Bacterial polypeptide expressing nucleotide sequence isolated from the Sargasso Sea
aaacaaaggtaaagatcctcaacaatatggaattggttttaaagaaatttgggaaatagaggataaaaatcatgaagaaggcttagttatgcatacagctggatggccattagataacaatacatatggtggtagttttatgtatcatgcagaaaataaacaagtttttctgggctatgtaattggtctagattacaaaaatccacatttatcaccttatgatgaatttcagaggtttaaaacacatccagcaattaaaaaaattatagaaggtggaaaaagaatttcttacggtgcaagagctttaattgaaggtggatttcaaagtttgccaaaaatgttcatgcctggagctttattagttggttgtgatgctggaactttaaatatgccaaaaattaaaggctctcatacagcgatgaaaagtgggattattgcagccgaaactattaatgaacacttaaaagaaaataaagatttatctatttatgaagataaatttaaaaaaagctggttacacaaagagctttatgaagctcgtaacgtgaaacctagttttagctggggattaattttaggaataattttcacaggtattgatcaaattttatttagaggaaaacttccttttacacttaaacataaacatgctgatcatgaaacattaaaacctgcaaatcaaatgccaaaaatagattatccaaaatatgataatgtaataacttttgataaaacaagttcagtttatctaacaggtaccaatcatgcagacaatcaaccagttcatctaaaacttaaagatcccgatttaccaattaattatactttagaaaaatttgatgaacctgctcaaagatattgtcctgcaggtgtgtatgaagttcaaaaagaaaatgatgtaaataaatttgtgatcaattctcaaaattgtattcattgtaaaacttgtgatattaaagaaccatctcaaaatattacttgggttaccccagaaggtagtggtggtccaagatatggaaatatgtaa

SEQ ID NO: 220670 - DNA, 1468 bp, Unknown
  Bacterial polypeptide expressing nucleotide sequence isolated from the Sargasso Sea
gaaaaaggatctgagattggagctcacattctttctggaaatgtttttcagcccaatgcgctagatgaattaataccaaattggaaagaattaaacgctcctcttaatgttcctgttaaaaaagataaattattgtttcttttagaaaaagttggtataccagtaccctcttttatactgcctccaatgaataatcatggtaactatgttattagtttaggtaacttatgcagatggcttggtgaacaagctgaacagatgggtgttgaaatatttcctggatttcctgctagtaaaattttaattgaaaacgataaagttgttggtgttcaaactggcgatatgggtatttcagaatctggtgaagttaaaccaggacatgagcctggtattgaaattagagccaaatatactattttgggagaaggttgtagaggacatcttggtaaacaaataatacagaaatttaatttatctgatggtaaggatccacagcattatggaattggttttaaagaagtatggaaaattaagcctgagcttcacgaagagggtttagttgtccatacaaatggctggcctactccgtttgatactccatcaggctcatatttatatcacggtgaaaataacgaaatatatcttggttatgtagtacccttagattacaaaaatcctcatctgagtccatttgatgagtttcagaaatggaaaactcacccatcaataaaaaaatatcttgaagggggagaaaggattacatatggtgcaagagccctgattaaaggaggattacaatctctaccaaaaatggaatttcctggtggccttcttattggatgtaatgctggtactcttgttttttctaaaattaaaggttctcatacagcaatgaaatctggtgaaattgctggtcaacatatttttgaagagctacaggaatcatctaatgaatcatatgacgcaagaattaagaactcatggatttatgatgaactttataagtctagaaactttggaccattttttcataagtatggtgctcttattggagctgcatttaatgcagtggaccaattcatctttagaggtaaattgccatttacacttaatcatccaacacctgactatgcatgtttgaaaaaagctgatgaaatgccaaagatagaatattcaaaaccagacgggatatattcgtttgataagttatcatcagtttatctatctaatacaaaccatgaggaggatcaaccgtgtcatcttcaattaaaagatatatcaattcctattagtgttaatcttccaatgtacgatgaaccagcacaaagatactgccctgctggtgtttatgaggttgtagaaaaagataaccagaaaaaatttgtaattaatgctcagaactgcgttcactgtaaaacttgtgacataaaagatccgtctcaaaatattaattgggtctcacctgaag

SEQ ID NO: 220671 - DNA, 1627 bp, Unknown
  Bacterial polypeptide expressing nucleotide sequence isolated from the Sargasso Sea
atgcacagagaaactatggagtatgacgttgtgattgtaggtggtgggccatcaggccttgctacagcaattaaatttgcgcaattaaacaacgaaaataatactaattattcaatatgcctattagaaaaaggttctgaaataggcgctcatatactttctggtaatgtattccaaccaaatgcacttgatgaactaatacctaattggaaagaactcaatgctccattaaatgtacctgtaaaaaaagacaagttattatttcttttaaaaaatattggcataccaattccttcatttgtaatgccaccaatgaataatcatggaaattatgtaattagtctaggaaacttatgtagatggttgggtgaacaagctgaaaatcttggtgttgaggtttttccaggctttccagcaagtaaattattaatagaagaagataaggttgtaggtgtgcaaacaggagatatgggaatctcggaaaatggtgaatttaaacccggccatgaacctggaatcgaaataagagcaaaacatactatccttggtgaaggttgcagaggtcatttaggaaaacaaattatcaacaaatttaatcttaatgaaaataaagatccacaacattatggtattggatttaaagaagtatggaagataaaaccagaattgcatcaagaaggtttggtgattcatacaaatggttggccaacatctactgacacaccatcaggttcatatttttaccacggtgaaaataatgaagcttatataggatatgtcatacctttagattataaaaatccacatctcagtccatttgatgaatttcaaaaatggaaaactcatccatcaataaagaaatatctagaagatggtgaaagattgtcatatggagccagggcattaataaaaggtggtcttcaatctttaccaaaaatggaatttcctggcggtcttctaataggtgataatgccggaacattagtattttctaaaattaaaggttctcatactgcgatgaagtcgggtttaattgcaggagaacatgtatttgatttgttacaaaataatgcttcgtcaacatttgatgaaaagataaaaaattcatggattcataaagaactccataaatctagaaactttggacctattttccataagtttggtgcgcttcttggtgctgcatttaatgcaatagatcaatttatttttcgaggtaatttaccctttactctaaaccaccctactcctgattatgcatgtttaaaaaaagcagatgaaatgccacaaattgaatacccaaaaccagatggagtatattcattcgataaactctcatcagtatatctatcaaatactaatcatgaagaagatcaaccttgtcatttacaactaaaggatccaacaatacccattagtgtaaaccttccaatgtacgatgagccagcacaaagatactgcccagctggagtttatgaagttgtgaacaagggcaatgaaaataaatttgtaataaatgcacaaaactgcgttcattgtaagacatgcgatattaaagacccatcacaaaatataaactgggtaagccctgagggacctggaggacctaattatccaaatatgtaat

SEQ ID NO: 220672 - DNA, 799 bp, Unknown
  Bacterial polypeptide expressing nucleotide sequence isolated from the Sargasso Sea
acatcagtcttctataaataaatatttaaaaggcggttcaagagtttcttatggagcaagagctttaattaaaggaggctaccaatcaagacctaaaatgagttttccaggaggccttttgattggagataatgctggaacaatgaattttcctagaattaaaggagcacatactgctatgaaatcaggaataatagccggtgaaactatagctaatgcttttttaagtgataatttagaagaagatcttaattcatatgaagaaaattttataaattcttggttaaataaagagctttataaagcaagaaactggaaccctttcttgcataaatatggtcagtatttaggggtgctattagcaggcatggatcaatttatttttagaggtaaacttccttttactttaaatgcattagagccagaccatgaaacattgaaaccagctgaccagatgccaaaaatagaataccctaagcctgatggtgtaacttcttttgacaagttatcttctgtattcttatcaaatactaatcatgcggaagaccagccctgtcacttagtacttaaagataacagtattccaattgaatctaatctgccactctatgatgagcccgcacagagatactgtcctgctggagtatacgaggttatagaagaagatggagaaaaaaaattccagataaattcacagaattgtgtccattgtaaaacttgtgatataaaagatcctgctcaaaatatcacctgggtaacgcctgagggaatgggcggtcctaactatcctaatatgtaa

SEQ ID NO: 220673 - DNA, 792 bp, Unknown
  Bacterial polypeptide expressing nucleotide sequence isolated from the Sargasso Sea
ttaaaacacatccagcaattaaaaagattatagaaggtggaaaaagaatttcttacggtgcaagagctttaattgaaggtggatttcagagtttgccaaaaatgtttatgcctggagctttgttagttggatgtgacgctggaactttaaatatgccgaaaattaaaggctctcatacagcgatgaaaagtggaattattgctgccgaaactattaatgaacacataaaagaaaacaaagatttatcgatttatgaagataaattcaaaaatagctggttatataaagaactttttgaggctcgaaatgtaaaacctagttttagctggggattaattttaggaataattttcacaggtattgatcaaattttatttagaggaaaacttccttttacactaaaacataaacatgctgatcatgaaacattaaagcccgcaaatcagatgccaaaaatagactatccaaaatatgacaatgtaataacttttgacaaaacaagttcagtttatctaacaggaactaatcatgcggataatcaaccagttcatttaaaacttaaagatcctgatttaccaataaattatactttagaaaaatttgatgaacctgctcaaagatattgtcctgcaggtgtgtatgaagttcaaaaagaaaatgatgtaaataagtttgtgatcaattctcaaaattgtattcattgtaaaacttgcgatattaaagaaccatctcaaaatattacttgggttactccagagggtagtggtggtccaagatatggaaatatgtaaa

SEQ ID NO: 220674 - DNA, 1171 bp, Unknown
  Bacterial polypeptide expressing nucleotide sequence isolated from the Sargasso Sea
aatttatgcagatggcttgctgaacaagcagaggtattaggtgtagagatttttcctggattcccagcatcagaaattttatacaacgaggatggatccgttaaaggcgttataactcaagacatgggtttagataaagagggaaataaaaaagatggttatgagcccggaatggaattacatgcgaaagttacagtatttgcagagggctgcagaggtcacttaggaaaacagttaattaaaaagtttgacttagatagcggaaaagatcctcaacaatatggaattggttttaaggaaatttggaagattgatgaaaaaaatcaccaagaaggtttagtgatgcatacagctggctggccactagataaaaatacttatggcggaagctttgtttatcatgctgaaaataaagaagtttatttaggttatgttattggtttagattataaaaatcctcacctatctccttttgacgaatttcaaagatttaaaactcatccagcaatcagaaaaatgctggaaggaggaaagagaatatcttatggggcaagagctttgattgagggaggttttcaaagtttaccgaaaatgttcatgcctggtgcccttttaattggttgtgatgcaggtactcttaatatgccaaaaattaaaggctctcatacagcaatgaaaagtggattagttgcggcagaaactataacagaacatctaaatgagtctaaagatctctctatttatgaggaaaaatttaagaaaagctgggctttcaaagaattatatgaagcaagaaatgtaaaaccaagttttagctggggattagttttaggaattatttttacaggtatagatcaaataatttttagagggaaattaccattaacacttaaacataaacacgcagatcatgaaactttaaaaccagcaaatgagatgccagtaatagattacccaaaacctgacaatttgattacatttgataaaacaagttcagtttatctaacagggactaatcatacagataatcagccagttcatttaaaattgaaagataaagatttaccaataagatataccttagatagatttaatgagcctgcacaaagatactgtcctgcaggtgtatatgaagtgcaagtcgaaaatgatatacctaaatttgtaataa

SEQ ID NO: 220675 - DNA, 775 bp, Unknown
  Bacterial polypeptide expressing nucleotide sequence isolated from the Sargasso Sea
tataaaaaaataattgaaggtggaaaaagaatttcttatggcgcaagagctttaattgagggaggtatacagagtttacctcagatgtttatgccaggtgctttgttagttggatgtgatgcgggaacattaaatatgcctaaaataaaagggtctcatactgcaatgaagagtggaatgatcgctgctgaaacaatttatgagcatcttacaaaaaatataaatttatctgcatatgaacaaaaatttaaagaaagttgggtttacaaagaattatatgaggcgagaaatgtaaaacctagtttctcttggggattaattttgggtatattatttactggaatcgaccagattttatttagaggaaagcttcctttcacattaaagcataaacatgctgatcatgaagccttaaaaccagcagataaaatgccaaaaattgattatcctaagcccgataacgttattacttttgataaaactagttctgtttatttaacgggtacaattcatgatgataatcaaccagtacatttaaaacttaaagatccagatttacctataaaatatactttagaaaaatttgatgagcctgcacaaagatattgtccagcaggagtttatgaagttcaagaagtaaattctgttcaaaagtttgtaataaatgcacaaaattgcatacattgtaaaacttgtgatattaaagagccatctcaaaatattacttgggtaaccccagaaggtggaggcggacctaaatatgggaatatgtaat

SEQ ID NO: 220676 - DNA, 874 bp, Unknown
  Bacterial polypeptide expressing nucleotide sequence isolated from the Sargasso Sea
atttcttggatatgtcgtaaatttagactatcaaaatcctcatctcagtccttatgatgaattccaacaatggaaactccatccatcaattaagaaactgctaaaaaatggtacgcgtgtagcatatggcgcacgatcacttgctaaaggtggaattcaatcattacctaaaatgtcattccctggtggtttattaataggttgtaatgctggaactatgaactatccaaaaattaaagggacacatacagcaatgaaatcaggcatgctcgctgcagagacaatttttgatgccttccaaaataatacagtacaagatgagttagaagaattccaaactaaatttaaggaaagttggctagctaaagaactttataaagcaagaaattttggtccactacttcataagtttggatctctttggggagcaatgctagctgcaattgatcaatttgtctttagaggaaatttaccatttacactgcaagtaaaaacacctgactacaagtccttaaaagcagctgatcaatgctcaccaattacttatccaaagcctgatggtatttattcttttgataaattaagttctgtttacctttcgaatacatctcatgaagaagatcaaccttgtcacctcaaacttaaagaccctaacatcccgatttcacacaatcttcctatatatgatgagccagctcagagatactgtcctgctggtgtttatgaagttgtagaagaagatggtttaaaaaaatttgttataaatgctcaaaattgtgttcattgtaaaacctgcgatataaaagacccttcacaaaatatcacctgggttactccagaaggtatgggtggaccaaattatccaaatatgtaa

SEQ ID NO: 220677 - DNA, 652 bp, Unknown
  Bacterial polypeptide expressing nucleotide sequence isolated from the Sargasso Sea
aaaggaacccataacgctatggagtcaggtattcttgttgctgaatctattgttgaaaactttgttaatggaaatcaaactgatgatctatcaaattatcaggaaaaatatgaaaaaagcaaaatagcaaaagaattaaagaaggttcgtaatgttaaaccatttcaatccaggtatggagttattttaggcactattttaagtggtttagatatgtggttaaataccttcggaattactttaccattcacattaggtcatattaaacctgattataaaacattacgaaaagcatctgagtgtaaggaaataatatatccaaaacctgatggggagttttcttttgataaattatcttcagtctttctttcaagcactaatcatgaagaggatcaaccagctcatttaacattaaaagatagcaatatacctattaaagtgaatctagttgaatacgatgagcctgcacaaagatactgtcctgcaggagtttatgaggttctctcagctgatgagaatagtgagccagtttttcagattaatgcgcagaattgtgtgcattgtaaaacttgcgatataaaagatccctcacaaaatattaattgggttgtaccacaaggtggagaaggtcctctatatggtggtatgtaat

SEQ ID NO: 220678 - DNA, 856 bp, Unknown
  Bacterial polypeptide expressing nucleotide sequence isolated from the Sargasso Sea
ggttatgtaatacctttagattataagaatcctcatctaagtccttttgatgaattccaaaaatggaaaacacatcctgctatcaaaaaatatcttcacgaaggagagagactaacatatggagcaagagcgttaatcaaaggtggattacagtctttaccaaaaatggaatttcctggaggtcttttaataggctgtaatgcaggtacactcgttttttctaagatcaaaggatctcatacagcaatgaagtctggtgaaatagctggtcaacatatttatgaagagcttcagggaacatctgatcaatcatatgattcaagaattaaaaactcatgggtttatagcgaactttataaatctagaaattttggacccttcttccacaaatttggtgcattaattggagcagcctttaatgcaatagatcaattcatatttagaggaaagcttccgtttacactaaatcacgctactcctgattatgcatgtttaaagaaatcagatgaaatgccaaaaattgattatccaaaaccagatggtatatattcttttgataaattatcttcggtttatttatctaatactaaccatgaagaagatcaaccgtgccaccttcaattaaaagatcctacaatccctataagtgtaaatcttcccatgtatgatgaacctgcacaaagatattgtcctgctggggtatatgaagtcgttgaaaaagataatgagaaaaaatttgtaattaatgcgcaaaactgtgttcattgcaaaacttgtgatattaaagatccctcacaaaatataaattgggttactcctgaaggtcctggcggtcctaattacccaaacatgtaat

SEQ ID NO: 220679 - DNA, 688 bp, Unknown
  Bacterial polypeptide expressing nucleotide sequence isolated from the Sargasso Sea
tggtcttattgttggggataatgctggcacactcaattttcctaagataaagggaacgcatacagcaatgaaatcagggatgattgcagcagaaactgtttttgatgcactagaaaataataatattggttcagatcttgttatttatgaagacaacattcaaaattcttggcttcaaaaagagttatataaagcaaggaactttggtcccttgttacataagtttggtaattttgtggggcctattttagctgccattgatcaattcatatttagaggtaatctaccatttacattaaaccaccctactcctgattatgcttgcttagaagatgcttcaaaaatgcctaaaattaattatcccaaacccgatggagttatatcttttgataagttaagttctgtttacctttccaacactacacatgaagaagatcaaccatgtcatttgaaattaaaagatgaaaacatcccaataagtgtaaatttacctaaatatgcagaaccagctcagagatattgtcctgcaggtgtttacgaggttgtaaatgaggatagtaaagacaaatttgttataaatgctcagaattgtgttcactgtaagacatgtgacatcaaagatccgtcacaaaatataacttgggtaacacctgaaggtatgggtggtccaaattatctcaacatgtaa

SEQ ID NO: 220680 - DNA, 1176 bp, Unknown
  Bacterial polypeptide expressing nucleotide sequence isolated from the Sargasso Sea
tgaacaagctgaacagatgggtgttgaaatatttcctggatttcctgctagtaaaattttaattgaagatgataaagttgttggtgttcaaactggtgatatgggtatttcagaatctggtgaagttaaaccaggacatgaacctggtattgaaattagagccagatacactattttaggagaaggttgtagaggacatcttggcaaacaagtaattcagaaatttaacttatctgatggcaaggatccacagcattatggaataggttttaaagaagtatggaaaattaagcctgaacttcacgaggaaggtttggttgtgcatacaaatggctggcctactccatttgatactccgtcgggctcatacttatatcatggtgaaaataatgaaatatatctgggttatgtaatacccttggattacaaaaatccacatctcagtccatttgatgaatttcagaaatggaaaactcatccatcaataaaaaaatatcttaaaggaggagaaagaattacatatggtgcaagagccttaattaaaggtggattacaatctctaccaaaaatggaatttcctggtggccttcttattggatgtaatgcaggtactcttgttttttctaaaattaaaggttctcacacagcaatgaaatctggtgaagtagctggtcaacatatttttgaagaactacaagaatcatctaatgaatcatatgactcaagaattaagaactcatggatttatgatgagctttataaatctagaaactttggcccattttttcataagtatggtgctcttattggagctgcatttaatgcagtggaccaattcatctttagaggaaaattgccatttactctcaatcatccaactcctgactatgcatgtctgaaaaaagctgatgaaatgccgaagatagaatattcaaaaccagacgggatatattcgttcgataagttatcatcagtttatctatctaatacaaatcatgaggaagatcaaccctgtcatcttcaattaaaagactcatcaattcctataagcgttaatcttccaatgtatgatgaaccagcacaaagatactgccctgctggtgtctatgaggttgtagaaaaagataacgagaaaaaatttataattaatgctcaaaactgcgttcactgtaaaac

SEQ ID NO: 220681 - DNA, 913 bp, Unknown
  Bacterial polypeptide expressing nucleotide sequence isolated from the Sargasso Sea
gtaggagcacatatactttcaggtgctgttttagagccaagagcattaaacgagcttttcccagattggaaagaaagaggcgctcccttaaataccccggttacaagtgatcaatttttatttttaactcagaacaatagtttcaaactaccaacgccgccacaaatgaataatcatggcaattttattattagtttgggtaacttatgccgctggttggctgaacaagctgaagcactaggggtcgaaatataccctgggtttgccgcatcggaaatattattcaatgaggacgggtctgttaagggcgtagctactggtgatatgggtcgtggcaaagatggtacagaaactgaaaattttacgcctggtatagaacttcacgccaagcaaactgtattctccgagggaagcagagggtcgcttacaaagatccttttcgacaaattcaatttaagaagtgatgcagacccgcaaacatatgctattggcataaaagagctatgggaagttaaaccagaaaaacatcaggaagggcttgctctccatagcgttgggtggccaattgatggctcaacatacggaggatctttcatttatcacttagaaggtaatcaagtctccgttggttacgtcataggtttagattataaaaatcctcacctgagcccctttgacgaatttcagcgattcaaaacgcatccgaaaatcagacctctattcgaaggagggagaagggttgcttatggggcccgagcgttgaatgagggtggctttcagagcattccaaaactgactttccccggaggcttaatcgtgggatgcggagctggttttcttaatgttccaaaaattaaggggacccatacagcgatgaagtcggggatgactgctgctgaagcagtcgaaaaca

SEQ ID NO: 220682 - DNA, 703 bp, Unknown
  Bacterial polypeptide expressing nucleotide sequence isolated from the Sargasso Sea
atgcatttccctggcgggatgctagtaggagatgatgcaggcaccatgaattttccaaggattaaaggcactcatactgcaatgaaatcaggaatgatagccgcagagagtctttttgaagaattttacaaagaaagtccaaaagctgacgtagacagtttttcagaaaatcttaaatcttcatggttagaaactgagctgcacaaagcccgtaacttcttaccatttacacacaaatacggaactctcttaggtgtagcattagctggagttgatcaattgatatttagaggtaaattaccctttactctgcatcacgacactccagatcacgagtgtctaaaagaggcttctgatatgcctgaaataaattaccctaaaccagatggtgaaattagcttcgacaagctttcatcagtctttctttcaaatacaaatcatgaagaagaccagccttgtcatttagtgttatcggatccgtctatacctttgagtgttaacttacctaaatacgatgaacctgctcagcgttactgtccagcaggagtttatgaaattgttgaaaaggatggtgaaaaacaatttcaaatcaatgctcaaaattgtgttcattgtaaaacttgtgacataaaagatccttcacagaatataaattgggttacgccagaaggcgcaggtggcccgaattatccaaatatgtaat

SEQ ID NO: 220683 - DNA, 1087 bp, Unknown
  Bacterial polypeptide expressing nucleotide sequence isolated from the Sargasso Sea
tgccgaaggatgtagaggtcacttagggaaaaaacttattgcaaaatatgagctagataaagataaagatcctcaacattacggtattggattcaaagaagtatgggatgtcccagctgaagtacattcagaaggtactgtaatgcatacttttggttggccgagtaaatcaaaagctggttcatatttttaccatggagagaataatcaggtctacataggccttgttgttccactcgattattcaaatccacatttaagtccgtttgatgaattccagcaatggaaacaacataaagatataaaaaagatcctggagaatggaacaagagtagcttatggagctagagctctcatcaaaggaggttatcaatctagaccaaaaatgtcttttcctggtggacttattgtcggtgataatgctggaacactcgttttcaccaaaattaaaggaactcacacggcaatgaagtctggaatgcttgctgcagaaacagtatttgatgcaattcaaaataataatctagatgctgatttagagacctatgaagaaaaatttgattcatcttggatacaaacagatttgtataaatcaagaaacatgacacctcttctccataaatatggatcgtggattggaggaattttaatggctatcgagcaattcttatttagaggtcgttatccgttcacattaactcataaaacacctgactatgcatgcatgaaaaaagcaagtgagtgtgaaaaaattgattatccaaaacccgatggaaaaattagctttgataaactatcttctgtttttctttctaataccaatcatgaagaagatcaaccttgtcacttaactctcaaagattcctctattcccataaatgtaaatctaccgacttatgatgagccggctcaaagatactgtccagctggtgtctatgaggttgtagagaaagacggagaacacaaatttcaaattaatgctcaaaattgtgttcattgtaaaacttgtgatatcaaagaccctagccaaaatatagtttggataacccctgaaggcatgggtggtcctaactatccaaatatgtag

SEQ ID NO: 220684 - DNA, 1660 bp, Unknown
  Bacterial polypeptide expressing nucleotide sequence isolated from the Sargasso Sea
aatgcaggaagaaaatacaagagagtctatagaggttgatgtgctgataattggtgctggaccggctggattagcaacggcaataaaactgaaaaccgaagcaaataaaaataatcaagaaataaatattgttgtccttgaaaaaggctcagaggttggtgcccacatactttcgggtgcagtaattgatccaattggcctggatatgcttttgccaaattggagagatctcgaccctccagctatgagtgaagtgattgatgatagattttatattctaggaccagctggtagcttaagaataccaaacttttttttcccaaggctgatgtccaatcacaattgttttgcgacaagcctctcaaatgtagtcaaatggttagggggtattgcccagtctctcggaattgaagtttatcctggatttccagcatctgaaataatttaccagggtgatagagttgtaggagtcataactggtgactttggtatctcaagaaatggagaaaaaaaggactcctttatgcaaggtatggaaatcagagctaaatatacagtatttgctgaaggtgctcgtggacacttaacgaagaaagttatagaaaaatttcaactcgataaagaatcagatttccaaaaatatggtattggactgaaagagttatgggaaattcccgaagagaatcataaacctggtctagtgcagcataccatggggtggcctcttgacaataaaacaggtggagggtcatttatgtatcattttgggaaaaatttagtttcaatcggttttgttgttcatctaaattataaaaacccatctttgtctccattcgaggaatttcagagatataaaacacatccgcttataaaagatattttgagtggtggtaaaagactctcatatggcgccagagtaataagcgagggtggataccaatcagttccaaaattaacattcccgggcggcttacttgttggatgtgctgcaggctttgtaaatgtgccaagaattaaaggatcccataatgcaatagttagtggtgttttagctgctaatgcgttactggagagctttacatcaaagaaaatatcggaagaattatcaagctatcaggacatgtataataaaagcaccatagcgaaagaattatcaaaggtaaggaatataaaaccgttatggtccaaattcggtactttggttggtgtagctttgggtggtatagatatgtggttaagagatcttggtattaatataccatttacaatgtctcacaaaaagccagatcatcttacattgcaaaaaaaatctgcatcaaagaaaatagaatatccaaagccggatggagtttattctttcgataggttgtcttcggtttatttatcatcaacgaatcatgaagaggatcaacctgttcatttgaatgtaggtgattttggtttgcaaacctctagtgaatatcacgattacggcggaccatcagcaaattactgtcctgctggtgtatatgaatggatactcgaaggtgagagtcctaaatttcagatcaacgctcaaaattgtgtacactgtaaaacttgtgatatcaaagacccaaatcaaaatataaattggcaggtgcccgaaggaggtggtggaccaaattactccaatatgtaa

SEQ ID NO: 220685 - DNA, 700 bp, Unknown
  Bacterial polypeptide expressing nucleotide sequence isolated from the Sargasso Sea
cccaggtggtttactcgtcggctgtgaagccggaacgctaaactttgccaaaattaaaggtaatcacacggccatgaagtcgggcatgcttgcagcagagagtatttttgaagccatttcagaaaatgctgaggcaccagtaaaagagttaacaagctttacagagaaatttaaatcatcgtggctatacgacgaattgttccgctctcgtaactttggccccgctatccacaaactcggaaatttctggggtggcgcatttaacacgctagagcaaaatatctttaatggtaatttgtttttcaccatgaaagacgaacataaagactacgcacagcttaaagaagcgaaagatgcaaaagagatttcatatcctaagccagatggcgtgttaagctttgataaactgtcttctgtatttttatctaatacaaatcacgaagaagaccagccttgccacttaaaattaaaagatccgtctattcctttgcaggttaatttacctaaatttgcagagccagcacagcgctactgccctgctggggtatatgaagtaattgaagaggaaggtgaaaaacggttccaaattaatgcacaaaactgtgttcactgtaaaacctgcgacataaaagacccaagtcaaaatattaaatgggtagttccggaaggtgccggcggaccaaattacccgaacatgtaa

SEQ ID NO: 220686 - DNA, 1573 bp, Unknown
  Bacterial polypeptide expressing nucleotide sequence isolated from the Sargasso Sea
aattaaactaaaacaacaagcaatcgaagcttcaaaagagatgtcgatatgtgttgttgaaaaaggttctgaagttggggcccacatattatcaggtaatgtttttgatccaaaggcattagatgaacttatacctgactggaaagaacttggcgcgccacttaatacacctgttaaaaaagattcagtaagatatttactgaatgaaaagtctaacttttcaatccctacgctatttgcaaccacctttaagaatcatggaaactacattatgagcctaggcaacttttgtagatggatggcagagtatgcagagggactagaaatagatatctttcctggatttacagcctctgaattaataatcagcaatggagttgttgtaggaattgctactggtgatatgggagttgatgttaatggagaaaagaaagactcctatgaacctggcataaatcttatggctaaatatacaatcctttccgagggatgtcgtggtcatcttggaaaacaagctattagtttatttaacctcaatgaagatagagatccgcagcactatggcataggtttcaaagaagtttgggatctagacccttctgtccatgaggagggattagttgtacatactatgggttggcctgcagcgaagggagttttgtcaggatcatacctttatcacggagaaaataatcaagcatttttgggttacatagtccctcttgactatgacaatccccacataagcccttttgatgagttccaacaatggaaacatcaagcatctatacaaaaatatttagaaggtggaacaagaactgcatatggagcaagggctcttataaaaggtggtcatcagtctattccaaaaatgcattttccaggtggcatgttagtaggagatgatgcgggcaccatgaattttccaagaataaagggtacgcacactgcaatgaagtctgggatgattgctgctgaaagtctttttgaagaattttacaaagaaaatcctatgactgacctaaatacagttacagctaactttaaatcttcatggttagaaaccgaactgcataaagccagaaactttttaccatttatacataagtatggaactttactcggtgtagctcttgctggaattgaccaattaatatttagaggtaagctgccatttacattgcatcatgatcaacctgatcatgaatgtttgaaagaggtatcagaaatgccgcgcattgattaccctaaaccggatggtgttataagtttcgacaagctttcctcagtatttctctctaatacgaatcatgaagaagatcaaccatgtcaccttgttcttaaagatccttcaataccattgagcgttaatttacctaagtatgatgaacctgcacagagatattgtcctgcaggtgtttatgaaatagttgagaaagaaggagaaaaacaattccaaataaatgcacaaaattgtgtgcattgtaaaacttgcgacataaaagacccttcccaaaacataaattggattacaccagaaggagctggtggaccaaactacccaaatatgtaa

SEQ ID NO: 220687 - DNA, 727 bp, Unknown
  Bacterial polypeptide expressing nucleotide sequence isolated from the Sargasso Sea
ggaggtttacaggcgctcacggctaatgcttttgctggtggtttaatagtgggcgacgattctggctttcttaatccgctaaaaataaaaggcagtcacacggcgatgaagagcggaatgctaggtgcggaagcagttttcgaagagctagtgttgggaaattccgcaactacgccctccactttcgaagaaaaatttaagtcgtcttggctattcgatgagctccatagggctcgtaattttgggcctatggctcataaacttggtactttgtttggtggcgtctactcatcgattgagcgttttattaggccaatcgctcgctggactttttcggaccctacccctgattatgcgacattgaaggaagccagtatggttgcaaaaatagagtatccgaaaccggatggcgtcatttccttcgataaattgtcctcagtatttctatcaaatacctatcatgaggaagaccaaccgtgtcatttgactttggaagaccctgatattccaatttcgattaacttgccgaagtatgatgagccagctcaaagatactgcccagctggtgtatatgaggtgctagaagaagaaaatggtgcaccaaagtttcaaatcaacgcccaaaattgcgtgcattgtaaaacctgtgacataaaagaccccgcgcaaaacataacttgggtagttccagaaggagcaggcggaccaaattatccaaacatgtaat

SEQ ID NO: 220688 - DNA, 832 bp, Unknown
  Bacterial polypeptide expressing nucleotide sequence isolated from the Sargasso Sea
tgaatttcaagagtggaaacaacacaaagatataaaacgaattttagaaaaaggtacacgtgttgcatatggagctagagcacttattaaaggtggttatcagtcaagaccaaaaatgagttttcctggtggattaattgttggtgataatgcaggaactctaaattttcctaaaataaaaggcacacatacagcaatgaaatcaggaatgattgcatcagaagtagtatttgatgcaatcactaacgagaattatgaacaagatttacttaaatacgaagagttgtttcaagaatcttggattaatagtgaactttataaagctagaaattggggtcctttacttcacaaaggattagcttggggatttaaaggtttaataggagtagcgttggcatcaatagatcaattaatttttaggggtaagttaccatttaccttaaatcattcaactcctgattacgcctgcactaagaaaagttctgaatgtaaaaaaatagattatccaaaacctgatggaatcgtaagttttgataaattatcttctgtatttttatctaatactaaccatgaagaggatcaaccttgtcacctacaacttaaggatccatccatacctattaacgtaaatttaccaatttatgatgagccagcacaacgttattgcccagcaggagtatacgaagttgttgagaaggatggcacttattcttttcagattaatgctcaaaattgtgttcattgtaagacatgtgatattaaggatccctcacaaaatataaaatgggtaactcctgaaggtatgggcggcccaaattatccaaatatgtaa

SEQ ID NO: 220689 - DNA, 1651 bp, Unknown
  Bacterial polypeptide expressing nucleotide sequence isolated from the Sargasso Sea
tatggaaaatatcgaaagagaatcaatggagtatgatgtagtcatagttggagctggaccggctggattatctactgcaattaaactaaaacaacaagcaattgaagcatcaaaggagatgtcaatatgtgttgttgaaaaaggttctgaagttggggcgcatatattatctggtaatgtttttgatccaaaagcattagatgaacttatacctgactggaaagaacttggcgcgccactaaatactcctgttaaaaaagattcagtacggtatttactgaatgaaaagttaaacttttcaattccaacgctatttgcaactacttttaagaatcatggaaactacattatgagcctaggcaacttttgtagatggatggcggagtatgcagaggggcttgaaattgatattttccctggatttacagcctctgaattgataatcgacaatggagttgttgtaggaattgctactggtgatatgggagttgacgttaatggagaaaagaaagactcatatgaacctggcataaatcttatggctaaatacacgatcctttccgaaggatgtcgtggtcaccttggaaaacaagctattagtttattcaacctcaatgaagacaaagatccgcagcactatggtattggttttaaagaagtttgggatctagacccttctgttcatgaggaagggttagttgtacatacgatgggatggcctgcagcgaagggagtattgtctggatcgtacctttatcatggagaaaataatcaagcatttttgggttatatagttcctcttgactatgacaatcctcatataagcccttttgatgagtttcaacaatggaaacatcaagcatctatacaaaaatatttagctggtggaacaagaactgcatatggagcaagagctctcataaaaggtggtcaccagtctattccaaaaatgcattttcctggtggtatgctagtcggagacgatgcaggcaccatgaattttccaagaataaagggtacgcatactgcaatgaagtctgggatgattgctgctgaaagtctttttgaagaattttacaaagaaaatcctatgactgacctaaatacagttacagctaactttaaatcttcgtggttagaaaccgaactgcataaagccagaaactttttaccttttattcataagtatggaactctactcggtgtagctcttgcaggaattgaccaattaatatttagaggcaagctgccatttacattacatcatgatcaacctgatcatgaatgtttaaaagaggcttcagaaatgccacgtattgattatcctaaaccggatggtgttataagtttcgacaagctatcctcagtatttctttctaatacgaatcatgaagaagatcaaccatgtcaccttgttcttaaagatccttctataccattgagtgtaaacttacctaaatatgatgaacctgcacagagatactgtcctgccggtgtttatgaaatagttgagaaagaaggacaaaagcagtttcaaattaatgctcaaaattgcgtacactgtaaaacttgtgacataaaagacccctcccaaaacataaattggataactccagagggagctggcggtccaaactacccaaatatgtaa

SEQ ID NO: 220690 - DNA, 1627 bp, Unknown
  Bacterial polypeptide expressing nucleotide sequence isolated from the Sargasso Sea
atggaaagagaagttatggagtacgatgttgtcatcgtaggtggaggcccatcaggccttagcgccgccataaaacttgctcaacttgcaagagataatgataaatctctagaaatatgtctccttgaaaaaggttctgaaataggtgcacatatactttcgggaaatgtatttcaacctactgctttaaatgaacttattccagattggaaagagaaaaactgtcctctaaatgttccggttaaaaaagataagctaatgtttatgtttgaaaaatttagcctgcctattccttcctttgtaatgcctcctatgaacaatcatggaaattatgtagcaagccttgcaaatctttgtcgttggcttgcaactcaagcagaagatttgggagtagaaatatttcctggttttcctgctagtgaaattctttacgaaggagatagagttgttggtgttagaaccggagatatgggtgttggattggacggtgagcagaaagcaggatatgaagctggaatagatattaaagcaaaatatacaatatttggtgaaggctgtagaggccatttaggaaaacaattaatatcaaaatttgaactagataaggataaagatcctcaacattatggaattgggtttaaggaaatctggaaaattaaagacgagatgcatgaagaaggtcttgtaatccacacgaatggttggcctagtgctaaaaatactcctgctggttcttacctttaccatgctgataataacgaggtatatttaggatacgttgttcctcttgattacgaaaatccctatcttagtccttacgatgaatttcaaacttggaaaactcatccctcaattcgacgttatctagaaggtggcgaaagaattacttacggagcaagagctcttatcaagggcggtctccagtctcttccgagtatggaatttccgggcggagttttagtaggcgacaacgctggaacactggttttttcaaaaatcaaaggatctcatacagctatgaagtcaggaatgctggcagcagaggctatctttaaaaacattgataatgaaagtgatcttgaattcaatgatttggtcaaatcaagctggatccataccgagcttcataaatcaagaaattttggacccatgttccataagtttggttcattgattggagccgctttcaacgcaatggatcaattaatatttagaggcaaactcccgtttactcttcgacatacaactccagactatgcttgcatgaagcctgctgctgatatgccaaaaatagaatacccaaaaccagacggaaagatcagctttgataaattaagctcagtatttctatctaatacctatcatgaagaagatcagccgtgtcacttgaaacttaaggattcaactattccaatactgcaaaacttgcctatgtatgatgaacccgctcaaagatattgcccagctggggtttatgaggttgttgaaaaagacaacgaacctaaatttgttattaatggtcaaaattgtgttcattgcaaaacatgtgatatcaaagatccatctcaaaatattacttgggtaaccccagaaggtactggcggtcctaattacccaaatatgtaat

SEQ ID NO: 220691 - DNA, 676 bp, Unknown
  Bacterial polypeptide expressing nucleotide sequence isolated from the Sargasso Sea
tattgacttagatgacaagcaagtcactctgcatatggactcaggcaaacgcctaagcgctgacgctttactttggtccaacggcagaaccggtaataccgacctacttcaattggaaaatgctgggctaactgccaaccatcgaggccagctcgatgttgatgaaacctaccgtacctctatagagaatatatttgctgcaggtgatgtcattggctggcctgcattagcatccgccgcctacaaccagggctctacagcagcaacatatgcgcgcggcgacaacacattcaaacatgttaatgacgtaccaaccggcatctacaccttaccggagatcagctctgtcggcatgaccgaaagggagctgactgataaaaaagtaccctatgaagtaggtcgcgccttttttaaagacactgcacgcggccagatcagcggtcaaaaggaaggtatgctaaaaatacttttccatatagatacttatgaattgttaggtattcactgtttcggcgccgaagcgaccgaaatcattcatatcggtcaggctatattaaaacaacaaaacagtggtaatgatattcgctactttgtagacacaacctttaactaccccacaatggctgaagcataccgaattgcggccttgaacggcttaaaccgacttggtttttaa

SEQ ID NO: 220692 - DNA, 1012 bp, Unknown
  Bacterial polypeptide expressing nucleotide sequence isolated from the Sargasso Sea
ttttgttgatgaacacacgatcgccctggaatgtcacgacggtacggtggaaacgctgactgcggataagtttgttatgccctgcggttcgcgtccttatcgccctgttgatgtcgacttttcgcatccacgggtttacgacagcgactctatcctgagcctgcaccacgaaccccgccatgtgctgatttatggcgcgggggtcattggctgtgaatatgcgtcgatcttccgtggaatggacgtcaaagttgatttaatcaacacccgcgatcgtctgctggcgttcctcgatcaagagatgtccgactcgctctcttaccacttctggaacagcggtgtggtcattcgccataacgaagagtatgagaagattgaaggctgcgatgacggcgtcatcatgcacctgaaatccggtaagaaactgaaggcagactgcctgttgtacgccaatggccgtaccggtaataccgattcgctggcgctggaaaacattggcctgaaaaccgacagccgtgggcagctcaaagtgaatagcatgtaccagacggcgctgccgcatgtgtatgctgtaggggatgtgatcggttatccgagcctggcatcggcagcctacgaccagggacgcattgccgcccaggcgttggtaaaaggcgaagccaccgcgcatctgattgaagatatcccgaccgggatttataccattccagaaatcagctccgttggtaaaaccgaacagcaactcacggcaatgaaagttccatacgaggttggccgcgcccagtttaagcatctggcacgtgcgcaaatcgtgggtatgagtgtcggaacgctgaagatcctgttccatcgcgaaaccaaagagattctggggatccactgctttggggagcgcgcggccgaaattattcacatcgggcaagcgataatggagcaaaaaggtggtggtaacactatcgagtacttcgttaacaccacctttaactacccaaccatggcagaagcctatcgg

SEQ ID NO: 220693 - DNA, 475 bp, Unknown
  Bacterial polypeptide expressing nucleotide sequence isolated from the Sargasso Sea
gccggtgacgtgatcggctggccaagcctggccagtgccgcccatgaccagggccgctcggccgctggcagcattgtcgacaatggcagctggcgctacgtgaacgacgtgccgaccgggatctacacgattcccgagatcagctcgatcggcaagaacgagcacgaactgaccaaggccaaggtgccttacgaagtgggcaaggcgttcttcaagagcatggcgcgtgcgcagattgccggtgagccgcaaggcatgctgaaaatcctgttccaccgcgaaaccctggaagtactcggcgtgcattgcttcggctaccaggcctcggagatcgtgcacatcggccaggcgatcatgaaccagccaggtgagcaaaataccctcaagtatttcgtcaacaccaccttcaactacccgaccatggccgaagcctatcgggtcgcggcctacgacggcctcaaccggcttttttgag

SEQ ID NO: 220694 - DNA, 736 bp, Unknown
  Bacterial polypeptide expressing nucleotide sequence isolated from the Sargasso Sea
actcagctatcacctgtggaacaatggcgtactcatccggcacaatgaggcctattcttcggttgaagctaccgatgactcggttattttaaacttagagtcgggcaagcgtatgcgcgcagattgtctcttgtttgctaacggaagaacgggtaatacagatacacttaaactcgagaatattggtttaaaagccgatggcagaggccaactcaaggttaacgaaaattatcaaactgacgtagacaatgtatttgcagtcggcgatgtcattggctatccaagtttagcatctgcggcttataaccaaggtcgctttgccgctgaagctatgcttggcataaaaacacattcggcattggtagaagatattccgtcaggcatatacaccatcccagaaataagttctgttggtaaaacagagcaagagcttactgcagcaaaagtgccttatgaagtgggaagagctcagttcaaacatttggccagagcccaaatcgcgtcaacgcagacaggaagtctgaaaatcttgtttcatcgcgaaactaaagaaatcttgggcattcattgtttcggtgaacgtgcctccgagattgttcacatcggccaagcgatcatgcagcaaaagggcgaaggcaataccatagattacttcgttaacactacgtttaactatccaaccatggcagaagcttatcgagttgctgctattaatggacttaatagaattttctaa

SEQ ID NO: 220695 - DNA, 688 bp, Unknown
  Bacterial polypeptide expressing nucleotide sequence isolated from the Sargasso Sea
catggctgtctacaactacgacgtagtggtgctgggttccggcccggccggtgaaggcgcggcaatgaacgccgccaaagcagggcgcaaggtagcgatggtcgatgaccgtcgccaggtcggtggcaactgcacccacctgggtaccatcccgtccaaggcactgcgtcactcggtgcggcagatcatgcagttcaacaccaacccgatgttccgtgccatcggtgagccacgctggttctcgttcccggacgtgctgaaaagcgccgagaaggtgattgccaagcaggtggcatcgcgcacgggctactacgcccgtaaccgcgttgacgtgttcttcggcaccggcagctttgccgacgagcaaaccgtcgaagtggtgtgcccgaacggcgtggtggaaaaactcaacgccaaacacatcatcatcgccactggttcgcgcccatatcgcccggccgacatcgacttccaccacccgcgtgtgtacgacagcgacaccatcctcagcctcagccacaccccgcgcaagctgatcgtgtacggcgccggcgtgatcggttgcgaatacgcctcgatcttcagcggcctgggcgtgttggtagagctggtggacaaccgtggccagctgctgagcttcctggattcggaaatttcccaggcgctgagctaccacttcagcaacaac

SEQ ID NO: 220696 - DNA, 1411 bp, Unknown
  Bacterial polypeptide expressing nucleotide sequence isolated from the Sargasso Sea
atggcggtctacaactacgatgtggtggtgctgggctccggcccggcgggcgagggcgcggcgatgaacgcggccaaggccgggcgcaaggtagccgtggtggacaaccgtccgctggtcggcggcaactgcacccacctgggcaccatcccgtccaaggcgctgcgccattcggtgcggcagatcatgcagttcaacaccaacccgatgttccgccagatcggcgagccacgctggttctcgttccccgacgtgctgaaaagtgcggagaaggtgatcgccaagcaggtcacctcgcgcaccggctactacgcgcgcaaccgcatcgacacctatttcggcaccgccagcttcgctgacgagcagaccgtcgaagttgtctgcctcaatggtgtggtggaaaaactggtggccaaacagatcgtcatcgccaccggttcgcgtccgtaccgcccggccgatgtcgatttccgccacccgcgtatctacgatagcgacaccattctcagcctgggtcacacaccgcgtcgtctgatcatctacggagcgggggtgatcggttgcgagtacgcctcgatcttcagtggcctgggtgtgctggtcgacctgatcgacaaccgcgatcaactgctcagcttcctcgactcggaaatctccgacgccttgagctaccacctgcgcaacaacaacgtgctgattcgtcacaacgaagagtacgagcgcatcgagggtgtggaaaacggcgtggtcctgcacctgaagtcgggcaagaagatcaaggccgacgccctgctgtggtgtaacggccggaccggcaataccgatcagcttggcctggaaaacatcggcatcgcggtcaacagccgtggtcagatccaggtcgacgagcattaccgcaccgaggtcagcaacatctacgccgccggtgacgtgatcggctggccgagcctggccagcgccgctgccgaccaggggcgttccgctgccggcagcattgtcgacaacggcagctggcgcttcgtcgatgacgtgccgaccggcatttacaccattccggagatcagctcgatcggcaagaccgagcgtgagctgacccaggccaaggtgccttacgaagtgggcaaggccttcttcaaggggatggcgcgggcgcagatctcggtggaaccggtgggcatgctgaagatcctcttccatcgtgaaaccctggaagtgctgggtgtgcattgctttggctatcaagcctcggaaatcgtccacattggccaggcgatcatgaaccagaagggtgaagccaacagcatcaagtacttcatcaacactaccttcaactacccgaccatggccgaggcctatcgggttgccgcgttcgacggcctcaaccggctttttgagcggctccggccggcgg

SEQ ID NO: 220697 - DNA, 1083 bp, Unknown
  Bacterial polypeptide expressing nucleotide sequence isolated from the Sargasso Sea
gaaatcgtgtgacgctatttcacggcgaagccagtttcgtagatgcgcatacgttagagataacccgtaaagatggctctaaagatactgtcactgcaggccagattgctatagccacagggtcgcgtccttattgtcctaaagacatcgactttaatcacccgcgtatttataactcagacactatcctatctttagatcacgatcccaaatcaataattatctatggcgctggggtcattggctctgaatatgccagtattttcagaggactaggcgtaaaagttgacctcgttaacatgcgcgatcgcttactgtcatttcttgatgacgagatatcagacgcactcagttatcacctgtggaacaatggcgtactcatccggcacaatgaggcctattcttcggttgaagctaccgatgactcggttattttaaacttagagtcgggcaagcgtatgcgcgcagattgtctcttgtttgctaacggaagaacgggtaatacagatacacttaaactcgagaatattggtttaaaagccgatggcagaggccaactcaaggttaacgaaaattatcaaactgacgtagacaatgtatttgcagtcggcgatgtcattggctatccaagtttagcatctgcggcttataaccaaggtcgctttgccgctgaagctatgcttggcataaaaacacattcggcattggtagaagatattccgtcaggcatatacaccatcccagaaataagttctgttggtaaaacagagcaagagcttactgcagcaaaagtgccttatgaagtgggaagagctcagttcaaacatttggccagagcccaaatcgcgtcaacgcagacaggaagtctgaaaatcttgtttcatcgcgaaactaaagaaatcttgggcattcattgtttcggtgaacgtgcctccgagattgttcacatcggccaagcgatcatgcagcaaaagggcgaaggcaataccatagattacttcgttaacactacgtttaactatccaaccatggcagaagcttatcgagttgctgctattaatggacttaatagaattttctaac

SEQ ID NO: 220698 - DNA, 1111 bp, Unknown
  Bacterial polypeptide expressing nucleotide sequence isolated from the Sargasso Sea
tatgattgaacgattcggcgcgacgcgcaaggcgacgccgacgcccaacccggatcgagcgtctcgatggaagatcaacaagtcggcgcagtacaccaagggcgtgcccaaggcgatgggtcaggcgacgcacatatgcacggcgtgcggatacatttaccaagagaccaagccgttcgaagaattaccggaggattacgtgtgtccgtcgtgcagcgcgcccaagtcgaaatttgaagcgatgaagacggaggaggcgccgaagagcgcgcgtcccgtcgtggagtacccggaaggcacgctcgtggcgctcaaaccgggcgagacgatcaagttgaagctcatcgagaaggaacaagtcaccgcgaatagtgtgcgcgtgcgctttgagcttccgtctccggaacacatactcggacttcccgtgggccaacacgtcacgatgaccatcgacggcgtctctcgtccgtacacgcccatctctcgcgacgcggataagggtttcatggatcttctggtgaagatttacgacaacggcgcgttgacgcaaaagttgaacgccgtcgaaatcggctccaccgtcgacttcgagggaccgaagggtctcgtcacgtacaccgctcgcggcgagttctccacgcaaaacccggcgacgggcgacgtcgcgaagaaatcgtgcaaatccatcgccatgatcgccggaggtacgggcatcacccccatgctccaagtcattcgtcaaatcttcaacgacgtcggtgacacgacgcgcgtcaacgtgttattcgccaacgtctcctcggcggacattttgatgaagaaggaactcgacgagctcgcgagcgcgcacaaaaacttgacggtgcactacgccatcgacgccgacgagcccggttggaccggtgaagtcggctacatctccgcggagatgatgaaaaagtgcgaattgttcaaaccgagcggtttaatgaacaaactcttcgcctcggccgacaaggtcgacaaggacaccgccgtgctcgtgtgcggtccgccggcgatggtcgaaagagccgtcgttcccgcgttagacgcgttgaaggtgtccaccgactcacgcatcttcttttaa

SEQ ID NO: 220699 - DNA, 636 bp, Unknown
  Bacterial polypeptide expressing nucleotide sequence isolated from the Sargasso Sea
atacttctctagtagcattaatgcaggatgatatgaaaaaattaatagcatattcatcagttgcccacatggggtttgtaactatgggcatctttacttttaataaacagggaatagaaggaagtatagttcagatgttcagtcatggattaatatcagctgcactttttctatgtgtcggggtcctttatgagagaacacattctagaatgataaagtcatacggcggtatagtgcaagtattaccaaaatattcatttcttttaatgatattcgctttaggcacattaggcttacctggcactagtggatttgtcggagaatttttaattttggttggtacatttaaagtaaatattttagttgcagtacttggaagtataggagtaattcttgctgcagcatatatactttggttatacaaaagagtggtttttggtaaattagaaaatccacagcttaaaaaaataaaagatgtaaatttttctgaaggttcaatcttaataattttaagttttatggtattattttttggcatgtacccagaacctctttttgaaacagtaaatgtatcagtagataatttgataaataattataatttagaaatagggaaagagattactttaaaataaa

SEQ ID NO: 220700 - DNA, 859 bp, Unknown
  Bacterial polypeptide expressing nucleotide sequence isolated from the Sargasso Sea
taaaattgctgctgtgccctttcatcaatggactcctgatgtatatgagggttcacctacacctgtagtagcttttttatctgttggttcaaaaacagcgggctttgcatttgcaataagaatattaagcacaactttctcttcttttgacgaagaatggaagcttttatttaccattttggcaatattgagcatggctctaggaaatgttgtagctctagctcaaacctcaatgaaaaggatgctagcttacagttctattggacaagcaggatttgtaatgattggaatagtatctggcacacaagatggtttatcagctgctgttttatatttggctgcatatttatttatgaatttgggtgcattttcttgtgtaatacttttctcactaagaactggttccgacagaattcttgattactcaggactttaccaaaaagatcctctcattacattaggcttaagcctttgtcttctatctcttggagggttacctccaatgttgggattttttggaaagatatacttgttctttgcaggttgggcaaatcatcaatatctactagtaattgttggattagtaacttcagttatatctatttattactacatttcagtgataaaaatgatggtagttaaagaaccacaggaagcttctgaaatagtcaaatcatatccagaaattaattggggaattgtaggattacctcccttgagaattgcactttatacttgcgtggcggtaactgctcttggaggaatcctatctaatcctctttttaaattagccaatacagcagtttcagaaactcctttcttacaagatatcattgctacagcaaacaatatttcctag

SEQ ID NO: 220701 - DNA, 889 bp, Unknown
  Bacterial polypeptide expressing nucleotide sequence isolated from the Sargasso Sea
gttgtagcagggatgcaatcacgagttggtccagacagagcaggaccctttgggattttacaaacccttgctgatgcgataaagcttctactaaaagagcaaatcatgcccctaaaagctgatagagcaatgtatattttggcaccaattcttgcattagttccttcatttttaatttttatgattattcctttaggtccagatattgatctagaaataaatgggcaaagcattacaattcctcttgttggtgctgatttaaatgttggtgttttattttttctcgcactttcatctatagctgtttatagcgttgttcttgctggttggtcttcaggttcaaaatatcccctattaggcggtgttagagcgtctgctcagatgatttcttatgaagcagcgatgggtctttcacttgtaccagtaattttatattcggggtcaatgtcaatgacggaaatagttaaaagtcaagaaggtcacctttcaagtccaataccatttttagatgcgatagtaagttttataccaaagtggaatgtattccctcaatttgtagcttttgcaatattttttgttgcctcaatcgcagaagtaaatagagcacctttcgatcttgttgaggcggaacaagagttagtaggaggttttcatactgagtattcgggatttaggtttgctatgtttttcttggctgaatatataaatatgtttaatatgtgtgcaattacagcgacatttttcttaggaggatggctagggccaacattttcaaactttttacctccattaatttcagcactaatgcctgctttttggcttggtataaaaacatttgctcttttgtttatctatgtatggattagagcaacttacctcgctaagatac

SEQ ID NO: 220702 - DNA, 609 bp, Unknown
  Bacterial polypeptide expressing nucleotide sequence isolated from the Sargasso Sea
tatgaaaaaattacagaagataatcccaatcgcacaagaagatagattatctaaagcaataaatattccaggctcgaaaagcattactaaccgggcctttttactgtcttctttatcagttttagatgccaaagatggtgagtatgcttatttaaatggtgttttagatagcaatgatactagggctttttataattgtattcaaggtttaggctttgacattttagaagtatctcaaaataaatataaaatcagcgctatatcaaaagatagtatcttaaaaaactggaaaagcaatcctcctaaaatttattgtcatgatgcaggaacagctgttagatttcttgtcccgatgattgcagctcttggtggttttggagttgaagttagcgcaagtaagcaaatgactaataggccaatacaggcattaatagaggcactagagctgcaagggtctaaatttagatatacttatactccagggtctttgccattacttattgagaaaaacaaggactccttaggtttgcgcggaggtaagttattagtagatacaaaagatagcagtcaatttatctcagggttattgatggtagcaccttttgcgca

SEQ ID NO: 220703 - DNA, 346 bp, Unknown
  Bacterial polypeptide expressing nucleotide sequence isolated from the Sargasso Sea
tgagtattcgggtttcagatttgctatgtttttcttggccgaatacataaatatgtttaatatgtgtgcaattacagcaacatttttcttaggaggatggctggggccaacattttcaaactttttacctccactaatttctggattaatgcccgctttttggcttggtataaaaacatttggccttttatttatttatgtatggattagggcaaccctacctcgtttaagatatgaccaattaatggaattaggttggaaaagaatgatacctatatcccttatatggcttcttttaagttcagttgttttagggataagacagtttggtttgccatggagttaa

SEQ ID NO: 220704 - DNA, 798 bp, Unknown
  Bacterial polypeptide expressing nucleotide sequence isolated from the Sargasso Sea
cggtgctcctgtgggtgcgtgcctcggggcgcccctgcgcatcgattcgagggacctgggctggttcggcctctttacccctggtggatgcctgcctgtttcaggccgtgctgttccgcggtctggagcagaccggagcgggtctcggctcggtgctgatcgactctcagcctctgatggtcgcgctgctcgccagggctctgttcgctgagtcgatcaatcctgtgggctggctggggctgggcctcggcctggctggcgttctctgtctgggggtgcctgctgacctgttgcgtcactggtggctgctggcggagcggcccgcgatgcaggacctgctgcaggcaggagaggcctggatgctgctggccgctctggcgatggcgtttggcactgtgctgatccgcttcgcttcgcgtcacagtgatccggtggtcaccaccggctggcacatgcttctgggcagcctcccgcttctgcttctctcctgtcttgaacgtgggttcgcgccccctgcctggagcggtttcgactggacacgcatggccttcgccagcctcctgggcagtgccctggcctacggcctgttcttctggttcgccagccggcgggatctcaccggtttcagcagtcttggatttctcacaccggtgttcgccctggccaccggtggctggttcctgggcgagcgactggcgccgctgcaatggttcggggtgtttctggtgctgttgtccgtgctctgcgtcagtcagcgaagacgcctctgggagcctgcggagtctcaagcggcatgag

SEQ ID NO: 220705 - DNA, 772 bp, Unknown
  Bacterial polypeptide expressing nucleotide sequence isolated from the Sargasso Sea
aatgatatcatctgctaattttatttatttagcattattgcctccacttttggctcctatttttatttttatctttaagaataatcagaatctaagagattcagttggtctgattggatcattaatttcattttacgctacaataaatatcacaaatgacttaatgaatggtggcagccctaccctttatttattcaatatattcagtgatttatctctttcatttaaagttacacctctaggtgctgtgtttgggttactgtgctcaggtttgtggatactagccgcaatttattctattggctatatgcgtggaaataatgaaaaaaatcaaactagattttatatattttactcattatcaatttttggagcattgtgtgttgcatggtcgagtaatttattagttttgtttattttttatgagtttttaacatttgcaacgtacccacttgttgttcacaaagaaactgatgagtcaattaaagcgagccgactttatttaggaattctagttggatcatcattaatgttatttttacctgctattatttgggtttggtactcagttggaacattaaactttgcagatggtggtattttaaataacacatttgatcctgcttatgctccaattttactttttttatttgtttttggaattggtaaagctgcgttaatgccacttcattggtggttgcctgcagccatggtagctccaactccggtatctgcattacttcatgctgttgcagttgtaaaagcaggtgtt

SEQ ID NO: 220706 - DNA, 835 bp, Unknown
  Bacterial polypeptide expressing nucleotide sequence isolated from the Sargasso Sea
aaaataaaaaatgatagtcctgatgttcatgtcaattacagtactcagctattaatgttaaaaaattttaaagaaggatttaaagaatatgaatggagaaaaaaaagtaaatctttttttgactacattaattatgacaaactcaatcttaaaagcagggtttgggatggagaggatctaaaaaataaaaaattacttgtaatttctgaacaggggattggtgatttaatccagtttacaagatatttatatgaaattaaaaaaaaatatagtgcaaaaataataatttatttaaaaagtaaaaaattttcacattttttttcccaaaattcatttagtacaatttttgaaggcgacaacatacctcaacatgattaccatattcatttacttagcattttaaaagttttttataaaaaaaataatctttttgttcgacctgtaaacttctttcaaaaaaatataaaagttgaaaaaaaatggattgaaaatctaaaaaaatataatggtataaaaatcggcataaactgcaaaacatcattactaaaaaaaaatataccaatccaattttttattgatttagctaagattaataagttttatttcatagttttacaaaaagaatttgattttaatgctacaaaaaaatttaaaaatattttgtattttgatgatatggatatttctaaagatgcctttattgacagcatagagattataaaaaaattagatttaatcataactgcagatacatcaattgcccacttatcagcaacactaggaaaagaaacttggattccacttccatttataagcgattggcgatgttcttaga

SEQ ID NO: 220707 - DNA, 464 bp, Unknown
  Bacterial polypeptide expressing nucleotide sequence isolated from the Sargasso Sea
ctgtgctccgtcctggaggaaggctcaggatattccatacaacatcttcctcttcagcttcggcttcttctgcccgctcaccatcatcaccatcacctccaccattgtcatcttcagcatcaagcaagactccaagagcatcatctcagaaaatataaaatcctcagttttatcccgccagtacaaggctattaagatggtatgttctccacaaataaatgggcgttttaacacctccagtctccagttcctatgtttctaccacttcctgtgtgtgcaggtgctggtgctggttggggtgttcctgttctgctggggcccatacgccgtgctctccctggcgggcatcctgggcctctccggctcagtgcccgcccccctcactgtgctgcccctcatgatggccaagagctccgtcctctggagccccattatctacatcaccatgcaccctccggtataga

SEQ ID NO: 220708 - DNA, 919 bp, Unknown
  Bacterial polypeptide expressing nucleotide sequence isolated from the Sargasso Sea
ggtgaggcagtttcacaaagaatatctgatttaagtgatggaagaattgttgtaaatcattatgcaggtggagaacgtgttggtcctttggatgtatttactgaagtaagttctggaaatgctcaaatgtacaatagtgcagattattattgggtaggacaacatccaggttggggtttctttgctgcagttccttttggactaatttcaacagagataaatggttggattagacatggcggtggtcaagaactttgggatgaacttgctgatggttttggacttaaaaactttatggcaggaaactctggtgttcaaatgggtggatggtttaataaagaaattaattctgcagatgacttcaaaggtttaaaaatgagaatgcctggattaggtggaatgatggttacaaaacttggtgcttcagtagttggtatgcctggtggtcaaatttatgaaaatctagtaaatggcactattgatgcatgtgaatgggttggaccttggaatgatgaaagatctagattctatgaagcggctaaatactattattggccaggtatgcatgaaccaggaacattaattactcttggttgtaacaagtcttggttaacaagtctttctaaaactgatcaaatgattattgaacatgctgctacggttcaaaatgaaatgatggttactgaatataacgcaaataatggtgcagcacttcaaagactaataaatgaccatggtgttgagctcagagaattcaatgatgatgttattgatgctatgggtgaagcttcagaagaattatatgcagaattagctgaaggtaacgaacttactggacgtattcttgatagttttttaaaagctagaagtgacattggtaactggttaaaaattgcagacccatggatatactgctcaa

SEQ ID NO: 220709 - DNA, 834 bp, Unknown
  Bacterial polypeptide expressing nucleotide sequence isolated from the Sargasso Sea
aatgtcagctgagataattcttgcactaattaaaccacttttagttctgggtcttttgcttacaaatacaattattcttatttggcttgaaagaaaagttgtagcaggaatgcaatcaagagtgggccctgatagagctggtccttttggaattttacaaactctagccgacgccataaagcttctgttaaaggaacaaattttaccaatgaaagctgataaagccatgtatttattagctccaattattgcactggttccatcttttttaatttttatgattattcctttaggtccaggttttgaattgacccttggtggtgaaactaaatttatagacatggttggtgccgatataaatgtaggtgttttattctttctagcgataagctcattggcagtatatagcgttgttttagctggatggtcttctggatcaaagtatcccttacttggaggggtaagagcatctgctcaaatgatatcttacgaagctgcaatgggactttctcttgtacctgtaattttgtattcaggatcaatgtcaatgacaaagatcgttgaaagtcaagctggaaatttatcaagcacaattccaatagttgattcaattgtaagcttcataccaaactggaatatttttccacaatttttagcatttggaattttctttgtagcctcaattgcagaagtaaatagagctccatttgatcttgtggaagcagaacaagaattggttggaggttttcatactgagtattcaggatttagatttgcaatgttttttttagctgaatatataaatatgtttaatatgtgtgcaatcacagctac

SEQ ID NO: 220710 - DNA, 844 bp, Unknown
  Bacterial polypeptide expressing nucleotide sequence isolated from the Sargasso Sea
gcgccctggcttctggcgctgctgccgctgttttcgctgttccagttcgcccgcctcgtgccgcgcatcgctgacggcgaggcgctgaccggcggctatgactgggtgccgagcctggttctcagcttctccttcctgatcgacggtctttcgctgaccttcgcgctgctgatcaccggcatcggaacgctgatcgtgctttattccgggggctatatgaagggccacccgcagcaggcgcggttcctgtccttcatgttcatgttcatgggcgcgatgctcggcgtcgtcatctccgacgggctcttgatgctgttcatcttctgggagctaacctcgatcacctcgttcctgctcatcggctttgaccatgaaaaggatgcgtcccgccgcgccgcgatccaggcgcttgtcgtgaccggcggcggcggattgtttttgctcgcgggcgtgctgacaatccagtatattaccggcgcgaacgggctttccgaactgctggcaagcggtgatgtgctgcggcagagcccgctctatatcgctgctttcattctggttctgggcggcgcgttcaccaaatcggcacagtttccgtttcatttctggctgccgaacgccatggaggcgccgacgccggtttcggcctatctgcattccgcaaccatggtgaaggccggtgtttatcttttgatgcggcttaatccggttatgggcgatactgcggcgtggatgacggttctgccggtgttcggcggcgtgacgctcatcatcggcacggtgctggccgtgcgccagaccgacctgaagctgatgctcgcctacaccaccgtcgcctcgctcgggc

SEQ ID NO: 220711 - DNA, 964 bp, Unknown
  Bacterial polypeptide expressing nucleotide sequence isolated from the Sargasso Sea
atgtacaaaattttaaaaaattcatgggctctttttacaggttatggaatacttatgattgcgcatggtttccagggtaacctacttggtgttagagcggtaatagaaaattttaatgttcttgcaacaggaattatgatgtcgggatattttgtaggatattttgctggagccaatacaattcctggaatggtttctaaagttggacatataagagtctttgccgcttttgcatccatggcatctttaagtattttaattcatgcgatttttgtaaatccagttatttggacaatagggagatttttaactggatatagtctggtagctatttttattgtaatggaaagttggttgaacgatcgagccactaataggacaagaggtcagctattatcaatttatatgcttttgaccctgcttgctctatcttcgggatcgcttttattgaatttcagtagcccagaaaaatatgaaccatttatattaatttctcttttattgtctcttgctttagtaccaattcttttaacaaaacgtaaagctccaaaatttcaaaaattaggatcattaaatattaaaagtttatacaaaatttcacctttggcagcagttagtatgttttgcaatggctttattcattcagctatatttactttagcggcagtttatgcagccactatgaatttttcaatttttgaaatttcactattaatatttttaatatctttcgctggaggaatatttcaatggcctataggttttttatctgacaaaagcgataggagaatgataataattgtttgtacattttctgcttcaattttttgtattcttgcaatatacgcttcgggaacttctttgggaaatatgtatttagcaacaagcttgggtttggataaagtaatgttttttatatatgcaactttatatgctggaatggccttgccattttcactctaac

SEQ ID NO: 220712 - DNA, 604 bp, Unknown
  Bacterial polypeptide expressing nucleotide sequence isolated from the Sargasso Sea
atgagctataaaagcatttttaataaggaattattttcaggaaagaatattatagtgactggtggtggtagtggcattggaagatgtatagcacatgaacttagttcactagggtcatatattattttaattggtagaaatgaagaaaaactgaaaaaggtaatgaaagagattaaatcatcaaatggaaatgcatcatactatgtttgtgatataagagaagaagaaaaagttcaacaatgtacaaaagagatttttgatcaatttaaggtaatatatggtttagttaacaatgctggcggacaatttccatcaccagcagaatatatttcacaaaaagggtttgaaaccgtcgtaagaacaaatcttgttggaggttttttatttagtcgtgaggtgtttaatcaaggaatgattaaaactggtggtaatattgtaaacataactgcagatatgtggaatggcatgccaggaatgagtcactcgggagcagccaggtctggcatggataatctaactaaaactcttgcctatgaatggggatatgctggagttcgtgtaaactctgttgctccaggcatatattgcgtcaagtgggcttgat

SEQ ID NO: 220713 - DNA, 547 bp, Unknown
  Bacterial polypeptide expressing nucleotide sequence isolated from the Sargasso Sea
atgaaaaatattcaaatattgaaaaggttatacaatgattatacgaaatattttttaaataaaatttttcttgctgtttttttttcagttttagttgcagggagcacatcagctaccgcttggttgcttgacccagctattgaaaaaatatttttaaatagagatgaaacactaatttttgttatcccattttttattataatagcattttctacaaaaggtatctctctttacatggcaaaagtaatcatgattcaagttgctgaggaagttaaaaaaaaaattcaagtagaaatgttaaaatcatttattaactctgacactgaaacgattgaaagtaagcattctgggaattatgtttcgaatcttaattttgatgtaaatcaaattactggaatgttaagctcatcatttcttgcactttttaaagatggattgacactaattggattgcttatagtaatgtttttacaaaattggcgcctctcattaatagcaattattatgattcctcttgcttctctagctgcaaaaaggctggcaaaag

SEQ ID NO: 220714 - DNA, 607 bp, Unknown
  Bacterial polypeptide expressing nucleotide sequence isolated from the Sargasso Sea
attgtgcattatcgctgtcctcagtatgtttgttggaaacctcggcgccatcatgcaaaccaatataaaaaggatgttggctttttctagtatctcgcatgctggctacctgctgatagcggtcatagctaaaagctcgctggctggttctgggctgcttttttatatgctagcctatgcctttaccactttcggagcatttgggatcatcattctattgggtaagaaagaggaggaaaacctggagcttgaaaactattcaggcctggcctacaagcgtccaatactggctttaagcatgacagtttttctgctctccttaggaggtctgccaccttttgcaggattcgttgccaagttttatatctttagcgcagcaattgaagaaggatttgtgacacttgttgtgattgcagttcttaatagtgctatttccttttattactatttaaaggttgtggttttcatgtatatgaaagagcctaatagcgagttccagatttccctgactcctatgactttattcgtagtcattgtaggaataattggaacagttgagttaggcatctttccagaccccatcatcgctctcaccagcctccactaa

SEQ ID NO: 220715 - DNA, 796 bp, Unknown
  Bacterial polypeptide expressing nucleotide sequence isolated from the Sargasso Sea
ttgttagcagtgacgattgctggaattcccctttttgtacttatggcattgaatgcaacagttgcagtttacgttgaaagaaaagtttcggccttcatgatggatcgcattggaccaatgggtcaaggccctggactgcatgcgggaaaatggggtgttcttcaaactattgcagatgctttaaagcttcttattaaagaagatactattccatcttctgctgataaattactatttaaagttgcccccttcatcatttttataggggcatttttaggcatagcagttttgccatttagctctgttattcaagttgtagatgttaatattggagtattttatatcattgcggtaggctctattggtgtgcatggaattgtcatggcgggctgggcatcaaataataaatggtcactgtatggagcgatgaggtcagcggctcaaattattagctacgagattccagctgggctatcaattatagttcctattatgatggcaggcacaatgaatcttcaatcgatgattgaatttcaatctggaacggtctggggtattttgccgaattggataatatttaataacccctttagttttttagctttttttattttttttattagcgcggttgctgaaactaatcgaacaccttttgatattcctgaagctgaatctgagcttgtcgctggttggatgaccgagtattctggttttcgttgggcagtattctttctaagcgagtatgcgaatatgttcgttgttagtggccttgcagcagtaggctttctaggaggat

SEQ ID NO: 220716 - DNA, 916 bp, Unknown
  Bacterial polypeptide expressing nucleotide sequence isolated from the Sargasso Sea
aatggatatgatccaaattgacaaccagaatgagaatgctttatttgaggctgtgccaggaggatctccctacaatttagcaatggctgcaggtaggcagggggtaaaggtaggttatgttacccctatttctaaagataaaaacggcgagcagttggcgcaaaacttgttaaactctaatgtttcattgcttgggccaagagttacggctcctacctcattagcaatggttcatatagacgatggaattccgtcatactctttctacagggaagggacggcagaacgattagtaactttggactctctctcaaaaaatctaacttcggaggtgtctatttttcatattgggtcgcttgcgttgacgggtggggaagatgctttggtttgggaagagtttgttaagagaactagggaaagtaatgtaaaagtatccctagatcctaatgtcaggccatcgctgatagcagaacctgatgtctatcgacaaagaataaaaaatcttatgactgaagtcgatattttgaagttaagtgatgaagaccttctttggctttttaatgatagtgcggatgaaacgaatgcattggcagaattggaagtcatttcaagagcggaaatacttatagtcacaaaagggtctcaggggtctgcaatatttcatgaaaaaaagtggcatgaaataacgtcacatccagtagaaaagttatccgatactgtgggagcaggcgatacttttatggcatctgtattagcttgggttatgaaaaaagaaaaattgaatgaactcgcaatgctggagcttaatgaaaaaaaagattttactcattatgcagcgaaagctgctgcaataaatgcgaaaagccaggttgtacccaccatgggaaaacgagttgctatagagataaagtcttga

SEQ ID NO: 220717 - DNA, 793 bp, Unknown
  Bacterial polypeptide expressing nucleotide sequence isolated from the Sargasso Sea
aatgaaagaaaaattatttagttatatttctttttatcaatggtggaaaagtattgataaacctattctatcattgatcttaattttatttttggcgggtttatttttctcacttgtatcaacttcactaattgcatctgataaattagatacgaatacttatttttttttttttaaacatacagtttttgttttacttgggttttttttaatttttattttatcttttatacctgaaaaagaaatttatagaatttcgcttatatttttctgtttatcattagttttgttgttactggttcctataattggagtggagattaaaggttccaagagatggattgatttgttggtattgccaagaatacaacctattgagtttgtaaagccttttttaatagtaataattagtatgataatttgctctcaaaaatatactaattttaatttgaaatactttttatcttttttattaactatgtcgatatcgagtcttttgatacttcaaccagatattggtcaaactcttttaatcggttttagctggttagttttgatttttatttctggtataagtatatttttgttgagcttagttttttttatttctttaaccgcaatagtgtctatcattagttaccttccacaatttaaatacataaaagatagattattttctttttttaatcctgaaactggtactcataactttcaatcagataaagcattagaagctataataagtggaggcttctttggaaaaggtattggagaaggaacattaaaaaacaga

SEQ ID NO: 220718 - DNA, 766 bp, Unknown
  Bacterial polypeptide expressing nucleotide sequence isolated from the Sargasso Sea
aatgttaaaaaaaataaatcttaagaataaaatagctcttgtgactggagctggtaaaggtcttggtaaagcttgtgcaatagctttagctgaggcaggagcaaaagtaattatattaagtagaacaaaatctgaccttattaaagtaaacaaaattataaaaaaaactaaaggctcaagtcaattatttgtttgcgatgtaacaaacctagaagatttaaaaaaagttttaagaaaaattagtcgattagatattttagtaaataatgctggaaataatagacctcaacattttacaaaagttagtcaagaaaacatggagtacttaactgatctgaatatgaaagctgcatttaacgttgcgcaattatgctctcaaaaaatggtaaaagcgaaaaatagaaaaaaaattgggggatctattattcatatgtcatctcaattaggcagagttggttgtgaaggacgaaacatctacaacatgaataaatttggggtagaaggtctttctaggggcatggcatgtgaattagctccttacaatataagagttaatactatttgccctacatttgttgaaacaccaatggttaaaaaattttttaaaaataaaaaatttaaaagtaaaatgcttaaaaatattccattaggtagagttgcaaaggaaagtgatgttgcaactgcggtagcatttcttgctgctgactcttctgaaatgattacaggaacttctttattagttgacggaggttggacagcacaataa

SEQ ID NO: 220719 - DNA, 903 bp, Unknown
  Bacterial polypeptide expressing nucleotide sequence isolated from the Sargasso Sea
ctgacgcgcacgtcgaggctccgacacctggatccgtgattcttgctgcggtgctgctcaagatgggtacgtacggctttcttcggttcctgctaccgttcttcccactagcgtcacagcatccaaccgtagtgactacgatgctcgttttggctgtgatcgggattctttacacggcctgggttgcagccgtgcaaccagacgctaagaagttggttgcgtacacatccgtggcgcatatgggtttcgtggtgcttggcgtgtttgcactcaatgtgaatggtctacagggtggcctggtcgtaatgatctcacacggtattagcacgggggcactcttcctcctcctcggcatgttatacgagcggcgccacactcgtaggattgctgatttcggtgggatcgctcgagtcgcaccatggttcgcaacagctttcatgattacggcgttagcctcgatcgggctgcccggtactagcggcttcgtaggggagttcctggccttgatgggcgccttcgaatctcatccgacgatcgcgttcttcgctacgctcggtgtgatcttcgccgcctattacatgttgccgatgttgcaaacgattttcttcaacaagctagaaactgccgagaatagagaggtcgaggatctgaaaggtcgggaaattgcaattctcagtcccttgtgcgccctgatgataataatcggctgcaatccgacccctatccttgagcggatggagccgagcgtgcggatcgtcctcgagcggatagaaaaggccggggaggggtcgtcagtgctcaatgtcattgaggtagcatcgccagctcaagcagaagaagtcgctcagccagaaggcttaaaccaaggcagccgctcagggctggccgatggcgagggataga

SEQ ID NO: 220720 - DNA, 778 bp, Unknown
  Bacterial polypeptide expressing nucleotide sequence isolated from the Sargasso Sea
gttacctgatgcgcatgttgaagctcctacagctggatctattatattagcagggatattgttaaaaatgggagggtatggttttttgaggttttcaattccaatgtttcccgatgcaagtatttatttccaaccgttaatttttgctctatcttgtgttgcaattatatacacttctcttgtggctttcgctcaagaagatataaaaaaacttattgcttattcatcggtagcccatatgggttttgttacaattggaatatttagtttcaatcaacatggattggatggagctatctttcaaatgatttcacatggtttgatttctggtgctttatttttgtctataggtgttttgtatgaaagaactcacactcgggatatcaattcatttggagattatgccagcaaaatgcctagattttcagtttttctaatgatcattactctgggatcagttggattaccaggaacaagtggttttattggagaatttttagtattacttggggtttggaaaattagtcctttggtcactatattggctggttcaagtttaattttaggggcagtttacatgttaagattttacagaaaaattgcatttggtttatataatacaagtagtactctagaaattaaagaaatcaattatagagagttcttattatttttaccgctaactgtgttaattataattttaggggttttcccaaatttacttttagtattttttaatcaacctaacttatttataatagacttattaaatggttaa

SEQ ID NO: 220721 - DNA, 799 bp, Unknown
  Bacterial polypeptide expressing nucleotide sequence isolated from the Sargasso Sea
tacttggttaccagacgctcacgttgaagctccaactgcacgatctgtattattagcagcgatcttattaaagatggcaggttatgggtttatcagattttcactaggtttattccctgttgcttcagaagtttttacacctttaatttacactttgagtgtcatagcaattatatttacttctcttattgctctaatgcaggaggatatgaaaaagttaatagcttattcttctgttgctcatatgggatttgtaacattaggaatatttactcttcaacaacaaggaattgaaggaagtattattcaaatgattagtcatggtttagtttcagctgcacttttcttatgtgttggtgtcgtctacgatcggatgcattcaaggatgatcaattcgtatggaggaatagttacaataatacctaaatattcgattttatttatgttgtttacattggcagcattgggattaccagggacaagtggatttataggagaatttttaattttaatgggcgcttttaaggataattttctagtagctgtaattgctagtttaggagtaatacttggagctgcatatatgctttggttatataaaagagttgtttttggaaagctagttaacgaagaccttaagaaaatgtttgatttaaatagatcggaatatctgattttatcttgtctagcagttccaactttattcttcggattttatccagatccgttgataaatactatagaagtttctgtgaccgatttaattaatatgcataacacaaatatagctagtaaataa

SEQ ID NO: 220722 - DNA, 661 bp, Unknown
  Bacterial polypeptide expressing nucleotide sequence isolated from the Sargasso Sea
tagaagcgcaccgggattaggtaaggctcctaaagaacaggatttatcttcgtatgattatttttatgctcatttggatgtagtaattgtgggggggggtatatctggattagtaactgcgaacaatttagcgagtttaggtttaaaaatacttttagttgaacaaaaacatttttttggtgggtatacactttcagaagaatttaaaattaataatttagattcatctaagtttataaaaaatttagaagatgatttatcaaaaaataaaaatgttattttaaagaaaaacttttccgttgtaggagttcatgatcatagttatttacttggattagaaaatcttgaagttcttgaaagtgaaggtcaaagttcaataaggcatcggctttggcgaattcgaactaagcatatgattttagcaacaggagctattgaaagacccctagtttttgctggaaatgatatacctggagttattttatcttctgcagctagtgagttttataaactttatggaatttcaccaggtgatagagtaatacttataacaaataatgactctgcgtattcctctgtaattgagctattttctgcaggtataggtatacctcttgtaattgatgtaagggagaaaagtgttggtgagcttccgcttaaa

SEQ ID NO: 220723 - DNA, 256 bp, Unknown
  Bacterial polypeptide expressing nucleotide sequence isolated from the Sargasso Sea
atggaaaaaataactaaaaatcttcaattaatattattagcaataattttacttagtacagttatcgccgttggaattgaaattaaagcaatgtttttaaatcaatcagtaactctagctgacttattattgatgtttctttatctagaagttttagcaatggtaagggttttctggaatcagcaatcgataagtattacattgccattattaattgcaataacagccttatctcgttttattatatgcaaggaaa

SEQ ID NO: 220724 - DNA, 907 bp, Unknown
  Bacterial polypeptide expressing nucleotide sequence isolated from the Sargasso Sea
agttacttactttctggttacctcaaaagagatccaagaagttcagaagcggccttaaaataccttctcgttggttcagctgctgctgcggtctatttgtatggatcctcttttctttatggattaagtggttcaacaaacttaacgaccataggtttagaaattatcaataagccatcctttattacttcactagctcttgtatttgtcttatcaacagttgcctttaaaattgctgctgttccctttcatcaatggactcctgatgtatatgagggttcacctacacctgtagtagcttttttatctgttggttcaaaaacagcgggctttgcatttgcaataagaatattaagcacaactttctcttcttttgacgaagaatggaaacttttattcaccattttggcaatattgagcatggctctgggaaatgttgtagctctagctcaaacatcaatgaaaaggatgctagcttacagttctattggacaagcaggatttgtaatgattggaatagtatctggcacacaagatggtttatcagctgctgttttatatttggctgcatatttatttatgaatttgggtgcattttcttgtgtaatacttttctcactaagaactggttccgacagaattcttgattactcaggactttaccaaaaagatcctctcattacattaggcttaagcctttgccttctatctcttggagggttgcctccaatgttgggattttttggaaagatatacttgttctttgcaggttgggcaaatcatcaatatctactagtaattgttggattagtaacttcagttatatctatttattactacatttcagtgataaaaatgatggtagttaaagaaccacaggaagcttctgaaatagtcaaatcatatc

SEQ ID NO: 220725 - DNA, 637 bp, Unknown
  Bacterial polypeptide expressing nucleotide sequence isolated from the Sargasso Sea
tatgaagaaaaattttaaaagacgcgactttataaagaaagctggtgttgctgcagcagcagctacagcagtatcttcttttcctgctccagcaattgctgcagataggatagaggtcaactgtgttgcaacgtggggtagaggctatcctggtttaggaacaggtggtgaagcagtttcacaaagaatatctgatttaagtgatggaagaattgttgtaaatcattatgctggtggagaacgtgtaggacctctagatgtgtttacagaagtaagctctggcaatgcgcaaatgtataatagtgcagattattattgggtaggtcaacatccaggatggggtttctttgctgcagtaccttttggacttatttcaactgaaataaatggttggatcagacatggaggaggtcaagaactttgggatgagctagctgatggatttggacttaaaaactttatggctggaaactctggtgttcaaatgggtggatggtttaataaagaaattaattcagcagatgactttaaaggcctaaaaatgagaatgcctggattaggtggaatgatggttacaaaacttggtgcttcagtagtgggtatgcctggtggtcagatttatgaaaacttagttaat

SEQ ID NO: 220726 - DNA, 369 bp, Unknown
  Bacterial polypeptide expressing nucleotide sequence isolated from the Sargasso Sea
ttttaataaagaatttaggtattgattggagagaaggagaaaaatattttgctcaatctttagttgattatgatgttttagtaaacaatggtaattggcagtgggtatctggttcaggagcagatagtcaacaatatattcgtgtttttaatcctgaattacagtcgaaaagatatgatttagatgctgaatacatcaaattttggttaccacaattaaaaaatattccttcaaaagaacttcatgaatggagtaaatatcataaaaattatgatatgaaaaagataaattattttgaacctattatagattataaaaatagtaaaaaaaaaatgatggaattatataaaaaggcattacacccataaa

SEQ ID NO: 220727 - DNA, 255 bp, Unknown
  Bacterial polypeptide expressing nucleotide sequence isolated from the Sargasso Sea
gatgatcaaaatattaaaaaattcctgggctctttttactggatattttatcctaatgattgcgcatggattacaaggaaacttacttggggtaagatctgtaattgaagattttaactttatagctacaggtgcaattatgtctggttattttgtaggatatttttctggtgccaatataattcctaaactagttggaaaagttggacacataagagtttttgcagcttttgcttcgatggcctcgttgagtat

SEQ ID NO: 220728 - DNA, 103 bp, Unknown
  Bacterial polypeptide expressing nucleotide sequence isolated from the Sargasso Sea
aagggctgcaataaaagcctttgtagttaatagagttggtgactttggtttagcacttggaatttttctaattttttatattttgtggtacagtcaattatga

SEQ ID NO: 220729 - DNA, 622 bp, Unknown
  Bacterial polypeptide expressing nucleotide sequence isolated from the Sargasso Sea
gatgaaagaaaaattatttagctatatttctttttatcaatggtggaaaagtattgataaacctattttatcattgatctcacttttatttttggtgggtttattcttctcacttgtatcaacttctctaattgcatcggacaaattagatacgaatacatatttctttttttttaaacatacagtctttgttttttttggtttctttttgatttttttcttttcttttatacctgaaaaagaaatatatagagtttctataatatttttctgcttatcattagttttgttattacttgttcccataactggagtagagattaaaggttcaaagagatggattgatttggtgatattgccaagaatacaacctattgagtttgtaaagccttttttaattgtaacaattagtatgataatttgctctcaaaaatatacaaattttaatttgagatacttcttatcttttttattaactatgttgatatccagtcttttgatacttcaaccagacattggccaaactcttttaataggttttagttggttagttttgatttttatttcaggtattaatatattttttttgagcctcgttttttttatttctttaacagggata

SEQ ID NO: 220730 - DNA, 849 bp, Unknown
  Bacterial polypeptide expressing nucleotide sequence isolated from the Sargasso Sea
gatggtgtgccagctatacggtgccctccggcacctgcattctctcggcgtgctgcaccgcgacgtcaagctcgagaacctgctgtgcgacacccgcgttcggccgcctgctgtgaagctgtgtgacctcgggcatgcgacgcgactggacgacctcggctccgatcgcaacttcttcggcacgcccgggtacgctgcgcctgaggtgacgcaagggccgctgtggacgaccgccgcggatgcgtgggcgatgggcgtggtgatgtttgcgctgctgagcaacgccttgccattcgaggaggctcacggctggaaacgccccgcagacttctcgtcgcgcgtgtggtggaaggtgtcactcgaggcgaaactgctgctccaggcgcttctcgagcccaacctgagcgagcgcggcggcctcgacaccttcgaggcctcggcgtggccacgcatgcgcttcgacggcaccacagcgggggtgccggagccgcacggcattcgacacgcttactcgatgcgcgacatgagtgtgatcggtggcccgaacgccgcgatgcagcacgctgcctcgtggagtgatggtctggatctctcagcttgctcgactcccaccgcgagcctcgccgcagcctccgccgccactggtgctacctctgctgccaccccaaatccccagagcttctccgcgatggtctcggctgcggctgcggcggcggtgcgctcgaatgggccgccagcagcaaacgccacctcgacgttccctggcgccccgcagccgcctggcttttacactggcccgagcgctgcggtgctgagcgctgcgatgccgagcgctgcgatgccgagcgc

SEQ ID NO: 220731 - DNA, 539 bp, Unknown
  Bacterial polypeptide expressing nucleotide sequence isolated from the Sargasso Sea
gtccgtacaggaactgaagaagtttggccccttcaacatccttgtgaataacgccggcaacaatattccggaacatttctgcgatgttacggaagataacttcgacaaggtgatacagctgaatgtaaagtcggctttttttgtagcacaggcagtagctcagggtatggtggagtctggcatcaagggatcaatcatccacatatcaagccagatgggaatagtcggtggcaaaaaacgtacagtctactgctcctcaaaacacgccatggaaggcttcagcaaaagcatggcccttgacctggcagaaaatgggatcagggtgaatactgtttgcccgacttttgttgagacagagcttactcgtcccttcatggcagaaaaggaattcaaagattatgtcctgagccgcattccgctgggacacgtgggacagactgaagatgttgccgacgcagtgctttttcttgcctcggacatgagtaaaatggtgaccggttctgccattaaagttgacggcggatggaccgcaatttaat

SEQ ID NO: 220732 - DNA, 776 bp, Unknown
  Bacterial polypeptide expressing nucleotide sequence isolated from the Sargasso Sea
tttattaatgttaataggcactttagcgcttacgggctttccttttttatctggattttactctaaagatttaataattgaatttgcatatttaaaaggaaataccgttggttattatgcttgtggtataggaatttttacagcttttttaacatcaatttattcttggagattaatatttaaaaccttccatggtgattacaaaaatgaaaagtatcaaattactagtgtccatgaatctccaattataatgataggcccattaattgtattagcttttggctctgtattagctggatttatttttaaagacttatttatgggctacagttctttcttagatttttggcaaggttctattttttttctagaatcgttacccaaagatcatccccccggatatattttatatttaacgcctatattagtaattatttcaataccattgagttattatatatttttaaaaaataaatcatcattagatgccatagttaaatcaaacagaccaatttatttatttttaaaaaataaatggtactttgatgaactttatgaagttttgtttgtaaaatcttctaagtttttaggtagatatttttggaaaaaaatagatggtttaattattgatagattcggcccagacggattatcaaatctatttaaatatttttcaattaaagcggtaaagttccaatcaggatttatataccaatatgcttttgttatgcttattggtttttcattaatattaacatttataataattaagtaat

SEQ ID NO: 220733 - DNA, 853 bp, Unknown
  Bacterial polypeptide expressing nucleotide sequence isolated from the Sargasso Sea
gataataaaaaaccctccttcatcacttctctggctctcgtatttgtcttgtcaactgttgcttttaaaatcgctgcagttccctttcatcaatggactcctgatgtttatgaaggatcacctacacctgtagttgcttttttatccgtcggttcaaagacagcaggttttgcatttgcgataagaatattaagcactactttctcttcattcgatgaagaatggaaactattatttactattttggccatcttgagcatggctctaggaaatgttgtagcgctagctcaaacctcaatgaaaaggatgttagcttacagttctattggacaagcaggatttgtaatgataggaatagtatctggtacacaagatggtttatcagctgctgttttatatttggctgcatatttatttatgaatttgggagcattttcatgtgtaatacttttctcactaagaactgggtctgacagaattcttgattactctggcctttaccaaaaagatcctctcatcacattaggtttaagcctttgtctcttatctcttggaggtttacctccaatgttaggattttttggaaagatctatttgttctttgcaggttgggcaaatcatcaatatctattagtaatcgttggattagttacttcagttatatctatttattactacatttcagttataaaaatgatggtagttaaagaaccacaggaagcatctgaaatcgtcaaatcatatcctgagattaactggggaattgtaggattgcctcccttaagaattgcactttatacttgcgtggcagtaactgctcttggaggaatcctttctaatcctctttttaaat

SEQ ID NO: 220734 - DNA, 649 bp, Unknown
  Bacterial polypeptide expressing nucleotide sequence isolated from the Sargasso Sea
tctagttactggagctggaaaaggtcttggaaaagcatgttcaatagcattagcagaggctggggcaaaagtaataatattaagtagaactaaatcagatttagataaagttagtaaagttataaaaaaaacaaagggctcaagtaaatcttttgtttgcgacgtaacaaatacagaagagtttaaaaaaattttaagaaagatagctagattagatatacttgtaaacaatgcaggtaataatcgccctgaacatttcactaaagttaaaaaaataaatatggaatatcttactaatttaaatatgaaagcagcatttaatgtagctcaattatgttctcaaaaaatggttaaaacaaaaaatagaaaaaaaattggaggatcaatcatacatatgtcatcacaactagggaaagtcggttgtgaaggtagaaatgtatacaatatgaataagtttggagttgaaggtttagctagaggtatggcagttgagttagctagctataatattagggtgaacaccgtttgcccaacatttgtagaaacgccaatggttaagaaattttttaaaaataaaaaatttaaaaatcaaatgcttaaaaatattccgttaggcagagttgcaaaagaaagtgatgtagctacagct

SEQ ID NO: 220735 - DNA, 427 bp, Unknown
  Bacterial polypeptide expressing nucleotide sequence isolated from the Sargasso Sea
tatgtatcgcgacttcggaacaatatttgttttcatttttattggcattgtgctaatctatttgccattgctaatccaaaaactgcttgccccaaacaaccccaatccagacaagctggcgacctacgaatgcggagaagaatcggaaggatctgcttgggtccaattcaacatacgtttctatgttgtggcgttaatttttttaatttttgatgttgaggttgtttttctatttccatgggcagttgtatttaatgatttagggttgctggcattagttgagatgggaattttcctcttaattctactagttggcttagcctatgtttggaaaaggtctgaccttgattgggtaaaatacaatgttaagtacggtcgcggtaggtattctagtttaatacaaaaatcaaacactcctagggaataa

SEQ ID NO: 220736 - DNA, 349 bp, Unknown
  Bacterial polypeptide expressing nucleotide sequence isolated from the Sargasso Sea
aatgtacagagatttcggaaccgtcttttttgcagtaatacttggcatcgtcatggttgcaatcccactcgtgatcagctggctagttgcgccgtcaaacaaaacgaaagacaagttagacacttacgaatgcggtgaagaagccgagggctctgcttggttacagttcaatataagattttacattattgccctgatctttctcatttttgatgtagaggttgtttttttatttccctgggcagttgtttttaaagaaatgggtttgcttgcattaattgaaatggggatatttttactcattctgattgctggacttgcatatgtctgggtcaaatcagatctagat

SEQ ID NO: 220737 - DNA, 322 bp, Unknown
  Bacterial polypeptide expressing nucleotide sequence isolated from the Sargasso Sea
atggaactatcgattatatttcttccacttattgcttcaattatatctggtttttttggtagatatatcggtgatagaaactccgaaatagtaacaagcgctctagtttcaatttctgcactcttatcaatttatgttctttatcaagtaattataaaccaatacgaagaaaacattgttatagctacctggataagctcagggtcacttgatgtaaattggtcaatgttaatagatcctttatcagcagtaatgttagtggttgtaacttctgtatctgctttagttcatatttactcgattggttacatgtcccacgacc

SEQ ID NO: 220738 - DNA, 873 bp, Unknown
  Bacterial polypeptide expressing nucleotide sequence isolated from the Sargasso Sea
tatggatgccaattttaggtggtatttggtcacttattattggtgatcagcaagagaaggtagtaaaacatttttctcttctaataagcttagctacctttttattttcaattattctttattatcaattcgataataattttttaggaatgcaatttattgaagagttttattggattgaatcattttctataaaatatcatcttggtgttgatggtattgcactgccattaataatgctcacaagtttcactacggtcattgtggtattagcagcctgggaagttatagatgaatatatatctttttacatgtgcgcttttcttattttgactggattaatgaatggtgtttttgctgcattagatagtattttattttatgtattctgggaggccatgcttatccccatgtttttgattattggaatttggggtggaccaaatcgtgtttatgccaccattaaatttttcctttatacttttttgggatcagtatttatgttagtagcacttctttatttatattctattagtggaagtttcaatattgaagatatgcagcaaacatcacttggattaacagcacaaaaactcatatttattgcttttttcttagcgtttgcagtcaagattccgatgtggcctattcatacatggttgccagatgcacatgttgaggcaccaactggaggatctgttgtactagcggcaataatgttaaaaatgggtggttacggctttcttcgatttagtcttcctattgctcccgatgcaagttttttctttgccactccaatgattttgttatctttgattgcgattgtatatattggttttgttgctttggttcaggaggatagaaaaaattaat

SEQ ID NO: 220739 - DNA, 838 bp, Unknown
  Bacterial polypeptide expressing nucleotide sequence isolated from the Sargasso Sea
aatgaacttaagccaaatcgaatggggaaaaaaatttaatttagtacataaagcaaagaaggtcaaaggacagaaatggcattgggttgaggcaggatctggagaccctgtaattttattgcacggaattccagaaagttggaaatgttggaaacaccaaatacctaaattatctactcaatttaaagtttatgccttagatctcaaagggtatggtcaatctgacaaatccgacggcgactactccatgaataatgttgcctcagaaattataagcctcttagattcactcaaaattgataagttccggatagctggtcatgactggggcgttgcaatagctgataatatcattgatcaaattccagatagagttgaaagatatattcgatgttgcctatctcttcataactatgaccctcgaaactcattacatcatcagtggaattctgagaaccctgatgctgctacaagattaatgaataaaagtgaagcttatgttaaagtttggtttgaaagttcgtgtaaacccgaacttatccctgatcaaaaagaaataaatgaaattgtaaaagagttctcttatccgggaattggtaatgctgttccaagatactttcgtgacataaccaaaaacaaaccagttgatttatctaaattcacaatgccaattttatatatacatggtgaacatgaccctagacagcctatagaatactgttttgggatggaaaaacatcttcctgggcttgaagcaattctggttttagactcaggccatttcattacaagagaacgccctattgatacaactaatgcaatgatgtggttttttaat

SEQ ID NO: 220740 - DNA, 316 bp, Unknown
  Bacterial polypeptide expressing nucleotide sequence isolated from the Sargasso Sea
atggaaattttaattttatttcttccgttaatagcatcaattatttcaggtttttttggaaaatatattggagatagaaattctgaaattgtaactagtgctttagtctcaatttcggctattttttcgataattatactttatcaggttatttttaatcaatatgaagacaatattgttatagcaacttggattaattcaggctcactcgatgttaactggtcaatgttaattgacccactatctgcagtaatgcttgttgttgttacctcgatttcatctttggttcatatttattctattggttatatgtcgg

SEQ ID NO: 220741 - DNA, 703 bp, Unknown
  Bacterial polypeptide expressing nucleotide sequence isolated from the Sargasso Sea
tcatttttactaaacccaaattatgcagaagcatattacaatatgggaaattcacttcaacgtaaaggtaagttatctgaagctatagaatattttaataaagcgttagttattaaaagagattatgctgaagctcacatgaatttgggtgttctgtttacaatacaaagtaagtatattgatgcaatcaatacttacaataaagcacttttaattaatccaaactatgcagaggcgtactataatatgggtaattctttacgccatcaaggtaaactatctgaagctgtagtgtctttcaagaaagcgttaactataaaaactgattatgctgaggcatatatgaatatgggccttgttttaaaagatcaagataagcttgaggaggccattgagtctttcaagagtgcaataactatcaaagaagactttgcagaagcgtacatgaacatgggaattacttttacagaacaaaataagattgataaagctataaagacttataataaagctttattaattaaaccaaattatgctgaagcttattataacctttctttttcttataatttaagaggggatcttcataagggcctaaaattatatgaatggagattaaaaaaaaagaaacctttagctatgatgccaaaagagaattttgaatgggacggcaaaaagtcagttttaggaaaaattttttagt

SEQ ID NO: 220742 - DNA, 805 bp, Unknown
  Bacterial polypeptide expressing nucleotide sequence isolated from the Sargasso Sea
atgagctataaaagcatttttaataaagaattattttcaggaaagaatattatagtgactggtggtggtagtggcattggaagatgtatagcacatgaacttagttcgctagggtcatacattattttaattggtagaaataaagaaaaactgaaaaaggtaatgaaagaaattaaatcatcaaatggaaatgcatcatactatgtttgtgatataagagaagaagaaaaagttcaacaatgtacaaaagagatttttgatcaatataaggtaatatatggtttagttaacaatgctggcggacaatttccatcgccagcagaatatatttcacaaaaagggtttgaaacagtcgtaagaacaaatcttgttggaggttttttatttagtcgtgaggtgtttaatcaaggaatgattaaaactggtggcaatattgtaaatataactgcagatatgtggaatggcatgccaggaatgagtcactcgggagcagccaggtctggcatggataatctaactaaaactcttgcctatgaatggggatatgctggagttcgtgtaaactctgttgctccaggatatattgcgtcaagtgggcttgatacttatgatgatggtataataaaagaaattatccccaaattaaaaaaaatagttccattgaaacggatgggaactgaagctgaagttagtgctgcagtttgttttctattatcagaagcagcagcttatataaatggaatatgcattcaggtagatggtggatctcctttaggaagtaacttttggccattaaaagaaacta

SEQ ID NO: 220743 - DNA, 571 bp, Unknown
  Bacterial polypeptide expressing nucleotide sequence isolated from the Sargasso Sea
atgagttatgacatcttaatcacaggtttaattatagtagcacaaatacttgctgttttggttccagttttaatatctgtagcttttttggtgtacgctgaaagaaaagttttagcacttattcaattaagaagagggccaaacatagtagggccatttggaatattacaaagttttgcagatgcattaaaactaattactaaggaaaatattattccaagtggttctaataaaattgttttcattttagcacccataataacaatggttttaagtttagctggttgggcagtaataccttttgctccaggttgggtattatcagatataaatgtaggtattatgtatctttttgcagtctcttcattaggagtatatggaattataatggctggatgggcaagtaattcgcaatatccatttttaggcgcattaagatccgctgctcaaatggtttcttatgaagtatcgataggttttgtaattattactgtcttactatgtgttggctctttaaacttatcaaaaatagttttagctcagcagactgtatggtttgcaattccattat

SEQ ID NO: 220744 - DNA, 850 bp, Unknown
  Bacterial polypeptide expressing nucleotide sequence isolated from the Sargasso Sea
catgctggtcttaacgctgggcatggggattgggcgctttttgtatacgccaatgctaccggtactgctgtcagaaggtcaatttacgtttgaccaactctcgtggattgccagcgccaactacgccgggtatctggcgggaagcctgctcttctcctttgggctctttcatcttccctcacgcttacgtccaatgttgctaacgtccgcgctcgctaccgcagggctgattctggcgatggccagcttaacgcagcccgcgctggtgatgctgatccgctttctggcgggcgtcgccagtgccggtatgatgatctttggctcgatgatcgttctgcatcatacccggcatccctttgtgatcgcggcgttgttctccggcgttggcgcaggcattttgctgggcaatgaatatgtcattagcggtctgcattttgcgctgtcctcgcacacgctctggctgggcgcggcggcagcctcggctctgttctttgtgctactggttatactcctgccatctcgcgaccacgtgctccccgccgcggccccggtaaaaacagagcatcagcctatgtcctggtggctgctggcgctgctgtacgggctggccggatttggctacatcattgtcgccacctacctgccgctaatggcgaaaagcgccggttcgccgctgttgactgcccatctctggtcgctggtcggcatatcgataattccggggtgtttcgcctggctgtgggccgcccgacgctggggagtattgcaatgcctgacggcgaatttgctgattcaaagcgcctgcgtgctcatgacgctcgccagcggctctttgccgctgctggtgata

SEQ ID NO: 220745 - DNA, 630 bp, Unknown
  Bacterial polypeptide expressing nucleotide sequence isolated from the Sargasso Sea
tatgtttactcataatttagacccaattcttattaactttggctttatttctttaagatggtattcattagcctatatatttggaattttaataggatggtggtatggcaaaaaaattattaaaaaatttaaaaataaacatggtaattttttagctgatgattttgatgatttaataacctatttaatttttggaatagttattggcgggagagtcggctatgtcatattttataatctcaattattatattgaaaatccattagatataataaaaatctggcaaggaggaatgtctttccacggagcgttaataggaataataattggaactttttttttctcataccgtagagataaaaatgcacttttttttttagatattatcgcatgtgtttccccaatcggtattttttttggtcgtattgcaaattttattaatggagagttagttggtaaaattagctctatgccttggagtgtaatttttcctaatgtagacatgatgcccagacatccttctcaaatatatgaagctatattggagggagtcatattattccttatagtaaatttttttatcaacaaaaaagaatatatcattggtacctgttcatatatatttctaat

SEQ ID NO: 220746 - DNA, 707 bp, Unknown
  Bacterial polypeptide expressing nucleotide sequence isolated from the Sargasso Sea
aatgaaagaaaaattatttagttatatttctttttatcagtggtggaaaagtcttgataaacttattttatcattgatcttaattttatttttggcgggtttatttttctcacttgtttcgacttccctaattgcatctgataaattagatacgaatacttatttctttttttttaaacatatagtttttgtttttattggcttttttttaatttttttcttatcttttatatctgaaaaagaaatctatagaatttcaataataattttctgtttatcattagttttgttattcctggttcctataattggagtggagattaaaggttccaagagatggattgatttgttgttattaccaagaattcaacccattgagtttgtaaagccttttttaatagtaataataagtatgataatttgctctcaaaaatatacaaattttaatttgaaatacttcttatcttttttattaactatactgatatcgagtcttttgatacttcaaccagatattggtcaaactcttttaatcggttttagttggttagttttgatttttatttctggtattaatatatttttcttgagcttagttttctttatttctttaactgtgatagcgtctatcattagttaccttccacaatttaaatatataaaagatagattattttccttttttaatcctgaaacgggtactcata

SEQ ID NO: 220747 - DNA, 443 bp, Unknown
  Bacterial polypeptide expressing nucleotide sequence isolated from the Sargasso Sea
aatgtttacccataatttagaccctattctatttgagtttgggttgatatcaattaaatggtactctttagcttatattttcggaattttaatcggatggtggtatggaaaaaaaattatattgaaaaagactcatattttaaaaaaaaaatttgagatcaaatttttcgatgacttgattacctacattatagtttcaataattcttggtggcagattgggctatgtatttttttataatttggaatattatctaaacaatcctttagatataataaaaatctgggaaggaggaatgtcattccatggtgccttattgggaataataataggtacatttatatttgcaaaaaaaaatgatattaaaactttttttctccttgatattttagcttgtgcttctcctataggaatttttttaggaagaattgcaaattttataa

SEQ ID NO: 220748 - DNA, 825 bp, Unknown
  Bacterial polypeptide expressing nucleotide sequence isolated from the Sargasso Sea
gctccccgatgcacacacgcaggcacctacagtaggttcagttattcttgccgctgttcttttgaaacttggtacttatggatttattcgaattgctattcctatgcttcctgaagctgctgcagcttgggcccccttcataggcttattggcagttatcggcattatctatggtgcgcttgggtgcttagcacagcgggacatgaagagacttatagcgttttcttccgtagctcacatgggttttgtgatgttaggaatctccacattaactgacttcggaatcaatgctgcagttttcggtatggttgctcacggcctaataacggggatgctcttcttcatagctggatctatgaaggaccgataccacacattagacatgggtcgattaggtggccttcttgtctcggcgcctagattgggttggatacttgggttctcagcaatggcatcacttggtttacctggcctcgcaggtttctggggtgaattcccggcaattcttgcaagctataaccctgcttctattcttccagagggcaccttccgtggatatatggttgtcgcagcccttggaactgtcctagcagctggatatctcctgtggatgttacaaaagaccgcgatgggaaaccccaaggaagaatttgcagataacgaggaaattactgatgttaaaaagcacgaatggatagcttgggcacccatcctcgcccttattctcttattcggcttgtaccctcgtcccatcttcaaaaccaccgatgatgctgtggtcaagtcactaactgtagatatacaaggcgaagaatttgaaaattg

SEQ ID NO: 220749 - DNA, 941 bp, Unknown
  Bacterial polypeptide expressing nucleotide sequence isolated from the Sargasso Sea
tatgaacttgtacactccttatcgaggattattattattccatggtttaggatcaggtaaaacgtgttcctctattgcaattgcagaagggtttaaacatgtacaaaacattatggttttaacaccaaagtcgcttatttcaaactatattgaagaactcaaaaattgtggtgatccaatttataaaacaaactacttttggacatttcatgctatttatgaagacattaattctaaatctagcgtaaaagccaatttaattgaacagtttactactgaactcagtttatccgaagcatttttacataaaaaaggcggtgcatgggttcctgactcaacgcttcaacctaatttcaatagtcttacacttgaccaacagaagcaaattatggaacaaataaatcatatgatttattccaaatatacactcgtcccttacaatggtcttcgtaaagataatgtaaatcaaaaactacaaacatttaatggtaccaaaaatccgtttgatgataaggtcgttgttgtagacgaagcacataactttgtcagcacaattactaataaaattaaaacgaaaaagtatgatactgttccatacatgttgtatcgttggttactctctgcacataactgtagaatagttttcctgtccggaacacctattatcaattccccattagaaattgctgtacttttcaatatattacgcggactcatttatgaatggactattgttttgcgcacaaaagaatctttaactattaatactgagtactttttaaaattgttcaaaaaacaatcgctcgcatctatttcttcagataaaccaatcactatttctgaggtgttagatgatgtaaattataaaccttccacacatacgcttaaatttactagaaatccaagcggttttctcaacaattcaaaaatacaacatacat

SEQ ID NO: 220750 - DNA, 199 bp, Unknown
  Bacterial polypeptide expressing nucleotide sequence isolated from the Sargasso Sea
atgttagtttttcttctaagcgttatcgggaaaattttaggtcttgttgttccacttttagttgcggtagcatatctaactttggcagaacgtaaagtcatggcctccatgcaacgacgcaaaggtccaaatgtggtaggtttttttggtcttttacaacctctcgcagatgggttaaaattattaataaaagaacctg

SEQ ID NO: 220751 - DNA, 418 bp, Unknown
  Bacterial polypeptide expressing nucleotide sequence isolated from the Sargasso Sea
aatgtacagagatttcggaaccgtcttttttgcagtaatacttggcattgtcatggtcgcaataccactcgtgatcagctggctagttgcgccgtcaaataaaactaaagataagttagacacttacgaatgcggtgaagaagccgagggctctgcttggttacagttcaatataagattttacattattgccctgatctttctcatttttgacgtagaggtagtattcttatttccctgggcggttgtttttaaagaaatgggtttacttgcgttaatagaaatgggaatatttttgcttattctaattactggccttgcatatgtctgggtcaaatcagatctagattgggtaaaacggagaattaaatatggaggtggtagatataaacagatagctggatctacggaggattaa

SEQ ID NO: 220752 - DNA, 298 bp, Unknown
  Bacterial polypeptide expressing nucleotide sequence isolated from the Sargasso Sea
gacctatgagtgtggagaggtggttgagggctccgcatggttacagtttaatatcaggttttatgttatagccttaatttttttaatttttgatgttgaagttatctttctctttccctgggctgtcgtgtttaaggatcttggccttttagctcttatagaaatgggtatctttttattgattctatcagttgggttagcatacgtatgggttaaatcagatcttgactgggtaaaaagaagagttcgttatggaactggtagatacaaaaatattgcaattgatcaggagagttaa

SEQ ID NO: 220753 - DNA, 370 bp, Unknown
  Bacterial polypeptide expressing nucleotide sequence isolated from the Sargasso Sea
atggaaaaatttataatttttttaccattatttgctgcaataatttcaggtttctttggaaaaataattggaaatagagcatcacaaataaccacaagtttatttgtttctgtatcggcattgttatcaatttttgtattctatgatgtaataagtaatggttactcaaacaatattttaattgctaaatggataaattctggacttcttgatgtaaattggtcaataaaaattgatcagttgtcagctgttatgcttgttgtcgtgactttagtttctgcaatagttcatgtttattcaataggctacatgtctcacgatcctcatcaaccgaggtttatgtcatatctgtcactatttactttttcaa

SEQ ID NO: 220754 - DNA, 787 bp, Unknown
  Bacterial polypeptide expressing nucleotide sequence isolated from the Sargasso Sea
atgtacatccataatttagaccctattttattcgattttgggattgtagttataagatggtattccttagcatacatatttggaatacttataggctggtggtatggcaaaaaaatagttttaaaaaaaagtttaattggaaaaaattattttgaaactgacaaattcgatgacctaattacttatttaatagtctcaataataattggaggaagaatcggatatgtaatattctataacttaggttattatttgcaaaaccctttagatataattaaaatttgggaagggggtatgtcatttcatggtgctattataggtgtagtagttgggacttacattttctcaaaaaagatgaaaatcaaaactttttttcttctagatattgtagcttgtgtgtctcctataggaatctttttaggacgaatagcaaattttattaatggtgaattaattggaaaaaccacaaatgtttactggggggttattttcccgaaggtagacaatcttttgagacacccatcacaattataccaggccatattagagggttttattttatttttaattatgaattacgtgataaacaaaaaagattataaaattggggattgttcatatctgtttttaattttctacggtctctttagaattttttcagaattttttagacaaccagatgtacaaattggatatgttttgggttcaataaccttaggtatgattttaagtatagtaatgatatttgctggtataattctttattttaaaaaaaatgaaatataac

SEQ ID NO: 220755 - DNA, 418 bp, Unknown
  Bacterial polypeptide expressing nucleotide sequence isolated from the Sargasso Sea
atgtacagagatttcggaaccgtcttttttgcagtaatacttggcattgtcatggttgcaataccactcgttatcagctggctagttgcgccgtcaaacaaaacgaaagacaagttagacacttacgaatgcggtgaagaagccgagggctctgcctggttacagttcaatataagattttatatcattgccctaattttcctcatttttgatgtagaggttgtttttttatttccctgggcagttgtttttaaagaaatgggtttgcttgcattaattgaaatggggatatttttacttattttgattgctggccttgcatatgtttgggtcaaatcagatttagattgggtaaaacgcaggattaaatatggaggcggtagatacaaacaaatagctggatctacggaggattaaa

SEQ ID NO: 220756 - DNA, 469 bp, Unknown
  Bacterial polypeptide expressing nucleotide sequence isolated from the Sargasso Sea
ttgcataaaggaacaaaacaaagattttctatatttgtattaattgtcctttcaattacattaatttttatcgaaacaattcaaactaaaccactcaattatgtaagagcttttgtaaaagatgtaatttatcatgctacttcggttgttactgctccgtctagaagtttaggaagtttttcactttatgttaaagaacatataaatctttataaagattatagtgaattaaaaaaagaaaatacagaattaaaaaataagatttcaaaatcagattatttagaattagaaaataatcaattaaagcaattatttgaagaacaaatggctttacccgaaaattttgtaagtgccagagtaatgatcgataaacaaagtccatatcttaattcgtttatcattaatattggtggtaataaaaaaataaaaaatggtttggaagttttaaatggaaaaaactttatcggta

SEQ ID NO: 220757 - DNA, 643 bp, Unknown
  Bacterial polypeptide expressing nucleotide sequence isolated from the Sargasso Sea
tctccagaagcgccctattcggtcaaacactttattgatgatgtcaattcactgattcctaaaattcattctagaaataaagcaattattatctgtggtggatctgccatgtatttaaaatcactgttatatggctatacacctcttaaacgactgcctgtttctgagcgacctcaaggctcaaaagaatcgttatggaatcaattgcatatcattgataaagcacttgctgataaaaccccttaccagaataaacaacgggttcaacgatatttagagctgtatgcaatttataaaaaacccccatcagaactattccaatcacatagctttcagtctgataaatataaagttattggactttcaatcgaaaaagaaaacttgaaagaaaaaatttcgaatcgagtcgatttaatgattgcacatggtttggttgacgaagttcatacattaatggaaaaatacaatcacggctcgcctgcatttagtgcaattggatataaggaagttatccaatatctgcagggaaagttctcaaaagatttcatgatagatttaattaagaaaaacacaatttattacgcaaaaaaacaaatgacttggtttaggatatttgacgatgttcactggattaatcaataac

SEQ ID NO: 220758 - DNA, 688 bp, Unknown
  Bacterial polypeptide expressing nucleotide sequence isolated from the Sargasso Sea
tatgtttacccataattttgacccagttctttttgatttaagctttatttcaattagatggtattcattagcctatatttttggaattttaattggctggtggtatggaaaaaaaattattttaagaagatttacatttgtaaaaaataagtttgatttaaaagagtttgataacttagttacttatttaattatctcaataattattggaggaagaataggttacattgttttttataattttggatactatttgaataatccacttagcatatttaaaatttgggagggaggtatgtcgtttcacggcgcactaattggggtcacagttggcacgattttattttcacagaaaaaaaacatacaatcattgttcctcttagatattatagcttgcgtttcaccaattggcattttcttaggaagaattgcaaattttattaatggtgaacttgtaggtaaagtaacttctgttccttggggtgttatttttccaaatattgacatggttcctaggcatccgtctcaaatatatgaagcatttctcgaaggagtattattatttttgattatgaactcaatcatttttaaaaaaaattatataactggtacttgtgcatacttatttttgataaattatggaatatttagaatcatatcagaattatttagagaaccagacactcag

SEQ ID NO: 220759 - DNA, 290 bp, Unknown
  Bacterial polypeptide expressing nucleotide sequence isolated from the Sargasso Sea
tatgtatagagattttggaaccgttttttttgcagtgattatgggaatcgtcatggtttctatcccgcttataattagttggctaattgcgccctctaataaaacaaaagataagttagatacttacgaatgtggtgaggaagccgagggatctgcttggttgcaatttaatattaggttttacataatcgctttaatttttcttatttttgatgttgaagttgtattcctttttccgtgggcagtagtgtttaaagaaatgggtttaatagctttgattgaaatgggaa

SEQ ID NO: 220760 - DNA, 409 bp, Unknown
  Bacterial polypeptide expressing nucleotide sequence isolated from the Sargasso Sea
atgtatagagatttcggaacggttttttttactagtatcgtggctatcatcttcgtggtagtcccattggtcatagcctggctagttgcgccctcaaataaaactaaggaaaaacttgagacatatgaatgtggagaagttgtagaaggttctgcatggttgcaattcaatatccgcttttatgttatagcactcatatttcttatatttgatgtagaagttgtatttctattcccttgggctgttgtttttaaagacctaggtcttcttgctttgattgagatgggtatattcctatcgatcttagtggttggtctagcatatgtgtgggtaaagtctgacctagactgggtgaaaagaaaggtgcggtatgggactggaagatattcaaaaattgcaatggatcaga

SEQ ID NO: 220761 - DNA, 304 bp, Unknown
  Bacterial polypeptide expressing nucleotide sequence isolated from the Sargasso Sea
atggaactgtcaattatatttcttccacttattgcatcaattatctctggtttttttgggagatatattggtgatagaaattctgaaatagtaacaagtgttctagtttcaatttctgcattcttatcaatttatgttctttatcaagtaattgtaaatcaatacgaagaaaatattgttatagctacttggataagctcggggtcacttgatgtaaattggtcaatgttaattgatcctttatcagcagtaatgttagtagttgtaacttctgtatctgctttagtgcatatctattcaattg

SEQ ID NO: 220762 - DNA, 307 bp, Unknown
  Bacterial polypeptide expressing nucleotide sequence isolated from the Sargasso Sea
aatgtcctatgtattagtttttgcaccattaattggttttcttttaacaatttgttttggcaaattacttggagatagaatttctcaaatcttaacgtcatcactagttttagtatcaacattaatatcatttttttatttttttaaatttatttcgaacgatacagctataataaatgatcaaattataaactggctttcttcaggaaaattaaattttgattggtcaatttatattgatccattaacatctttaatgctcgtaataattacattaatatcatttttagttcatatttattctata

SEQ ID NO: 220763 - DNA, 729 bp, Unknown
  Bacterial polypeptide expressing nucleotide sequence isolated from the Sargasso Sea
tgttggagatttagcttttgcaacagtaagcgttttatggtcaggatttaaaaaagattttactaagtttaaagatcttttaaaaaaagaattaaatttcaatcaagatgtttatttttatatgaggttaatagctgtagtagcagatagatcagcccttttagatgacatcgaaaaaatgactccatcagaattaagaaaaacatggaaattggtaaaaactattcttcctgaaattcttaaagcttttaagacagaattaaatatattttctgacaaagatttagtaactaagaatgttatatatattattgctgcctatctttctaaaagacctaacaattcattcaaaagtaaaaacgatcgaaaaatgtggatgtattttgttttacttgcatcagtacacagaagatattctggttcaggtggagataataaaataaatatcgatgcagataaagctagagaaggggatattaataaagtaattagaaatattgatgaacaagcaaatgttagagaaatacatccaaatttagttaaaggcgccgatggttcaaaatctaatccaattttttggtcttactctttaatgttaagaaaaaatggtgcacaagattgggttacaggtattgaatttttcccaccaaaatcagatttgagtcctacgcacatacatcacatatttcctaaagcaaaacttgatgaaattagagaactgaaacaaga

SEQ ID NO: 220764 - DNA, 274 bp, Unknown
  Bacterial polypeptide expressing nucleotide sequence isolated from the Sargasso Sea
gatgcgtgcctactcggcttgtatcctcttcgcactattcttcctagggggatggcaactgccatttgaggacactttggtaagtctaccatatgtcggcgttatcttcgatttcttagcaaatgcaacacctggattactagttctacttctcaaggcctacctaatgtttgcattctttgtctgggttcgtgcttccctacatcgtgttcgcacggaccaaattcttgagtttggatggcgctggcttctacctgcctcgatggacaacctt

SEQ ID NO: 220765 - DNA, 821 bp, Unknown
  Bacterial polypeptide expressing nucleotide sequence isolated from the Sargasso Sea
cggtgagctggggatgacggctcagttggtgttaatgggcgccctgctgatcggcttcggcatcaaaatccccctgtttccgtttcacacctggttgccggatgcccacaccgaggcctccacaccggtgtcggtgctgctggccggggtgttgctcaagctgggtacctacggcttgctgcggttctgccttggtctgttccccgaggcctggcaactggcctccccctggttggcggcctgggcggcgatttcggtgctttacggctctttggccgccatcgctcaaaccgacatgaaacggatggtggcctacagctccgttggtcacatgggctacgtgctgctggcggcggccgctgccacgccgcttgggttgatgggtgccctgttccagatgatcagccatgggctgatctccggggtgctcttcctgctggtgggcgtggtctacgcccgaaccggcacccgagatctcaatgttcttcgcggtctgctcaaccctcagcggggcctgccgctgaccggttctctgatgatcatcggtgtgatggccagtgcaggtattccaggcatggctggcttcatctctgaatttctgatcttccgcggcagcctgcagccgttccccatcgccacgttgctgtcgatggtgggctccggcctcacggcggtgtatttcctcctgctggtgaaccgggcattcttcgggcgacttgcgatcgcccccggcgaggtggtgaatccccgtattctcgaccgggttgccttgcgggaacaagtgccggccattgccctcagccttggtgttctggttcttg

SEQ ID NO: 220766 - DNA, 565 bp, Unknown
  Bacterial polypeptide expressing nucleotide sequence isolated from the Sargasso Sea
aatatggggtccccgctctatttttgttatcattatcagagtcatcatttttttccaatcccaccagacgttctcttaattgctttatgcttaggcatgcattcaaaagcactctattttgcgtttgtatgtagtttagcaagcgttttgggggcaatgattggttttgcgattggttattttacctggtggaatagcgtgggagaatattctacagttgcactcttcttttttaataatataccaggcttttctgaagaattattttcaacaattcaacaaaagtttgatttgtataatttctttattgtatttacagctggatttactccgataccttttaaggttattacgatttcttcaggcgcgttcaatattaattttccaatgtttattatagcatcaactattagcagatctgccagattctttttggtagctatattgattaaaaaattcggtgaaccaattaaaggatttatcgatagatattttaatattctttctatattatttacggttttactaattggaggattctttttaataaaagtattgttatagc

SEQ ID NO: 220767 - DNA, 751 bp, Unknown
  Bacterial polypeptide expressing nucleotide sequence isolated from the Sargasso Sea
gatggagaactcccctttcgtcctcataccccagataggagtcgcatggcacgtaggggccgacgcactctcccttcctatgatctggctgacggcactggtggtgccggtttccatgctcgtcgagtgggacgctaagagaggtcaccaattccaccccctcctgctaatcatggagggggctatgataggggtattcgtctcactggatctgttcgtattctacgtgttctgggagatgacgctgattccgatgttcttcctaatcctgatgtggggcggcgaggacaggcgatacgccgcgatgaagttcttcatctacacattcactgccagcgtcgttatgctgattggaatacttgtgatgtacttcaacaccgggtccacgatcgctgaaagatcatttgacatggtgcacatgctcgaaagtggagaccagatgacagagggcctcaggcatctagtctgggtgcttctgctgattggattcgccacaaagatgcccagtgtgccagtccatacctggcttccagacgcacacgtgcaggcacccaccgccggttctatgatcctagcaggggtaatgctgaagatgggtgcatacggattcctcagggtagctgtgacggcttttccaggatccacggtagtattcactcccctactggtaggactcggtatggtcagcttagtctacggggcttgggtatgcatggggcaaaccaacctcaagagaatggtagcatactcc

SEQ ID NO: 220768 - DNA, 362 bp, Unknown
  Bacterial polypeptide expressing nucleotide sequence isolated from the Sargasso Sea
attgctaatccaaaaactccttgcgccaaacaaccccaatccagataagcttgcgacctatgaatgcggagaagaatcggaaggatctgcatgggtccaattcaatatacgcttctatgttgtggcattaatttttttaatttttgatgttgaggttgtttttctatttccatgggctgttgtatttaatgatttagggttgctagcattagttgagatgggaattttcctcttaattctattagttggcttagcctatgtttggaaaaggtctgatcttgattgggtaaaatataatgttaagtacggtcgcggtaggtattctagtttaattcaaaaatcaaatactcctagggaataat

SEQ ID NO: 220769 - DNA, 414 bp, Unknown
  Bacterial polypeptide expressing nucleotide sequence isolated from the Sargasso Sea
aatggttaataatttgaatccagttctgatcgatttaggaattatcaaaattcattggtattctctggcatatatatttggcatattaattggctggtggtatgggagatttttaattaaaaaaaaagttagatttatcgatcaagaaaattatataaaaaattttgatgatttaatttcttacataattattggcgtaattattggtggaagattgggatatgtaatattttataacccttcatattttattgaaagccctattcaaatttttaaattatgggaaggcgggatgtcttttcacggaggattaataggtgttattgtaagcacttatattttttcaaatcttaaaaaacttaattataaagtatattttgatctaatttgctgtgtggcacctattggaatttt

SEQ ID NO: 220770 - DNA, 487 bp, Unknown
  Bacterial polypeptide expressing nucleotide sequence isolated from the Sargasso Sea
ttgggtgtagttcttatgattttttattggctatattacaatagaattttaaaaaacttactgaatacaacaaaaaattattacttttttaaatttggtattctttcagcttcttttttacttttacatgtattttttcttggttggacatttgaaaacgaaatacttacaaaattaagaagaactttagtaatattttttatattatttgaagtgctagcgcaaacatttcttattaagcagattttttccataaaagataaaattaataattatcttaatttaattatagtttatttaaaattgttatttgtttttctggtttgctcttcaacaattataattttaacaatactaattttttatgatttagatgctaaatttgattatattttagaatggaattattttttattattactgatattttattttttgtcctttttaatgtggaaaaaactaattcgtaatccagcctcctcctaaa

SEQ ID NO: 220771 - DNA, 436 bp, Unknown
  Bacterial polypeptide expressing nucleotide sequence isolated from the Sargasso Sea
taaacccgaacttattcctgatcaaaaagaaataaatgaaattgtaaaagagttctcttatccggggattggtaatgctgttccaagatactttcgtgacatacccaaaaacaaaccagttgatttgtctaaattcacaatgccaattttatatatacatggtgaacatgaccctagacagcctatagaatactgttttgggatggaaaaacatcttcccggtcttgaagcaattttggttttagattcaggtcatttcattacaagagaacggcctattgatacaacaaatgcaatgatgtggttttttaattctatgcttggttcaggtttaaaaatatttaaaagatccaaggaattaggattaccaacaaaaccaaccaaagccttaaaaaataagtttggtgttaactctgtgaaatttgataaaaaataa

SEQ ID NO: 220772 - DNA, 336 bp, Unknown
  Bacterial polypeptide expressing nucleotide sequence isolated from the Sargasso Sea
ctactacctactacctactacctactactactactactactactactactactactactactactagaactactactactactactactactactactactactactactactactactactactactactactactactacttactactactattatactactactactactactactactactactactactactatcactacttttactactactactactactactactactattatcactattactactactactactactactactattatcactattactactactactactactactactaatattcggcgcccgtggggcggttgat

SEQ ID NO: 220773 - DNA, 446 bp, Unknown
  Bacterial polypeptide expressing nucleotide sequence isolated from the Sargasso Sea
ttggtttgactcgtcttgcaaacaagagacaaagccgtcagaggatgacattcaaatgattattgctgaattttcatacccaggtatagctgagtctgtaccaaaatattttcgcgacacccgaaaaagcgtcccggttgactatagcaaattcactatgccgatactttatattcacggagagcatgacccccggcaaccaatagagtacgcccgcgggatggaggagcatttaccagggcttcaagcaattttggtcctcgattgcggccatttttcaacgctggagcggccacaagatgttactaatgctatgatgtggttcttccattccatgcttggggctggacttccaatttttgaccgttcgcgtcactacgggcttccgacaaagcctgtcggagttgtcgaaaattggggggtaaaccctggcatgaaaaactaag

SEQ ID NO: 220774 - DNA, 361 bp, Unknown
  Bacterial polypeptide expressing nucleotide sequence isolated from the Sargasso Sea
atggtacgcctaatagggaatgtcctagtttctggcctagcgataatactactgagtagttgtgccgctggtgtcaaagtcatagacacatataaaatagaaaagaaaagagaaccattagcgttagcagatcctaaacctcttgaactacaagacattgattggattataataacaaaggataacgctgatgaagtttttgagaaaattaaaaacgataaaaatggcgactatgctttgtttgctttgacagataatggttatgaaaaactagcactaaactttgcagacataagaaacaaaatagcagaacaaagacaaatcatactatcatataaagactattacgaatcagaataga

SEQ ID NO: 220775 - DNA, 2059 bp, Unknown
  Bacterial polypeptide expressing nucleotide sequence isolated from the Sargasso Sea
ggggccgaatggggtcgaacccatcaccccgacccagctgctggcctatcacctggatctcgcccagctggccagcggccgcagcttcatcggcgccatggccagtgcccagccacccggcagcggcacacaggcacgcaccgccctgcctgtgcccgagcaggatcccgccgcattgctgacctcggaggggatcggcagcaacggctgggcgctgggggcggatcgcagcagcaacgccaacagtctgctgctcggcaacccccacttcccctgggatggcgaactcaggttctatgaacagcacctgcagatcccgggggagctcaacgtgaccggtgccaccatgatgggctttcccgccatcctgatcggcttcaacgagcaactgggctggacccacaccgtctcccagtccaagcgcttcaccctctatcagctcaccctggaccccgccaacccgctgcgttaccgctacggcgaccagtggcgggagatgagccagaaagagatcgccgtacaggtacgccaggccgatggcagcctgcaaccttatgtccagaccgtctatgccagccacttcggccccatggtcaacctcgcctccctctcgcccagcctaggctggaccagcagcagcgccatcagcttccgcgatgccaacgccggcaactacaagatgctggaacagtggctcgccatggccagggcccagagcaccccggccttcttcgatgcgctggccgagcatcagggggtgccctgggtcaatacactgctgatcgacaagacgggccaggccagctatgtggatgccacccaggtgccccgcctcggcaccaaggcagaagcctggtggcgagcagcgtcccagacaccgcaactggcccccatctggctggatggcgagggcagcgtgctgctgccgggcaacgaccccgatttcgagtgggtcgacagcggccagactcgcgtcctcggccttgtccccctgagccaggccccccgccagactcgcagcgactacgtctacaacgccaacagcagccactggctgaccaacctggcggccccgctggagggttactccatcctctacgggccggagcagacggtgcgcagcccgcgcacccgctacaacgcccagctcatcagcacccccgacaccatgggactgaccgggagcgatcggcgtttcaccctgcagtcgctgcaacgggtactgacccacaacggctccctgtttgcccatgagctcagagatcccctgctggctcgctgccaggcacatccgctgatccagctgaccagcggcccgctggacctgaccccgagctgcaatgcactcgccaactgggatggtgaatatcagctggaaagccgcggcgcccacctgatgcgcgaatggttgacggcgtttcgcaccagcggccacagagacatcaaggatgccctgttcgccatccccttcgatccggcccatggcgccaccacgccgagcgggctggccccctggagcggtgcgccggatctggatcctgccctgctggcgctggcccaggcccagcagcggttgcaggcggccggtatcgcgccggatgccgagctcggcgcactgcagttcgtgcaaaaggcagccgggctgacccccatagcgctgccgggaggcaactcgttcgagggcatgttcaacatggtgcagaccaatctgccttcgcgcagcagctcggatctcgccaacatagtgaccggcaaggccgtggctggcaccacgctgcgcagcctggatgacgacggtgacggccagcccgagctgcgttatcgcgccaactacggctccagcttcgtactggccctgcagttcgatgccgccggccccaaggcggagcgcttcctgagctacggccagtcccatgaccccgagagcccgcacttcaccgatcagaccgagcagttcgcccgtcagcagtggcagcccatgcgcttcaccgagcaggagatagcagcccaccaggagcgcaccctgcacctcaaggtactgcgtaccaccagcccctga

SEQ ID NO: 220776 - DNA, 391 bp, Unknown
  Bacterial polypeptide expressing nucleotide sequence isolated from the Sargasso Sea
atgaacgcattatggatacccgcttggtatgagcttgatccgtcgatcgttgtgggcgtgactgaagagtttgtatttcataaacccgctaccaatgaggcactgagattttacagcggcgcgaaagaaactgacgcagtgaaagcgacaggcgcaatttcaagcattcatcacagagtattgggggatattgaaagtgttgatgctcaagggcttgattatacggttgtgttaaaggatggccgtcgcttgctagtcaatgcggaggaagatcctggccttatttacgaatgggttgatgacagctggcaaccttcggagatggtgatccaagattggcaactggatgtaaagtttacctcgctttcaccctttaagacggtcgattaac

SEQ ID NO: 220777 - DNA, 2119 bp, Unknown
  Bacterial polypeptide expressing nucleotide sequence isolated from the Sargasso Sea
catgatccgtcctacggttgaatggaatgcgactattgtctgttatttgctgatgttttcatgcctagtttcaccgactgtgataggtgtacctccagttatagcttacatgatggcagtgatttggtttttgttaggtaataagtacttcaaggaggctagaagtcactttagcttcatcaacggtctttggcgtattaagccgttccatatgcatcctaatgatttgcctggtacggatgatacgatttatctaggcagagggtttctaatcacccctattcatacacagaggctctatgaactgaataatgaaacaacacgaaaatacatgaatcctcctgctatgtatttttggtttcgaaaggctgaagcattctttggtcgtctgtctaaatttttcttaattggtataccgtttgcgatggctgcagcggcgttgcgtgaacctcgctggtataacccatttccatatttccctatcgatttgcttgaccctaacaatacctatggtaatccatatttacatggtgtcggcggggatgaagagcaagatttgtttgctccttttgctgatagtaactcgcacaccttggttttaggcactacacggcaaggaaaaacaattaatgcagggattgttgtaacacaagatatcatgcgtttttctaagtcaaagtctggagatgattgcgcagtcatcatgattgatccaaaaggtgatttagaactggcggtgcgtatgtttattgccgcatatcgtgcaggtaaagccgataagttctattttttccatcttgcttatcctcatctttcagtacgttacaactcaattgcagaatattcccgtgaaacggaagttgccactcgtactacaaatccattgtctgattcaggtaactcaaaggttttcaaagactttgcttggcagtttattaacatatctgcaatggctttaaagcgtatggggaaaactccgacatataaaatcatatctaagtatttaaaggaccctgaattacttgcagaagattacattaatcgggtgataagggatgatgagttggatgggatcatccatgctattgcagataaaatagaaaacaataagaaagacttatcgcctcaagaacgttcaaaaaatccaagatcaattgcactgacaaaattgatatctgaccctccggaagattatgtcgatttgatacgtaacgatgatgttttgagatcgattgccgatggtctgaaacatgaccgtagctactacgataagatcactgcatcggcaaaaccgcatttagataagttgacgtcaggtgccgttgctgacttgatatcacccaattatgacgatgtaaaagatcaaaggccgatcattgatttaaaacaaattatttcgtcaggtgggattttatatgcgggtttagactttcaatcagatcctgttactggcgcggctgtaggtaacggcttcttaactgaaatactctcgatatcaggtgaaatttataactatggtatcgataacggtatgcctattgaaaaggataaaaagcgccgtaaacctatggtaaggctacatattgatgaggcaaatgaaatatttggcaaggagttcaaccctatcttaaacaaagcggggggctcaggtgtatccgtggtcgcgtatacacaaactatttcagatgctgaagtaaagttggaatctccggcccttgctgctcaagcattaggtaattttggaacaatcatttcgtttaaagtgaggggacaggatacatccacgtatttatcagaattaactcaaatggtccgagtgatgactgatacgccagatactaaagcagccgatggcatgggcagtgctgcagacgggcaatttaagtcttcaaacagcgattcagcatcatttgcagaagaaagactcatacccgagtatgcatttagagatctgcctaaaggccaagcatatgtttatgcccaatctcgttggtataaagtcaggatgcctattttcttaaaagatgaagatatgccaaaggatttggcagaaatggagcgtgtaattgcatcggtgcggggatatagcactagcaaattaagggagtatgtccgttaa

SEQ ID NO: 220778 - DNA, 994 bp, Unknown
  Bacterial polypeptide expressing nucleotide sequence isolated from the Sargasso Sea
tatgttaattccatgtttagcagtatttgggtttatcactgtctacgcactcattgttatttatgcagagctaaaagtttcttcttttattcaggataaggttggtccaatgggccaaggggtagggttacatgcaggaaaatggggccttttgcagccagtcgccgatgcattaaaactattattaaaagaagatattattccatctagtgctgataaacctctatttattttagcgcctttcatgattttcatcggtgcatttattagttttattgctattccatttggggattcaataattatagctgaccttaacattggtctattttacattcttggagttggctcgattgcggttctttctctcatactagctggatgggcttcaaataacaaatggtctttatatggtggtatgagatcagcagctcagattgttagctatgaaatacccgcgggactttcattgatagtagttattatgcttgcagggacattgaatatgcaggatataattgcctatcaggctggcggcatgtttaactggattatatttgataatcctttcgtgcctataacttttgtagtttatttcattagcgccattgctgaaacaaatagaacgccctttgacttaccggagtcggaatctgagcttgttgcaggctttgcaacggaatattcaggaatgcgttatgcttttttctttttaagcgaatacgcaaatatgtttgttgtgagtgcagttgcagcagcaggattcttaggtggttggcatagcccaattgctggatttatggattcatctgcttggggtgttttttggatggttagtaaaacatttttcttgatatttgttatgatatggctcaggtggacgcttccaagacttagggtggatcagctgatgaacgtttgttggaaagttttcctgcctctagccctaatcaatatatttggcgtagctatctggactgtagtatttaactag

SEQ ID NO: 220779 - DNA, 703 bp, Unknown
  Bacterial polypeptide expressing nucleotide sequence isolated from the Sargasso Sea
ttgattttattcttaccgctggttgcatttgtaatcaatattttttttggtaagagattgcctcgccagggcgactgggtatcagtaggagcaatattaacgactcttttattatcattgattttgcttttttcgatgtttgcgaatggaaactctagcttttcccatgaagttataatgccctggatcgatttaggtgcatttcagattgatttaggattttgggtagacaacatcacaattgtgatgttagttgttgttgccttgatctcaagcatgactcatttattttcaatagaatatatgaaaggtgatgtgaggtataatcgttattacgcttatttagggctttttactttttctatgaatggaatcgttttagcaaataatctgatatcactttatatcttttgggaattggttggtgtaagctcttttctattgattggtcattggtttgaaaaacattctgcagcggatgcgagtaaaaaagcatttttgacaaatagagttggtgacatagggttcttcataggaattatgcttatttttactgcagttaattctttcaattttcaagatgtatttcaaggtgtaaatcaaggattaataactggtagcctcttaactttagcaggtattgggctatttatgggagcagtaggtaaatcttctcaatttcctcttcatatttggttacctg

SEQ ID NO: 220780 - DNA, 418 bp, Unknown
  Bacterial polypeptide expressing nucleotide sequence isolated from the Sargasso Sea
tatgtatagagatttcggaactgttttttttacgagtattgtagctatcatttttgtgatagtgccacttgtcatagcctggctggtcgcaccctcgaacaaaacaaaagaaaagttagagacctatgagtgtggagaagtagttgaaggttctgcatggttgcagttcaacatacggttttacgtcattgcattaatatttctaattttcgatgttgaagtcgttttcttattcccatgggcggttgtgttcaaagagctaggccttcttgctctaattgagatgggaattttccttttgattctagttgtcggcttagcatatgtatgggtcaagtctgatttagattgggtaaaaagaagggtacgatatggtgctggtagatattcaaaaattgcaatggatcaggataaatag

SEQ ID NO: 220781 - DNA, 796 bp, Unknown
  Bacterial polypeptide expressing nucleotide sequence isolated from the Sargasso Sea
gatggttcacaattttgatccagtgctaattgatttaggaattataaaaattcactggtattctttggcttatgtgtttggtattttaattggttggtggtatggacgacttataataacaaaaaaaatacatggatcggatcaagaaaattatttaaaaaattttgacgatcttgtttcttatataattattggtgtaattgttggaggaaggttgggttacgtaattttttataacctaacattttttcttaaccaaccgattgaaatttttaaattgtgggagggggggatgtcttttcatggaggtttgataggagttattttaagtacttatattttttcgaaagttaaaaaattaaattacaaaatatatttcgatattatttgttgtgcagctccaataggaatttttttgggtaggattgcaaattttattaatagtgaactttatgggacaccaacagataaaccatggggaattatcttccctgaaattgacaatttaaataggcatccatctcagctatatgaggcttttttggagggaattgttttatttgttttaataaatttcttatttttaaaaaaaaattttaatcacggtttaatatcatttttatttttaattttttacggaatttttagaattatttctgagttttatagagagccagataaacacattggttatatatttgattttattagcctcggttcgttgctaagtattggtatgatgatttttgcaattctatttatattaaaaattaatttcaatgaacaaaataaataa

SEQ ID NO: 220782 - DNA, 1144 bp, Unknown
  Bacterial polypeptide expressing nucleotide sequence isolated from the Sargasso Sea
gtttttcgtattttttgaaatagttcttcttccgatgtatttcatgattggaatttggggagataaaactgtaagaactgtagcaggttttaaaaatcaaattgaaacaagactatatgcaagtattaagttttttgtttttactctatttggttccgcatttatgttacttggctttttaggattgtattacagaggaaatagaacttttagcattcctgagttaattgagcttggaactaatggtgcatttacaggaacatttgcgatgctagtttttgcagttttgtttcttggctttgcggttaaagtaccaatgtggccgttgcatacctggcttccggatgcacacacggcagctcctacagttggttcagtattgttagcagcaatactcttgaaattaggatcttatggttttgttagaatcgcaataccaatacttccggaacaagcaaaagcctgggcgcctgcgattgcaattctgtctgcaatagggattatatatggatcacttgcatgtttagctcaaactgatctaaagagattaatagcattttcttctgttggtcatatgggttttgtaatgttgggtatagcttcattaacaccaattggtataaatgctgcaatgattggtatggtcgcacacggagtgatcactggcttattatttttcctatcgggatccatggctcacacatatcacactcgggatatgggaaggttaggtggaaatatgaaactacttccaaagactggagcactgttagggtttactgcaatggcttctttaggcctgccaggacttgctggattttggggagagtttatggcattacttggagcatttaatccacttgatgggttaaatgttacagtttttcgaggatcaatggtcgctggtgctattggaactgtattaactgcaggatatttgttgtggatgttacaaagagttaatcttggtgaaccatctgatgaatggaatgaaatggagcttcatgatgcagacggctatgaattagctgcatggattccactcgtaattctaacaattcttatcggcgtatttccaaagctaatatttggagcaactaatgatgctgttgttagcctgctttctaaagcatttggaggataa

SEQ ID NO: 220783 - DNA, 3082 bp, Unknown
  Bacterial polypeptide expressing nucleotide sequence isolated from the Sargasso Sea
catgattaaagccttcgtcgaaaatggtcgcttagtcagcctagtgatcgccctactactggtcgcgggatttggcgcgatgtccagtttgcctcgcaccgaagatccacatatcaccaaccgctttgcctctgtcatcactccttatcccggcgcttccgccgagcgggtcgaggcgcttgtcaccgaagtattagaaaatcaattacgtcgccttgaggaaataaagctgattcaatccacctcaagacccggtatctcggtgatccagttagagctcaaagacacagtgacagatactgcgcctgtgtggtcaagggcgagagatctgctggccgatgccagaaacaccctccccgatgacatacagacaccgaccttagacgatcaagtcggctacgcctacaccgcgattttaagcctagtgtggaacgataacagtcaacctagggtggatatgctcaaccgctatgccaaggaattacaaagcaggctcagactcttatccggcaccgatttcgttaaactctacggcgcacccgaggaagaaatcctagtccagctcgatggctataagatgagccagttgcaattaacgccgggtaccatagcgaaaatcttaagcagcgccgacagtaaaattgccgctggtgagatcaataacaatcactttcgcgcccttgtcgaagtctcgggtgagctcgattcgcagaaccgtattcgccaagtaccacttaaagtcgataacgatgggcaaatcattcgtctgggtgatattgcgactatcagccgccaagctaaaaaaccagcagatagcatcgctctcgttgacggcgagcaaagcgtgtttgttgcagcgcgcatgttgaataacacccgtgttgatatctggcaaggacaagtcaagcaactggtcgatgagctcaacaacgagcttcccgcaaatatcaaagtgcaatggttatttgagcaaaacagttacaccagtgaccggcttggcggactcgttatcaacctaatacaagggtttgtgattattctcaccgtcttactgctgaccttgggcttaagaaatgcgattatcgttgccctgtcacttcccttaaccgccctgtttaccttagcctgcatgaaatatatcggcttacccattcatcaaatgtcggtcacaggtttagtcgttgctctagggattatggtggacaatgccattgtaattgttgatgccatttcccagcgccgccaacagggtatgagtcgcttaaacgctgtgactgagaccttacatcacctgtggttgcctttggcgggctcaacgattaccactattctagcctttgcgccgatcgtattaatgccaggcgcagccggagagtttgtgagtggcatcgcgatatcggtgatgtttgcactctttggctcctatgtaatttcccatactttgatagctggtcttgcgggacgctttagcctcgaaggtaaacatcctatctggtatcaacatggcatcaatatgcctttagtaagcggttactttcaagcaagcctaaggtttgcactcaatcgcccactactgagcgctacgcttatcgggataataccgctgttaggtttttacgcttcaggcaagatgactgagcagtttttccctccatcggatcgggatatgttccaaattgagctgtatctcgccccccatgtcagcctcgaaaacaccttaaaccaagtgcagttgatggataagcagttgcatcaaatcgagggcatcagccaagtcgattgggttgtgggtggcaataccccttcgttttattacaacttaactcagcgccaacagggggccactaactatgctcaagccatggtgaaagccagcgactttgagcgcgccaacgcccttatcccagagttgcagcaaagcttggataaagactttccagaagcgcaggtgctggtgcgtaaactggagcaaggcccgccctttaatgccccggtcgagttgatgatttttggccctaatctggaaacattacgcaccttgggtgatgaaatccgtcatattttggccgcaacgcccgatgtgatccacacccgcgccaccttaagtgccggcgcacctaaggtatggctacaggtcaatgaagatgcgagcttaatcagcggattaagcctgacggatattgctagacaagtccaaatgtctacaactggagtgattggcggcagcgtgttagaacaaaccgagtcacttcctatacgcgtgcgtctaggtgagagtagccgcgagcaggcgagccgtattgcggaaatccagctcatgaccccttcgggcactgccgttccgttatctgcactgtcccacaacgaggtgcaagtcagtcgcggggcgatccctaggcgtaatggtcaacgcgtcaacacgatcgaagcctatatcgtcagcggggtattacctgcccaagtcttaaatgatgtaaaagataaagtggccgccatcaaactaccggcaggttatcggattgaaattggcggcgaaagcgctaaacgcaatgaagcagtaggtaatctactgtctaatatcattttagtggttaccttattactagctacagtagtcttgtcctttaactcctttaggctaacagcgattattttactgagtgcattacagtcggcggggcttgggctacttgcggtctatgtgtttggttatccctttggcttccctgtgatcatcgccctactcggcctaatggggcttgcgatcaacgcggcgattgtgattttggctgagctggaagatacaccgaatggcagagcgggagataaagctgtaattatcaatattgtcagcggctgtggacggcatatcagctcaaccacaatcacgacggtggggggatttattccgctgattattgcaggtggcggattttggccgccctttgccatcgctatcgcgggaggcaccttgctaacaaccttgctatcactcgtttgggtgccaaccatgtatctgctactaatgaaaaaccgcaataggtcagatacatcgccgttgtcgcctcaaatagcatcatga

SEQ ID NO: 220784 - DNA, 1483 bp, Unknown
  Bacterial polypeptide expressing nucleotide sequence isolated from the Sargasso Sea
tatgttagattttattgttacaattactatatttttcccagctttaacagcaatctttctacttctattaaatgatagaaaaaaaatagtaatcacatctatttcatcatcagtattgacatttttattgtctctagttgttttcctttcttatgacaagtcaaagggagggattcagtttattgatcattttcaatggattgattcattaaatattaagtcttcctatttagtaggtgttgatggattctctgcaccgcttgttcttttgactggcctcctttctatggttgcatgtatggcttcttggagaatagagaaaagagtaaaagaatattttatttggatacttttgcttgtaacaagtgttatgggtgtatttactgctttagatttacttttgttcttcgtattttttgaatttgaacttataccaatgtatatgctaattagtatttggggatcaggaagaaaagaatattcagcaacaaaatttgttattttcactcttgctggaggagcctttatgctagtggcaattttagctcttttctcaagcgaatcagtaactaatttatcaatggtttctattgatgaattgggaataataggtattccagagttgattgctggacaaaaactaattattcctgcatcaataatttttatatttttctttatagcctttgcagtgaaacttcctctttggccttttcataactggttaccggatgctcatacagacgctcctacagccgtttcgataatgctagcaggagtgctactaaagatggcaggttatggattattcagaataaatcttggattttttcaagaaacttatgggttccaaatttttgattatacaaatttcctagttatattaggaactatttcaataatttacggtgcaatagttacccttaggcaaactgacctaaagagattgatagcatattcttctataagtcatatgggatatgtcctccttggtttttcagcaataaccaagaatggagatttctcttattatgctctcaatggttctgcgatgcaaatgtttactcatggaacaattactggattatctttcttaacggtaggattgatttatgaccgcactcatactcgagatataaataaattaggagctattgctaggaaaatgccaatggttgcattattctttgtaatttctggtctagcttcattaggtcttccaggattatcaggttttgtgtcagaaataatggtatttttgggtacttataaggtctatcctgtagaaacaattatttcagcatttggtgttgtattagctgcgggatatattctttggatgacacagagagcgttattcggtgacaataacttagataaatcagataaaacttatgattttaattctcttaaagatgcaaatagtttagatttactaccagcatttattattaccatccccattattttgataggttttttt

SEQ ID NO: 220785 - DNA, 1165 bp, Unknown
  Bacterial polypeptide expressing nucleotide sequence isolated from the Sargasso Sea
gatggtcacctggctggtcgcgtttggttccaatatctcggccctgtggatcctcaacgccaacggctggatgcaatatccaaccggcgctcactttaatattgataccctacgtatggagatgagcagctttagcgagctggtctttaaccccatcagccaggtgaaatttgtgcataccgtgatgtccggttatgtcaccggcgccatgtttgtgatgtccatcagcgcctggtatttgctgcgcggtcgcaatcgcgagttcgcccggcgttccttcgcggtgggttccgtttttggcacgctggctatcctcggcactctacaactgggtgatagctcagcctatgaggttgcccaacgccaaccggtaaaactggcggcaatggaaggcgaatggcaaaccgaaccggcacccgcgccctttcatgtcatcgcctggccgcagcaggagcaagaacgtaacgcctttgctgtgaagataccggctctgctgggcatcctggccacgcactctttagacacgccggttccggggctgaaaaatctgatggaggatgctcttccccgcctgcaacgaggtcgggaagcgtggctgctgatgcaggaaatcgccaaaggtaaccgcacgcctcaggtactgaacgcttttcacgctgtggagaaagatctgggttacggcatcctgctggcgaactacgcgcctgatatgaaccatgtcactccggagcaatatcaggccgcgcaacgcggtgcgatcccgcaagtagcaccggtattctggagttttcgcatcatgattgcatgcggttcacttctgctgctggtgatggcgattgcgctgatacagaccttacgctggcgtatcgaccagcatcgctgggtactgcacatgacgctgtggagcttgccgctaccgtggattgccattgaagccggctggtttatgacggagtttggccgccagccgtgggcgattcaggatattttgccgacctggtacgcccactccgcgttaagcgcaggccaactggccttctccatggggctaattctcacgctttacaccttgtttttaattgccgaagtctacctgatgcagaaatacgcgcgccttggcccggatgcaatgcataaccaacaaccagcgcaacaacagggataa

SEQ ID NO: 220786 - DNA, 418 bp, Unknown
  Bacterial polypeptide expressing nucleotide sequence isolated from the Sargasso Sea
atgtatagagatttcggaactgttttttttactagcatcgtggctatcatcttcgtggtagtcccattggtcatagcctggctagttgcaccctcaaataaaactaaggaaaaacttgagacatatgaatgtggagaagttgtagaaggctctgcatggttgcaattcaatatacgcttttatgttatagcactcatatttcttatatttgatgtagaagttgtatttctatttccttgggctgttgtttttaaagacctaggtcttcttgctttgattgagatgggtatattcctatcgattttagtggttggtttagcatatgtgtgggtaaagtctgacctagactgggtaaaaagaaaagtgcgttatgggactggaagatattcaaaaattgcaatggatcaggaagaataaa

SEQ ID NO: 220787 - DNA, 1480 bp, Unknown
  Bacterial polypeptide expressing nucleotide sequence isolated from the Sargasso Sea
cttgggttttgataaaattaaaaaagaaataattatgaacgtggattattttaaaagtgcacttttacaccatagcaaaggaaactggaataaagccaaagaaatttatgagcatattttaaaatcaaatccaaacaactattcagttttgcaaaattatggtccattactttcccaattaaaagagtataaattggcaaaaaatattttcgaaaaaagtttaaaaattaaacccaaagatcctttacttttatataactacgcaaagttttatcatgatcaaagaatttttgaaaaagcaattcagttatataaagaatcttatgagattgaacctagaaataatttttcaatgtacaatattgggaatatttatttttccattaataaattagatttagcaatcaacgcttacaagaatagtttaaaaaataatcccaaaaattttttagcgtacaataatttagctaattcttataagcaaactggaaattttaatgaagccatagaaacatacaaaaaatcaatagagattaaaaataataatcctgatgttcatgtaaattatgggacgcagttattaatgacggagaattttgagcaaggttttgaagaatatgaatggagaaaaaaaagtaaatcatttctagattatataaattatgacaagcttaatcttaaaagtaaaatttgggatggagaaaatcttgacaataaaaaattattagtaatttcggaacaaggaattggcgatttgatacaatttgccagatatttatacaaaataaaaaataaatataaagttgaaataacaattattcttaaaagcaaaaaatttttacatttttttgataaaaaaatatttaatttaatatctgacattaatctaattccaaagcatcattatcatattcatttactaagtattccaagggttttttataatgaaaacgatctttttgttcctactgttaatttttttcaaaaaaatgatcatgtagaaaaaaaatggattgatatattaaacaagtataaaggaactaaaattggcataaattcaaatacttctttaattaaaaaaaacataccatttgattattttttaaatctagcttcatcatttgattttactttttttgttttacaaaaagaaattgataataaaaaaatagataaattcaaaaatataatcttttttaaaaatatcgataaatctgaaaatgcatttatagatagtatcgaaataattaaacaacttgatttagtaataactgctgatacagcgctagctcacatttctggcacactaggaaaaaaaacatggataccccttccatttgtaagcgattggagatggtttttagataaaaaatctactaaatggtacgataatgttagtttgtacagatcaaagcaaattaataattgggaaagctcatttaaaatgataaatgaagacttaaaaaaaacttttaaatag

SEQ ID NO: 220788 - DNA, 382 bp, Unknown
  Bacterial polypeptide expressing nucleotide sequence isolated from the Sargasso Sea
atggatgtatttgttaatgactggatggccgttgcgctgtctgttttagtgggcgcaggcgcgattatgggtttatttatagcatcctttatttttagtgctaagcgtaaatctcaaatcaaattaacaacctacgaatgcggcatacctagcgaaggctttacctgggctaacataaatttcaggttctatatatttgggatattgtttttgatatttgacgtagaagctgtgtttttattcccttgggcactgatattcttggagcaaaatagtttagggaaccctattcctttctacgctatgatgatgttcttagtgatattgtttttcgctattttgtatggatggaggaaaggggtgtttgagtggcagaagtaaa

SEQ ID NO: 220789 - DNA, 619 bp, Unknown
  Bacterial polypeptide expressing nucleotide sequence isolated from the Sargasso Sea
atgaattattttaaaagattatataattgggttttacattggtctaatacaaaatatggggtccccgctctatttttgttatcattatcagagtcatcattttttccaatcccaccagacgttcttttaattgctttatgcttaggcatgcattcaaaagcactctactttgcgtttgtatgtagtttagcaagcgttttgggggcaatgattggttttgcgattggttattttacctggtggaatagcgtaggagaatattctacagtagcactcttcttttttaataatataccaggtttttctgaagaattattttcaacaattcaacaaaagtttgatttgtataatttctttattgtatttacagctggatttactccgataccttttaaggttattacgatttcttcaggcgcgttcaatattaattttccaatgtttattatagcatcaactattagcagatctgccagattctttttggtagctatattgattaaaaaattcggtgaaccaattaaaggatttatcgatagatattttaatattctttctatattatttacggttttactaattggaggattctttttaataaaaggtattgttatagcaa

SEQ ID NO: 220790 - DNA, 587 bp, Unknown
  Bacterial polypeptide expressing nucleotide sequence isolated from the Sargasso Sea
acaaacggacttaaagagattgatagcttattctagcgtgagccatatggggctggtgttagttgggataggatcctttacttctgctggcttaactggcgctggcatgcagttatttactcacggaactataacaggacttttatttttatgtgttggattggtttacgataaagcccacaccagaagtattcctgaactaggaggattatttgtcaggatgcctctggtagctatagcttttacgatcgccggcttagcttcgttgggattacctgccttaagcggatttgtgtcagagattcttgtgtttagcggtgcattccctggattccctatattaactatattggctgtattaggaatcatactagctgcaggatatatattatggatgttagaacgagttttatttggtgaagtgaaacctaaagtacaacatgtatcggatgccactgtactagaggcatttccattaattttactagtaataatgatagtcgcattgggtatattccccggaattttaatagatgttctagaccaggctatattacccgttgtgactaagtttggaggagtgtagt

SEQ ID NO: 220791 - DNA, 1558 bp, Unknown
  Bacterial polypeptide expressing nucleotide sequence isolated from the Sargasso Sea
cctggcactgtcgcccatagtggtcggcctcctcctgatggcgctcccgcacctcctccccgaggactactccgcgcaggtgaggcgggtctccaggaacatctgcatgggagtggcactggcgctgctggcgatctccacgtgggcggcagcgacgtccctcagcgacatcgactggatgtccatcgccttcgggcagtacgagctcgagaacaccccgttcgaggtcataccccagatcggggtctcctggcacgtcggggcggacgccctctcgctgccgatgatatggctgaccgctctggtcgtccccctctccatgctggtcgagtgggacgccaagaaggggcactacttccacccgctcctcctcgtcatggagggcgccatgatcggcgtcttcgtctcgctggacctcttcgtcttctacgtcttctgggagctgaccctgatccccatgttcttcctgatcctcgtgtggggaggggaggacaggcgctacgcggcgatgaagttcttcatctacaccttcacggcgagcgtcctgatgctcatcggcatcctcgtgatgtacttcaacaccggcgcgaccctctcggagcggtccttcgacatggcggcgatgctcgacagcggcgcccagatgagcgagggcctcaggcacctcgtctggttcctcctgctggtcgggttcgcgacgaagatgcccagcgtccccgtgcacacgtggctgcccgacgcccacgtgcaggcaccgacggccggctcgatgatactggccggcgtcatgctgaagatgggggcctacggcttcctcagggtcgcagtcaccgcgttccccgggtccacggtggtgttcgtgcccctcctggtggtcctggggatggcgagcctcgcctacggcgcctgggtgtgcatgggccagaccaacctgaagcggatggtcgcctactcctcggtctcccacatggggctgatattcctgggcatagccacgatgcagcccctcggcatcgccggggccctgttcatgatgttcgcccacggcataatcagcccgctgctgttcgcagtcgcaggggccttcaagcaccactaccacaccctcgagataggctcgatgagggggatagcccaccacagcccgtggctggcaggccacatgatgctgggttggatggcgagcctcgggctcccgctgatggcgggcttcgtggcggaggtggccgtcatgatcgccttctggatgaccttcggctggctcgtcctcatcccagcgctcacgctcgtgatcacggccgtgtactacctcgcgtccatgcagcgcacgatattcgagtccaacgacccccaccaggggtcgctcccggacaccctggaccacgagccccgggacatcacgtggcacgagaacgccgggatggccatcctcggggcactgacgatactgttcgggatactgcccttcttcttctgggacatgatgtcctactggggcaccgaggtcatggtcgaggcgctcgccgacgccatgcagtcggagggggtgacgccatga

SEQ ID NO: 220792 - DNA, 1582 bp, Unknown
  Bacterial polypeptide expressing nucleotide sequence isolated from the Sargasso Sea
tatgacaaatattttagaaacattttcaaatggattagggattagcttagttgtatttctaccacttgttagtgcaatttttattttgtttattccaaaaacgcaagagtttttaattaaaattacaactcttggtgcatctgtagttacttttcttctcagtcttattgttgcttatcaatttgattacgataaggctcatacatttcaacttggcaacaaactaagttggattgaaagtataaattcgaactatgaaattggcattgatgggatttcacttcctttgcttttactttcaacatttatatcagttttagcaattatttattcatttgaacatcttcccgaaccagtcaacccaaaaggaatgatgtctttgatcctagtattagaaacaggaatgaatggaacatttgttgctcttgatcttattttgtttttcgttttctttgaactagttcttttacctatgtacttcatgattggtatctggggagatagaactgtaagaagtgtggctgggttaaagaatgaaattgaaactagactttatgccagtattaaattctttgtcttcacattatttggttcagcttttatgttgttaggatttttaggtctttattttagaggaaataaaaccttcagtattccagaattaattgaacttggtacgtcaggagcatttactggaacatttgcaacattagtttttgctgttttattcttaggttttgctgtaaaggttccaatgtggcctctacatacctggcttcctgacgcacacacggctgcaccaactgttggatctgtattgcttgctgcgatattacttaaattaggttcttatggttttgtaagaatagctttgccaatattacctgaacaagcaaaagcttgggctccagctattgctatattatcggctataggaataatttatggttcattagcttgtttagctcaaacagatttaaagaggttgatagcattttcctcagttggacatatgggatttgtcatgcttggtatttcttcattaacttctattggaataaatgctgcaatgattggaatggtagctcacggaataattacaggattacttttctttatatcaggatcaatggcacacacttatcacactagagatatgggaagactcggtggaaatatgaaactacttccaaaaacaggagcattacttggttttacagcaatggcatcacttggtttaccaggtcttgctgggttctggggagagtttatggcattattaggtgcttacaatcctctttcaggtttgaacataacagtatttagaacttcaatggttgcaggagcaattggaacagttctaacagcaggttacttattgtggatgttacagagagttaacttaggagagccgaaagaagaatggatagggcaagatttacatgatgcagacaattatgaactagcggcatggattccactagtaattttaactgtgttaattggtgtatttcctaaattgatttttggttctacaaatgatgctgttattaatttagtaaccaaagcttttggaggctga

SEQ ID NO: 220793 - DNA, 775 bp, Unknown
  Bacterial polypeptide expressing nucleotide sequence isolated from the Sargasso Sea
aatggaacatcctaggattgaggttaggaacttaaaaaaatctttccgcgaaaaagtaatcctcgatggaataaacctgaaggtctgcgccgggaaatcgctcgtgataataggcgcttcgggctctggtaaatcggttttgactagatgtattgtaggcttattaaagccagacaacggagatatattgttagatggccaattattaaatcctgatttaatgaacaacagagcgtttatagctagttcaattggttaccttttccaaaatgctgctttatttgattcacttacagtcctcgaaaatgtatctttcggcccccttttcatgcaaaatagaaatatcaaagacgctaatgaaatagcaaaagaaatcatgcttaaattggatatcaatccaaaattttggtttttgcatccaaaagagttatcgggaagctcgcgtaaaattgttgcaatagcgagagcgttggctgtaaagccaaaagtaatcatttttgatgaaccttctactggcctggacgtgagggcaagtaaaaaattggacagcttaataagagattgtgtagaaaaggaaaatataacgtctataaccattacgcatgatatgaacagtgcaagacgtatagctgacgatattgccatgttacacgaaggtaagttcatttggtcaggcaaatcaaaccaaatgaacaaatcgaataatataagcgtcgagcgatttatccagccttttcttgacacaaattgcaatacaattcgaggaagtcaataa

SEQ ID NO: 220794 - DNA, 211 bp, Unknown
  Bacterial polypeptide expressing nucleotide sequence isolated from the Sargasso Sea
cccgccgacgattcgctcggcgtgagcgttctgaaggttctcgttttcgcagtgaagacggcgttcttcctgtttgtgtttatctgggtgcgctggaccgtaccgcgattccggtacgaccaggtgatgcggctgggttggaagtatctgctgccgattgcgctcgctaatgttttcgtcaccggactcgttctgacgctgacgagttagg

SEQ ID NO: 220795 - DNA, 1264 bp, Unknown
  Bacterial polypeptide expressing nucleotide sequence isolated from the Sargasso Sea
atggaattaaataaatataaatattcagatatgatcattactgatcatacttttctggttcccttggattatgaaaataaagatggcaaagaaatatctatttttgctagagagattgaaagaaaagaaaccgtaaacaagaatctttcttatttggtattttttcaaggcggtcccgggtatgaatcgccaaggcctataactgactcaggttggattaaaagagccagcgaagaatataaaattttattgttagaccagaggggcaccggccttagcactccggtgtctgtcgattcatttaaaggtatgaacgatagtgaactatcggattatttaacttttttcagggctgataatattgttcgagatgctgaggaaattagaaaaaaccttatccaaaataaaaaatggtcagtgctcggtcaaagctttggtggcttttgtgctactaattatctctccttttaccctaacagcctagaaaaggtttttataacagggggcttgcctccattaagcgcccaccctgatgatatttatcgctcaacctataagagagtaattcaaaaaaataaagaattttatgatatcttccctcaggcgaaaattaattcaagaaagatcgcagatcatttaatggaaaatgaagtattgcttcccaatggggataccttatcagtagaaaggttccagcagcttggtctaaaccttggttttagcgatggtatggcaacgctcaactttttgtttgaaagagcattttcgaatgaaaaactatcttacagttttctaaaaggtgttttgtcattgcaaactttcgatacaaatccgattttcactgttctgcatgaggcgtgttatgcacaggcattctctacagattggtctgcataccgaattttggatgaatacccagagtttaacacagagaatgatgagttatttttcacaggagagatgttatatccctggatgttagattcttttaaagctctaaagccgcttaaaggtgcagccaatattttagctaagaaaaatgactggccaatgttatacagcgagaaaaaattacgggagaatcaagtatctactgctgctgctgtttacacaaatgatatgtatgtggacagagagtattctatggaattagctggtattatcccaaatatgagcatttgggagaccgaaaccttggagcataatgcactacgtagcaatggcaaattagtattagattctcttttttcgcggataaaataag

SEQ ID NO: 220796 - DNA, 787 bp, Unknown
  Bacterial polypeptide expressing nucleotide sequence isolated from the Sargasso Sea
atgttttaccataatttagacccaataatatttgattttgggtttttagaagtcagatggtattctttggcttatatatttggaatattgattggttggtggtacggaaaaataatcataattaagaaatttcaaacttttgaagaaaaatttaatttaactctttttgatgacttaattacttatttaatcatttcaataattttaggtggaagacttggctatgtaattttctatgatatgaattattacttaaaaaatccttttgatattgttaaaatttggcaaggcggtatgtcatttcacggtgcaatgttgggtattattattggtacttttatattttcaaaaaaaaataatataaagactttttttttactagatattatagcttgtgtatcacctattggaatttttttaggtcgtattgcgaattttataaacagtgaattagtaggaaaagcttcggatgtttattgggcagttatttttccaaaaatagataatgttgcaagacatccttcacaattatatgaggcctttctagaaggtttaattttgttccttattttaaattatttaatatttaaaaaaaattataaaataggaaactgttctttttcatttttaatttattatggagtttttagaattttttcagaattttttaggctaccagatatacaaataggatatatttttggatttgtaagtatgggaatgttgctaagtacatttatgatttttgcgggtatagttctatatttaaaaagaaatgacttgtaat

SEQ ID NO: 220797 - DNA, 1414 bp, Unknown
  Bacterial polypeptide expressing nucleotide sequence isolated from the Sargasso Sea
atcgagcagggcaatctcgggctggtacgccactcgttactcgaacggcagcgtctgcgcagaaacgcacggcacctggtgcaacggctgcccttcctgtttcccgtcatggaaaaagacggcgtgttcgacaagcgtctcgccaaagcattcgaaagtctgctgtggacttacgacattgcgggcggctggcgcgagggcatcctgcatcagaagctcagcaaggcggaagtgctgtcgcactgccccaccttcaacgaagagaacctcaccggcggcttcatgtatttcgacgcgcgcgtggacgatgcgcgcctcacgttgaatctcgcgcgcacggcagcgtttcatggcgcggccgtggtcaatcacgcgaaggtcgtcgagattacgcgcaacggacacggcagcgtcgacggcgtgatcgtgcatgcggacgagcgcgaaattcgcgtgcgtggcggcgtggtagtgatggctaccggcgtctggctgcgcgactggaacggccgcaaaaaagacgatccggcagctttgcaaatccgccctgcgaagggcgtgcacgtcgcgattccgtggctgaagattcgcaacgactgcacggtgacgattcccgtaccgggccgcagccgacgcgcgacgatcacgcgctggggcaacgtgtcctatctcggcaccaccgacgaagactatcaaggcaatctcgacgatgtctgctgcacgcgccaggaactcgacttcctgatcgaaggcgcgcgctccgcgttgaagaccgatctgcaggccgaggatgtggtgggcagcattgccggttgccggccgctggtcgggccgcctggcggaaagacactggaaatgaagcgcaatcacgagattcacaccgcaccggatggactcgtcacgattgtcggcggcaagctcacgacctcgcgacacatggctgaacagaccatcgacgccgcgcagaaggtgatcggcaaacgcgcgaaatgccgtacgaagtccgcgtacctgcttggcgcggcgggctacgacgcgcaagcaatcgtcgcgtccggcggattgtccgcgcaactgggcgaacgctacggcacggaagcacgcttcgtcaccgacattctcgaaggcgattcgagcttgctgaagccgattgtcgaaggtctgccgtacaccgaagcagaggtgctctacgccgtcagacacgaactcgcacgcaacgtggatgacgtgctgtcgcgccgcatccgcgcacgcctgatggcacgcgatgcatcggcgcgcgccgccgtgcgcgtaggtgaaattttacagacggagctcggcttgtccgcggcggccgtcgcaaagcaggtgagcgactacgtcgccgccgtcgaacacgaaaagtctgttcttatgggagaaaccgaatgat

SEQ ID NO: 220798 - DNA, 415 bp, Unknown
  Bacterial polypeptide expressing nucleotide sequence isolated from the Sargasso Sea
atgttagccggtattcatcatgtggcgctgatttgcagtgattatcagcgctccaaacatttctatactgaaattctgggtttaaaagttctggctgaacattacagagctgaacgcttgtcttacaaattggacttgcagttgcctgatggtagccagttggaattattttcttttccaaatccaccgcctcgccctagtacacctgaagctcagggcttacgccatctggcttttcaggtgctggatgtcgctcaggtggtatcacatttagagcagcatggcatagcagtggagccggtgcggattgacccttatacagaacgggcttataccttttttaaagaccctgatgatctgccactggagctctatcagatatccccgtcgtccttgaagccgcagcttcgttgac

SEQ ID NO: 220799 - DNA, 1156 bp, Unknown
  Bacterial polypeptide expressing nucleotide sequence isolated from the Sargasso Sea
catgcacagcaccccatctttcgcacaacagcagacccgtcgtaccggcccactgttcaactggctcgctgtcatcactctgatctacctgatcctggttgccgtcggcgccgtctcccacggcttcaagggcttctccgggggcgccgagggcgcggcccagatcttcgccttcgccaataaccccttcgtcgccctgctgctcggcatcctggccaccgccctggtgcaatcctccagcacggtcacctcggtcatcgtcggcctggtggccggcggcctgcccatcggcatggccatccccatggtgatgggcgccaaccttggcaccaccatcaccaacaccatcgtctccctcggccatatccgggatcggggcgaatttcgccgcgcctttgccgccgccaccgtgcacgacttcttcaacctgctggcggtgttcatcttcctgccgctggaactgatgttcggcctgctgcaaaagagcgccgaggcgctggccgacctgctggcgggctccgccgacatgtcgatgcaggggatggacttcatgaagccgctgctctccccggccctcaccttcatcgacggcctggtggccttcctgccgggcaaagggcccgccatcgccaccatctgcatcggcatcctgctgatcctcggctgcgtcacctggctcggcaaggtgctgcaacgggtactggtgggccgtgccagagatctgttgcaccgggcgctgggccgcggcccgctgaccggcatcgcctccggcaccctggtcaccgtgatggtgcagtcctcttccaccaccaccagcctgatgatcccgctggccggcggcggcgtgttcagcacccgtcagctctaccccttcaccctgggcgccaacatcggcaccactatcaccgccctactggccgccaccgccatcagcggcgccggggccaagctggcgctgaccatcgccctggtgcacgtgctgttcaacctgttcgccgtggtgctcatctacggggtgcccttcctgcgcgaactgccggtcaaggcggccgaggggctggcccgggtcggcagcgagaacaagctgctggcgcttggttacgtggcgggcctcttcttcgccctgcccgccctgatgatggtggccgccaagtaa

SEQ ID NO: 220800 - DNA, 3082 bp, Unknown
  Bacterial polypeptide expressing nucleotide sequence isolated from the Sargasso Sea
atgattaaagccttcgtcgaaaatggtcgcttagtcagcctagtaatagccctactcctggtcgcgggatttggcgctatgtccagtttgccacgcacagaagatccgcatatcaccaaccgatttgcgtctgtcatcaccccttatcccggcgcctccgccgagcgggtcgaggcgcttgtcaccgaagtattagaaaatcaattacgtcgccttgaagaaattaagcttattcaatccacctcaagacccggtatttcggtgatccagttagagcttaaagataccgtcactgacacagaccccgtctggtctagggcgcgggatctattagccgatgccagaaacaccctccccgatggcatacaaacaccgaccttagacgatcaagtcggctacgcctacaccgcaattttaagcctagtgtggaacgatagcagtcaacctcgggtggatatgctcaaccgctacgccaaggaattacaaagcaggctcagactcttatccggcaccgacttcgttaaactctacggcgcgcccgaggaggaaatcctcgttcagctcgatggctataagatgagtcagttgcaattaacgccgggaaccattgcgaaaatcttaagcagcgccgacagtaaaattgccgcgggcgagatcaataacaatcagtttcgtgccctcgtcgaagtctcgggtgagctcgattcccaaagccgtattcgccaagtgccactcaaggtggatgcgcagggacaaattattcgtttaggggatatcgcccacatcagccgccaacctaagaccccagctgacagcatcgcccttgtcgatggcgagcagggcgtgtttgttgcagcacgcatgctcaataatacccgcgtcgatatctggcagggacaagtcaaacagctagtcgatgagttcaatcaagagctgccggccaatatcaaagtgcaatggctatttgagcaaaacagctacaccagcgaacgcctcggcggattaatcgtcaatctattgcaagggtttgtgattattctggcggtcctactgctgaccttgggcttaagaaacgcgattatcgtagccctgtcgctccccctgaccgccctcttcaccttggcctgtatgaaatatatcggcctacccattcatcaaatgtcggtcacaggtttagtcgttgcccttgggatcatggtggacaatgccattgtgatcgtcgatgccatcgcccagcgccgccagcaggggatgagtcgcttaagcgcggtaactgagaccttacatcacctctggctacccttggcaggatcaaccatcaccaccattttagccttcgcccctatcgtactgatgccgggcgccgcaggagaatttgtcggtggcatcgccatgtcagtaatgtttgccctgctggggtcttatgtgatttcccatactttgatcgccggtcttgcaggacgctttagcctcgaaggtaaacatcctgtctggtatcaacatggcatcaatgtgcctttagtgagtggttactttcaagcaagcctaaggtttgcgctaaatcgaccactgctaagcgcaacgcttatcgggataattcccctgctaggtttttatgcttcaggcaaaatgactgagcagtttttcccgccgtcggatcgggatatgttccaaattgaactgtatctcgccccccatgtcagcctcgaaaataccttaaaccaagtgcagttgatggataagcagttgcatcaaatcgagggtatcacccaagtcgattgggttgtgggtggcaataccccttcgttttattacaacttgactcagcgccaacagggagccaccaactatgctcaggccatggtgaaagtcagtgactttgagcgcgccaatgcgcttattcctgagttacagcaaaccttagataaggcatttcccgaagcgcaggtgttagtgcgtaaactcgagcaaggcccgccctttaatgcgccggtcgagttaatgatttttggccctaaccttgaaaccttacgctcactcggtgatgaagtgcgcaatatcttagccgccacgcccgatgtgcttcatacccgcgcaacgttgagcgctggcgcccctaaagtgtggttgcaggtgaatgaagatgcgagtttgatcagtggtttaaccctgacggatatcgcccgacaagtgcaaatggccacgacgggtgttattggcggcagtgtgctcgaacagacagaatcgctgccgatccgtgtgcgtttgggtgacaccagtcgtgaacaagccagccgcctctctgaaattcagctagtgaccccctctggcacagccgtgcctttatctgcgctgtcccacaatgaggtacaagtgagtcgaggggcgatcccgcggcgaaatggccaacgcgtcaatacgattgaagcctatatcgtcagcggcgtcttgcccgctcaagtattaaatgatgtaaaagataaaatcgcagcgatttcactgcctgcgggttatcgaatcgaaatcggcggcgaaagcgctaaacgtaatgaggcggtcggcaatctgctctctaatctgattttggtcgtcaccctgctgcttgcaacagtcgtcttgtcctttaactcctttaggctcacagcaattattttactgagcgcattacagtcggcggggcttgggttacttgcggtgtatgtgtttggctatccctttggctttccagtcatcatcgcgctactcggcttaatgggtcttgcgatcaacgcggcgattgtgatcttggccgagctggaagataccgagaatgcccgtgcgggtgataaagaggtgattattaccacggtcagcagctgcggccgtcatatcagctcgaccactatcaccacggtcggcggctttattccgcttattattgcgggtggtggcttctggcccccctttgccatcgccattgccggcggcaccttactcacgacgctgctgtcactcgtttgggtgccaaccatgtatctgttgctgatgaaaacacggcgcaaggcacaaacagcggccttgccagcccaagcggcatcctaaa

SEQ ID NO: 220801 - DNA, 1285 bp, Unknown
  Bacterial polypeptide expressing nucleotide sequence isolated from the Sargasso Sea
gtctacatttatctcagttctagcaattatttattcaattgaacatctaccagagccaaaaagccctaaaggctttcttgcgttaattctagttttagagaccggtatgaatggaacatttgtagcccttgacttaatattgttttttgtattttttgaaatagttcttcttccaatgtattttatgatcggaatttggggagataaaactgtaagaactgtagctggacttaaaaatcaaattgaaacaagactatatgcgagtattaagtttttcgttttcactttatttggttctgcatttatgttgcttggctttttaggcttgtattacagaggtaatcgaacttttagcattcctgaactaattgaacttggaacaaatggtgcattcacaggcacatttgcaatgttagtttttgcggttttgtttcttggttttgcggttaaagttccaatgtggccgctacatacctggcttcctgacgcacatacagcagctcctacagttgggtcagtattgttagctgcaatactcttaaaattaggatcttatggttttgtaagaattgcaataccaatacttcccgaacaagcaaaagtatgggcgcctgcgattgcaatactttctgcaataggaattatttatgggtcacttgcatgtttagctcaaactgatttaaaacgacttatagcattttcgtccgttggtcatatgggttttgtaatgttaggaatagcatcattaacaccaattggtatcaatgctgcaatgattggcatggtcgcacatggagtaatcaccgggttattatttttcttatcaggttcaatggctcatacataccacactcgtgatatgggaagattaggtggaaatatgaaactactaccaaaaacaggagctctgttaggttttaccgcgatggcttctttaggcttgcctgggcttgctggattctggggagagtttatggcattacttggggcatttaatccacttgacggtttaaatgttacagtttttcgagggtcaatggtcgctggtgctataggaactgtcttaactgcagggtatttgttatggatgttacaaagagttaatcttggcgagccttctgatgaatggagtgaaatggagcttcacgatgcagatagctatgaattagctgcatggattccattggtaattctaacaattcttatcggtgtatttccaaagctaatatttggagcaactaatgatgctgttgttagccttctttctaaagcatttggaggataa

SEQ ID NO: 220802 - DNA, 823 bp, Unknown
  Bacterial polypeptide expressing nucleotide sequence isolated from the Sargasso Sea
atgaccgcttcgtctaccgcaaccactccgccggttttctcgctgcagcggggaagcctgccgttgctgatttcgatcccgcatctgggcacgcaaattcccgccgacatcgccgcaacgatgacgccggccgcgcagcgcaccgacgactgcgactggcatctcgaccgactctacgctttcgcgaagcgcatgggcgcgtcgatcctggtgccgacgtacgcgcgttacgtgatcgacctgaaccgcccgcccgatggcgcgaatctgtatccggggcaggacaccaccggcttgctgccggtcgataccttcgacaaggagccgctgtacctcgaaggccatctgccgaccgacgccgaagtcgcacgccggcgcgatgcttactggaagccttatcacgatgcgctggtgggcgaactcgccgcgctgaaggcgaagcacggcaaggtgttgctgtgggaagcacattcgattcgctcgcacgtgccgcgatttttcgaaggacgtttgccggatttcaacttcggcacatccaacggtgccagcgcggtggccggcgtagctgaagaactggccgcgatagtcgagcggcatggcgcttattccgctgtcgccaacggtcgcttcaagggcggctatatcacgcgcgagtacgggcagccgtcgcagggcgtgcacgcgatacagctcgagttgtcgcagattacgtatatggaggaacagatgccgtatgcgtatgacgaaagcctggcggtgaaggtcgagcctttgctggaagaactggtggcgacggctttgcagcgcgtgcgcgcagcgtgac

SEQ ID NO: 220803 - DNA, 1780 bp, Unknown
  Bacterial polypeptide expressing nucleotide sequence isolated from the Sargasso Sea
atgacaaaaaataaaattacagcaattctaggtcctacaaatactggaaaaacgttcttagcaatagaaacaatgctttccttcgaatctggaatgattggatttccattaagattattggcaagagaagtttatgataaaataattgaaaaaattgatgtttcaaaagtagctctgattactggagaagaaaaaattatacctttaaacgcaaaatattttttatgcacagttgagtcaatgcctatagacaaagatttagaatttgtaggaatagatgaaattcagatgtgtaatgatcatgaaagaggtcatatttttacagatagactattaaatcttagaggtgaaaaattaacaatgttaatgggatccagtgctataaaaaatattttacaaaaattggatgatgatgttgagtttataaaaaaagaaaggctatcaaaattaacttttggaggtcaaaaaaaaatttcaagaatagagagaaaaagtgcaataattgctttttcgactgaagaagtttatgcaattgctgaattaacaagacgtcaaaaaggaggtgcagctatagtaatgggatcgctaagtcccaaaacaagaaatgcccaggttaacctatatcaatctggtgatgttgattatcttgttgcaacagatgctattgggatgggaataaatatggatttagatcatgtttatttttctaatataagaaaatttgacggaaaaaaaataagaagattaagtatttctgaaatgggacaaatttcaggaagagctggtagatatttaaatgatggatcttttggtattacaggagagtgtagcgaaattagttcagaagaaatagaggcaattgaaaatcataaatttcctgaaattgtaagtattttttggagaaattctaagctcaattttaaagataaattaagtttaattaaatcattagatgaaaagcctggaaaaagctggctaagaagaatcggcgaatgtgaagatgaaaaagtattaaaatatttcttgaaagaaacatcgggtataaatattgaagataactcagaaatcttaagaattttatgggaaacatgccaaatacctgactttgtaaaaaagacttatggccatcacgttgaagttgttggaaaagtattcaatttcttaacgagtaatacaaataaaattccaaatgaatatatgaaaaaacaactttctctattagataaaatagaaggaaatgtggactcactgtcaaatagaatagcaaatgtaagaacatggtcttacgtatctaacaaatctaactgggtagaaaatcaagattattggattgaaaggacaaaacgtatagaagataaattgtcagatagattgcatgaagaattaacaaaaaaatttattgataaaagagcaagtgttttatctagaggattaaagcaagatattttatttgatacaaaaattattaatgatgaaaaggtgatgataaataatcaatatattgggagattaaaaggcttaaaattagatttagacttaaaaatggatgcattagacacagatattaaatctttaaagaaagctgcaaaacaaaatgttagtcctgaaattataaaacgaattaaccaaattttagatactggtcttattgaattaaaaaatgacaataaaatttattggaaaagtaatccaattgccaaattaacgccgggtatagattatttaaatcctcaaattcatctaattattgatgaaatgatggaaaaagatgaaaaaaata

SEQ ID NO: 220804 - DNA, 1108 bp, Unknown
  Bacterial polypeptide expressing nucleotide sequence isolated from the Sargasso Sea
tatgaagaaaaattttaaaagacgtgactttataaagaaagctggtgttgctgctgctgcagctactgcagtatcttcttttcctgctccagcaattgctgcagatagggtcgaagtcaattgtgttgcgacatggggcagaggttaccctggtctagggactggaggtgaagctgtttcacaaagaatatctgacttaagtgatggaagaattgttgttaatcattatgcaggtggagaacgtgtaggacctttagatgtttttacagaagttagctctggtaatgctcaaatgtataatagtgcagactattattgggtaggacaacatccaggttggggattttttgcagcagtaccatttggtttaatttctactgaaattaatggatggataagacatggtggaggtcaagagctgtgggatgaacttgctgatggttttggactgaaaaactttatggctggaaactctggagtacaaatgggtggatggtttaataaagaaattaattcagctgatgactttaaaggtctaaaaatgagaatgcctggattaggtggaatgatggtaacaaaacttggtgcctcagttgtaggtatgcctggtggccaaatttatgaaaatctagtcaatggtacaatagatgcatgtgaatgggttggaccatggaatgatgagagatctagattctatgaagcagcaaaatattattattggccaggtatgcatgagccaggtactttaataacacttggctgtaacaagtcttggttaacaagtctttcaaaaactgatcaaatgattattgaacatgccgcaactgttcaaaatgaaatgatggtaacagaatataatgctaacaatggtgctgctcttcaaagactcattaacgatcacggtgttgaattaagagagttcaatgatgatgttatcgatgcaatgggtgaagcatcagaagagttatatgctgaattagctgaaggtaatgaacttacaggtcgtattcttgatagctttttgaaagctagaggcgatattggtgagtggttaaaaattgctgatcatggatatactgcccagagacgtagagtattagaaggttaa

SEQ ID NO: 220805 - DNA, 514 bp, Unknown
  Bacterial polypeptide expressing nucleotide sequence isolated from the Sargasso Sea
tatgttttggaaaactaactctcttttttatgtattaattctttttttgttatttaattgcgcaaaaatgggtgttattaccggaggggaaaaagacacgattcctcctgttcttataaattctattccagatcaaaaagccataaacgtagacactaaagagttttcgtttttattcgacgaggttataaacacagatgaaataaagagcaaacttattatttcaccatattctgatattaaatatgaggtcgatgcaaagaagaacagtcttattctctcctttgattcgagttttgaaaacaacagaacgtatatttttaattttgcagatggtataaaagacattacggaaggtaacgaggcaaaaaccttaaaatatgtttttagcactggcccaatactagattcgttgattgtttttggagaagttgttaatccattaacaaacaaaccccaagaagatgtcttggttgctttatacgatagcagtgatagcttgggtctctttaat

SEQ ID NO: 220806 - DNA, 301 bp, Unknown
  Bacterial polypeptide expressing nucleotide sequence isolated from the Sargasso Sea
gatgtctgaaatctggaacggttatatttggcctggaatttggatcgtcgctaaaattatagcaatcattgttccggtctttttatccgttgcctatctgacgttagctgagcgcaaagttattggtgcaatgcagcttcgtaaagggccaaatgttgtcgggtcatttggcctacttcagcctatcgctgatgcaatcaagctatttctaaaagagacggtcattcccgctaacgctaatcggggtgtcttcatagcggccccttgcacgactttcattttggcaataattgcctgggcg

SEQ ID NO: 220807 - DNA, 1396 bp, Unknown
  Bacterial polypeptide expressing nucleotide sequence isolated from the Sargasso Sea
atgttgctttccctgctgctctttattcccctgctgggggcactggccttgatcctctggccgggatcacccaccagcaatcggttgcgcgaggtgtcgatcgtgttgttggccgttcaatgcgtggccagctttgccctgctgttgcccttcgaccccacggacgccggacttcagctgattgaacaggcccgctgggtccatgcgatcggtctggattacgccctggcggtggatggattgtccctgcccctggtgctgatgaacggggtgctctgcctggtggccgccatcgcctcgcgttcgattgagaatcgcccccgcatctacttcgctctgttgctggtgatcagcggtgcggtgaacggtgccttcctcgctcagaacctgctgctgtttttcctgttctacgagctggaactgattccgctgtggttgttgatcgctgtctggggtggtgccaatcgggcctatgccgccaccaagtttttgatcgtcacggcggtgtccggtgtgctgatcctggcggccttcctggggctggcgttcgtcagcggcacgatggatttcagcctccagccgatcctggccggtgagctgggaataacggcgcagctggtgctgatgggtgcactgctgatcggtttcggcatcaaaattccccttttccccttccacacctggcttccggatgcccacaccgaggcctcgacgccggtgtcggtgctgctggccggggtgttgctcaagctggggacctacggcctgctgcggttctgcctcggactgttcccggaggcctggcagctggcctccccctggctggcggcctgggccgcgatctcggtgctttacggctccctggcggccattgcccaaaccgacatgaagcggatggtggcctacagctcagtgggccacatgggctatgtgctgctggcggcggccgccgccacaccgctgggcttgatgggtgctctcttccagatggtcagccatggcttgatctccggagtgctctttctgctggttggagtggtctacgcccgcaccggcacccgcgatctcaacgtgttgcgcggtctgttgaaccctcagcgcggactaccgctgaccggctctctgatgatcatcggtgtgatggccagcgctgggattcctggcatggcgggcttcatctccgaatttctgatcttccgcggaagcctccagcctttcccgattgccacattgctgtcgatggtgggctctggtctcacggcggtgtatttcctgttgctggtgaaccgcgcgttcttcggtcgtctcgccatcgcccccggcgaggtggtgaatccccgtattctcgacccgtgttgccttgcgggaaccaggtgcctgccattgctctcagccc

SEQ ID NO: 220808 - DNA, 427 bp, Unknown
  Bacterial polypeptide expressing nucleotide sequence isolated from the Sargasso Sea
atgtatcgcgacttcggaacaatatttgtttttatttttattggcattgtgctaatctatttgccattgctaatccaaaaactccttgcgccaaataaccccaatccagataagcttgcgacctatgaatgcggagaagaatcggaaggatccgcatgggtccaattcaatatacgcttctatattgtggcattaatttttttaatttttgatgttgaggttgtttttctatttccatgggctgttgtatttaatgatttagggttactagcattagttgagatgggaattttcctcttaattctattagttggcttagcctatgtttggaaaaggtctgatcttgattgggtaaaatataatgttaagtacggtcgcggtaggtattctagtttaattcaaaaatcaaatactcctagggaataat

SEQ ID NO: 220809 - DNA, 922 bp, Unknown
  Bacterial polypeptide expressing nucleotide sequence isolated from the Sargasso Sea
atggaaatagaaacaaaaactgcaacagtaaataatattaattggcattgggctgaggctggtgatggagaagctgttgtattgcttcatggtattccagaaagttggagatgttggaaacatcaaattcctaaattagcaagtcaatttaaagtgtatgcaattgatttaaaagggtatggactttcagataaaagtgagggggattactcaatgaataaggtagcctctgagatattggatttacttgattatttaaagattgatacctttaggcttgctggtcatgattggggtgtggcaattagtgataatataattgatcaagcccctgaaagagtaaacagatacgttaggtgttgtctttctttacataattatgacccgcgaaattctttacaccatcaatggaattctgaaaatcctgaattagctgcaaaattgatgaataaatctgaagcttacgtaaaagtatggtttgaaagttcttgtaagccagaattaataccggatgaaactgagataaatgaaataatagaagatttttcacatcctggtattggagatgctgttccaagatactttagagacatacctaaaaacaaacctgtagatttatcaaaatttactatgcctattttatatattcatggcgaacatgatccaaggcaaccacttgaatattgtgaaggtatggagaaacacttaccaggtttgcaagcaattctcgtgcttgatgctggtcattttatcacaagagaaagacctgttgaaactactaatgcaatgatgtggttttttaattcaatgcttggttcaggtttgaaattatttgatagatcaaaagaattaggacttcccacaaaacctactgcagcaccatcaaaaagttttggtgtaaactctttgaagtttgattgag

SEQ ID NO: 220810 - DNA, 436 bp, Unknown
  Bacterial polypeptide expressing nucleotide sequence isolated from the Sargasso Sea
atgtatcgagattttggaaccgttttgatttttgctatgctagcaatagtattagtatatgttcctctattaatttcaagtttagtagctccaagtcagaagactccggataaacttgataattatgagtgtggagaagagcctgagggatctgcttgggtacaattcaatattcgcttttatgtaattgctcttatttttctcatatttgatgttgaagttgtatttctattcccatgggctatggtttttaaggaaatggggatggttgcatttgtagaaatgggaatttttctacttattttgattgtaggtttagcatatgtttggaaaaaaggtgatttggattgggtaaaatataatgtgaagtatggtagaggaagatatcgccaaaaagcttcgcaaacggaaggagaaaccattgggagtatttgaa

SEQ ID NO: 220811 - DNA, 874 bp, Unknown
  Bacterial polypeptide expressing nucleotide sequence isolated from the Sargasso Sea
tatgagttataagagtatttttaataaggaatcattctcaaaaaaaaatgttgtagttacaggtggaggtagtggaattggtagatgtatagcacacgaactgagttcgttaggatcagatattattttagttggaagaaataaagaaaaacttgaaacggtacagaaagaaattaaatcatctaatggaaacgcatcattctatgtctgtgatattcgagaagaagataaagtccgtcaatgtactaaagagatttatgaagaattcaatataatacatggtttagttaataatgctggcggccaatttccatctccagcagaatatatttcacaaaaagggtttgaaactgttgtaagaacaaaccttgtaggggggtttttgtttagtcgcgaggtattcagtcaaggaatgattaattctggcggtaatattgtaaatataactgcagatatgtggaatggtatgcctggtatgagccactctggtgcagcaaggtctggtatggataacctaactaagactcttgcctatgagtgggggtatgctggagtacgtgtaaactctgttgctccaggttatattgcatcaagtggacttgacacctatgatgatagtataataaaagagataatacctaaattaaagaaaaccgttcccctgaaaagaatgggaaccgaagctgaggtaagcgctgcagtttgttttctattgtccgatgcagcagcttatataaatggagtatgcattcgggtcgatggtggatctcccttaggtagcggcgcatggccattaaaagaaactaagaaatataaatcgtttgatgggtttcatctttcaaaacttccagatgttcttgatggagaattataa

SEQ ID NO: 220812 - DNA, 604 bp, Unknown
  Bacterial polypeptide expressing nucleotide sequence isolated from the Sargasso Sea
gatgacttatgatatattaattacagggttaataatcattgcccaaatacttgctgttgttgtgccagttttaatatctgtagcttttttagtttatgctgaaagaaaagttttagcattaattcaattaagaagaggtccaaatatagtagggccttttggtatattacaaagctttgctgatgcattaaaacttattactaaagaaaatattatacctagtggatcaaataaaattgtttttattttagcacccataataacaatggtacttagcttagcaggttgggcagtaataccttttgctccaggatgggtagtctctgatattaacgtaggtatcatgtatctgtttgcagtatcatctcttggagtatacggaataataatggctggatgggctagtaactctcaatatccttttctaggagcattaagatcagctgctcaaatggtttcttatgaagtatctattggatttgtaataattacagtattattatgtgtaggttctttaaatttatcaaagatagttttagctcagcagactgtatggtttgcaattccattattacctatgttcattattttttttatttctgcg

SEQ ID NO: 220813 - DNA, 427 bp, Unknown
  Bacterial polypeptide expressing nucleotide sequence isolated from the Sargasso Sea
tatgtatcgcgacttcggaacaatatttgtttttatttttattggcattgtgctaatctatttgccattgctaatccaaaaactccttgcgccaaataaccccaatccagataagcttgcgacctatgaatgcggagaagaatcggaaggatccgcatgggtccaattcaatatacgcttctatgttgtggcattaatttttttaatttttgatgttgaggttgtttttctatttccatgggctgttgtatttaatgatttagggttgctggcattagttgagatgggaattttcctcttaattctattagttggcttagcctatgtttggaaaaggtctgatcttgattgggtaaaatataatgttaagtacggtcgcggtaggtattctagtttaatacaaaaatcaaatacttctagggaataa

SEQ ID NO: 220814 - DNA, 347 bp, Unknown
  Bacterial polypeptide expressing nucleotide sequence isolated from the Sargasso Sea
acttgttgcacctaataatccaaaccctgacaaactagccacatatgaatgtggtgaggaatcagaaggttctgcatgggttcaattcaatattcgtttttatgtagtcgctctcatttttcttatttttgatgttgaagttgtttttttgtttccatgggcagttgtatttaatgatttaggaatgttggcatttgttgaaatggcaatattcctaattattttacttgtcggtcttgcctatgtatggaagagagcggatttagattgggtaaaatataatgtgaaatatggacgaggtcgttatgctagtctttttgaaaagtcaaaaacagttcaggagtaga

SEQ ID NO: 220815 - DNA, 658 bp, Unknown
  Bacterial polypeptide expressing nucleotide sequence isolated from the Sargasso Sea
actggttctcacaattgacagagacaatgatttgggagtgaaatcagggataagagggccggttgttggcaggaaatcctgcttaacggcagctctcagattgggtatcgcggaccctgaggagtccgatactaacgcgattcttggtgcgctacaccatcatgataggctggcagaaggagctggtgcgagcgatgaggttcagatcgctatactaacaggtgacgtgagggtcggacctaggagcgatagggcgatagctagccagttagatgaggtgattcaggatttccaaccagatgcggcactccttgttacggatggcgctgatgacgaagcctctctgcccatagttacctcgagggtgagagtggacactgtggagaaggtaatagtcaggcagtcgaaaggaatcgagggtacctactactacatcgtgaaggccatagaggaccccagattcaggtctagacttctggttccactcgcagttttcctaatcataattggtctaggcctaattctaccaaacggaatagctctcatcggctctctaccactcctgataggattgtgggttttgggcaagggactgggtctcgaggcacaaatggagagggtagccatggagatgagagacagcgccactggggggctt

SEQ ID NO: 220816 - DNA, 958 bp, Unknown
  Bacterial polypeptide expressing nucleotide sequence isolated from the Sargasso Sea
tatgttcaccagcattctaacaaatataaagaagctcacacgtgaactttcagacaacccatctgcacaagctgcagttcttttcgttgcttcagtaataattatttacctccaaagagaatatataattgaaacttttataccaaatatcagtgacatagttcttacatatgtaggatatggatttgtaactctttcgatatttttgattggtgtaacagcaacagtaaaccatttcagaaaagattcattaatattttggccacaattagtttccacactattaacggttatttctattcaattagtaatgggagcatttaaagggccacaaggaattgtctttaaagaaactacaggagggagatttggaaaatacctatgggaggatttttatattccaggcccactattattactactcttacttttaattgcattttacatttcatggccaaaattttctttggctaaattaaaattatctaaattatattttctttcttttttatattttttaaggaaaatatttaaatcaaaatccaaaaagccaagaataattgaaaaaaaaccctatcaagaaactaaagataatatacaacaaaaaatagaagaacctagaaaaaaatcccttcacgataattaccaaccaattaaaaataacccgacgtttgaagaaaaaacaaaaaaaattgaagaaaaaattgatacgcctaaaaaaccaactagagcattcacttttggaaaaccatgggccataccagaaatgtcattacttgaatatggacctgaggcttcgatttcgtctgacgaatcaaaattagtagccgaaaaaattgaagaaaccctaataaatcatggtattgaagttagagttaatcaaataaagcctggaccaacagttactatgtatgggctcacacctggttggacaagaaaaaccagaagactaaaaaaa

SEQ ID NO: 220817 - DNA, 1225 bp, Unknown
  Bacterial polypeptide expressing nucleotide sequence isolated from the Sargasso Sea
ctgaactcgatatgggggaacgaccaccacctcgaggccgtctccagggtgaacaacagggggtaccacggctactggttccttctcccggggttcttccaagcattcgcggacttcaccaagttcgccggcaaggagcacatagtccccaaggaggcagacaggactgtctacgaggtcgccccggtgatcataatctccaccacggtgctggtgttcgcgttcgtccccttcgggccccacttctacgcagccagccccgagctctccgtcgtgttcatgatggccatcttcggagtggccccgctcggggtcttcttcgccgggtgggcatcgaacaacaagtacacactcatcggcggcatgaggtccgcagcccagctcaccgcatacgagatacccctgctcatcaccgtgctcggggtgtgcgtcatcagcggctctttcaacgtcatcgagatagtagacttccaagcccaggaatccaacgtctggaacctgttcatgctcccgctcggagccgcgctcttcctgattacgatgatcgcagaggtcgagaggatacccttcgacatgcctgaggccgaggccgaactggtagagggatggtggaccgagtacggcgggatgcgctggggcctaatgttcgcagcagagtaccagcgctgctacgccgcgtgcctcctcttcgccctgttcttcctaggcggctgggaagcccccttccaggggaccatggagtcgctccccatcgccggcggcggcctcgaactcctcttctcgctgatcccggggatagcctgggtcctgatcaaggcctggctgctgttcgccgtcttcgtctggatcagggcatcgctgcacagggtcaggacagaccagatactggagttcgggtggcagtggctgctgcccctgtccatagtcaacctcgccatcgccatgttcctcagggtctgggtctgggacggcagctggggcatcgtggccccagtcgtgatgatcctctccgggatcgtcggactcgtcatcctggtagccgacgaggacaaggaggccctggagagcatgaccaggccgtacagcacgtacgcggtcaccaaggcctacccaggaaggcacccgcagacctcgctcgaggacctgcagaggcagtacacggcctacaccgccgtcaaggcagccacctcggtatcactctcagaaacggaggccggctcatgag

SEQ ID NO: 220818 - DNA, 1561 bp, Unknown
  Bacterial polypeptide expressing nucleotide sequence isolated from the Sargasso Sea
ttggagagtggattaggtttaaccatagtagtttttcttccgcttgtatctgcaatttttatattcttaatacctaagaaacaagagatgctaattaaattagtaactcttggatctgcactacttacttttggagtaagtttaattgttgccttgcaatttgattttaataatgctggtgaccttcagcttggtactaaggtctcatggattagtagtattaattcaaattatgaaataggtatagatggtatttctttacctttattacttttatctactttcatttctgtattagcaattatttattcttttgaacatttacctgaaccaaaaaatgcaaaaggaatgatgtctttgattttaattttagaaactggaatgaatggtacatttgtggcattagatctaattttattttttgtgttctttgaacttgttttactaccaatgtatttcatgattggtatttggggagataaaactgtcagaagtgtttctggacttaagaatgatattgaaacaagactatatgcaagtattaagttttttgtatttactttatttggatctgctttcatgctcttaggattcctaggtttatatttcaggggaaatagaacatttagtattcccgaactaattgagcttggctctagtggagcattcacaggtacatttgcaacgttagtttttgctgttttattcttgggttttgcagtaaaagtaccaatgtggccactacatacatggttgcctgatgcacacacagctgcaccaactgttggatctgttttattagctgcaattttattaaaacttggatcctatggttttgtaagaattgctttacctattcttccagaacaggctgttgcttgggctccagctattgcagtgctatcagcaattggaataatatacggctctcttgcttgcttggcacaaacagaccttaaaagattgattgcattttcttcagtaggacatatgggctttgtaatgcttgggatatcttcactcacctcaataggtattaatgctgcaatgattggaatggttgcccacggaataattactggtttattgttctttgtttctggttctatggcacatacttatcacaccagagacatgggaagactaggtggaaatatgaaacttcttccaaagactggagccattttagcttttacagctatggcgtcacttggcttacccggattggcaggattttggggagaatttatggctctccttggagcatataatccattacctggtttaaatattacaatttttagatcctccatggttgcaggtgcaattggaactgttttaacagcaggttatttattatggatgcttcaaagagttaatcttggtgaacctaaagaagaatggttagataaagagcttcatgatgcagataattatgagcttgttgcttggatacctttagtaatacttactgttctgatcggagtatttccaaagcttatatttggagcaactaatgatgcagttattgctttggtatctaaagcgttcggaggctaaa

SEQ ID NO: 220819 - DNA, 1567 bp, Unknown
  Bacterial polypeptide expressing nucleotide sequence isolated from the Sargasso Sea
attgagtagtttttcttttttagatagtggattaggtcttacgattgttgtattccttcctttaatttctgccatatttatttttctgatacctaaaaaacaagagatgttaataaagttaataactttaggctcagcgattgtgacctttttagtgagtttagttgtagccctacaatttgattttaatgatgctgctgaacttcagctaggaacaaaagtctcatggattagcagtataaattcaaattatgaaataggcattgatggaatttcattgcctttgttgcttttatcaacattcatttctgtattagcaattatttattctttcgaacatttacctgaaccaaaaaatgcaaaaggaatgatgtctttaattttaattctagaaactggaatgaacggaacttttgtcgcactagatttaatattgttttttgtattttttgaacttgttttacttccaatgtatttcatgattggtatttggggcgataaaacagtaagaagtgtttccggactaaagaacgatattgaaacaagactttatgcaagtatcaaattttttgtatttactttgtttggatccgcttttatgcttttaggatttttaggtttatatttcagaggaaataaaacatttagcattccagaacttattgaactaggtaccaatggagctttcactggaacatttgcaactctagtttttgcagttttatttttgggttttgctgtaaaagttccaatgtggcctttacacacttggttacctgatgctcatacagccgcaccaaccgttggatcagtattattagcagcaattttattaaaactaggttcttatggttttgtaaggattgctttaccaattcttcctgaacaggctgttgcttgggctccagcaattgcaatattatctgcaattggaattatatacgggtctcttgcttgccttgcccaaacagatctgaagagattgatagctttttcttcagttggtcatatgggatttgtaatgttagggatttcgtctcttacttcaattgggattaatgcagcaatgattggaatggttgcgcacggaataattaccggactattattttttgtttcaggttccatggctcacacgtaccacacaagagatatgggaagactaggtgggaatatgaaacttctgccaaaaacaggtgcaatcttagcttttacagcaatggcatcacttggattaccgggcttagctggattttggggtgaatttatggctttacttggtgcttataatcctttaccaggtcttaatgtcactatttttagatcatccatggttgctggtgccatcggtacagttctaactgcaggatatttattgtggatgcttcaaagagtaaatctaggagaacctaaggaagaatggattgaccaagaacttcatgatgctgataattatgaacttgttgcttggataccgttagttattcttactgttttaatcggagtgtttccaaaacttatatttggggcaacaaatgatgcagtaattgctcttgtcgcaaaagcg

SEQ ID NO: 220820 - DNA, 1454 bp, Unknown
  Bacterial polypeptide expressing nucleotide sequence isolated from the Sargasso Sea
ggttgtccaattatccatactttcttcaatagtgacgtttgtcttaactgttgccttatttattctttacgataaagacaaaggtggaatccaatttatagatcatctaaattggattgattcagtaaatattaaatcatcttatttacttggtttagatggcctttctgcaccattagttttactaacaggattattgggtatggttgcttgcatgtcttcatggagaataagtcataggtacaaagaatattttatatggctgttgttattggaaactagtgttttgggagtcttcacatcattagatttattacttttctttatattttttgaatttgaattgataccgatgtacatgttgattggtatttggggttcaggtagaaaagagtactctgcaacaaagtttgttatttttactttggcaggaggagcatttatgcttattggaattcttgcattatttgccagtgattctgttagtacgcttgcaatggtttcaattccagaaattggtgttcaaggtattccagacttaattgcaggaaaagacttaataattcctgcatcatttatttttgcatttttctttattgcatttgcagtgaaactccccctttggcctcttcataactggttgcctgacgctcatacagatgctccaacagcagtttctataatgcttgcaggggtgctgttgaaaatggctggttatggattatttagaattaatcttggtttttttcaagaaacccaaggatttactatttttagtgtaaccgagcttttggcacttttaggaactatttctatagtttatggtgcaatagtgactcttagacaaactgatcttaagaggttaattgcatattcatcaataagccatatgggttatgtcttgctaggattctcagctataagtaagtctggtgaattttctttatattctctaaatggagctgcaatgcaaatgtttactcatggaactataacaggactttcattcctagccgttggccttatttatgatagaactcatactagagatattaataaactaggagcgattgcaaataaaatgccaatggtttctttattttttgtgatttcaggattagcgtccttaggattaccaggtttttcaggatttgtttcagaaattatgatcttcttaggaagttataaagtttttcctgcttatacaatagtttctgcttttggagtagtcttagctgcaggttatattctttggatggttcaaagatctatgtttggttctaataatttagaaaaggatgataaaacttataaatatgacgaattatctgatgcaaatttttatgatattttacctgctttcttaataacagtgccaattatattaataggtataattccaagtatttttattactttttttgatatgggaataaaggagattctaagataat

SEQ ID NO: 220821 - DNA, 928 bp, Unknown
  Bacterial polypeptide expressing nucleotide sequence isolated from the Sargasso Sea
gtgtcgctatccgacatcgcgcggctcgatacgatggtgacggtggtcgacgcgttcaactttctgcgcgactacggctccgccgacgcgctctccgaacggggcatcgccgcgactgaagaggacgatcgcacgctggtcgaattgctgatcgagcagattgagttctgcgacgtgctggtggtgaacaaggccgatctggtgagcgccgacgaactcacgcgtttgcagcgcatcctcgcgcgcatcaatccgcgtgccgtgcaggtagtgacccgtttcggcgaggtgccgcttgccgacgtactgaacaccggacgtttcgatttcgacgaggcgtcgagcgcaccgggctggctggcgtcgctcaatcaggaacatgaacacggccatgctcatcacggtgaagctgacgaattcggcatcggcaatttcatttaccgcgcgcggcggccgtttcatccggagcgcctgtgggcgctgctacatcaggagtggcagggcgtcttgcgcagcaagggtttcttctggctcgccacgcgtaacgacattgcgggttcgctgtcgcaggcgggtggcgcttgccggcatggtccggcgggcatgtggtgggccgctcaggatcgcagcgaatggccggatggcgacgacgagctggccgccgaaattgccgccgactggtacggcgatccggacgatctgagcattggcgaccgtcgccaggaactggtgatgatcggcgtcggcatcgacccggcagtgtggaaagcgaagttcgatgcgtgcctcgtcaccgaagaggaatacgcggcgggaccgcaagcgtggcaacaattcgccgatcctttcccggcatgggatttcgacgaagacgaccatgatcacgacggccatggccacggcgaaatcgtgcatcgccacgattgag

SEQ ID NO: 220822 - DNA, 760 bp, Unknown
  Bacterial polypeptide expressing nucleotide sequence isolated from the Sargasso Sea
atggattttcctattttatcatcattaatcttattaccattattaggtgctatatttatatttttttctaaatcaaaatcaaacactcatttaacaagcaaatacttagcactctttgtttcatttgctaattttattttatctttatatctttggtacttatttgatccatctacacctgagtttcaatttttagaagaacaatcttggattaaaggttttgtaaactataaagtaggtatagacggtatttcaattttatttatcgtactaacagctttcattacaccattatgtgttgtttctgtaaatagtacgattaaatatagattaaaagattttcttgttgcaatacttgttatggaatctttaatgattggtgttttttgctcattagacttagttatattttatcttttttttgaaggtggtttgatcccaatgtttttaataattggtatttggggtggtgaaagaagagtatattcagcatttaaattttttctttatacacttcttggatctgttcttatgcttgttgcaattatttcaatatattggtttacaggaagtacagatataacttatttatataaccttggtattgatgagaagtatcaatatttattatggttagcttttttcagttcctttgctgttaaaactccaatgtggcccgttcatacatggctaccagatgctcacgtagaagctccaacagcaggctcagtcttattagcggcaatcttattgaaaatgg

SEQ ID NO: 220823 - DNA, 740 bp, Unknown
  Bacterial polypeptide expressing nucleotide sequence isolated from the Sargasso Sea
gatgatttctattatgttctctttgttgttagttccactttttagtgcattacttatctttttgattccaaattcaagaaaagagacatttagaccaattggaattgccttttctttaataacgttaactcaatgtgtttatttgctatttggggaatatgcaaaaacagaatttacaattttatcaacttttcaatggatacagtcttatggaattaatctacatttcggtctctctggaatgtcaactcttttgttattgcttagctcattattagtatttgtttcattactttctattggaaaagatcactctgaaagcaaaggatttgttggatcattgttaatgttacattttgcaatcaacggtgtatttattagtggtgatttaatttcattatttatattttttgaggctttactaatccctatgtatttcctaatgggaatatggggaggtgagaatagaagatatgcaactataaagttcattctttacactgtttttggttcggtatttatttttattggaacagtttatacagcagttctaagctttggagttaatggtaggcttgctgtagattttgaaacattgtcttcattaagtttgcttgagtcacagtcaaaaactttatttttattatttacatttggctttttaattaaagtgcctatatttccactacatacttggttgccggatgcacacgtagaagctccaactgctggaagtataa

SEQ ID NO: 220824 - DNA, 601 bp, Unknown
  Bacterial polypeptide expressing nucleotide sequence isolated from the Sargasso Sea
tatgggattatctttagtaccagtaatcctatattctggttcactatctcttgtagatatagttagtagccaatcaggaaacttatcaacaacgattccaattcttagctcaattgtttcatttattcctaaatggaatatttttcctcaatttattgcatttggaatattttttatagctgctgtagctgaagtaaatagagcgccttttgacttagtcgaagcagagcaagaattggttggagggtttcatacagaatactctggatttaggtttgctatgtttttcttggcggaatatataaatatgttcaatatgtgtgcaattactgcaaccttttttctgggtggttggcttggtcctacttttgaggggtttttgcctccagtattatctgcaattatgccaataatttggttaggagttaaaacgtttgcactcttattcatatttgtttggataagagccacactaccaaggctcagatatgatcaattgatggagcttgggtggaaaaggcttataccagcatctttagtttggcttatattgtctgctattgttctaggattaagacagtttggtttaccttggagttaa

SEQ ID NO: 220825 - DNA, 865 bp, Unknown
  Bacterial polypeptide expressing nucleotide sequence isolated from the Sargasso Sea
atgaactttcctattatttctgcattaattttacttcctacaataggatctatttttttatttttttcaaaggataattcagaaaataaattaacatttaaatatgttgctctatttacttcagtagttaattttttattatcaatttatttgtggtttttatttgatacaacaatttcagattttcaatttgttgaagatagaatatggttagttggttttattaattacaaagtaggaattgatggtatttcaattttatttataattttaaccacttttattactcccctatgtatattgtcagttaataacactgttaaaattagactaagagattttctaatagcaatattaataatggagtcttttatgataggagtgttttgtgctcttgatttatttgtattttatttattttttgaagctggtttaatcccaatgtttttaattataggaatttgggggggacctagacgagtttactctgctttcaaattttttctatatactcttttaggttcagtattgatgctagttgctataatttcaatttattggataacaggtacaactgacgttattgaactttatgaacttggaatagacgctaaatatcaaaatcttttatggctagctttttttagttcatttgcggttaaaacaccaatgtggccagttcacacatggttaccagatgcacacgttgaagccccaacagcaggctcggtgttattagcggccattcttcttaaaatggctggttatggatttattagattttctttaggattgtttcctgttgcatctgatctctttacaccattaatttatattttaagtattattgcaataatttttactt

SEQ ID NO: 220826 - DNA, 982 bp, Unknown
  Bacterial polypeptide expressing nucleotide sequence isolated from the Sargasso Sea
ctttctttgcctctgttgcttctctcactcgtcgtggtgcccctttgtcttatctatagctggaatcacattcctgaaccgggcaaccccaaagcgttcttcgtcctattactcatcctgtctacgggcatgaatgggtctttcgtagcccaagacatgattctcttcttcgtcttcttcgaagttgtactcctgcccatgtatttccttattggtgtgtggggcggagaagatcgacgatacgcatcactcaaattcttcctctatacgttgttcggctcagcgctcatgatcattagtttcttggcgctgttctttctctccaaagacgcgtccggcgaactcttacagaccttcgacatgagaatcctgaccgatgtagccggtgtggggatcatcaaaagcacccaagtctggatattcgcagggctcttcatgggcttcggcatcaaagtaccgatgttcccatttcatacctggctgcccgatgcgcacacccaagcgccaacggtcggctccgtcattctcgccgctgtgctcctgaaattgggtacctatgggttcgtgagaatcgccattccgttccttcccgaaggcgccatcgcatgggccccatggataggacttcttgctgtgattggcatcatttacggcgcgcttggatgtctcgcacaaaaagatatgaagcgcctcatagcgttctcctcagtagctcacatgggtttcgtaatgctcggaatagctactctcactgactttggtattaacgccgcaatattcggaatgatcgcccacgggctcattaccggaatgctgttcttcgttgccggctcggtaaaggagcgctaccacacgctcgaaatatctcgattagggggcctgctgaaatccgctccacgaatgggatggatcctcggatttgcgtcaatggcgtcacttgggcttccgggtcttgcaggcttctggggtgaattccctgcga

SEQ ID NO: 220827 - DNA, 772 bp, Unknown
  Bacterial polypeptide expressing nucleotide sequence isolated from the Sargasso Sea
atgtacattagttattcgctttatattctcttcctgccattagcagcgttcctgattcaaatattttttggaaagaagctgcctcgacaaggtgactgggtctcaattggagctatttcaattaccctcatccttgcaatatccatgtttatttctatgatctcaaaatacgacccaaaattcagcgaagaagcttcatttacttggcttgatatgggagagttcactattaggttagggttcttagtggataacattactattatcatgctacttgtggtggcccttatatcaacatgtacacatatattctcgacgcaatatctcaaaggtgacataagatattccaggtattttgcatatcttggcctgtttacgttttcgatgaatggaatagtgctcgcaaacaatttgatgtcaatgtacatgttttgggagctagttggagttagttcttatttgttgattggacattggtttgaaaaagagtctgcggcaaacgcaagcaaaaaggctttcttgacaaatagagtcggtgacattggatttttcattggaatcatgttattgtataatgcgattggatcatttgcctttagtgatatttttaatggagtctcttcaggaatgatagctggtggcacgcttacccttgcaggtgttggtctattcttaggtgcaatgggtaaatcatctcaattccctctgcacatttggttgcctgatgcaatggaaggtccaacaccagtgtcagcgctaatgcatgctgcaa

SEQ ID NO: 220828 - DNA, 979 bp, Unknown
  Bacterial polypeptide expressing nucleotide sequence isolated from the Sargasso Sea
tgggctgatgggcctttccctgccgcttttgttgctttctttggtcgtcgtacccctgtgcctaatttacagttggaaccacgttccagagcctggcaacaccaaagctttcttcatcttgattttgattctgtcgacgggaatgaacggatcgtttgtagctcaagacatgattttgttctttgttttctttgaggttgttctcttgccgatgtacttcctgatcggtgtttggggtggcgaagaccgccgttacgcatctctaaagtttttcctctacacactctttggctcagccttaatgattattagcttcctggctctcttctttctttccaaggatgctgccggtgagtttctatatacctttgacatgagagcgcttactgacgcagcgggcgtcggaattatcaaaagcactcaagtgtggatttttgcaggcttgttcatgggctttggcatcaaagttcctatgttcccgttccacacatggctgcctgatgctcatacgcaagccccgaccgttggctcagtgatacttgctgctgtcttactgaagttaggtacgtatggcttcgttcggatcgccatacctttcctcccggaagctgcaatcgcatgggcaccatggattgggctcctagcagttattggcatcatttacggagcgcttggatgccttgctcaaaaagacatgaaacgcctcattgcgttctcttctgtcgctcatatgggctttgtgatgctcggtatcgctactctcaccgactttgggatcaacgcggcgatcttcgggatggttgcccatgggttgataacaggaatgctcttcttcgttgcaggatcggtcaaagagcgttatcacaccctagaaatttcgcgtttgggtggcctcttgaaatccgccccaaaaatgggatggattttaggtttcgcctctatggcatctctgggtctcccaggtctggcgggcttttgg

SEQ ID NO: 220829 - DNA, 820 bp, Unknown
  Bacterial polypeptide expressing nucleotide sequence isolated from the Sargasso Sea
aatgaacttcccaattttaacttctataatattactgccatctttaggggcactttttttattatttcttaaaaatgatttttctaatgattataaaagtagtaaatatatttcaatttttgtcacttttttaaattttttggtttctttatatatttggtatttatttgatacatcaaatccagattttcaatttgttgaagaaagagaatggttaaaaggttttgttaattataaaattggaatagatggaatttcaattttatttattttacttactacatttatcacaccactatgcataatttctgttattaacaccacaaaagaaagacttaaagaattcctaatagcaattcttattatggaaagtttaatgattggtgttttttgttcacttgatttagtaattttttacttattctttgaaggtggattaattccaatgtttttaataattggtatttggggaggtgcaagaagagtttattctgcatttaaattttttttatttacattgttcggttcaattttaatgctagttgcaataatttctatttattggctaaatggtactacagatattgtaaaattatatgagttaagtattgatagtaaatatcaaaatttattatggttagctttttttagctcttttgctgtcaagactcctatgtggccagttcatacttggttgcctgatgctcatgttgaggctccaactgcaggttcagttcttttggcagctattttacttaagatggctggttacggatttataaggttttctataggattatttcctgtagcatcaagattt

SEQ ID NO: 220830 - DNA, 541 bp, Unknown
  Bacterial polypeptide expressing nucleotide sequence isolated from the Sargasso Sea
tttgtttctaatcacaatgctggtgtgttttagtttggtacctttttattgcttgcttctaatcacaatactggtgtgttttagtttggtacctttttactgcttgtttctaatcacaatactggtgtggtttagtttggtacctttttattgcttgcttctaatcacaatactggtgtgttttagtttggtacctttttattgcttgtttctaatcacagcgctggtgtgttttagtttggtacctttttattgcttgtttctaatcacaatgctggtgtgttttaatttggtacctttttactgcttgtttctaatcacaatactggtgtgttttagtttggtacctttttattgcttgtttctaatcacaatgctggtgtgttttagtttagtacctttttattgcttgcttctaatcacaatactggtgtgttttagtttggtacctttttattgcttgtttctaatcacagtgctggtgtgttttgctgggtggcttttactgtttgattctaatcacaatactggtgtgttttag

SEQ ID NO: 220831 - DNA, 430 bp, Unknown
  Bacterial polypeptide expressing nucleotide sequence isolated from the Sargasso Sea
atgtttagctataaattacttttctttcttccattaatttcaacaatttttacatatccttttggtgttctgctaggtgataaaactgctcaatatttttcatcaacgctaatatctattgcagctattttaagctggtttttgtttattagtttttcaatgtctccctctccagaaattatcattcctgtattagagtggtttcttgtttcgggtcagttttttaattggggaatttcagttaactctttaacacttttaatgttaacacttgttcttactgtatctgctttagtccatatatattcaattgaatacatggcacatgacaattcaaaagtaagatttatgacttacctgagtttatttacattttgtatggtagctttagttgtaagtgataatttaattcaattattttttggatggg

SEQ ID NO: 220832 - DNA, 727 bp, Unknown
  Bacterial polypeptide expressing nucleotide sequence isolated from the Sargasso Sea
atgaactttccgattttatcgtccttaattttgctacctacaataggtgctttatttatattattcacaaaatcatcaagtataaaatatcaaagttccaaatatgtagctttatttatttctttagctaattttttattatctttatatctttggtatgtctttgacaaaaattcagtagactttcagtttgtagaaaatagagaatggttatcaggatttataaattataaagttggaatagatggtatttcaattttatttgtaatattaacaactttcataactccaatttgcattatttcagttaatgctacaattacaaataggcttaaggatttcttaattgccatattaataatggaaacatttatgattggtgttttctgctcacttgatctagtagtattttatttattttttgaggcaggtcttataccaatgtttttaataattggtatttggggtggagaaagaagagtctattcggcttttaaattttttctgtacactttattaggatcagttcttatgttggttgctattatttcaatttattggataacaggaaccactgatgttgaaaaactttatgaacttggcataaaggctgaatatcaaaatttattatggttagcatttttcagttcttttgcagttaaaactcctatgtggccagtacatacgtggctgccagatgctcatgtagaagctccaactggtggat

SEQ ID NO: 220833 - DNA, 976 bp, Unknown
  Bacterial polypeptide expressing nucleotide sequence isolated from the Sargasso Sea
aatgggattttggggtggtgaaacagaaagatatgcaaccatcaagtttattctttacacagtttttggatcaatttttattcttgctggaacaatatacacaggagttttgagttatctttcatcaggaaattttgcactcgattttgactctttatccacattatcaataacttcaagtcaatcaaaaatattatttcttctctttacattcggtttcttaattaaagtccctatttttccacttcatacttggttgcctgatgcacacgtagaggccccaacagcagggagtattttacttgctggagtacttttaaaagtcggagcttacggaatattaagagtatcaattccttttttcacagagggatttattgagtatcagttcttaatcgctactttatcagtagttggaattatatacggagcagtagtcgctattgttcaaatagatataaagaaattaattgcatattcttcaataagtcatatgggttttgtaatgcttggtatttcggcaggaagatatttaagtttagagggtgcagtaattcagatgataaatcatggaattacatctggcgcgctattcatgctcgttggctttctttatgagagaagacacacaagacgtatctctgattttggtggattaaaaaaatctatgcctatttatgcaggaatttttctatttacttcgtttgcgtctatagggttgcctggtttaaatggatttgttggagagtttatgattttaatgggaagtttcccaacatttaatgtactttcttcaatagcagcttttggcgttgtgcttgctgcaatatacatgttgtgggcttaccagagaatgtttaatggagagttaacacatgaagacaacaaaaatgtacttgatttaaattcaaaagaaattgtatcagttgctcctttacttatcctgatgtgtgtcataggactatatccaagcttt

SEQ ID NO: 220834 - DNA, 553 bp, Unknown
  Bacterial polypeptide expressing nucleotide sequence isolated from the Sargasso Sea
aatgtcaaaaattgtagaaagtcagtccggaaatttatcaagcactattcctgcaattgattctattgttagatttattccgaattggaatgtgtttcctcaatttttagcttttgggatcttctttgtagcatcgattgcagaggtaaaccgtgcaccttttgatcttgttgaggcagaacaggaattagttggggggtttcatacagaatactcagggtttaggtttgcaatgttttttctagcagagtacataaacatgtttaacatgtgtgctatcaccgcaactttttttcttggtggctggttaggtccaacttttccaggaatttttcctccattattatcggcaatgatgccaacaatatggcttggtcttaaaacagtcggtcttttattcgtctatttttggataagagctacattaccaagattaagatatgatcaactaatggaattaggatggaaaaggttaatccctatatcccttatttggcttctagtttctgcaattgttttaggaattagagattttggattaccttggagttag

SEQ ID NO: 220835 - DNA, 369 bp, Unknown
  Bacterial polypeptide expressing nucleotide sequence isolated from the Sargasso Sea
aatggaaaagcttataatttttttaccgcttttagcttcgataatttctggtttttttggtactaaaattggaaataaagcatctcaagttaccacaagttcatttgtttctttatctgctatcttatctatctacatattttataatgttattagtaatgattattcaaataatattattattgctaaatggatttcttcaggtcttcttgacgtaaattggtcaattaaaatcgatcaaatatcatcagtaatgttggtagtagtaactttggtttctgcagtagttcatatttattcaattggttacatgtcacacgatcctcatcagcctagatttatgtcttacttgtcactatttacatttgc

SEQ ID NO: 220836 - DNA, 751 bp, Unknown
  Bacterial polypeptide expressing nucleotide sequence isolated from the Sargasso Sea
atgaactttccaattttatcatctttaattttacttccaacaataggagccttgtttatattattcacaaaatcatcaagtgataaatatcaaagtgctaaatatgtagcattgtttatttcgttagcaaattttttgttgtctttatacctttggtatatctttgataaaaattcaatagacttccagtttgtcgaaaatagagaatggctatcaggattcataaattataaagttggtatagatggtatttcaattctgtttataatattaacagctttcataactccaatttgcataatttcagtaaacgcaacaataacaaacagacttaaagatttcctaattgccatattaataatggaaacttttatgataggagttttctgttctcttgatttagtagtcttttatttattttttgaggcaggtctaattccaatgtttttaattattggcatttggggaggagaaagaagagtttattcagcttttaaattttttctttacaccttacttgggtctgtacttatgttggttgctattatttcaatttattggatcacaggaaccacagacgtagagagactttatgagattggtattcaatcagagtaccaaaatttattatggctagcttttttcagctcttttgcagtaaaaactcctatgtggccagttcacacatggctacccgatgctcatgtagaagcaccaaccgctggctctgttctactagcagcaattttac

SEQ ID NO: 220837 - DNA, 795 bp, Unknown
  Bacterial polypeptide expressing nucleotide sequence isolated from the Sargasso Sea
taccagatgctcacgttgaagcaccaacagctgggtccgttttgttagcagcaattttattaaaaatggcaggttatggatttattagattttcaataggtttatttcctatagcttcagaaaattttgtcccattagtttatgtgctaagtttggttgcaatagtttacacgtctttagttgctcttatgcaagaggatatgaaaaaattaattgcatattcttctgttgcacacatgggctatgttacgcttggtatttttacagtaacccaacaaggtttagaaggtggtattatccagatgattagtcatggattagtttcagcagcattatttctgtgtgttggtgtagtttacgacaggatgcattctcgtttaataaaaacttatggtggacttgcatctataatgcctaagtatgctatatttttcatggtatttacgttagccgcggtaggactaccaggtacaagtgggtttgttggagaatttctaattcttatgggagtttttaaaaaaagtttcttagtagctactattgctagtttaggtgtgattttagcggtcgcttatatgctttggttatataaaagggtaatatttggagaacttattaataaagatttggtaaaaatgttagatttaaataaatccgaaatttttattttaacatgtttagctataccaactttattttttggattttatccggaaactttattaaatactatagatgtatctattagcaatttaatagacacctacaattacaaattaagcttaagaaaataaa

SEQ ID NO: 220838 - DNA, 892 bp, Unknown
  Bacterial polypeptide expressing nucleotide sequence isolated from the Sargasso Sea
atttattgggattacagggacaactgacatagttcaactttacgaaattggtattgatgttaaatatcaaaatcttttgtggttagcattttttagctcatttgctgttaaaacacctatgtggccagttcatacatggttacccgatgcacacgttgaggctccgactgctggatctgttttgttagctgctatattattaaagatggctggttatggttttataagattttctttaggccttttcccaattgcatctgaagtatttacaccattaatttatactttgagtgttatagcaatcatatttacctcacttatagctttaatgcaggaagatatgaaaaaattaattgcttattcatcagttgcacatatgggttttgtaactttgggtatattcactttgcaacagcagggaattgaaggaagtataattcaaatgattagccacggattagtttcagcagcattatttttaactgttggtgtagtttatgacagaatgcattctagattgataagtacatatggtggattagtttctgtaattccaaaatattcaatattgtttatgttatttgctttggcatctctaggtttacctggaaccagtggttttatcggtgagtttttaatattaatgggagcttttaaagataattttttagtggcagttatagcaagtattggggtgattttaggagccgcatacatgttatggctttataaaagagtagtatttggaaaattaataaacgaagatcttaaaaaaattatagatttaaatagatctgaatactttattttaagttgtttagctgcaccaatattattttttggtttttatcctgatccattaataaacactattgaaagtttctgtgactga

SEQ ID NO: 220839 - DNA, 618 bp, Unknown
  Bacterial polypeptide expressing nucleotide sequence isolated from the Sargasso Sea
gatggaaaaaataataatttttttacctttattagctgcattagtttctggtttttttggagggaaaattggaaatagagcctctcagataattactagttcttttgtttctatatctgccttattatctatttatattttttatgatgtaataattaacgattattcaaataatattttaattgctaaatggatttcctctggattacttgatgtaaattggtctataaaaattgatcagttatcggcagttatgcttgtagtagttactttagtctctgcaattgttcatatttattcaattggttatatgtatcatgatccacatcagccaaggttcatgtcttacttgtctttatttacatttgctatgctagtgctagtgacttctgataattttcttcaattattttttggttgggaaggtgttggtctatgttcttattttttaattggtttttggtttaaaaaacccaaagccaatgctgctgctattaaagcatttattgtaaatagagttggtgattttggttttgctcttggaatatttttagtcttctatatttttggtacagttaactatgaagaagttttttaccaggtatcaatctataaaga

SEQ ID NO: 220840 - DNA, 568 bp, Unknown
  Bacterial polypeptide expressing nucleotide sequence isolated from the Sargasso Sea
atggaatttgaatatctaattgtttttttaccactagtagctgcgattatctcaggattttttggaaaatttttaggttcaagaaattcagaaattttaactagcttgttcgtttcaatttcttcaattttttcttttttaattttttataaagtttttaatgatggctacacaaacaatttagaaatacttacttggataaactcaggatcatttaatgttaattggtcaattaaaatagatgctctttcatctgtaatgttagttgttgtaacattagtttcctcaattgttcacatatactcaattggatatatgtcacatgatccacataaacaacgtttcatggcttacttatctttatttacattttcaatgttaatgcttgttacttcagataattttttacagcttttttttggatgggaaggtgtgggtctatgttcgtattttttaataggtttttggtttaaaaaagaaagtgccaatgcagctgctattaaagcatttgttgttaatcatgtaggggattttggatttgcattaggaatatttttaatattttatt

SEQ ID NO: 220841 - DNA, 526 bp, Unknown
  Bacterial polypeptide expressing nucleotide sequence isolated from the Sargasso Sea
atggaaaaactaataatttttttaccccttatagcatctataatatctggtttttttggaaaattgattggaaacagatcatctcaaataattacaagtttgtttgtttccatatcagctttgctatctatttttgtattttatgaggttattaacaataactattctgataatattgtaattgctaaatggattgcctcagggaatcttaatgttaattggtcaataaaaattgatcaaatatcagcagtaatgcttgtagttgtgactttagtttctgctttagtacatatctattcaattggttatatgtcacaagatcctcaccaaccacggtttatgtcttacttgtcactatttactttcgctatgttggtattagtaacttctgataattttttacagttgttttttggatgggaaggcgtcggactttgttcttattttttaattggtttttggtttaaaaaaccaactgctaatgcagcagcaataaaagcatttattgtaaacagaataggagact

SEQ ID NO: 220842 - DNA, 916 bp, Unknown
  Bacterial polypeptide expressing nucleotide sequence isolated from the Sargasso Sea
gatagctgacaatgttgtggcgaatgccgtttctcggacagcacaactttggatatttggaggcatgtttttgggctttggaattaaagttcctatgttcccattccatacatggttgcctgatgctcataccgaagctccaactgttggatctgtaatacttgcagcagtattacttaaacttggaacttatggatttgtgagaatcgcaataccattactccccgaagcggcagtcgaatgggcaccttggataggactactggcagtaataggaatcatttatggtgctttctgttgcttggctcaaacagacatgaaacgattaattgcattttcttcggtcgcccatatgggatttgtaatgctaggaatttcaactctcacggactttgggataaatgcagcaattatgggcatggttgcccatggccttataacagggatgcttttcttcctagccggttctatgaaagagcgttatcacactttagaaatcaagaggttaggagggttgttagttcaagctcctaaaatgggttggattctaggattttgtgcgatggcatctttaggtctgccagggttagcaggattctggggggaatttccggcaatactttctgcttataatcctgcgaatgggttacccgttgaaacctttagaactttcatggttgtcgcagcattgggcactgttcttgctgctggttaccttttgtggttgcttcagagagcagcattcggcacgccgaaagatgaatttgctgaagatccaaatatccatgacacaacaaaaactgagtggatagcttgggctcctttactcgcattgatacttgcattaggtatctatccaaatcttgtttttagaactaccgatggagcggttgatgcatctttaactccgtgtttg

SEQ ID NO: 220843 - DNA, 856 bp, Unknown
  Bacterial polypeptide expressing nucleotide sequence isolated from the Sargasso Sea
attgtggttagcattttttagttcatttgcagttaaaacacctatgtggccagttcatacatggttacctgatgcacacgttgaggctcccacagcaggatctgtattactcgcagcgattttgttaaagatggctggatatggttttataagattttctttaggtctcttcccggtggcatcagaggtatttacacctttaatttacaccttgagcgttattgcaatcatatttacttcattgatagctttaatgcaggaagatatgaaaaagttaattgcatattcttcagttgcgcatatgggctttgtaactttgggtatatttactttgcaacaacaaggaattgagggaagtataattcaaatgataagccatggcttagtttcagcagcattatttttaactgttggcgttgtgtatgacagaatgcattctagattgataagtacatatggtggactagtttctgtaattccaaaatattcaattttgttcatgttatttgctttagcatcacttggtttacctggaaccagtggttttattggtgagtttttaatattaatgggagctttcaaggataactttttagtagctgttatagcaagtattggagtaattttaggagctgcatacatgttatggctttataaaagagtagtttttggaaaattacttaatgaagatcttaaaaaaattttagatttaaatagatctgaatattttattttatcttgtttagctgcaccaatcttattttttggtttttatcctgacccattaatcaacacaattgaagtttctgttactgatttaattaatacgcataacacaaatatagttagtaagtaa

SEQ ID NO: 220844 - DNA, 718 bp, Unknown
  Bacterial polypeptide expressing nucleotide sequence isolated from the Sargasso Sea
atgaactttccaattttatcatctttaattttgctaccgactttaggagctttatttatattattcacaaaatcatcaaatgaaaaatatcaaagctctaaatatgtagctttatttatttctttagcaaattttttattatctttatatctttggtatgtttttgataaaaattcagtagactttcagtttgtagaaaatagagaatggttatcaggatttataaattataaagttggaatagatggtatttcaattttatttattatattaacaactttcataactccaatttgtattatttcagttaatgctacaattacaaatagacttaaggatttcttaattgctatattaattatggaaacatttatgattggtgttttctgctcacttgatctagtagtattttatttattttttgaggcaggtcttataccaatgtttttaataattggtatttggggtggagaaagaagagtttactcggcttttaaattttttctttacactttattgggatcagttcttatgttggttgccattattgcaatttattggataacaggaaccactgatgttgaaaaactttatgaacttggtattcaggttgaatatcaaaatttattatggctagcattttttagttcttttgcagtaaaaacccccatgtggccggtacatacttggctgcctgatgctcatgtagaagctccaa

SEQ ID NO: 220845 - DNA, 919 bp, Unknown
  Bacterial polypeptide expressing nucleotide sequence isolated from the Sargasso Sea
aggatttttttaatgcccatattaataatggaaacatttatgattggtgttttctgctcacttgatctagtagtattttatttattttttgaggcaggacttataccaatgtttttaataattggtatttggggtggagaaagaagagtctactctgcttttaaattttttctgtacactttattaggatcagttcttatgttggttgctattatttcaatttattggataacaggaaccactgatgttgaaaaactttatgaacttggcataaaggctgaatatcaaaatttattatggttagcatttttaagttcttttgcagttaaaactcctatgtggccagtgcatacctggctgccagatgctcatgtagaagctccaactgttggatctgtattgctagcagcaatattgcttaaaatggctggatatggatttattagattttcattggggttatttcctattgcgtcagaaaattttacaatgttagtttatgccttaagtttaatagcaattatttatacatctcttgtagctttgatgcaggaagatatgaaaaaactcatagcatactcgtctgttgcgcatatggggtttgtaacattaggtatctttacaatgactcaacaaggtatcgaaggaagtattttccaaatgattagtcatggacttgtatcagctgcacttttcttaagtgttggagttgtttatgaaaggcatcacacaaggttaattaataaatatgggggcttagtctctataatgccaagatatgcaattgtttttatggtgttcacactaggagctttaggattgcctggaacaacaggttttatcggagaatttttaattttgatgggtgcatttgagaaaaatatcttagttgcaatgattgcaagtttaggggtaattt

SEQ ID NO: 220846 - DNA, 682 bp, Unknown
  Bacterial polypeptide expressing nucleotide sequence isolated from the Sargasso Sea
gaaggttttataaactataaagtcggaatagatggtatttctatactatttataattttaacaacatttattacatttctttgtgttatttctgtaaattctacagttcaaaatagacttaaagattttcttcttgcaatactgtttatggaaacaatgatgattggagttttttgttcacttgacctagttatcttttatttattttttgaagcaggattaatcccaatgtttttaataataggaatatggggtggacagagaagagtgtactcagcatttaaatttttcttatacacattattaggttctgtacttatgttagtagcaattatttctatatactggatgacaggaactactgatgtaattgaattatatcaaatagggattgatccaagatatcagaatttactttggttagcattttttagttcttttgctgtaaaaactccaatgtggccagttcatacatggcttccagatgctcatgttgaagcccctacagttggctctgttttattagcagctattttattaaaaatggctggttatggttttattagattttcagttggcttatttccaattgcctctgaatattttgtaccacttgtttttggactaagtctcattgcaattttatatacttcatttgtagccttaatgcaggaagaatgaa

SEQ ID NO: 220847 - DNA, 631 bp, Unknown
  Bacterial polypeptide expressing nucleotide sequence isolated from the Sargasso Sea
atggtgggctatcaatttgaagagcaagttgaatggatcgcaggtagcggcatatcctatcatctgggtgtggatggcatatcgatgccctttattctgctatcaacatttttaacaccgctttcgatattagcgagctggcattccattaaaaatagaatacgtgaatttatgatagcattcctcgttttagaaacaatgatggttggaatgtttgcatcactcgatatgatgatgttctatttgttttttgaaggcgtattaattccgatgtttttgatcatcggaatttggggtgggccgcggcgcgtatatgctgcttttaaattctttttatacacgcttgcaggctccgttttgatgctcgttggtattatggttatgtatctgcaagctggaacaactgatattccagttctttcagattttaactttccgcaagagctacaatactggctgtttattggtttctttgcctcatttgctgtaaaagtgcccatgtggcctgttcatacatggctgcctgatgcgcatgtggaggccccaacggcggggtcaatgatactggctggtgtgttattaaaaatgggtgggtatggttttattcgcttctcattaccgatgttttcag

SEQ ID NO: 220848 - DNA, 523 bp, Unknown
  Bacterial polypeptide expressing nucleotide sequence isolated from the Sargasso Sea
atggaaaaacttataatttttttacctttattagcatcaattatctcaggattttttggaaagataattggaaataaagcttctcaattaattacaagtttttttgtttctgtatcagctttgttatctatttatctattttatgatgtaataaacaatagttatacagacaacattataattgctaaatggataacctcaggacttttagatgttaattggtctataaaaattgatcagttgtctgcggtaatgcttgttgttgtaactttagtttcagcaatagtacatgtttattccataggttatatgtctcacgatcctcaccaaccaagattcatgtcttatttgtccttgtttacttttgctatgcttgtattagtaacttcagataactttcttcaattgttttttggatgggaaggcgttggcttatgttcatattttttaataggcttttggtttaaaaagcctacagctaacgcagctgctattaaggcatttatagtaaatagagtaggtg

SEQ ID NO: 220849 - DNA, 828 bp, Unknown
  Bacterial polypeptide expressing nucleotide sequence isolated from the Sargasso Sea
cttcctctatacattcctcggctcagtctttatgttgatagcaatcatctatctgtatattcaaactggatcttattcgatctttgatttttataatcttgacctatctagaactgagcaaattcttatattcctagcattcttgtttgcttttgccgttaagattccaatgtggccagttcatacctggctacctgatgctcacgttgaggcacctacaggaggatcagtgattcttgcagcgatactgcttaaaatgggtggctatggtttacttagattcagtttaccaatcacgccagatgcatcgagtgaactgtcaatctttatggttgtgctatctcttattgcaatcatctacataggtatggtcgcactgtctcaaacagatatgaaaaaactcattgcttattcatcggttgctcacatggggtttgtgacactcggtacttttgtcgttttcctgaatcatgaaattgcttctctagacaatatgaatttagcaatcagtggtgcaatgatacaaatgatctcacacggattaatatcgggtgctttattcctatgcatcggtgtgatgtatgacagaattcacagcaggcaaatagaagattatggcggtattgctttaacgatgccacgttttgcaggtttgatggtcttttttgcacttgccaatgcagctctgcctgggacgtcagggtttgttggggaagttttggtcattttagcgagcctgaaagttaatttctggatcgcactcttatcagctacaaccttagtcattggagcggcatacacattgtggatgatcaagcgtgttatttt

SEQ ID NO: 220850 - DNA, 123 bp, Unknown
  Bacterial polypeptide expressing nucleotide sequence isolated from the Sargasso Sea
cttgggcaatatcccttggtaaaataggagtatttggatttacatcaatgatgattttcttattcattctaactattggttttatctatgaatggaaaaaaggagcattagactgggaataaa

SEQ ID NO: 220851 - DNA, 856 bp, Unknown
  Bacterial polypeptide expressing nucleotide sequence isolated from the Sargasso Sea
ttatatacactgttaggatctgttttaatgttggttgcaataatttcaatttattggattacaggaacaaccgatgttgttcaactatatgaaattggcattgatgttaaatatcaaaatctattgtggttagcattttttagttcatttgctgttaaaacacctatgtggccagttcatacatggttacctgatgcacatgttgaggctcccactgctggatctgtattgttagcagcaattttattaaaaatggcaggttatggtttcatcagattttctttaggtcttttcccaattgcatctgaggtatttacaccactaatctataccttgagtgttatagcaatcatatttacttcacttatagctttaatgcaggaagatatgaaaaagttaatagcttattcatcagttgctcatatggggtttgtaactttgggtatattcactttgcaacaacagggaattgaaggaagtataattcaaatgattagccatggattggtttcagcagcattatttttaactgttggagtagtttatgacagaatgcattctagattgataagtacttatggtggactagtttctgttattccaaaatattcaatattgttcatgttatttgctttagcatcccttggcctacctggcactagtggttttattggtgagtttttaatattaatgggtgtttttaaagataattttttagtagctgttatagcaagtcttggagtgattttaggggctgcatatatgttatggctatacaaaagggtagtatttggaaaacttatcaacgaagatcttaaaaaaatattagatttaaatagatctgagtattttattc

SEQ ID NO: 220852 - DNA, 814 bp, Unknown
  Bacterial polypeptide expressing nucleotide sequence isolated from the Sargasso Sea
atgtggccagtacatacttggttgccagatgctcacgttgaagctccaactgcaggatctgtattattggcagcaatattattaaagatggcaggttatggttttataagattttctctaggtttatttcctgttgcttcagaagtttttacacccttaatttacactttgagtgttatagcaattatattcacttctttcattgctctaatgcaggaggatatgaaaaagttaatagcttattcttctgttgctcatatgggatttgtgacattaggaatatttactcttcaacaacaaggaattgaaggaagtattattcaaatgattagtcatggtttagtttcagctgcacttttcttatgtgttggtgttgtctacgatcggatgcattcaaggatgatcaattcgtatggaggaatagttacaataatacctaaatattcaattttatttatgttgtttacattggcagcattgggattaccggggacaagtggatttataggagaatttttaattttaatgggtgcttttaaagataatttcctagtagctgtaattgctagtttaggagtaatacttggagctgcatatatgctttggttgtacaaaagagttgtttttggaaagctagttaacgaagatcttaagaagatgtttgatttaaatagatcggaatatctgattttatcttgtctagcatttccaactttattcttcggattttatccagatccattgataaatactatagaagtttctgtgaccgatctaattaatatgcataacacaaatatagctagtaaataat

SEQ ID NO: 220853 - DNA, 910 bp, Unknown
  Bacterial polypeptide expressing nucleotide sequence isolated from the Sargasso Sea
aatattcagctttcacaagaagcgcccttagggctaacagcacaaaaactaattttcatagcttttttcttggcgtttgcagtcaaaattcctatgtggccggtacatacatggttaccggatgctcatgttgaagcaccaactggtggctcggtcatactagctgcgattatgctgaagatggggggttatggctttttacgatttagtttgccgattgcccccgatgcaagtctttattttgctaatacaatgattctactttcactaattgctatcgtttatattggttttgtcgcgcttgtacaggaggatatgaaaaaactaattgcttattcttcgatttcacatatgggttttgtcacgttaggtttttttattcctttcgggattattgcagcaacaaactcaaatgctggtgctgtaatgggaatggaaggagcaatgatgcaaatgatttctcatgggtttatttcagctgctttatttttatgtgttggtgtgatgtatgacagattacatagtcgaatgattaaagattatggcggcgtggttaatagtatgccgtattttgctgcttttatgatgttatttgcaatggcaaattccgggttacctggaacatccggttttgttggtgaatttttagtaatactaagcagttttaaattgaatttttggattgcattcactgctgcattaacactaatactaggagctgcttataccttatggatgtataaacgagttatatttggtgaagctatcagagaagaagtctctgaattaaaagatattgatgcaagggaaggatttattctgtttttacttgcgggtgtcatattattatttggtgtttggcatgcaccactttttgatgttatgcatgtgacaatacaacagcttattg

SEQ ID NO: 220854 - DNA, 909 bp, Unknown
  Bacterial polypeptide expressing nucleotide sequence isolated from the Sargasso Sea
agattctttggctgcgcaggctgtggcaagccagaaactacaacaagcggagcgagaagcatctgaatctcaggcgaaagccaagcaggttcaacttgaaaagcaggagatggagaagactgcgcgttccgagaaagatgatgctgaaaaggctgaagccaaggctgttgctgagcagcggaatgcagaggctgtgcagcgtcagggtatccttgcgaagtcagctgcaggaaaagagatgctgcgcgctaagtcaatggaagcaaatgcacgtgcggcagagctcgaggcgcagcaatctcagaagtcggcttctcgcacacaagcaaatgcacgtgcagcagagctcgaggcgcagcattctcagaagtcggcttctcgcacacaagctgcagccactgcagagatggctgatgcgaagcagcagcaagccaacgcagccatcttgcagcaaaaggccaagcacgccgaagcagctgctcagcaaagtcaacacgattcagctcagatcaaggccgttgctcagaaggaggagaatgcagccaggcagcaggaagcagatgcggcgtcgatcaagaaagattctttggctgcgcaggctgtggcaagccagaaactacaacaagcggagcgagaagcatctgaatctcaggcgaaagccaagcaggttcaacttgaaaagcaggagatggagaagactgcgcgttccgagaaagatgatgctgaaaaggctgaagccaaggctgttgctgagcagcggaatgcagaggctgtgcagcgtcagggtatccttgcgaagtcagctgcaggaaaagagatgctgcgcgctaagtcaatggaagcaaatgcacgtgcggcagagctcgaggcgcagcaatctcagaagtcggcttctcgcacacaagcaaa

SEQ ID NO: 220855 - DNA, 403 bp, Unknown
  Bacterial polypeptide expressing nucleotide sequence isolated from the Sargasso Sea
ttttttattagcgcggttgctgaaactaatcgaacaccttttgatattcctgaagctgaatctgagcttgttgctggttggatgactgagtattctggttttcgttgggcagtattctttttaagcgagtatgcaaacatgttcgttgttagtggtcttgcagcagtaggctttctagggggatggctgagtccgatcccagggttatttaattcaccaatatggggactattttggtttacaggaaaaattattttcttaatctttattatgatgtggtttcgatggacttttccaaggcttcgcgtagatcaattaatgcatgtttgctggaaggtctttataccgatcgcaatgtttaatatttttggagtaggaatatggaaattaattatagggtaaa

SEQ ID NO: 220856 - DNA, 195 bp, Unknown
  Bacterial polypeptide expressing nucleotide sequence isolated from the Sargasso Sea
actttatgaaattggtattgatgttaaatatcaaaatcttttatggctagcattcttcatctcatttgcggttaaaacacctatgtggcctgttcatacatggttacccgatgcacacgttgaggctcctactgctggatctgttttgttagctgctatattattaaagatggctggatatggttttataagatt

SEQ ID NO: 220857 - DNA, 795 bp, Unknown
  Bacterial polypeptide expressing nucleotide sequence isolated from the Sargasso Sea
caactttatgagtcaggtattgatgtaaaatatcaaaatcttttatggctagccttttttagttcatttgctgtaaaaactcccatgtggccagttcatacttggcttccagatgcgcacgttgaagctccaacagctggatcagttttattagccgcaattttgcttaagatggcaggatatggatttataagattttctttagggttatttcctttcgcctcagaagtttttactcctttaatttacacattgagtgttattgcaattatttttacgtcgttaatagctttaatgcaagaagacatgaaaaaattaatagcatattcatctgtggcccatatgggatttgttacattaggaatatttactattcaacaacaaggtattgaaggaagtataattcaaatgataagtcacggcctcgtatccgcagctttatttttatgtgttggtgtggtttatgatagaatgcattctagattgatcacaacttatggaggtgttgtaactattattcccaaatatgcaattttatttatgatttttactttagctgctttaggattacccgggacaagtggatttgtaggagagtttttaattttaatggctgcttttaaagataattttttagtagcagtgttagctagtttaggagttattcttggagctgcatatatgctttggttgtataaaagagttatatttgggaaattaattaattctgagttaaaaaaaatgattgatctaaataagtcagagacgtttacgcttacatgtttagctattcca

SEQ ID NO: 220858 - DNA, 844 bp, Unknown
  Bacterial polypeptide expressing nucleotide sequence isolated from the Sargasso Sea
tatttatcatcttttatttttattaccattaattcggagctcttttttattttttttgtaaagtcttcaagtggcaaataccaagcaagtaagtatattgcattattcatagcaatcgctaattttatactttcgatttatttatggtatttgttcgataaagattcaacaaaattccaatttgttgaaaatagagaatggttgttgggttttgttaactataaagttggcatagatggtatttcaatattatttattattttaacaacctttattacttcaatttgtataattttagttaactcaactattaaaaaaaaattaaaagattttttgattgcaatattagttatggaaacattcatgattggtgttttctgttctcttgatttattagttttttatttattttttgaagcaggattaataccgatgtttttaattattggtatttggggaggtaaaagaagggtttactctgcatttaaattttttctctatacattattaggctcagtattaatgctagttgcaatcatttctatttattggatcacaggaacaacagatgttgaaaaattatatgaaattggaatagacactaagtatcaaaatttattatggttggccttcttcagttcatttgcagttaaaactccaatgtggccagtgcacacatggttaccggatgctcatgttgaagcaccaactgctgggtctgtattattagctgctatattacttaaaatggctggatatggttttataagattttctcttggactgtttcctatagcttcagaatattttgtacctttggtatattttttgagcttagtagcaa

SEQ ID NO: 220859 - DNA, 839 bp, Unknown
  Bacterial polypeptide expressing nucleotide sequence isolated from the Sargasso Sea
tttgctacctacaataggtgctttatttatattattcacaaaatcatcaagtggaaaatatcaaagttccaaatatgtagctttatttatttctttagcaaattttttattatctttatatctttggtatgtttttgataaaaattcagtagactttcagtttgtagaaaatagagaatggctttcaggatttataaattataaagttggaatagatggtatttcaattttatttgtaatattaacaacttttataactccaatttgcattatttcagttaatgctaccataaaaaatagacttaaggatttcttaattgccatattaataatggaaacatttatgattggtgttttctgctcacttgatctagtagtattttatttattttttgaggcaggtcttataccgatgtttttaataattggtatttggggcggagaaagaagagtctattcggcttttaaattttttctgtacactttattaggatcagttcttatgttggttgctattatttcaatttattggataacaggaaccactgatgttgaaaaactttatgaacttggcattaatgctgaatatcaaaatttattatggttagcttttttcagttcttttgcagttaaaactcctatgtggccagtacatacatggctgccagatgctcatgtagaagctccaactgttggatctgtattactagcagcaatattgcttaaaatggctggatatggatttattagattttcgataggattatttcctatagcttctgaaaatttcacaatgttagtttatatcttgagtttaatttgcattatttatacatctc

SEQ ID NO: 220860 - DNA, 110 bp, Unknown
  Bacterial polypeptide expressing nucleotide sequence isolated from the Sargasso Sea
aaccgcaatttttgccgcttcagttgctttagtgcaaaatgatataaaaaagattgtagcatactcaacttgtagtcagctaggttacatgttttcgcagcaggggtagg

SEQ ID NO: 220861 - DNA, 163 bp, Unknown
  Bacterial polypeptide expressing nucleotide sequence isolated from the Sargasso Sea
tttatttattatatttgatctagaaattgcatttttgtttccttgggcaatttcattaggcaaaattggtttgtttggatttatatcaatgatgatatttttatttatattaacaattggatttatatatgagtggaaaaaaggagctttagattgggaataa

SEQ ID NO: 220862 - DNA, 880 bp, Unknown
  Bacterial polypeptide expressing nucleotide sequence isolated from the Sargasso Sea
catgaattatgatatattaattacagggttaataatcgttgcccaaatacttgctgttgttgtgccagttttaatatctgtagcttttttggtttatgctgaaagaaaagttttagctctaatacaattaagaagaggcccaaatatagtagggccttttgggatattacaaagttttgcagatgcattaaaacttattactaaagaaaatattatacctagtggatcaaataaaattgtatttatcttagcgccaataataacaatggtacttagcttagcgggctgggcagtaataccttttgctccaggatgggtaatctctgatattaatgtgggtataatgtatctttttgcagtatcatctcttggagtatacggaataataatggctggttgggctagtaactctcaatatccttttttaggtgcattaagatctgctgctcaaatggtttcatatgaagtatctataggatttgtaataattacagtattattatgtgtaggctctttaaatttatcaaagatagttttagctcagcagactgtatggtttgcaattccattattgcctatgttcatcattttttttatttctgctttagctgaaacaaatagattaccttttgatcttcctgaagacgaatcaacacttgttgcaggattttttactgaatattcatctgcttcatttgtattattttttttaggtgaatatgcgagtatgattttaatgtcttctatgactgtcattctttttttaggcggatggcttcccccatttgatgtatacccattaaatgttgttcctggagtaatctggtttactgtgaaagtaatatttatattgtttttatttatttgggttagaggaact

SEQ ID NO: 220863 - DNA, 770 bp, Unknown
  Bacterial polypeptide expressing nucleotide sequence isolated from the Sargasso Sea
tgctttgttcacgaccatagtaaattttttaatttcattttatctgtggatttcttttgaccaatcaacttctaattttcaatttatagaagatagaacatggattgaaggttttattaattataaagttggtgttgatggtatttcaattttgtttattattttaactacattcataactccgttatgcattatatctgtaaataattccgtcaaaaatagattaagagattttttaattgcaatcctaatcatggaaagtttcatgattggtgttttttgtgcacttgatttagttgtattctatttattttttgaagcaggattaattcctatgtttttaattattggaatttggggtggaccaaaaagagtttattcagcatttaaattctttttatacacattactaggttctgttttaatgttagttgcaataatttctatttattggattacaggtacaacagatgttattcagctttatgaacttggtatagatgctaaatatcaaaatcttttatggctagcatttttcagctcctttgcagttaaaacccctatgtggccagtacatacttggttgccagatgctcacgttgaagctccaactgcaggatctgtattgttagcagcgatcttattaaagatggcaggttatggttttatcaggttttctcttggtttatttcctgttgcttcagaagtctttacacctttaatttacactttgagtgttatagcaattatattcacttctttcattgctc

SEQ ID NO: 220864 - DNA, 889 bp, Unknown
  Bacterial polypeptide expressing nucleotide sequence isolated from the Sargasso Sea
ttttttttatatacactgctaggatctgttttaatgctagtagcaattatttctatttattggatctcaggaacaacagatgttgaaaaattatatgaaattggaatagactcaaagtatcaaaatttattatggttagcattctttagttcttttgcggtaaaaactcctatgtggcctgtccatacatggttaccagatgcacacgttgaagcacctactgcaggatcagtacttttggctgctatactgcttaaaatggcaggatatggatttattagattttcattaggactttttcctatagcttcagaatattttgtacctttaatatattttttaagtttggttgcaataatttacacttctttagttgctttgatgcaagaagatatgaaaaaactcatagcttattcttcggttgcacatatgggttttgttacgcttggaatatttacaatgacacaacaaggtattgaaggaagtatattccagatgattagtcatggtcttgtttctgcagcattattcttatccgtaggagttctttatgaaagacaccatacaagattaattaataaatatggtggactggttcaaataatgccaaaatatgcaatagtactgatggtatttactctaggttcaataggacttccgggcacaagtggttttattggggaatttttaatattaattggagcatttaaaaaaagttttttagtagccacaattgctagcctaggtgttattttaggtgcagcatacatgttgtggttatacaagagaattatttttggagaaataataaatagtgagttaaagtcatctttagacctaaaaaaatttgaaatattaattctttttagtttagtagttcctataattt

SEQ ID NO: 220865 - DNA, 358 bp, Unknown
  Bacterial polypeptide expressing nucleotide sequence isolated from the Sargasso Sea
aatggaaatttcaattttagcattaccattaattgcttcaattatatcaggatttttcggtaaatttataggggacagaaattcagagatagttacaagtttattagtatctatatcagctgtcctttcagcaattgtattttatgaagtgatttttaaccaatacgaggaaaatatcaaaattgctacatggattaattctggatcattagaggtaaactggtcaatgaagattgatgcattatcatcagtaatgctagtagtcgtaacttttatttccgcattggtacatatctactcaattggatacatgtcccatgaccctcataaaccaagatttatggcctacttatcgcta

SEQ ID NO: 220866 - DNA, 904 bp, Unknown
  Bacterial polypeptide expressing nucleotide sequence isolated from the Sargasso Sea
atggactttccaatactttcatcattaatcttattaccaactattggagctttttttattttttttgtcaaatcctctaataaaacttatcaagccagtaagtacatagctttatttattgctctcgctaattttataatttcattatatttatggtatgaatttgataattctacatcagaatttcagtttactgaaaatagagtttggattaaaaattttataaattataaagttggagtagatggaatctcaattttatttatacttcttacaacttttgtttcaactatttgtataataactgttaattatacagtttctactagattaaaagattttcttattgcaattcttttaatggcgtctttaatgattggagttttttgttcactagatttagtaatattttatcttttctttgaaggtggactaataccaatgtttttaattattggtatttggggaggtaaaagaagagtttattcagcatttaaattttttctttatacactattaggatcagttctaatgttaattgcaataatatcaatttattggttttccggaaccactgacattgaaaaattatattcaattggaatagaagcaaaatatcaaaatcttctatggttagctttttttagttcttttgctgttaaaactcctatgtggccagttcacacatggcttccggatgcgcacgttgaagctccaactgcaggatctgttttactggcagcaatactattaaaaatggctggatatggatttataagattttcacttggtttatttccattagcctctgattattttgttcctttaatatattttttaagtctagttgcgataatttatacttcattagttgctcttatgcaggaggatagaaaaaattaat

SEQ ID NO: 220867 - DNA, 444 bp, Unknown
  Bacterial polypeptide expressing nucleotide sequence isolated from the Sargasso Sea
aatggagtacgcggttatttttttaccgttgttaggaacaataattggatatttatctaaatactttggcgatattgcgtcgcaattattaactacacttacagtttgtatagcagccatattatcattagcaattttttacaatggtttagtacatgataattatggaaattatataattctcgagtggattaagtcaggtgattttcagatcaattggtcaataaatatcgatcctttaagttcaataatgctagttatagttacacttgtttctgctttagttcatatttattcaattggttacatgaatcatgacccgtttaaaccacgatttatgtcttacctttcattatttacttttgccatgttggttttggttgtatcggataatttcatacaactattttttggatgggaaggagttggcttgtcatcttatct

SEQ ID NO: 220868 - DNA, 842 bp, Unknown
  Bacterial polypeptide expressing nucleotide sequence isolated from the Sargasso Sea
tgaggcaccaacggcagggtcgatgattttggcgggtattcttttaaaactgggtggatacggtatgctgcgtctctccctaccgatttttcccgaggcatctttttattttgcgccgtatgtatttttcctcagcattgtggccattttatatacatcccttgtcgcacttgtgcaaaaggatgtaaaaaaactgatcgcatactcctccatcgcgcatatgggctttgtcacattgggtatgtttacggtgacagcacttggcattaatggcagcatctttcaaatgattagccacggccttgtttcagcgggtctctttttctgtgtgggtgttgtctatgagcggtttcacacccgcgtgattgcgcattacggggggcttgctgcgaaaatgccgcgttatgcgacgctgttcttaattttgaccatggcctccattggtgttccgggaacaagtggctttttgggcgagtttttcgtgattttgggcacattttcaattgcgcccatgtgggctgtgctcgctgcactcggtgtaatttttagtgcggcttacggtctattgttgtatcgccgcatgatgtttgacaaactcaatacagagcatctttctcttaaaaatatgtttgacctaaaggcatccgaaatgtccgtgcttcttttactcactgtgcccgctattctatttggtttatatccaaaacccataacggagctcatttcgccctatacagagcatttgatggcgcatgtccataaaaaaacacaagatacacacagcggttccgcgtacatgtcttccacgtcgacgcacagggggggatcacacgatgcatagt

SEQ ID NO: 220869 - DNA, 517 bp, Unknown
  Bacterial polypeptide expressing nucleotide sequence isolated from the Sargasso Sea
atgtacgcgctcgccatattcctgcctctgatcggcgccattctcgccggtttcggcggccgctggctcggagatcgcggcgcccagatcgttaccagcggctgtatgctgctatcggcggttcttggctgcattattctggctgaggtcggccttggcggaaacccgcaaacggtcgagcttttctcgtggatcaattccggctcgtttgaggtcaactggaccctgcgcttcgatacgctgaccgcggtgatggtgtttgtcgtgaccgttgtctcctcgatggtgcacgtctattccataggctacatgagccacgaccctcatattccgaggttcatgtcctatctcagcttcttcaccttcttcatgctgatgctggtgacggcggacaatctgctgcagatgttctttggctgggaaggtgtcggtctctgttcttaccttctgattgggttctggtacgaaaagccggaagcaaacggggccgcgataaaggcgttcgtggtcaaccggg

SEQ ID NO: 220870 - DNA, 829 bp, Unknown
  Bacterial polypeptide expressing nucleotide sequence isolated from the Sargasso Sea
atgacttatgatatattaattacagggttaataatcattgcccaaatacttgctgttgttgtgccagttttaatatctgtagcttttttagtttatgctgaaagaaaagtattagcattaattcaattaagaagaggtccaaatatagtagggccttttggtatattacaaagttttgctgatgcattaaaacttattactaaagaaaatattatacctagtggatcaaataaaattgtttttattttagcacccataataacaatggtacttagcttagcaggttgggcagtaataccttttgctccaggatgggtagtctctgatattaacgtaggtatcatgtatctgtttgcagtatcatctcttggagtatacggaataataatggctggatgggctagtaactctcaatatccttttctaggagcattaagatcagctgctcaaatggtttcatatgaagtatctattggatttgtaataattactgtattattatgtgtaggttctttaaatttatcaaagatagttttagctcagcagactgtatggtttgcaattccattattacctatgttcattattttttttatttctgcattagctgaaacaaatagattaccttttgatcttcctgaagatgaatcaacacttgttgcaggattttttactgaatattcatctgcttcatttgtattattttttttaggtgaatacgcgagtatgattttaatgtcttctatgactgtcattctttttttaggcggatggcttcctccatttgatgtataccccattaaatgttgttcctggagtaatctggttt

SEQ ID NO: 220871 - DNA, 523 bp, Unknown
  Bacterial polypeptide expressing nucleotide sequence isolated from the Sargasso Sea
aatggattttgaatatttaattatttttttaccattattaggatcaattatctcaggtttttttggtaatattttagggtcaagaaattcagaaattataacgagcttatttgtttcaatttccgccattttttcttttttgattttttataaagttctcaatgaaaattatacaaacaacttaattatttttagttggataaattctggaacattaaatgttaattggtctattaatattgatgctctatccgccgtgatgttgatcgttgtaacattggtttcatcattggttcatgtttattcaataggatatatgtcacatgacccacacaagcaaagatttatggcttatttatctttattcactttttcaatgttaatgcttgttacatctgataattttttacaattgtttttcggttgggaaggtgttggtttatgttcttattttctaataggtttttggtttaagaaagaaactgctaacgctgctgctataaaagcatttgttgtgaataga

SEQ ID NO: 220872 - DNA, 418 bp, Unknown
  Bacterial polypeptide expressing nucleotide sequence isolated from the Sargasso Sea
aatggaatttgctattttatttttaccactgtttggagctttattaggttattttggaaaatcctttggtaatttcttttcagaagtcatcaccagtttttttacttcaattgctgctgtcttatcagtagtagttttttataatggtgtcaactatgacatatatgggaattataaaatattcgagtgggtaagctcaggcaactttattgttaattggtcaataaatattgatcccttaagttcaataatgttagtagttgtaacatctatttcagctttggttcacatatattcaataggatatatgagtgaagatccacacaaaccaagatttatgtcctatttgtcattattcacattttctatgctagctttagttgtgtcagacaatttttttacattattttttggatgg

SEQ ID NO: 220873 - DNA, 346 bp, Unknown
  Bacterial polypeptide expressing nucleotide sequence isolated from the Sargasso Sea
tgttgcaggtttctttactgagtattcctcgatttcatttggtctctttttcttagctgagtatgccaacatgatattgatgagctcgcttacggttattctatttttaggtggatggtacccgcctttagatatttttcctttaaatgttattcctgggattttttggtttactttaaaagttttcttgattttgtttgtatttttatgggtaagagcaaccttcccacgttatagatatgatcaactaatgcgacttggttggaagatatttctaccactgactttagtgtgggttgttatcacatcttcgtttttattttattttggattattgcctagctga

SEQ ID NO: 220874 - DNA, 401 bp, Unknown
  Bacterial polypeptide expressing nucleotide sequence isolated from the Sargasso Sea
aatgccatacgcaattatttttcttccattaatagggtcgattatcggctattttggaaaatcatttacaaaatatttttctgagataactacaagtattttcgtaagtatttcagccgtactttctatgatagttttctggaaagtaataaataatgattatagtggtaattttttaatatttgagtggattaattcaggaaattttgtagccaactggtcaatttatattgacactttaagctcattaatgttggtaatcgtaacgctaatatcagccttggtccatatctattcaattggatacatgagccacgatcctcacaaacccagatttatgtcttacctatctctttttactttttttcatgtatctctttgtagttcagatatttttttac

SEQ ID NO: 220875 - DNA, 898 bp, Unknown
  Bacterial polypeptide expressing nucleotide sequence isolated from the Sargasso Sea
tttccaattttatcgtccttgattttactacctacaataggtgctttatttatattattcacaaaatcatcaagtggaaaatatcaaagttccaaatatgtagctttatttatttctttagcaaattttttattatctttatatctttggtatgtctttgataaaaattcagtagactttcagtttgtagaaaatagagagtggttatcaggatttataaattataaagttggaatagatggtatttcaattttatttgtaatattaacaactttcataactccaatttgcattatttcagtcaatgctacaattacaaatagacttaaggatttcttaattgccattttaataatggaaacatttatgattggtgttttctgctcacttgatttagtagtattttatttattttttgaggcaggtcttataccaatgtttttgataattggtatttggggcggagaaagaagagtctattcggcttttaaattttttctgtacactttattaggatcagttcttatgttggttgcaattatttcaatttattggataacaggaaccactgatgttgaaaaactttatgaacttggcataaatgctgaatatcaaaatttattatggctagcatttttcagttcttttgcagttaaaactcctatgtggccagtacatacgtggctaccagatgctcatgtagaagctccaactgttggatctgtattgcttgcagcaatattgcttaaaatggctggatatggatttataagattttcgctaggattatttcctatagcttctgaaaatttcacaatgttagtttatatcttgagtttaattgcaattatttacacatctcttgttgctttgatgcaggaagatatgaaaaaactca

SEQ ID NO: 220876 - DNA, 130 bp, Unknown
  Bacterial polypeptide expressing nucleotide sequence isolated from the Sargasso Sea
ttttatttccttgggcatatcgttaggaagtattggcctgtttggattttggtcaatgatgatttttttattaattcttactattggttttatttacgagtggaaaaaaggagctcttgaatgggagtaa

SEQ ID NO: 220877 - DNA, 748 bp, Unknown
  Bacterial polypeptide expressing nucleotide sequence isolated from the Sargasso Sea
tatgcttgttgcaattatttcaatatattggattacagggacaacagatataatttatttatatagtctaggtattgatgagaagtatcagtatctattatggttagctttttttagctcgtttgctgttaaaactccaatgtggcctgttcacacatggctaccagatgctcacgtagaagccccaactgctggctcagttttattagctgcaatcttattaaaaatggctggatatggatttattagattttcagttggactttttccagtagcttctgaatattttattccaatgatatatattttaagtttaatcgcaattatttacacttctcttgttgcattaatgcaaaaagatatgaaaaaattgattgcttactcctctgtagcacacatggggtttgtaactttaggaatatttacatttactcaacaaggattagacgggagtatatttcaaatgattagtcatggtttaatttctgcggcacttttcttatcggtcggtgtaatttatgagagaatgcatacaagactaatatcaaattatggaggactggttttagtaatgcctaaatacgctattgtattaatggtatttactcttggcgcagtaggacttccaggaacaagtggatttataggagaatttttgattctaattggagcatttaaaaaaagttttttagtggcagctatagcaagtataggggtaattttatctgcagcttatatgttttggctt

SEQ ID NO: 220878 - DNA, 682 bp, Unknown
  Bacterial polypeptide expressing nucleotide sequence isolated from the Sargasso Sea
gtcgtgatagcagggtggcaggtcatccagagccgggtcgcccagtattttgcggccttcctgatcatggaagggttgatgatcggagtgttctgcgcgcttgacgggattctgttttatcttttctgggaggccatgctcatccccatgtttctcataattggggtttggggcggaccgaatcgggtgtacgcggcaatcaagtttttcctgtacaccccgctgggatcgctactgatgctggttgcgctcctctacctttatcgtgcctcggggggattgtttgatttgcttgtattccatcacctacctctctccggcagcgtacagacgctggtctttctcgcatttttcgcggcgttcgccgtcaagatacccatggtgccggtgcatacctggttgccggatgcacacgttgaggcgccgacaggcgggtcggttatcctggccgcgatcacattgaagatgggtgcttacggttttcttcgaatcgccatgcctattgcgccggacgctgctcagcagatcgcgccggttattattggcctgtccctgctggcggtggtctacattgccctgatcgcgcttgttcagcaggatatgaaaaagttgatcgcttactcctcgatttcccacatggggttcgtcacgcttgggtttttcgtctttgagacgcgggcaa

SEQ ID NO: 220879 - DNA, 668 bp, Unknown
  Bacterial polypeptide expressing nucleotide sequence isolated from the Sargasso Sea
aattgacgggatttccttccctcttatccttctcacgacattcatcacacccatcgttttattaactgccagaacctcaaataaaatcaatctataccaatatttggcttctttcctgatattagagggtttaatgataggcgtattcagtgcactggacgctttcctattttatgttttctgggaagcaatgctgattccaatgtttatcatcataggaatctggggtggagagaatcgtgtgtatgcaaccataaagttctttctatacaccttccttggctcagtttttatgctgatcgcaatcatctatctctatataagtactggatcttattcgatctttgatttttacaatcttgatctatctagaatggagcagatcttgatatttttggcatttttattcgcatttgccgtcaaaattccaatgtggccagtgcatacatggttgccggatgcacacgttgaagcacctactggcggatccgtaattcttgcagcaatcctccttaaaatgggcggctatggtttactgagattcagcttgccgatcacaccagccgcatccaatgagttatctatgcttatggtcatcttttccctgatcgctattatttatattggcatggttgctttatcgcaaacagacatgaaaaaactgatcg

SEQ ID NO: 220880 - DNA, 778 bp, Unknown
  Bacterial polypeptide expressing nucleotide sequence isolated from the Sargasso Sea
atgaactttcctattttatcatcgttaatcttacttccaacaataggagctttatttattttttttgttagatcatctaattctcaatatcaaagtagtaagtatgtagctctttttataacattttctaattttatattatctttatatttatggattgtttttgataaatctatagttgattttcagtttgtagaggaaagagaatggatttctgggtttgtaaattataaagttggagtagatggaatatcaattctattcattttgctcaccacattcataaccccaatttgtgtaataacagtaaatgcaactattaaaaacagattaaaagattttttaatagcaatcttaatactcgaaacatttatgattggagtattttgctcactggatttagttgtattttatttattttttgaagctggtcttataccaatgtttttaattatcggtatatggggtggagaaagaagagtttattcagcatttaaattctttttatttactttattaggttcagttttaatgttagttgcaattatatctatttattggataactggaacaactgatgtcattaatttatacgaattaggtatcgacgctaagtaccaaaatttattatggctagcattttttagttcttttgctgttaaaacacctatgtggccagtacatacgtggttaccagatgctcacgtagaggcaccaactgcaggctcagtcttgcttgctgcaatacttttaaaaatggctggatatggatttatta

SEQ ID NO: 220881 - DNA, 811 bp, Unknown
  Bacterial polypeptide expressing nucleotide sequence isolated from the Sargasso Sea
ggcctgtccatacttgggttgccagatgctcacgttgaagcacctacagcaggatcagtattacttgcagctatattgcttaaaatggctgggtatggatttataagattttcattaggtctttttccaattgcatcagaagtattcacacctttaatttatgctttaagcgttattgccatcatcgtcacttcattaattgctttaatgcaagaggatatgaagaaacttatagcttattcttctgtagctcatatgggttttgtaaccttaggtgtttttacaattcagcaacaaggtattgaaggaagtataatccaaatgattagtcatggattagtttctgcagcattattcttatgtgttggtgttgtttacgatagaatgcattctagattaatcagttcatatggtggtattgttacaattattcctaaatattctatattatttatgatctttacccttgctgctcttggattacctggaacaagtggatttgttggtgaatttttaattttaatggctgtttttaaagataatttccttgtagctgttttagcaagtataggagtaattttaggtgctgcatatatgctttggctttataaaagagttatatttggaaaattaattaattcagatttaaaatcaatgatggacttagatagatctgagtattttatattaacatgtttagctatacctactttgtattttggattttatcctgatcctttaattaatacaattgaagtctcggttaatgatttaattgatatgtataataaaaatttactaattaaataat

SEQ ID NO: 220882 - DNA, 799 bp, Unknown
  Bacterial polypeptide expressing nucleotide sequence isolated from the Sargasso Sea
atatcaaaatttattatggttagcattcttcagttcttttgcagttaaaactcctatgtggccagtacatacttggcttccagatgcgcatgttgaagctcctactgttggctctgtattgcttgcagcaatactactcaaaatggcaggatatggatttattagattttcgctaggattatttcctatagcttctgaaaatttcacagtgttaatttatatcttaagtttaattgcaattatttacacatctctggttgctttgatgcaggaagatatgaaaaaactcatagcatactcctcagtagcacatatgggatttgtaacactaggtatcttcacaatgacccaacaaggtattgaggggagtattttccaaatgattagtcatggacttgtatctgcagcacttttcttaagtgttggagttgtttatgaaaggcatcatacacgactaataaataaatatggcggtttagtctcgataatgccaagatatgcaattgtttttatggtatttacactaggagctctaggactgcctggaacaacaggttttattggagagtttttaattttattgggtgcatttgagaaaaatactctggtagcgatgattgcaagtttgggagtaattttaggagcagcatatatgctgtggctatttaaaagagttgttttcggcgaaatgaataatcaagagcttaaaaatatgaaagatttaaaaccttttgaaattatcactttgtcagctttagtaataccaattttattttttgtttttatccagagccttaag

SEQ ID NO: 220883 - DNA, 777 bp, Unknown
  Bacterial polypeptide expressing nucleotide sequence isolated from the Sargasso Sea
tatgaattttccaattctatcatcactaattttacttccaacaataggagccttatttattttttttgttagatcgtctaattctcaatatcaaagtagcaaatatgttgccctttttataactttagctaattttttcttgtctttatatttatggattgtttttgataaatctatagttgactttcagtttgttgaagaaagagaatggatttcaggatttgttaattacaaagttggagtagacgggatatcaattttatttattttacttacaacattcattactccaatttgtgtaataactgtaaatgcaactatcaaaaatagattaaaagattttttaatagcaatcttgatacttgaaacatttatgattggtgtcttttgttcgttggacttagttgtattttatttattttttgaggctggtcttattccaatgtttttaattattggtatatggggtggagaaagaagagtttattcagcatttaaattctttttatatactttgctaggttcagttttaatgctggttgctattatatcaatatattggataactggtacaactgatgttattaagttatatgaattgggtatcgacgctaagtaccaaaatttattatggctagcattttttagttcctttgctgttaaaacaccaatgtggccagtgcatacatggttaccagatgctcatgtagaggcaccaactgctggttcagttttactagctgcaatacttttaaaaatggctggatatggatttat

SEQ ID NO: 220884 - DNA, 779 bp, Unknown
  Bacterial polypeptide expressing nucleotide sequence isolated from the Sargasso Sea
tatgatcggtaaaaattacggatcactttcatactggctatctatattctcatcctctttggtatttgttatcagtttgtatgcattatcaatgtacgattccagtcaaactggtatccaatttgagttgatcacttcatggatagagcgtttcgatataaattatcatctcggtgttgacggcatttcttttccactcattcttctgacaacatttattacaccgatagtattattgacctcaagaacttcagaaaaacccaacctccaccaatacttagcttcattcttaatattggaaggtttaatgatcggagtattcagtgctttggatgctttcctgttttatgttttctgggaagccatgttgattccaatgttcatcatcataggaatatggggtggcaagaatcgagtttatgcaaccattaaattcttcctatatacattcctcggatcagtctttatgttgatagcaatcatctatctatacattcaaaccggatcatattcgatctttgatttttacaatattgacttatccagaactgagcaaattcttatattcctagcatttttgttcgcttttgccgttaaaattcccatgtggccagttcatacctggttgcctgatgctcacgtcgaagcaccaacaggaggatcagtgattcttgcagcgatacttcttaagatgggcggttatggtttacttagattcagtttaccaatcacgccaaatgcatcgagtgagctctcaatagttatggttgtgctatccc

SEQ ID NO: 220885 - DNA, 826 bp, Unknown
  Bacterial polypeptide expressing nucleotide sequence isolated from the Sargasso Sea
ttgatactaaatatcaaaaatttactgtggcttgctttttttacttcatttgcagtgaaaactccaatgtggccagtacatacgtggttacctgatgcacatgtcgaggctcccaccgctggttcagttttgttagcagctattcttttaaaaatggctggatatggttttattagattttctcttggtttattcccggtagcatcagaatattttataccattaatatatatattaagtttagtagccattatttacacctccttagtggctttaatgcaagatgatatgaaaaaattaatagcttattcttcagttgcacacatgggttttgtaactttaggaatttttacaatgacacaacaaggtatagaaggaagtatatttcaaatgattagccatggtttagtttcagcagcactatttttatctgtaggtgtaatttacgatagaatgcatacaagattaattagtcaatatggtggtattgtttcaataatgccaaagtatgcaatagtatttatgatatttactcttggagctattggattgcctggcacgagtgggtttattggggaatttttaattttaatgggaacttttaaaaaaaatttcttagtagcaactattgcaagttttggtgtcattttggcagctgcttatatgctgtggctctataagagagtagtttttggaaaattaattaatgataatctaaaaaaaatggttgatttaaaaaaatctgaaatattaatactttggagtttagctgtaccaactattttatttggattttatcctgagccattaattaatactattgaag

SEQ ID NO: 220886 - DNA, 737 bp, Unknown
  Bacterial polypeptide expressing nucleotide sequence isolated from the Sargasso Sea
gttgttgcaaattgccatcgttacaatttgtttgattctaaccgttgttttcttggtttactttgaaagaaaagtaatcggttacatgcatgccagagtggggccaaatcgagtcggaccaaaaggaacgcttcaatcaattgcagatacgatcaaattactactaaaggaagtgattatccctgataaagctgatcggttcttctttttactgtcaccattactacttttaataccagcgcttgccgcttgggcagtcataccttttagtccagaattcatcatcgcagacatcaatgcaggattgctttacttattggcactcacttcttttggtgtctatggggtaatacttgctggatgggcttctaattcaaaatatgcctttctgggatcaatgagagcagccgctcaaatggttgcatatgaaattgctatgggatttgcactggttggcgttctcatggctggcgggagtttgaaacttggagaaattgttgcagcacaatcaggcggtgtactcagttggttttggattcctctttttccattgttcatcgtttattttatttctggtatagctgaaacaaatcgacatccttttgatcttgcagaaggagaagctgagattgttgctggtttccatgttgagtattctgggattgggtttgcaatattttttcttgctgaatacatcaatatggctctcatatctgtactcacatccattatgttcc

SEQ ID NO: 220887 - DNA, 410 bp, Unknown
  Bacterial polypeptide expressing nucleotide sequence isolated from the Sargasso Sea
aatggaaatttcaattatagcattaccattgattgcttcaattatatctggattttttggaaagttaataggagacagaaattctgaaatagttacaagtttattggtatctatttcagctgttctctcagcaattgtattctatgaagtaatttttaatcaatacgtggaaaatattaaaattgccacgtggattagttctggatcattagaggtaaactggtcaatgaaaattgatgcattgtcatcagtaatgttagtagtcgtaacttttatttcagcattggttcatatttattcaattggttatatgtcccatgatcctcacaaaccaagatttatggcctacttatcactattcacatttgcgatgttaatgttggtaacagctgataattttattcaactat

SEQ ID NO: 220888 - DNA, 895 bp, Unknown
  Bacterial polypeptide expressing nucleotide sequence isolated from the Sargasso Sea
taaatttttcttatatacattgttaggttcagttttaatgcttgtagctataatttacatttattggatcgcaggcactacagatgtagaaaaactttatcaaattggtattgatgcaaaatatcaaaaaattctgtggttagctttttttagttcctttgcagttaagacaccaatgtggcctgttcatacttggcttcctgatgctcacgttgaggctccaactgctggctccgtccttttagcagctatacttcttaaaatggctggatacggttttataagattttcaattggacttttcccaatcggttcagagtacttcgtaagcttaatatatattttaagtcttatagcaataatttacacttctctaatagcgttgatgcaagatgatatgaaaaagttaatagcatattcatcagttgctcacatgggttttgttaccctaggaatatttactatgacacaacaaggcttagaggggagtatttttcaaatgataagtcacggaataatttctgcagctttatttttatgtgtgggagttatttatgagagaatgcatacaagagaaattaaaaaatatggtggtatagttgaagtaatgccaagatattcaatagttttaatgatcttcactttaggagcactaggtctaccaggaacgactggatttgttggagaatttttaattttgatgggcgcatttaaagataattttttagtggcagtgattgcaagtataggggtgatactgggtgcagcgtacatgctttggttatataaaagagtagtatttggtgaactaataaataaagatttgaagaatttgatagatcttaataaatctgaattaataattttgattgcattagctattccaagtctatat

SEQ ID NO: 220889 - DNA, 799 bp, Unknown
  Bacterial polypeptide expressing nucleotide sequence isolated from the Sargasso Sea
atgtttttaataataggaatctggggtggatctagacgaatttattcagcatttaaattttttctatttaccttgcttggatctgttttgatgcttgttgcaatcatctcaatatattggataaccggtacaactgatgtaactcagatatatgaaataaaaataccagttgaatatcaatatttactttggttagctttttttagttcttttgctgttaagttgccaatgtggcccgttcatacttggttacccgatgcacacgtcgaagctcccaccgctggatcggtaatattggctgctattttattaaaaatgggtggttatggttttttaagattttcagttggaatgtttcctattgcatcagaatattttgttcctttaattttttcactcagcataatagcaatactatacacttcatttgttgcattaatgcaagatgatatgaaaaaactagttgcatactcatctgtagctcacatgggttttgtcacactgggtatttttacatttaataaacaaggcatagaaggcagcatacttcaaatggtaagtcatgggctgatttctgctgctctatttttaagtgtcggtgtactttatgatagagttcactcaagattaattaattcatacggtggtatagttaatattttacctaaatattcatttatcttaatggtttttgtacttgctgcattaggactaccaggaacaagcggttttataggtgaatttttagttttgatagggacattcaaaattaattttttagcaggaatactcgcaagta

SEQ ID NO: 220890 - DNA, 457 bp, Unknown
  Bacterial polypeptide expressing nucleotide sequence isolated from the Sargasso Sea
atgattgagttgctttcatcaaatttcatttacctattaattatagtaggtatttgtcttcttatatttgtcccgctgttacttggagttattattgctttatatgccgatagaaagatatgggcagctgttcaaaagagaagggggccaaatgttgttggaccttatggattatttcaaatacctgcagatggcttaaaatttatatttaaagagataattattcctgacggatcagacaaaatagtttttcttattgctcccattgtaactttagctttatcaatcgctgcttgggcagttgttccagttcaggcgggagttgttttatctaatattaatgtaggaattttatatatttttgcaattagttcacttggtgtttatggaatattaatggcaggatggtcttcaaatagtaagtatcctttttttggagcattgcgttctgcagctc

SEQ ID NO: 220891 - DNA, 419 bp, Unknown
  Bacterial polypeptide expressing nucleotide sequence isolated from the Sargasso Sea
aatggagtacgcaatactttttttaccattaatcggctctttaataggttatttaggaaaatctcttacaaaatattttgctgaaatttccacaagtttatttgtaagtatatcagcagtactatctgtacttgttttttggaatggaattcaaaatgatatttacggcaattatttaatttttgaatggataagttctggaggatttaaggctaactggtctataaatgttgatcctttaagttcagttatgttagtggttgttacttttgtatcatcattagtacacatttattctattggttatatgagtcatgatcctcacaagccaaggtttatgtcatatttatcattgttcactttttcaatgttagctttggttgtttcagataattttttacaacttttttttggtgggg

SEQ ID NO: 220892 - DNA, 778 bp, Unknown
  Bacterial polypeptide expressing nucleotide sequence isolated from the Sargasso Sea
atgaattttcctattctctcatctttaattttgcttccaactattggagctttatttatattttttactagaagtagtaaaaaaaataacaacacagttaaatatgttgctttattcacttcttttgtgaatttctttttgtccatatatttatgggctttattcgatcaaacaacttctgattttcaatttgttgaggacagagtttggattgaaaattttataaattataaagtaggtattgatggaatttcaattttatttattttgttaacgacatttataacacctctctgcattatttctatcaccaactcaattaaaaataggttaagtgaatttcttatagctgtactaattatggagtcatttatgataggtgttttctcttctttggatcttgttattttttatctattttttgaggctggtttaatcccaatgtttttgatcataggaatttggggtggaactcgaagagtatactctgcatttaaattctttttatatactttgcttggatcagtattgatgttggttgcaataatttcaatatattggataacagggacaacagatgtagttgagctttataaaatagggatagatgttaaataccaaaatcttttatggttagctttcttcagttcatttgcagtaaaaacaccaatgtggccagttcacacttggttaccagatgctcatgttgaagcaccaacagcaggatcagtattattggctgcaattttattaaaaatggcaggctatggatttataa

SEQ ID NO: 220893 - DNA, 472 bp, Unknown
  Bacterial polypeptide expressing nucleotide sequence isolated from the Sargasso Sea
atggaatatttaatattatttttacctttaataggttcaatcatatcaggtttctttggtaaaactattggtgataaattatctcaattaatcacatgtattttagtttctatttcggcgttattatcattaattatattttttaaagttgtttcatcaggatatgagcataatgcaattatagcaacttggataaattcaggatctttaaatgtaaattggtcaattaaagttgatgccctttcggctgtaatgttagttgtagttactttagtttcatccttagttcatatctattctgtaggttacatgtctcacgaccctcataaaccaagatttatgtcctatctatcactatttacattcgctatgttaacattagtaacatcagataattttttgcaattattcttcggatgggaaggagttggtctttgctcgtattttttaattggtttttggtataaaaaag

SEQ ID NO: 220894 - DNA, 868 bp, Unknown
  Bacterial polypeptide expressing nucleotide sequence isolated from the Sargasso Sea
tggaactactgatataataaaactttacgagattggaataaatgcaaactttcaaaatttattgtggttagcattttttagttcttttgctgtcaaaacaccaatgtggcctgttcatacatggctaccagatgctcacgttgaagcaccaacagcagggtcggttcttttagctgctattttattaaaaatggcaggatatggatttataagattttcaattggattatttccaattgcatcagaattttttacaccacttatttactttcttagcctagtagcaataatttatacttcctttgtggcgttaatgcaggatgatatgaaaaaattaattgcttattcatcagttgctcacatgggttatgttacacttggtatttttactaacacccaacagggtttagaaggaagtatagtgcaaatgataagtcatggattagtttcggctgcattatttttatctgtgggtgtcttatatgacagaactcattctagactaattaaaacttacggaggtctagtttcaataatgcctaaatattcaattttattgatgatttttactttagctgctcttggcttgcctggtaccagtggttttgttggagagtttctaattcttatgggggcttttcgagataactttcttgtagcgactgtagcttgttttggggtcatattaggagctgcttatatgttgtggttatacaaaagagtaatttttggaaaattaaataacgaggatttattaaaaataaatgatttaaataagtccgaatttttaattttattgattatagccataccaactttatttttcgggttttatcctgaaccattattgaatactattcaaatatct

SEQ ID NO: 220895 - DNA, 802 bp, Unknown
  Bacterial polypeptide expressing nucleotide sequence isolated from the Sargasso Sea
ttatggttagcattttttagctcttttgctgttaaaaccccgatgtggcctgttcatacatggcttccagatgctcacgttgaggcaccaacggcaggatcagtgcttctggctgcaatattactaaagatggcaggctacggttttattaggttttctttgggactttttccagttgcatcagaagttttcacacctttaatttatactttaagtgtaatagcaatcattttcacatccttcatagcgttgatgcaagaagatatgaaaaaacttattgcctattcttccgtcgcacacatgggttttgttactcttggaattttcacattacaacaacagggaattgagggcagtataatccaaatgataagtcacggattagtttctgcagctctatttttatgtgttggtgttgtatatgacagaatgcactcaagattgatcaaatcgtatggcggaatagttacgataatacctaaatactcaattttatttatgctatttaccttagcagccttaggtttaccgggtactagtggatttattggtgaattcttaattttaatgggtgcatttaaagataattttttggtagccgttattgcaagttttggagtaattctaggcgcagcttacatgttatggctttataagagagttgtgtttggaaaattagtcaatgaagatttaaaacaaatggtagatttaaatagatctgagtatttaatattaacatgtcttgcggtgccaacattattctttggattttatccagagccattatttaacacaattgaag

SEQ ID NO: 220896 - DNA, 739 bp, Unknown
  Bacterial polypeptide expressing nucleotide sequence isolated from the Sargasso Sea
atgaactttccaattctttcttcattgatacttttacctattataggatctttttttattattttcatcaaatcttccaataaagacaatcaaagcataaagcttattgctttgtttaccagtttttcaaattttttgctgtcattatacttgtggtatcaatttgataattctatttatgaatttcaatttattgaaaataaaaaatggctgattgggttaattaattacaaggttggagtcgatggaatttcaatactatttattttattaactacttttattattccattatgcataatatctgtaaatcacacaataaaacatcgtaataaagaatttttgattgctattttgctaatggaaagtttaatgatcggtgtattttgttcattagacttagtaatattttatttgttttttgaaggtggtttaataccgatgtttctaattattggtatttggggaggacaaagaagagtttattcagcatttaaatttttcctttatactttactaggttcagtattaatgttgatagctatcatatcaatttactggatcacaggaacaactgattttgttgaaatttataaccaaggaatagatttcaaatatcaaaaattattatggttagccttttttagttcttttgctgttaaaactccaatgtggccagttcatacatggttaccagatgctcatgttgaagcacctactgcaggttcggttatttagc

SEQ ID NO: 220897 - DNA, 398 bp, Unknown
  Bacterial polypeptide expressing nucleotide sequence isolated from the Sargasso Sea
aatggaactttcaatcatattccttccattaattgcatcaataatatcaggcttctttggtaaatttattggtgatagaaattctgaaatagttacaagtgctttggtttcaatatctgcgttgttatcaatttttgttttattccaagtaattgtaaatcagtatgaagaaaacatagtaatcgcaacttggatcaattcaggttcattagatgtaaactggtcaatgttaatcgacccattgtctgctgtaatgttggttgtggttacttctgtatcttctttggttcatatttattcaattggatatatgtcccacgatcctcataaaccaagatttatggcatatttatctttgtttacattcgcaatgttaatgcttgtaacatcggataatt

SEQ ID NO: 220898 - DNA, 838 bp, Unknown
  Bacterial polypeptide expressing nucleotide sequence isolated from the Sargasso Sea
atttggggaggaccaagaaaggtttactcagcatttaaatttttcttatttacacttttaggctcagttttaatgttggttgcaataatagcaatttattggatctccggcacaacagatataaccgaaatttatcaaatagggataccctcggagtaccaatatttgttatggctagcattttttagttcatttgcagttaaattaccaatgtggccagtccacacctggttaccagatgctcatgttgaagcaccaacggctggatcagtggtattagctgcaattttactaaaaatgggcggatatggttttattagattttcagtgggtatgtttccagtagcctctgaatattttacacctctaattttttccttaagcacaatagctgtaatttacacatctttaatagccttgatgcaaaaagatatgaaaaaattgatagcatattcatctgttgcacatatgggatatgtaacaataggaatttttacttttaataaacagggtattgaaggaagcattgtgcaaatgtttagtcatggtttaatttctgccgctctttttttaagtgtaggggttctttatgacagaacacattcaagactaataaaaacatatggcggtatagtaaatttaatgcctaaatattcatttctttttatgatctttgttttaggaacactaggtttacccggtacaagcggttttgttggagagtttctagttttagtaggagtttttaaagtaaattatttagtcacaatccttgcaagtataggagttatattggctgctgcatatattttgtggctttataaaagagtggtttttg

SEQ ID NO: 220899 - DNA, 429 bp, Unknown
  Bacterial polypeptide expressing nucleotide sequence isolated from the Sargasso Sea
aatggctcacagcattgtaattttacccttattgggatttcttattgcgtgcgcattatctttttttaaaagaaatgcttttatagatcgtttagctgatattattacgtgtacttttattgttttaacggccttcttttctttttatattttcatcgtcgatataggaaaccctagtgttgtttctttaaaattatttacatggattgagtcaggctctttttctgctgattggtctatatatttagacactgttactagagtaatgcttgtagttattacaagtgtttctgctttggtgcacatttattcaatcggatatatgtcacatgacgatagtaagcctagatttatgggttatttgtcattgtttacatttgctatgatcatgcttgttacagccgataattttttaaattattttttggc

SEQ ID NO: 220900 - DNA, 802 bp, Unknown
  Bacterial polypeptide expressing nucleotide sequence isolated from the Sargasso Sea
accagatgctcatgttgaggctcctacagcaggatctgttttattggcagctattttgttaaaaatggctggatatggttttattagattttcactaggtttatttccgattgcatctgaatattttgtaccatttatatatacacttagtttaattgcaattatctacacatcattggttgccttaatgcaagaagatatgaaaaagcttattgcgtattcttctgtagcacacatgggatttgtaactctaggtatttttacaatgactcaacaaggtatagaagggagtatttttcagatgataagtcatggacttgtctccgcagctttgtttttatctgtaggtgttgtttatgaaagattgcatacaagacttataagtaaatacggaggtctagaaactataatgccaaagtatgcgattgtattaatggtttttactttaggagcacttggattaccaggaactagcggatttataggggagtttttagtattaatgggaacgtttaaaaaaaattttttggtagctgcaataacaagcttgggagttattttgggagccgcatatatgttatggttatataaaagaataattttcggagaaattactaatgaggaagttaagtcaatgaacgatctcaaaagattcgaaataataattttatttatgttagttgtgccgataattctttttggtttttatccagaaccattaatgagctcaatggaaacatcggtagaaaatttactaaatatatataatttaaatttaacaaataacctttctcttaaataa

SEQ ID NO: 220901 - DNA, 965 bp, Unknown
  Bacterial polypeptide expressing nucleotide sequence isolated from the Sargasso Sea
aagaagagtttattctgcatttaaattttttttatacacactcttaggttctgttttaatgctagtagcaataatttcaatttattggataactggtacaacagatgtagttaagctttatgaaattggtattgatgttaaatatcaaaatcttttatggctggcgttttttagttcatttgctgttaaaacgcccatgtggcctgttcatacatggttaccagatgcacacgttgaagctcctacagcaggatctgtattattagcagcaatattattgaagatggcaggatatggatttataagattttcattaggacttttccctgtagcatcagaaacatttacccctttaatttatgttttgagtgtaattgcaattatattcacatcactaatagctttaatgcaagaagatatgaaaaaacttatagcatattcatcagttgctcatatgggatttgtaaccttgggtatcttcactctacaacagcagggtattgaaggtagtataattcaaatgataagtcatggattagtttcagcagctttgtttttaacagttggagtagtttatgacagaatgcactctagattgataagtgcttatggggggttagtttctgtaattccaaaatattcaatattatttatgatatttgctttggcatccttaggtttaccagggacaagtggttttattggagagtttttaattttaatgggagcatttaaagataatttcttagtcgctgtgattgctagtcttggagtaattttaggtgctgcatacatgttgtggctttataagagagtagtttttggtaaactaataaatgaagatctcaaaaagattgtagatttaaatagatcagaatattttattttaagttgtttagcagctcctattttattttatgggttttatccagatccattaattaacaccatagaagtttctgtaa

SEQ ID NO: 220902 - DNA, 845 bp, Unknown
  Bacterial polypeptide expressing nucleotide sequence isolated from the Sargasso Sea
tcatttgttcactcatgctttttttaaagctctactttttctctcagctggagccgttataattagcatgcatcacgaacaagatataagaaaaatgggtaatttaagagcttatttgccgatcacatataaatgttttttaataggaacactttgcttagtaggatttccgctaacctctggttttttttcaaaggatcttattttaatttctttatataacgatgataattttttatcattatttagctatgtcattttagttataggtacttttgtaacaagtatgtattcctttagattactttttttagtatttcatggaaacgaaaggtttaaaagtcaaaagattacagagcaaggtttatcaatgctaattcctttaacaatactctctgtgttagcagttatttctggagcatgcataaacttttttcttgagttaaatatttacagtactgagaataaaaatatcaattattctggaattttagattttattttacatggtatactttctcttcctactttattcatttttgtagctttttggatatcaaaaaaattatatttagacaattactctattcaaaataatagtttcattattgaaaagattttgtctattgtaaaaaataaattttattttgatgagatattttttttattggccaatacattcattaaaattggatcatttttttcaaatataattgactataaattaatagatcaaaagttaattataggtattcctaagataattgacagattatcatttaaagctaaaaaaatgcagactggttacctttatcactctgcattctcgataatttttcactagt

SEQ ID NO: 220903 - DNA, 849 bp, Unknown
  Bacterial polypeptide expressing nucleotide sequence isolated from the Sargasso Sea
aaaaattcagtagactttcagtttgtagaaaatagagaatggctgtcaggatttataaattataaagttggaatagatggtatttcaattttatttgtaatattaacaactttcataactccaatttgtattatttcagttaatgctacaattacaaatagacttaaggatttcttaattgccatattaataatggaaacatttatgattggtgttttttgctcacttgatctagtagtattttatttattttttgaggcaggtcttataccaatgtttttaataattggtatttggggtggagaaagaagagtctattcagcttttaaattttttctgtacactttattaggatcagttcttatgctggttgctattatttcaatttattggataacaggaaccactgatgttgaaaaactttatgaacttggcataaaggctgaatatcaaaatttattatggttagcatttttcagttcttttgcagttaaaactcctatgtggccagtacatacgtggttaccagatgctcatgtggaagctccaactgttggatctgtactgctagcagcaatattgcttaaaatggctggatatggatttattagattttcgctaggattatttcctatagcttctgaaaatttcacaatattagtttatatcttaagtttaattgcaattatttacacatctctggttgctttgatgcaggaagatatgaaaaaactcatagcatactcctcagttgcacatatgggatttgtaacattaggtatcttcacaatgacccaacaaggtattgagggaagtattttccaaatgattagtcatggacttgtatct

SEQ ID NO: 220904 - DNA, 427 bp, Unknown
  Bacterial polypeptide expressing nucleotide sequence isolated from the Sargasso Sea
aatggaatacctaattttatttctacctctaataggatctgtaattagtggtttttttggaaagaaaataggagacagaaattctcaaattttgacaagttcgtttgtgagtatttcagcaatactctctttatatattttgtataaagttattatttcagattattcaaacaatcttgttatagctacctggatcaactctggagctttaaatgttaattggtcgataaaaattgactccttatcagcagttatgtttgttgtggtaaattttgtgtcagctttagttcatatttattcaattggttacatgtcacatgatcctcataaaactagattcatggcatatttatcattgtttacttttgcaatgttaactttagtaagctcagacaactttattcaactattttttgggtgggaaggt

SEQ ID NO: 220905 - DNA, 397 bp, Unknown
  Bacterial polypeptide expressing nucleotide sequence isolated from the Sargasso Sea
atggaatacttaattttgtttttaccattagttgcagctattgtctcaggcttctttggaaaattaattggtgatagattttctgaaattattacaagcctatttgtatcaatatctgcaattttatcattttttatattttacaaagttataaatcatggatattcaaataatttaatcatttctacttggatcaattcaggaactttaaatgtgaattggtcaatcaatatagatactttatcttctgtgatgttagttgttgtaactttagtttcttctctagttcatatttattcaataggctacatgtctcacgatcctcacaaaccaaggttcatgtcatacttatccttatttacttttgccatgttaactctagttacttcagaataat

SEQ ID NO: 220906 - DNA, 913 bp, Unknown
  Bacterial polypeptide expressing nucleotide sequence isolated from the Sargasso Sea
tcggaattttggggtggaccaaaaagagtttattcagcatttaaattctttttatacacattgctaggttctgttttaatgttagttgcaattatttctatttattggatcgcaggcacaacagatgttattcagctttatgaacttggtatagatgctaaatatcaaaatcttttatggttagcattcttcagctcttttgcagttaaaacccctatgtggccagtacatacttggttgccagatgctcatgttgaagctccaactgcaggatctgtattgttagcagcgatcttattgaagatggcaggttatggttttatcagattttctctaggtttatttcctgttgcttcggaagtttttacacctttaatttacactttgagtgttatagcaattatattcacttctttaattgctctaatgcaggaggatatgaaaaagttaatagcttattcttctgttgctcacatgggatttgtgacattaggaatatttactcttcagcaacaaggaattgaaggaagtattattcaaatgattagtcatggtttagtttcagctgcactttttttatgtgttggtgttgtctacgatcggatgcattcaaggatgatcaattcgtatggaggaatagttgcaataataccaaaatattcaattttatttatgttgtttacattggcagcattgggattaccagggacaagtggatttataggagaatttttaattttaatgggtgcttttaaggataatttcctagtagctgtaattgctagtttaggagtcatacttggagccgcatatatgctttggttgtacaaaagagttgtttttggaaagctagttaacgaagaccttaagaagatgtttgatttaaatagatcggaatatctgattttatctt

SEQ ID NO: 220907 - DNA, 433 bp, Unknown
  Bacterial polypeptide expressing nucleotide sequence isolated from the Sargasso Sea
gatggctgaagtatgggacgtgtatatttggccgacggcttggattgtaatcaaagtcctaggaatagttattcctatacttttatctgtggcctacctaacctatgctgaacgcaaggtaataggagctatgcaacaaagaaggggccctaacgtagtaggcccgtttggccttctgcagcctattgccgacgcaataaagctatttcttaaagaaacaataatcccaaataaagccaaccggggtgtatttttagcagccccatgcataaccttcattttagccatagtagcctgggcagtaataccatttggtgaacagatgatactagcgaatatcaacgttggtattttatatctatttgctatctcatcgctgggggtttacggcatcttaatggcaggttgggcgtcaaactctcgctatgcattt

SEQ ID NO: 220908 - DNA, 418 bp, Unknown
  Bacterial polypeptide expressing nucleotide sequence isolated from the Sargasso Sea
gatggaatacgcagttatatttttaccattattcggaacgatcgtaggatatctttcaaaatatcttggagatattgcttcccaattatttactacattttcagtttgtttatctgccgttttatcaatcgcaattttttataatggtatcgttcatgatagttatggaaattatttaatttatgaatggattagttcaggcagctttcaagcaaactggtcaataaatatagatcccctaacctctataatgttagttgtagtcactttggtttcagctttggtacacatttattcaattggatatatgaaccatgatccaaacaaaccaagatttatgtcatatctgtcattatttaccttctctatgttagtactggtagtttcagataactttttacagctattttttggatgg

SEQ ID NO: 220909 - DNA, 780 bp, Unknown
  Bacterial polypeptide expressing nucleotide sequence isolated from the Sargasso Sea
actactgatgttgaaaaactttacgaacttggtattcaggtagaatatcaaaatttattatggctagcattttttagttcttttgcagtaaaaactcctatgtggccagtacatacttggctgccagatgctcatgtagaagctccaactgttggatctgtattactagcagcaatactgcttaaaatggctggatatggatttattagattttctttagggttatttcctatcgcatcggaaaattttacaatgttagtttatgtcttaagtttaatagcaattatttacacatctcttgtagctttgatgcaggaagatatgaaaaaacttatagcatactcgtctgttgcgcatatggggtttgtaacactaggtatcttcacaatgacccaacaaggtattgaaggaagtattttccaaatgattagtcatggacttgtatcagctgcacttttcttaagtgttggagttgtctatgaaaggcatcacacaaggttaattaataaatatggaggtttagtctctataatgcctagatatgcaattgtttttatggtgttcacactaggagctttaggactgcctggaacaacaggttttataggagaatttttaattttgatgggtgcatttgagaaaaatatcttagtagcaatgattgcgagtttaggagtaattttaggagcagcatatatgctgtggttatttaaaagagttgtttttggcgaaatgaataatcaagagcttaaaactatgagagatttaaaaacttttgaa

SEQ ID NO: 220910 - DNA, 949 bp, Unknown
  Bacterial polypeptide expressing nucleotide sequence isolated from the Sargasso Sea
tatgcttgtagcaattatttctatatattggattaatggaactacagacatagttcaattatacgagttagggattgataaaaaataccaaaatcttctttggttagctttttttagctcatttgcagtaaaaacacctatgtggccggtacatacatggcttcctgatgcacatgtagaagcgcctacagcaggctcagtacttttagcagcaatacttttaaaaatggcaggctatggttttataagattttcaattgggttatttcctgatgcatccgtttattttacaccattaatattttctctaagtctcgtggcaattatttatacctctctagttgctttaatgcaggaagatatgaaaaaactaattgcttattcttctgttgcgcatatgggctatgtaacactcgggatctttacttttaatgaacaaggacttcaaggaagcatcatacaaatgataagccatggactaatatcagcagcactttttttgtgtgtcggagttgtttatgagagaactaaaacaagaattataaatgattatggtggtttagtttcaattatgccaagatattcaatcgttttgatgattttcactttgggtgctgtaggattacccgggacaagtggttttataggagaatttttaatcttgatgggtgctttcaaggttaattttttagttgctaccatagctagttttggtgtgatattggcagcagcttatatgttgtggctttataaaagacttatatttggaaaattgataaatgaaaaacttttaaaaatccttgatttaaaaaaacatgaaataataatattgtggttactggcaattccttctttattttttggattctatccaatgcctttgattgaaactattgaagtatctcttaacgatataataaatatttatgcatctaattcatcacttaat

SEQ ID NO: 220911 - DNA, 684 bp, Unknown
  Bacterial polypeptide expressing nucleotide sequence isolated from the Sargasso Sea
aaggagaatttacttccctctagctcaaacaagttcctttttatctttgcgcctatgcttactttaatattaagtttaatagcttgggctgttatcccaattagctcaacttatgttatagcaaatattaatataggtattttatatttgttcgctgtgtcatcgtttggtgtttatggagttattatcgctggttgggctagtaattctaagtatccatttttaggtgcattgagatcagcagctcagatgatttcttatgaagtatcaataggttttgtaatcataacagttttgatttgtgtcggctcattaaatttaattgatattgtagagagtcaaaagaatatgtggtttgcgataccactgttacctatgtttgttatatttattatttcagcattagctgaaacaaatagactcccatttgatctacctgaagatgaagccacattagttgcaggtttttttaccgaatactcatcaatatcatttggcttattttttttagcagaatacgccaatatgattttaatgagctctctaactgtaattctatttttaggaggttggtaccctccaatagatatattccctttaaacgcaatacctggaatattttggtttgtaaataaagtatttttaattctttttgtgtttttatgggtcagagcaactttccga

SEQ ID NO: 220912 - DNA, 721 bp, Unknown
  Bacterial polypeptide expressing nucleotide sequence isolated from the Sargasso Sea
ttattatggctagctttctttagttcatttgctgtaaaaactccaatgtggccttttcatacctggctccctgatgcccatgtagaagcgcctaccgctggttctgttttacttgctgcaatattattaaaaatggctggctacggatttatcagattttcagttggtttatttcctattgcttctgaattttttgtaccattaatatttgtattaagtttaattgcaattatttatacgtctttaatagctttaatgcaggaagatatgaagaagcttattgcttactcttcagttgctcatatggggtttgtaacaatgggcatatttacaatgacacctgaaggaatcgagggaagtatattccaaatgataagtcatggaataatttcagctgcactttttctatgtgtgggagttgtttatgatagaatgcacactagagaaataaataaatatggtggtttagttataattatgcccaaatatgccgtagtatttatggtttttactttgggagcattaggtttgccaggcacaacaggatttattggtgagtttctaattttactagcaacttttaaggttaattttatagttgctacaatagcaagctttggtgtcattttgggagctgcatatatgctttggctttatagaaaagtaatttttggagaaataaaaaatccagatttaaataaactgacagatttaaaataaa

SEQ ID NO: 220913 - DNA, 700 bp, Unknown
  Bacterial polypeptide expressing nucleotide sequence isolated from the Sargasso Sea
aagaagtaatgaaaaaaataataatacagtaaagtacgttgctttatttacttccttcgtaaatttctttctatcaatatatttatggatattatttgatcaaacaacctctgaatttcagtttgttgaagatagagtttggattgaaaattttattaattataaagttggaattgatggaatttcaattttatttattttgttaacaacatttattacacctctttgtattttatcaattaacaattccattaaaaatagattaagtgaatttctgatagccgtactaattatggaatcttttatgattggtgttttttgctctttagatcttgtcatattttatttattctttgaagctggtttaattccaatgtttttaattatagggatttggggtggtgcaagaagagtatactctgcatttaaattctttttatataccttactaggatctgtgttaatgctagttgcaataatttcaatatactggataacaggcacgactgatgtagttgagctttataaaataggaatagatgttaaatatcaaaatcttttatggttagctttttttagctcttttgcagtaaaaacaccgatgtggccagttcatacatggttacctgatgctcacgtagaagcgcctactgcagggtcagttttacttgcagcaatcttattaaaaatggctggctat

SEQ ID NO: 220914 - DNA, 640 bp, Unknown
  Bacterial polypeptide expressing nucleotide sequence isolated from the Sargasso Sea
aatggatatatttcatgagataattattccaggctcaataatagttgctcaaattcttgctgttgttgttccagttttgatatctgttgcttttttggtatatgctgaaagaaaagttttagcgttaattcagctaagaagaggacctaatattgttgggccttttggaatcttacaaagttttgcagatgctttaaaattgataactaaagaaaatattataccaagtggttcaaataaaatagtttttattcttgcaccaataataactatggttttaagtttagctggctgggcggtaataccttttgcacctggatgggttatatcagacataaatgttggaatcatgtatctttttgctgtctcttcattgggggtatatggaattataatggcaggatgggctagtaattcccaatatccttttttaggagcattaaggtctgctgctcaaatggtttcttatgaggtgtcaataggttttgtaataattacagttcttttatgtgttggttctttaaatttatcaaagattgttcttgctcagcagactgtttggttcgcaattccattattgcctatgttcattattttttttatttctgctttagctgaaacaaatagattaccattttga

SEQ ID NO: 220915 - DNA, 796 bp, Unknown
  Bacterial polypeptide expressing nucleotide sequence isolated from the Sargasso Sea
ttgtttattttattttccattcctaatattaattcattatcaatcccttttttaaccattaatggtaataatattaaccttatttttgattacatagacaaaaacctcttgatgtcaaaagttgtcttaataatatcaactttggtactcatatattcttccaaatttattgaaggtgaggaaagaaggtctcattccaggtactttctttttttatcgattttcatttcgtcaatgtttatgtttacaatatcttctgacctttttagtaactttattttttgggagcttttagggctgtcctcctatttcttaataggtttttggaataaagactctgaagcaattaaatcttcaaccatagctttttggattacaagatttggcgatcttttctttcttgcaggaataatcttaatttttactactgctggtactttagatataaataatctcaatcaaatagcatcaaattcagatttggatattaagtttccattgctatttatagttatagggattttctccaaatcagctcaatttccattcaacatatggctacctaaagcgatgaaaggtccaactcctgtttcttctcttattcattctgcaactatggttgtggcaggtgttttattattatttaaaatctatccattaataagtaattcaattggacttcttaatttgctaacaacaattggaattatttcttcatttattggtgcaattgctgctttttatgaggaagacttaaagaaaatactcgcatattccacaatatcccatattggat

SEQ ID NO: 220916 - DNA, 415 bp, Unknown
  Bacterial polypeptide expressing nucleotide sequence isolated from the Sargasso Sea
atggaactatcgattatatttcttccacttattgcttcaataatctctggtttttttggaagatatatcggtgatagaaattctgaaatagtaacaagcgctctagtttcaatttctgcactcttatcaattcatgttctttatcaagtaattgtaaatcaatacgaagaaaatattattatagctacctggataagctcagggtcacttgatgtaaattggtcaatgttgattgatcctttatcagcagtgatgttagtggttgtaacttctgtatctgctttagtgcatatctattcaattggttacatgtcccacgatcctcataaaccaagatttatggcttatttatcattattcacttttgcgatgttgatgaatgtaacatcagataattttattcaactattttttg

SEQ ID NO: 220917 - DNA, 703 bp, Unknown
  Bacterial polypeptide expressing nucleotide sequence isolated from the Sargasso Sea
catacgtggctgccagatgctcatgtagaagctccaactgttggatctgtattgctagcagcaatattgcttaaaatggctggatatggatttattagattttcgctaggattatttcctatagcttctgaaaatttcacaatgttagtttatatcttaagtttaattgcaattatttacacatctctggttgctttgatgcaagaagatatgaaaaaactcatagcttactcctcagttgcacatatgggatttgtaacattgggtatcttcacaatgacccaacaaggtattgagggaagtattttccaaatgattagtcatggacttgtgtctgcagcacttttcttgagtgttggagttgtctatgaaaggcatcatacaagactaataaataaatatggcggtttagtctccataatgccaagatatgcaattgtttttatggtattcacactaggagctctaggactgcctggaacaacaggttttattggagaatttttaattttaatgggtgcatttgagaaaaacatcctagtagcgatgattgcaagtttgggagtaattttaggagcagcatatatgctgtggctatttaaaagggttgtttttggtgaaatgaataatcaagagcttaaaagtatgaaagatttaaaaacttttgaaattatcactttatcagctttagtaataccaattt

SEQ ID NO: 220918 - DNA, 862 bp, Unknown
  Bacterial polypeptide expressing nucleotide sequence isolated from the Sargasso Sea
tatcaaaatttattatggttagcattttttagttcttttgcagttaaaactcctatgtggccagtacatacgtggctgccagatgctcatgtagaagctccaactgttggatctgtattgctagcagcaatattgcttaaaatggcaggatatggatttattagattttcgataggattatttcctatagcttctgaaaattttacaatgtttgtttatatcttaagtttaattgcaattatttacacatctctggttgctttgatgcaggaagatatgaaaaaactcatagcatactcctcagttgcacatatgggatttgtaacactaggcatattcacaatgacccaacaaggtattgagggaagtattttccaaatgattagtcatggacttgtatctgctgcacttttcttaagtgttggagttgtttatgaaaggtatcatacaagactaataaataaatacggtggtttagtctccataatgccaagatatgcaattgtttttatggtattcacactaggggctctaggactgcctggaacaacaggttttattggggaatttttaattttaatgggcgcatttgagaaaaatatcttagttgcgatgattgcaagtttgggagtaattttaggagcagcatatatgctgtggctatttaaaagagttgtttttggcaaaatgaataatcaagagcttaaaagtatgagagatttaaaaacttttgaaattatcactttatcagctctagtaataccaattttattttttggtttttacccagagcctttaatgaattcaattgaagcatcagtcgagaataccttaaacatgtacaactttgacttaattaaca

SEQ ID NO: 220919 - DNA, 886 bp, Unknown
  Bacterial polypeptide expressing nucleotide sequence isolated from the Sargasso Sea
gggtatagaagctaagtatcaaaatttactttggttagctttttttagttcttttgctgtaaaaactcctatgtggcctgttcatacttggttgccagacgctcacgttgaagcacctaccgctggatctgtacttttggctgcaattttacttaagatggctggttatggttttattagattttcaattggactgtttcctttagcttcagaatattttgttccgttaatatatactttaagtttaattgcaataatttacacttcttttgtcgccttgatgcaggaagatatgaaaaagttaattgcatattcatcagtagcacatatgggatttgttactctgggaatttttacaatgacacagcaaggtttagaaggaagtattattcagatgattagtcatgggttagtttcagcagcgttatttttatgcgttggagtggtttatgaaagaatgcattctagattaattaaaacttatggaggaattgtaagtttaatgcctaaatatgctgttttatttatgatatttacgcttgcagcaattggattgcctggaacgagtggttttattggggagttcttaatattaatgggtgcatttaaaaagagttttttagtagcgttcatcgctagttttggagtaattttaggagcagcttatatgctttggttatataaaagagttatttttggcaaacttattaataaagatttgcttaaaatgatagatttaaataattctgaaatttttattttgatatcattagctattccgactctattttttggtttttatccagaacctttactaaacacaatcagtgtttcgattagtaatttgattgaaacctataactatcaaatattattaaacaagtaa

SEQ ID NO: 220920 - DNA, 1010 bp, Unknown
  Bacterial polypeptide expressing nucleotide sequence isolated from the Sargasso Sea
tactctttagggatcgacggtatcagtctcttcatggtgctgcttaccaccttttctacgtcgatagcgatcttgggatcgttcaattacatcaagacaaaagagacagccttttacgcgctgatgcttcttttagaagccgctgtgatcggtgtctttgtaacgacggacgtcttccttttctatgtcttcttcgagcttacgctcgtaccgatgtacttcattgttggtatatggggtggtgagagacggatctatgccgcgataaagtttttcctgtatacggcttttgggtctcttctcatgttggttggaattctcttcctgttctggaaagccaagaatttcatgggtatgccgacatttgcttacgaagatttcttgctggtaccattgtctggaacggagcaactgtggctttttaccgcattcgcgctcgcgttcagtgtaaaggttcctgtctttcctctgcatacatggcttcctgacgcgcacgtcgaggctccgacacctggatccgtgattcttgctgcggtgctgctcaagatgggtacgtacggcttccttcgattcctgctgccgttcttcccactagcgtcacagcatccaaccgtagtgactacgatgctcgttctagctgtgattgggattctttacacggcctgggttgcagctgtgcaaccggacgcgaagaagttggttgcgtacacgtccgtggcgcatatggggtttgtggtgcttggcgtttttgcactcaatgtgaatggtctccagggtggcttggtcgtaatgatctcacacggcattagcacgggggcactcttcctacttctcggtatgttgtacgaacggcgccatactcgcagaattgctgacttcggcgggatcgctcgagtcgcaccatggttcgcaacagcgttcatgattactgcgttagcctcgatcgggctgccaggcactagcggtttcgtaggggagttcctggccttgatgggcgccttcgaatcaca

SEQ ID NO: 220921 - DNA, 1045 bp, Unknown
  Bacterial polypeptide expressing nucleotide sequence isolated from the Sargasso Sea
tatgataggtgttttttgttctcttgatttagtagtcttttatttattttttgaggcaggtcttattccgatgtttttaataattggtatttggggtggtgaaagaagagtttactcggcttttaaattttttctatacactttattaggatcagttcttatgttgatcgctattatttcaatttattggattacaggtactactgatgttgaaatactttatgcacttggtattcagtcagaatatcaaaatttattatggctagcatttttcagttctttcgcagttaaaactcctatgtggccagtacatacttggctgccagatgcccatgtggaagctccaactgttggatctgttttacttgcagcaatattgcttaaaatggctgggtatggatttattagattttcaataggtttgtttcctatagcatccgagaattttacaatattagtttatgtcttaagtttaatagcaatcatttatacatctcttgtggctttgatgcaggaagatatgaaaaaactcatagcatactcatcagttgcgcatatggggtttgtaacattaggtatcttcacaatgacccaacaaggtgttgaaggaagtatttttcaaatgattagtcatggacttgtatcagctgcacttttcttaagtgttggagttgtttatgaaaggcatcacacaaggttgattaataaatatggtggcttagtcactgtaatgccgagatatgctattgtttttatggtattcacactaggggctttaggactacctggaacaacaggttttattggagaatttttgattttgatgggtgcatttgaaaaaaatattctagtagcgttgattgcaagtttgggagtaattttaggagcagcatatatgctatggctatttaaaagggttgttttcggcgaaattaataatcaagagcttaaaagtatgaaagatttaaaaacttttgaaattattaccttatcagccttagtaatacctattttattttttggtttttatcacagagccctttga

SEQ ID NO: 220922 - DNA, 970 bp, Unknown
  Bacterial polypeptide expressing nucleotide sequence isolated from the Sargasso Sea
ctggctgtttcaattgcaggaatacctctatttgtattaatggcgcttaatgcaactgttgcggtctatgttgaacgaaaggtctctgcatttatgatggaccgtattggccctatgggtcaaggaccaggcctgcacgctggtccatggggcgttcttcagacaatagctgatgctgttaaactcttaattaaagaagacactattccctcctcagcagataaattgctatttaaagttgcaccattcataatatttattggggcatttctcggtattgccgtactcccctttagttcagtcatacaggttgttgatataaatattggagtcttttacataattgcagttggctcagtgggagtacatggtattgtaatggcaggatgggcatcaaataacaagtggtctttgtatggagcaatgcgatctgctgctcagattattagctatgagatccctgcaggattatcaataattgtccctattatgatgacaagcacaatgaatcttcaatctatgattgaatttcaatctggctctatatggggtattcttcctaactggattatttttaataacccttttagttttctagccttttttattttctttatcagtgctgtagctgaaacgaatcgtactccatttgatattcctgaagcagagtctgagctagttgctggatggatgactgaatattctggctttcgatgggcggtatttttccttagtgaatacgcaaatatgtttgttgtaagcggtcttgctgcagcaggttttttaggaggatggctaagtcctatcccaggcctatttaattcaccaatgtggggcctattttggttttttagtaaaattatatttttaatttttgtgatgatgtggtttagatggactttcccaagattaagagttgatcagttaatgcatgttgctggaaagtgtttatacctatcgcaatgttaaa

SEQ ID NO: 220923 - DNA, 1117 bp, Unknown
  Bacterial polypeptide expressing nucleotide sequence isolated from the Sargasso Sea
ttgagcggagacctactttcactattcatattttttgaagctttacttattccaatgtatttcttaatggggatttggggtggagaaaatagaaggtatgcaacaattaaatttattatttacacagtatttggttcagtgtttatattcattgggaccgtatatgctggagtaataagttatggagtaacaggtagattagctctagattttgcaactttatcctcacttacttttaccacggaacaatcaagagtattgtttttgatgtttacctttggtttcttaattaaggtaccaatatttcctctccatacttggttaccagatgctcacgttgaagcacctactgctggaagtattttattagccggggttttattaaaggttggagcttatggaatattgagagtttccatcccattttttactgaaggcttcttagaatataaattcttaattgctgttttatctgtaattgggattatttatggagcaattgtagcgattgctcaaatagatattaagagactcattgcttactcatccgttagtcatatggggtttgtaatgcttggtatatcagctggtaattatttaagtttagaaggtgcaatcattcagatggtaaatcacggtcttacaacgggagcattatttatgcttgtaggttttctttatgaaagacgtcacacaagaagaatttcagattttggaggaataaaggcaacaatgccaaagtatgcagcaatatttttgttttgctccttcgcatctattggcctcccaggattaaatggttttgttggagagttcatgatccttatgggtagttttgctacatataaagtgttatctggaataggtgctttcggagttgttctcgcagcaatatatatgctttgggcttatcaaagaatgtttactggagagatctcaatacaagaaaataaagaacttgttgatttagattcaaaggaaatgatctctgttgttcccttattagttttaatgttgtttattggaatttatccaagctttatagagggttatgtaactcaagatgcattactcatatctgagattattgatatttttagtgggaggttgaattgag

SEQ ID NO: 220924 - DNA, 1099 bp, Unknown
  Bacterial polypeptide expressing nucleotide sequence isolated from the Sargasso Sea
atgtcaattgatataataatctctcttgttaaagcttttttaatcctaggtttattactaaccaatacactcctattaatttggctagaaagaaaagttgttgcaggaatgcaagcacgagttggtccagatagagcggggccctttggaattttacaaacacttgctgatgccataaagcttttactaaaagaacaaataatgccgcttaaagctgacagagctatgtatattttggctccaatacttgcattagtaccttcatttttaatatttatgattattcctttaggtccagatattgatatagaaataaatggacaaaatattagagtccctcttgttggtgccgatttgaatgttggcgttttatttttcctagcactttcatctttagcagtttatagtgtagtccttgctggctggtcttcaggttcaaaatatcctcttttaggtggcgttagagcatctgctcaaatgatttcttatgaagcagcaatgggtctttcactggttccagtaattttatattctgggtctatgtcaatgacggaaatagttaaaagccaagaaggtcatctttcaagtccaataccatttttagatgcgatagtaagttttataccaaagtggaatgtatttcctcaatttgtagcttttgcaatattttttgttgcctcaatcgcggaagtaaatcgagcaccttttgatcttgttgaggcggaacaagagttagtaggaggttttcatacggagtattcgggatttaggtttgctatgtttttcttggctgaatatataaatatgtttaacatgtgtgcaattacagcgacatttttcttgggaggatggctagggccaacattttcaaactttttacctccattaatttcaggactaatgcctgctttttggcttggcataaaaacatttggtcttttgtttatttatgtatggattagggcaactttacctcgcttaagatatgaccaattaatggagctaggttggaaaagaatgatacctatatccttgatatggcttcttttaacttcagttgttttaggtataagagagtttggtttgccatggagctaaa

SEQ ID NO: 220925 - DNA, 814 bp, Unknown
  Bacterial polypeptide expressing nucleotide sequence isolated from the Sargasso Sea
atgtggccagttcatacatggttaccagatgctcacgttgaggctcctacagcaggatctgtattactagctgcaattttgttaaagatggctggatatggttttataagattttctttaggtcttttcccggttgcatcagaggtatttacaccattaatttacaccttgagtgttatagcaatcatatttacttcactgatagccttaatgcaggaagatatgaaaaagttgattgcttattcatcagttgcgcacatgggctttgtaactttgggtatattcactttgcaacaacaaggaattgaaggaagtataatccaaatgataagccatggcttagtttcagcagcattatttttaactgttggtgtagtttatgacagaatgcattctagattgataagcacttatggtggactagtttctgtaattccaaaatattcaatattgttcatgttatttgctttagcttcacttggtttacctggaacaagtggatttattggtgagtttttaatattaatgggagctttcaaagataactttttagtagctgttttagctagtattggggtgattttaggagctgcatacatgttgtggctctataaaagagtagtatttggaaaattaattaatgaagatcttaaaaaaatgttagatttaaatagatctgaatattttattttatcttgtttagctgtaccaatcttattttttggtttttatcccgatccattaatcaacactattgaagtttctgtcactgatttaattaatacacataacacaaatatagctagtaaataat

SEQ ID NO: 220926 - DNA, 1170 bp, Unknown
  Bacterial polypeptide expressing nucleotide sequence isolated from the Sargasso Sea
tttgattacatatttaattagtttttttaattttaaaaaattagagttggagacattgaattacattataccaacaataatatattcaagcttattgtttattttatttttcatttctaatattaattcattatcaatcccctttttaaccattaatggtaacgatattaaccttatttttgattacatagacaaaaacctcttaatgtcaaaagttgtcttaataatatcagctttggtacttatatattcttccaaatttattgaaggtgaggaaagaaggtctcattccaggtactttctttttttatcgattttcatttcctcaatgtttatgtttacaatatcttctgacctttttagtaactttattttttgggagcttttagggctatcctcctatttcttaataggtttttggaataaagactctgaagcaattaaatcttcaaccatagctttttggattacaagatttggcgatcttttctttcttgcaggaataatcttaatttttactactgctggtactttagatataaatattctcaatcaaatagcatcaaattcagatttggatattaagtttccattgctatttatagttatagggattttctccaaatcagctcaatttccattcaacatatggctacctaaagcgatgaaaggtccaactcctgtttcttctcttattcattctgcaactatggttgtggcaggtgttttattattatttaaaatctatccattaataagtaattcaattggacttcttaatttgctaacaacaattggaattatttcttcatttattggtgcaattgctgctttttatgaggaagacttaaagaaaatactcgcatattccacaatatcccatattggattaatgtttctagctattggcatctctaaacctgatttagcttattttcatatgttcagccatagtttttttaaatccttattatttttatttgctggtgttgtaataatgttaaatggaacttccaaattaaaaaacctagattcttctattaaactaaaatcaccgatgggggctatattagttatagcatgttgctcgcttagttccatttacttctttacaggttcattttcaaaagaatatattatttttagcatgataaatgatgctttatacat

SEQ ID NO: 220927 - DNA, 1447 bp, Unknown
  Bacterial polypeptide expressing nucleotide sequence isolated from the Sargasso Sea
ttgattgggaaaaatgccacatcactttcctactggttatcgttaacaacatcattgcttgtatttggtatgagtatgtatgctttatcaatgtttaagactgatcaagtcggcattcaatttgaattgattgctccatggatagaacgattcaatataaattatcatctcggcattgatgggatttctttcccacttatccttctcacgacatttattacacccatcgttatattaactgccagaacctcaaataaaatcaatcttcaccaatacttggcttctttcctgatattagaaggtttaatgataggcgtattcagttcactggacgctttcctattttatgttttctgggaagcaatgctgattccaatgtttatcatcataggaatctggggcggagagaatcgcgtgtatgcaaccataaagttctttctatacaccttccttggctcagtttttatgctgatcgcaatcatctatctctatataagcactggatcttattcgatctttgatttttacaatcttgatctatccagaatggaacagatcttgatatttttggcatttttattcgcattcgccgtcaaaattccaatgtggccagtgcatacatggttgccggatgcacacgttgaagcacctactggcggatccgtaattcttgcagcaatcctccttaaaatgggaggctatggtttactgagattcagcttgccgatcacaccagccgcatccaatgagttatccatgcttatggttgtcttgtccctgatcgctattatttatattggcatggttgctttatcgcaaacagacatgaaaaaactgatcgcttattcatccgttgctcatatgggctttgtaacactcggtacttttgttgtgtttcttaatcacgaaaatgcctcaatagagaatatgaatatagccatcagtggagcaatgatacagatgatttcacatggattgatatctggcgctttgtttctatgcattggtgtaatgtatgaccgcatacacagtagagaaataaatgattatggcggcgttgcattggcgatgccacgttttgctggtctaatggtcttttttgctctagcgaatgccgcattgcctggaacttcgggttttgttggtgaggtattgatcattctcgccagtttgaaagtcaacttctggattgcattactatctggcaccacattagtcattggtgctgcatacacgctatggatgattaaaagagttatttttggatcaatcaccaatgaaaaaatcagcaatgttaaagatactactgccgtcgaatttatttctcttacaatacttgcattaatggttttggctttgggtgtttacccagagccattgatgaagcttatgtatattactcttaatgatctttctgagcttgtctttgcaggagttggcttatgac

SEQ ID NO: 220928 - DNA, 1422 bp, Unknown
  Bacterial polypeptide expressing nucleotide sequence isolated from the Sargasso Sea
catgattgagataaacaatatcttaagtaccatgatctggcttcccatcctaggtggcctgtctttacttttgattggtgacgccgaagaaaaacgcaaagatctgatgcatatggttgcagttgcagtcagtatcattacttttttgttgagtatcaatttgtattctggctttgataatttattaccagcaatgcagtttgttgagcgaaatgcttggattgagtcactgaacatcgaatattatcttgggattgatggaatttctgcgcctttaattatactcaccgcgtttattactccgtttgtggtggtaagcagttgggatgtcataaaaaataagccagctcaatattatgctgcttttttgattttagaaggcctaatgattggtgtattcagtgcattagatgccattttgttctatgtattttgggaagccatgctggtgccgatgttcttaatcataggcatatggggtgggaagcgaagaatttatgccacgattaagttctttttgtacacctttctcggttccgttctgatgctggtttcattcatctatttatacaatcaaatggatgtattcagcctgcctgatttcatgcaagcgccactcactatgcttgaacagcaattgatattcgttgctttcttgttggcttttgcagtcaaagtacctatgtggccggtacatacttggcttccagatgctcatgttgaagcacctactggaggctctgtaatactggcagctattatgttgaagatgggtggctatgggttcatcaggctctccatgccaattacaccggatgcgagcgaatatttttcattcatgatgatagtcttatccctgattgcagtaacctacatcggttttgtcgcactaatgcaaaaagacatgaaaaagctcattgcctactcatctatttcgcacatgggttttgttacgctgggtttctttattgtgtggtcgtattctcacatgtccgatgcctctctgggtgttgttggcgggatggtgcaaatgatttctcatggattgatttctggggcgatgtttttgtgcgtcggcgtgctttatgatcgtatgcacagtagggaaatcagcgattacggtggtgtcgctaacagcatgcctttatttgctggattcatggttttctttgctatgtcaaacgcaggtctgccgggcacctctggttttgttggcgaattcatggtgattttggcaagttttgaggccagcttttggtatgcatttttagccgcttctaccttaattttgggggcagcgtatacattgtggatggttaaaagagttctttatggagaaattgccaacgacaatgtcgccaaattagaagatatcaacaaccgagaattttatgtgctgatggttttagcaatctcagtatt

SEQ ID NO: 220929 - DNA, 1078 bp, Unknown
  Bacterial polypeptide expressing nucleotide sequence isolated from the Sargasso Sea
atgactgttgattttctcatagattggttttcaactatcggggattttcctgtgattgcatttattctagctgtaattatatctggcattccactctttttgcttatggcattaaatgcaatggttgctgtatatgttgaaaggaaagtttctgcgtttatgatggatcgtattggtccaatggggcaaggtccaggtcttcatgcagggaaatggggattgctacaaactctagctgatgctatcaaactattggtaaaagaggatacaattcctgaaacctcagatagattgctatttaaaatggctccatttataatttttattggcgcttttcttggtcttgcggctgttccctttaattcaagcttacaggttgcagattttaacgtcggagttttttatataattgctgttggttcaattggtgttattggaattgtaatggctggctggtcctcaaataataaatggtcactttatggagcaatgcgttcagcggcccaaattattagctatgaaattcctgcaggcttatcgataatagtaccaattatgatggcaggaactatgaatctacaagagatgattcagtctcaatctggatctgtttggggtatattgcctaattggattatttttaacaatccttttacatttttagctttctttattttttttattagcgcggttgcagaaacaaatagaacaccttttgatataccagaggcagaatcagaattagttgctggttggatgacagaatattcagggtttcgttgggcagtgtttttcttaagcgagtatgcaaatatgtttgtggttagtggattagcagttgctggctttctaggcggatggctaagcccaattccaggtatgttcaattctgcaggttggggacttttttggtttatgggaaaagtaatctttctcatattccttatgatgtggtttcgctggacttttccaaggcttcgagtagatcagctaatgcatgtatgctggaaagtttttatccccatagctatgtttaatatttttggagtaggaatttggaaacttatttttgggtaaa

SEQ ID NO: 220930 - DNA, 1498 bp, Unknown
  Bacterial polypeptide expressing nucleotide sequence isolated from the Sargasso Sea
aatgacctttccattactatcttcattaatattactaccgttattaggatctttatttattttttttataagagaaaaaactacaaagaactaccagagtattaaatatgttgctctctttgtttcattttcaaattttattatctctctttatctttggtatctattcgacaactcaattagtgattttcaatttgtagaagaaaaagtttggataaaagattttattaattataaagttggtgttgacgggatttcaatattatttattattctcacaacattcattgtgccactatgtgtagtttcaattaatagtaatataaaaaatagacttaaagaatttctaatagcagtactaataatggaaagttttatgattggtgtattttgctcactcgatcttataattttttacttatttttcgaaggtgggttgataccaatgtttcttattattggtatttggggcggatcaagaagagtatactctgcttttaaattttttctgtttacactgcttggctcaatattaatgctcgtagctataataactatttactggatatcagataccaccgacataactatcctttattatttaggcattgacccaagttatcaaaaattgctttggttagcattttttagctcttttgctgttaaaactcctatgtggccagttcatacatggcttccagatgcccacgtggaagcaccaacggttggatctgttttattagcagctattttacttaaactagctgggtatggttttataagattctcaattggattatttcctattgcatctgatttttttacacctttaattttctcattaagccttatcgcaattgtatttatttcattggttgcgctaatgcaggaagatatgaaaaaattgatcgcatattcatctgtagcccatatgggttttgtaacattaggaatatttacatttactcagcaaggtttagaaggaagtataattcagatgatcagtcatggaattgtatctgctgcactttttttttcagtcggggttttgtatgacagaacacaatcaagaataataaataattatggtggtctggtatctttaatgccaaaatactctgtgatgttgatggttttttgtttagctgcactaggtttacctggaacttttggttttattggtgaatttttgattcttttaggaacgtttaagaaaagttttgttgtagcaactatagctagtctaggcgtaatctttgctgctgcatatatgctttggctatataaaagacttatttttggcgatattaaaaataaagaacttcttagcataaaagacataaacatacatgaatcttttattttagtaagtttattaataccaattattttatttggtgtgtatccagaaactttgttaaatactatcgaagtttctataaatagtttaattgaaattataattataatattaatgataaataataataaaaatgct

SEQ ID NO: 220931 - DNA, 884 bp, Unknown
  Bacterial polypeptide expressing nucleotide sequence isolated from the Sargasso Sea
ttttaaggcattattatttttaggcgctggctcagttatccattctttaaataatgagcaaaatttagataaaatgggaggcttgtggaagaaaatgccatatacctggattctaatgattgtaggaactttggcattaacagggttccctttgttatcaggttattattcaaaagatgcaataattgaattcgcctatttaagaggaagttttctggcttatttatctgcaggtattggaattttaacagcaatattgacttcaatatactcttggagattaatctttaaaacatttcatggttcttacaataatgaaaattgtgtttttgaaaaaatacatgagtcaccaaaatctatgatggtaccattaatcttacttgcactaggttcaatttttgcaggtttattttttaaagatttatttataggttatgatagtgatttaattttttggaaaaattccattttctttatctcggaaatttcaaaagatcatccaccattttggtttttgattttaacgccagtatttgtcacgatgatgattccaatttcttattatttatttataattaacaaaaatattccaaaatatttagccgaagaaaacaaaggtgtatatgattttttaatcaataaatggtactttgatgagatttacgattatatttttatacaaccagcaaaaaaaattggaatttttttatggaaagttgttgatttaaaaactattgatagatttggtccagatggaatatcaaattttataaaattcttatctaataaagctgttaagtttcaaagtggttatatttatcattatgcttttgtcatgttaattggtgtatcaattcttctaacttatttaatggtgtattaag

SEQ ID NO: 220932 - DNA, 1099 bp, Unknown
  Bacterial polypeptide expressing nucleotide sequence isolated from the Sargasso Sea
aatgtcaattgatataatcatctctcttgttaaggcttttttaatcttaggtttactactaaccaatacaattttattaatttggttggagaggaaagttgtagcagggatgcaatcacgagttggtccagacagagcagggccctttggaattttacaaacacttgctgatgcgataaagcttctactaaaagagcaaatcatgcccctaaaagctgatagagcaatgtatattttggcaccaattcttgcattagttccttcatttttaatttttatgattattcctttaggcccagatattgatctagaaataaatgggcaaaatattacaattcctcttgttggtgctgatttgaatgttggtgttttattttttctcgcactttcatctatagctgtttatagcgttgttcttgctggttggtcttcaggttcaaaatatcctctattagggggtgttagagcgtctgctcaaatgatttcttatgaagcagcgatgggtctttcacttgtaccagtaattttatattcggggtccatgtcaatgacggaaatagttaaaagccaagaaggtcatctttcaagtccaataccatttttagatgccatagtaagttttataccaaagtggaatgtatttcctcaatttgtagcttttgcaatattttttgttgcctcaatcgcagaagtaaatcgagcaccttttgatcttgttgaggcggaacaagagttagtaggaggttttcatacggagtattcgggatttaggtttgctatgtttttcttggctgaatatataaatatgtttaacatgtgtgcaattacagcgacatttttcttgggaggatggctagggccaacattttcaaactttttacctccattaatttcaggactaatgcctgctttttggcttggcataaaaacatttggtcttttgtttatttatgtatggattagggcaactttacctcgcttaagatatgaccaattaatggagctaggttggaaaagaatgatacctatatccttgatatggcttcttttaacttcagttgttttaggtataagagagtttggtttgccatggagttaa

SEQ ID NO: 220933 - DNA, 1051 bp, Unknown
  Bacterial polypeptide expressing nucleotide sequence isolated from the Sargasso Sea
ttagaaacttttatgataggagtgttctgttctctcgatctagtaattttttatttattttttgaagctggattaataccaatgtttttaatcataggtatttggggagggccaagaaaggtttattcagcatttaaattctttttatatactcttttgggttcagtcttgatgcttatagctatcatctcaatctattggataactggaactactgatgtaacccaaatctatgaaattaaaattcctggagaattacaatatttattatggttagctttttttagttcgtttgcagttaagttacctatgtggccggtacacacatggttacccgacgcacatgttgaagcaccaaccactggatctgtagttttggcagctattttacttaaaatggcaggatatggttttttaagattttcagttgggatgtttcctattgcttcagaatattttactcctttgatttttgccttaagtgtcattgctgtaatttacacttctttagttgcattaatgcaagacgatatgaaaaaattaatagcttattcgtcggtggcacatatgggttttgttacaataggaatttttacatttaataaacaaggtatcgaaggaagcataattcaaatgtttagtcacggattaatttctgctgcactttttttaagcgtaggtgttctttatgataggacacattcaagattaattaaatcgtacggaggaattgtaaatatattaccaaaatattcttttctttttatgatttttgctctaggagcactaggacttccagggactagcgggtttataggtgaatttttaattttagttggagtttttaaggtaaacgtgttggttgcaatagttgctagcatcggagtcattcttgcagccgcatatattctttggctttataaaagagtgatattcggcaagcttgaaaatactcaattaaaaaaaatgaaagatgttaatttttctgaaggatctattctttttactctttgtttaatgatactattttttggtttttatcctgaaccac

SEQ ID NO: 220934 - DNA, 898 bp, Unknown
  Bacterial polypeptide expressing nucleotide sequence isolated from the Sargasso Sea
tggtattcaagttgaatatcaaaatttattatggctagcattttttagttcttttgcagtaaaaactcctatgtggccagtacatacttggctgcctgatgctcatgtagaagctccaactgttggctctgtattattagcagcaatactgctcaaaatggctggatatggatttattagattttctctaggtttatttcctatagcttctgaaaatttcacaatgttagtttatatcttaagtttaattgcaattatttacacatctctgattgctttgatgcaggaagatatgaaaaaactcattgcatactcctcagttgcacatatggggtttgtaacattaggtatcttcacaatgacccaacaaggtattgagggaagtatttttcaaatgattagtcatggacttgtatctgctgcacttttcttgagtgttggagttgtttatgaaaggcatcatacaagactaataaataaatatggcggtttagtctccataatgccaagatatgcaattgtttttatgatattcacactaggagctctaggactacctggaacaacaggttttattggagaatttttaattttaatgggcgcatttgagaaaaatatcctagtagcgatgattgcaagtttgggagtaattttaggagcagcatatatgctgtggctatttaaaagagttgttttcggaaaaattaacaatcaagagcttaaaagtatgaaagatttaaaaacttttgaaattatcaccttatcagctttagtaataccaattttattttttggtttttatccagagcctttaatgaattcaattgaagcatcagtcgagaatactttaaacatgtacaactttgacttaattaacaaccttgcatcaaaagactaa

SEQ ID NO: 220935 - DNA, 328 bp, Unknown
  Bacterial polypeptide expressing nucleotide sequence isolated from the Sargasso Sea
catgatcgattactcggggatggcgttcgcgctgttcttcctcgccgagtacatcaacatgatcgtgatctcggcattggctgcaacgctgttcctcggcggctggagcgcaccgttcggcttcctgtcgtttatcccgggcatcgtttggctcgtcgccaaggttttcttcctgttgtcggtattcatctgggcgcgtgccacgttcccgcgctaccgctatgaccagatcatgcgtctgggctggaaggttttcattccggtttgcgtggtgtggctcatcgtggtcggcttctggatcatgtcgccgttgaatatctggaaataa

SEQ ID NO: 220936 - DNA, 1312 bp, Unknown
  Bacterial polypeptide expressing nucleotide sequence isolated from the Sargasso Sea
gatgaactttccaattttatcgtccttaattttgctgcctacaataggtgctttatttatattattcacaaaatcatcaagtgaaaaatatcaaagttccaaatatgtagctttgtttatttctttagcaaattttttattatctttatatctttggtatgtttttgataaaaattcagtaaactttcagtttgtagaaaatagagagtggttatcaggatttataaattataaagttgggatagatggtatttcaattttatttgtaatattaacaactttcataactccaatttgcattatatcagttaatgctacaattactactagactaaaggatttcttgattgccatattaataatggaaacatttatgattggtgttttctgctcacttgatctagtagtgttttatttattttttgaagcaggtcttataccaatgttcttaataattggtatttgggggggtgaaagaagagtctactcggcttttaaattttttctgtacactttattaggatcagtacttatgttggttgctattatttcaatttattggataacaggaaccactgatgttgaaaaactttatgaacttggcataaagaccgaatatcaaaatttattatggctagcatttttcagttccttcgcagttaaaactcccatgtggccagtacatacgtggctgccagatgctcatgtagaagctccaactgttggttctgtattactagcagcaatattactaaaaatggctggatatggatttattagattttcacttgggttatttcctatagcttctgaaaatttcacaatgttagtttatatcttaagtttaattgcaattatttacacatctctggttgctttgatgcaggaagatatgaaaaaactcattgcatactcctcagttgcacatatgggatttgtaacactaggtatcttcacaatgactcaacaaggtattgagggaagtattttccaaatgattagtcatgggcttgtatctgcagcacttttcttaagtgttggggttgtttatgaaaggcatcacactagactaattaatagatacggtggtttagtctcaataatgccaagatatgcaatagtttttatggtattcacactaggagctctaggattacctggaacaacaggttttattggagaatttttaattttgatgggagcatttgagaaaaatattctagtagcaatgattgcaagtttaggagtaattttaggcgctgcatatatgctatggttatttaaaagggttgttttttggcgaaatgaataa

SEQ ID NO: 220937 - DNA, 1099 bp, Unknown
  Bacterial polypeptide expressing nucleotide sequence isolated from the Sargasso Sea
aatgtcaattgagttaataatttcactggtaaaagcaaatatagttttggcagttttattaaccaatacaatattattaatttggtttgaaagaaaagtagttgcaggaatgcaatctagagttggacctgatagagctggtccatttggaatacttcaaactttagctgatgctattaagttattattaaaagaacaaattctcccttcaaaagctgacagagcaatgtaccttcttgcaccattaattgcacttgttccatcttttttaatctttatgattattcctttagggcctgatattacggttgaatggcaaaatgcactatatactattccattagttggtgcagatttaaacgtaggagtcctgtacttcttagcattttcctcaattgctgtatatagcgttgttttggctggatggtcttcaggatcaaaatatcctttattaggaggagtaagagcttctgcacaaatgatttcttatgaagctgctatgggcttagcattagtccctgttattttgtattcaggatcactttccttggttgatattgtaaatagccaatcaggaaatttatctagttcaattccaattcttaatacaatcgtttcatttattcctaaatggaatatttttcctcaatttgttgcatttggaatattttttatagctgcagtagctgaagttaatcgggcaccttttgacttagttgaagctgaacaggaactagttggaggttttcatactgaatattcaggttttagattcgctatgttttttttggcagagtatataaatatgttcaacatgtgtgcgattactgcaactttctttttaggtggatggctaggccctacatttgaaggaatattacctccaattttctcagttataatgccaataatttggctaggtgtaaaaacttttctacttttatttgtttttgtctggataagagcaacactcccaagattaagatatgaccagttaatggaactaggatggaaaagaatgattccactatctttagtttggctaatactttcagcaatagttttaggcttaagagaatttggattaccttggagttaa

SEQ ID NO: 220938 - DNA, 397 bp, Unknown
  Bacterial polypeptide expressing nucleotide sequence isolated from the Sargasso Sea
aatggaaatttcaattttagcattaccattaatcgcatcaattatatctggattttttggtaaatttataggcgacagaaattctgaaatagttacaagtttgttggtatcaatttcagctattctttcagcaattgtattttatgaggtaatttttaatcaatatgaggaaaatatcataattgctacatggattaattctggatcacttgaggtaaactggtcaatgaaaatagatgcattgtcatcagtaatgttagtggttgtaacttttgtttcggcattagttcatatctattcaattggatatatgtctcatgatcctcataaaccaagatttatggcttacttatcgttatttacatttgccatgttaatgttggtaacagctgaataa

SEQ ID NO: 220939 - DNA, 916 bp, Unknown
  Bacterial polypeptide expressing nucleotide sequence isolated from the Sargasso Sea
atgcttgactatccaatacttagtattttgatttggctacccattttggttggacttatattagtcgcatcaaatgatataggaaagtcattatcaacaacaataactttattaaccactctaatcatcttaattatctctataaatcttattcaatcttatgattattcattaggaaacttacaattcatagaaaggtttgtttggatatctggtttggatattcattactatcttgcagttgacggtatctctgtatcattagtgcttttaacgtcatttataaatttcttaatcgcaatttatgcttcatctgaagattatgataataagtcatcatatttaggttattttttaatacttgagggtttactgatgggaaccttctctgcttttgatagtattctgttttatatattttttgaaagcctgttaataccgctttttttaataataggaatatggggaggagagaacagaaagtatgcaactataaaattcttcctttatacattttttggatcggtacttatgctgatatcaataatttacttagcgaacttagccaactcattcgctatagaagatttctattatttaaccctatcatttgaggaggaagttttacttttactcgcttttctgattggctttggtataaaaatacctatgtggccagtgcatacatggttaccagatgctcatgtagaggcaccgactagcggatctgtgatattagcctctgttcttcttaaagttggtggatatggaatgattagattcttattgccgattacaactgaggctggtatttatctgagtgattacatgatatatctgtcacttatcgcaataatctacataagctttgttgcatttgctcaagaggatatgaaaaaacttattgcctattctt

SEQ ID NO: 220940 - DNA, 1330 bp, Unknown
  Bacterial polypeptide expressing nucleotide sequence isolated from the Sargasso Sea
ctttttagtgcacttttagtctttatgattcccaattctagaaaagaaatttttaggccaattggcataatattttcctttataactcttacacaatgtttttatttattattcagcgactatggaaaaacaaaatttgtaattatttctaattacaaatggatccaatcttacgggcttgaaatcagtatcggaatttctggtatgtcaactttactattactactaacttcgcttttagtatgtgtttccttgttatcaattggaaatgaacatgcagaaagcaaaggttttatcgggtcattacttgcattacattttgcaattaatggtgttttcattagtggcgatttaatttctctattcatattctttgaagcattgttaattccaatgtatttcttaatgggaatatggggaggagaaaatagaaggtatgcaacaataaaatttattctttacacagtttttggttcagtttttattttcatcggaacagtatacacagctgtaataagctatggtgctaatggctcactagccgttgattttgattcacttgcaaacttagctcttacttcttcacaatctaaaactttgtttttgctatttacttttggttttttaattaaagttccaatatttcctcttcacacttggttaccagatgcacacgttgaagccccaacagctggaagtattttattagcaggtgttttattaaaagtaggggcctacggaattttaagagtatcaatacctttttttactgagggatttttagcatataaaaattttgttgctgttctatcagtgattggaattatttatggtgcaatagttgcaattgcacaaatagacattaaaaagttaattgcatattcatccgtaagtcatatggggtatgttatgttgggtatttctgctggaggatatctgagtattgagggtgcaattattcaaatgataaatcatggtataacagctggtgcactatttatgcttgtaggatttctttatgaaagaagacacacccgaaatattagttcatttggcggaattaaaattacaatgccacgatacgcggcaatatttttgttcacctcttttgcctcgataggactcccaggattaaatggttttgttggtgaatttatgatattaatgggcagctttaatagctacaaagtcttaacatcaattgcagcatttggtgtagtgttagctgcaatctacatgttatgggcttatcaaagaatctttacaggtccgatttctaatgaaaaaaatgaaagcttgaaagatttagatacaagagagactctgtcaa

SEQ ID NO: 220941 - DNA, 121 bp, Unknown
  Bacterial polypeptide expressing nucleotide sequence isolated from the Sargasso Sea
ttgggcaatatcttaggcaaaatcggaatatttggatttacatcaatgatgatcttcctatttattcttaccattgggtttatttatgagtggaaaaaaggagcattagactgggaataaa

SEQ ID NO: 220942 - DNA, 1081 bp, Unknown
  Bacterial polypeptide expressing nucleotide sequence isolated from the Sargasso Sea
gatgacaattgattttattataaatcaatttactgagattattggaaattttcctgttgccgcttttttagttgcctgtgcatcagtaggtggtttgctttttgttttgatggctctcaatgcgatggtagcagtatatgtagaaagaaaagtctctgcatttatgatggatagattgggaccaatgggtcaagggcctggtcttcatgcaggaaagtggggaattctgcagacttttgcggatgcgattaaattgcttatcaaagaggacactatacctaagtcagccgatcaaatactttttaaagttgcacctttcattatttttattggcgctataattggtctctctgcgttaccatttagttcgtccatacaagccgttgacttaaatgtaggtgtattttacatcattgctgtaggctctatcggtgtaattggaattgtaatggctggatgggcatctaataacaaatggtcattgtatggcgcaatgcgttcagcggctcaaattattagctacgaaattcctgcaggtttatcgatcattgtgcctatcatgatgtctggcactatgaatcttcaaaacctcatcgagtatcaaagtgggtctatctttggaatttttcctaactggattatgttccaaaacccctttgcttttttagctttttttattttttttatcagtgcagttgccgaaacaaatagaacgccctttgatatccctgaagcagaatcagagcttgttgcaggttggatgacagaatattcaggctttcgttgggcagtctttttcttaagtgagtatgccaacatgtttgttgtaagcggtttagctgttgcaggttttatgggagggtggttaagcccgattcctggatttcttaactctcccgtgcttggacttttttggttctttggaaaagtgtcgtttttgattttcgttatgatgtggtttagatggacttttcctcggttaagagtagaccagctgatgtatgtctgctggaaagtttttatacctattgccatgttaaacatctttggtgtaggaatttggaaattaatttttgggtaa

SEQ ID NO: 220943 - DNA, 1295 bp, Unknown
  Bacterial polypeptide expressing nucleotide sequence isolated from the Sargasso Sea
aatgaattttccaattttatcttccttaattttgctgccgacaataggagctttatttatattattcacaaaatccacaagtggaaaataccaaagttccaaatatgtagctttatttatttctttagcaaattttttattatctttatatctttggtatgtttttgataaaaattcagtagactttcagtttgtagaaaatagagaatggctgtcaggatttataaattataaagttggaatagatggtatttcaattttatttgtaatattaacaactttcataactccaatttgcattatttcagttaatgctacaataaaaaatagacttaaggatttcttaattgccatattaataatggaaacatttatgattggtgttttctgctcacttgatctagtagtattttatttattttttgaggcaggccttataccaatgtttttaataattggtatttggggtggagaaagaagagtctactctgcttttaaattttttctttacactttattaggatcagttcttatgttggttgctattatttcaatttattggataacaggaaccactgatgttgaaacactttatgaacttggcataaaggctgaatatcaaaatttattatggttagcatttttaagttcttttgcagttaaaactcctatgtggccagtgcatacctggctgccagatgctcatgtagaagctccaactgttggatctgtattgctagcagcaatattgcttaaaatggctggatatggatttattagattttcattggggttatttcctattgcgtcagaaaattttacaatgttagtttatgccttaagtttaatagcaattatttatacatctcttgtagctttgatgcaggaagatatgaaaaaactcatagcatactcgtctgttgcgcatatggggtttgtaacattaggtatctttacaatgactcaacaaggtatcgaaggaagtattttccaaatgattagtcatggacttgtatcagctgcacttttcttaagtgttggagttgtttatgaaaggcatcacacaaggttaattaataaatatgggggcttagtctctataatgccaagatatgcaattgtttttatggtgttcacactaggagctttaggattgcctggaacaacaggttttatcggagaatttttaattttgatgggtgcatttgagaaaaatatcttagttgcaatgattgcaagtttaggggtaattttaggagcagcatatatgctatggctattaaaagagttgtttc

SEQ ID NO: 220944 - DNA, 553 bp, Unknown
  Bacterial polypeptide expressing nucleotide sequence isolated from the Sargasso Sea
gctccgtttgatttggcggaggcagagagtgaacttgttgctggcttccatacagaatactcaggcttgcgatggagttttttctttatggcagagtatggatcaatgtttttggtgagtgctcttgccgcgattctttttcttggaggttggaacggtccagttcccgtttcgaagctccttggactgagtgatggtatggcggtaaacgccccatacgcacttcgcttgctaggctgtgtcaaccttttcttaaaggctgcacttggtgtctttgtcatgatgtggattcgttggacgttaccgcgattgcgaattgaccaagtgatgacgacatgcttgaaatactgcactccaatagcagctgccatgtttgtgggcgtcatgctttggcaactgtttctgccaggggggcttgtcccaggtagcttccaaaacgctgctggtgtgcgagaagggtggcttgagcaaagcggcagcgaagagtctgttaataaagactctttgagtggcattaccccatcgcgtcgtattgcggaggtgtcgcgatgaa

SEQ ID NO: 220945 - DNA, 1066 bp, Unknown
  Bacterial polypeptide expressing nucleotide sequence isolated from the Sargasso Sea
aatgaactttccaattttatcgtccttaattttattaccaacaataggtgctttatttatattattcacaaaatcatcaagtggaaaatatcagagttccaaatatgtggctttatttatttctttagcaaattttttattatctttatatctttggcatgtttttgataataattcagtagactttcagtttgtagaaaatagagaatggttatcaggatttattaattataaagttggaatagatggtatttcaattttattcataatattaacaaccttcataactccaatttgcataatttcagttaatgcaacaataacaaatagactgaaggactttttaattgccatattaataatggaaacttttatgattggtgttttctgctcacttgatctagtagtattttatttattttttgaggcaggtctcataccaatgtttttaattattggtatttggggtggagaaagaagagtctactcggcctttaaattttttctgtacactttattaggatcagttcttatgttggtcgctattatttcaatttactggataacaggaaccactgatgttgaaaaactttatgaacttgggattcaggtcgaatatcaaaatttattatggttagcatttttcagttcttttgcagtaaaaactcctatgtggcctgtacatacttggctgcctgatgctcatgtagaagctccaactgttggttctgtattgctagcagcaatattgcttaaaatggctgggtatggatttattagattttcactaggtttatttccaatagcttccgaaaatttcacaatgttggtttatgtcttaagtttaatagcaattatttatacatctcttgtagctttgatgcaggaagatatgaaaaaacttatagcatactcgtctgttgcgcatatggggtttgtaacattaggcatcttcacaatgactcaacaaggaattgaaggaagtatttttcaaatgataagtcatggacttgtatcagctgcactttttttgagtgttggagttgtttatgaaaggcatcacaca

SEQ ID NO: 220946 - DNA, 922 bp, Unknown
  Bacterial polypeptide expressing nucleotide sequence isolated from the Sargasso Sea
cctgctctcctttgggtggtggaccggcattgtctggccagtgctctggatcctgatcaagatcgtctgcatcctggcaccgctgatgggtgccgtggcttacctcacgttgtgggagcgtaagctgctgggcttcatgcaggtgcgccacggccccaaccgcgtgggacccatggggttgctgcagcccattgccgatgcgctgaagctgctgaccaaggagatcatccagcccacggcggccagcaagggcctgtttgtcctggggcctgtcatggccatcatgccggccttggctgcctgggtagcgattcccttcggtcccgatgtggccctggcgaatgtgaatgccggcctgctgttggtgatggctatcacgtccatcgaagtctatggcgtgatcattgccggctgggcctccaactccaagtacgccttcttgggtgcactgcgggcctcggcgcagatggtgagctacgaaatcgcgatgggcttctgtttcctggtcgtgatcatggtctcgggcagcatgaacctgacggaaatcgtgctggggcagggaaggggcatggctgccgacaagggcctgacgttcctgtcctggaattggctgcccttgctgccgatcttcctcgtgtacctgatctctggcgtggcagaaaccaatcgccacccctttgacgtcgtggaaggcgaggcagagatcgtggccggccacatggtcgagtactcgggtatgggtttcgcgatcttcttcctggccgaatacgccagcatgtggctcgtgtccattctggcggcgctgatgttcctgggtggctggttgcctccgatcgacagcgctctgttcaactgggtgccgggctggatctggctgggtctcaagaccttccttgtggtgtccatgttcatcggatccggg

SEQ ID NO: 220947 - DNA, 991 bp, Unknown
  Bacterial polypeptide expressing nucleotide sequence isolated from the Sargasso Sea
tatacattgctcggttctgtattaatgttagttgctataatatccatatattggatagcaggcacgactgacgttcaagaactttataaaataggaattgatcaaaaatatcaaaatttgttatggttagcattttttagttcattcgcagttaaaacccctatgtggcctgtacacacatggttgccagatgcacatgtcgaagcacccactgcaggctcagtgctgttagcagctattttgcttaagatggcaggctatggttttattagattttctattggtttatttcctgttgcctcagaatattttgtaccactagtttacgtcttaagtattattgcaataatttatacctctctagttgctttaatgcaggacgatatgaaaaagttaattgcatattcttcagtggcacatatgggttttgttactcttggaatatttacaatgacacaacaaggtatcgaaggaagtataatacaaatgatcagtcatggattgatatctgcagctttatttttatgcgttggagttatttatgatcgaagacatacccgacaaattaaagattatggtggtttggtttcagttatgcctaaatacgcaattttatttatgatatttacattaggtgccgtaggtcttcccggtacaacaggatttgtaggggaatttttgattttattgggagcatttaaaaagagtttcatagttgccatttttgcaagtattggcgtaatattaagcgccgcatatatgctttggctatatcgtagagtagtttttggaaaaattgttaatgctgatttaaaaaatattgttgaccttaataagtctgaaaaaataattttgtggacacttgcaataccatctatattttatggtttctacccagagccaatttttaatacaatagatgtttctataaacagtttaatccagacatataatgcaaatttagatatctattttgcgggtaaaaattaat

SEQ ID NO: 220948 - DNA, 1186 bp, Unknown
  Bacterial polypeptide expressing nucleotide sequence isolated from the Sargasso Sea
caaaataataaatttatctctttatttctcattttggagggtttacttataggtgttttttctgcatttgatagtattttattttacatattctttgaatctatgttgatacctttatttttaataatagggatatggggtggcaacaatagaatctatgcgactcttaaattttttatatatacttttgtaggctcagtattaatgctgatttctttaatatatttatcgaatcaggcggatagttttaatatcgtagatttttacaatctgaatttaccacttgagacgcaaatctacatatttttggcattcttgattgcttttggtataaaaataccaatgtggccagttcatacatggttaccagatgcacatgtggaagcgccatcttctggatccgtcatactagctgcggttttacttaaagtcggaggttacggcctaataagatttttgttgcccatcacatcggatgcaggtttttatcttaatagcatactaatcacactctctttgattgctataatttacatctcatttgtagcacttgctcaaaaagatatgaagaagttaattgcgtactcttcagtagcacacatgggatttgttacgctaggaatatttcttgcctttaacatagcaaaacccggtatcgacaaagatattttattgctaggcttacaaggctcagtcatgcagatggtttcgcatggtttaatttctgctggtctgtttttttgtattggaataatttatgctagaacaaaaaatagggcaattgatgatcagagcggtataggtcaagtaatgccacttttttctgcgatgatgatgttttttctcttatcaaatgcaggtcttccaggaacttctgggtttgttggagaatttatggtgatgattgcaggactagaagtaagttatttatatgcctttttagcatccatgacacttgttcttgcggcatcatattctctatggttaggaaaaagagttttgttcgggctgccatctaatgacaaaataaccaatatgtcatctatgaaaagtgaggaattttggccattaataattctcattctttttatcatactattaggtgttaagcctggaattattctagatatctctctcgtctcctccgaatatatgattgatgttattagtggagatatcaaatgat

SEQ ID NO: 220949 - DNA, 1099 bp, Unknown
  Bacterial polypeptide expressing nucleotide sequence isolated from the Sargasso Sea
atttattttgatatcctcgttttcatatttaaaatctctaaaaatatttaaaattgaatatccaattcttattgcctcatctctccttggaatacttgtaatgatatcttcaatgaatttaatagttttttatattggattagagttacaatcattagctctgtatgtgttagcatcatttaatagagatcagataaaatcttcagaggcaggattaaaatattttgtccttagcgcattatcatcgggattgctactatatggttgttcacttatatacggttttaccggatcaacagattttattacaatttcacaatttttgagtaatgatagttttggaataaaatttgcaattgtttttattttagtaggtttatcatttaaaatttctgctgtaccatttcatatgtgggcacctgatgtgtatgaaggttcaccaaccactgttacacttttttttgctttaattcctaaagttgcaattatagcagttttgataaagattttgtacattcctttttttaatttaatagaccaatggcaagtaataattatttttctttccatatcttctatgacatttggagcaatagcagctataggtcaaaaaaatttaaaaagactaatggcttttagttcaataggtcatatgggctatgctttagcaggaatagctactggtacaaatcaaggtattgaaagttctattacatatataatcatttatataactatgacattaggtttttttgtatgcttgttaatgataaaaaaaaatgatttatactatgaaaacatagaggatctttcaggattatcaaaaagccacccaatattatcaatatgttttctaattatgcttttttcattagcaggaatcccacctttagcaggattttttggaaaattttatatctttttagctgttatagaacaaaagatgtattttttagctatagtaggtttaattgcaacagtaatatccgccttttattatttaagaattattaaagtaatttattttgatgaagaaaagaaaaaatacgacacagaacagcactttggtttaaaagtttcattagctataactacattt

SEQ ID NO: 220950 - DNA, 1144 bp, Unknown
  Bacterial polypeptide expressing nucleotide sequence isolated from the Sargasso Sea
gctgaactcaagttttggaaacaaatctaagcacgttgctgtggatcgtgtccataacagaggttatcacggaatctggttcctatttcctggcttcttccaggctttagccgacttcctaaagttcgccacaaaggaacatatggtaccaacaaaggctgatagattggttttcgaaaccgcaccagtaatcattattgcaacgacaatcatggtctatgcattcatcccattcggcccacatatctgggctgcaaatccagagttatctttggtattcatgatggcggtgttcggtgtcgctccacttggtgtattctttgcaggttggtcttcaaacaacaaatacacactcatcggcggaatgaggtccgcggcacaacttacagcttatgagatacccttgttaattagcgtgctagcaattgcagtaatctcgggctccttcaatatcctagagatagtagatttccaaatcgagacaagtaatacttggaatctcttcatcatgcctttgggtgctgcattatttctaatcacaatgattgcagaagttgagcgtattccattcgatatgcctgaagcagaggccgaactagttgagggctggtggacagagtatggtggaattcgctgggggcttatgttcgctgtagagatgatgcgtgcctacgcggcttgtatcctcttcgcactattcttcctaggaggatggcaactgccattcgaggacactttggtaagtctaccatatgtgggtgttatcttcgatttcctagcaaatgcaacacccggattagtagttctacttctcaaggcctacctaatgtttgcattctttgtctgggttcgtgcttccctacaccgtgttcgcacggaccaaattcttgagtttggatggcgctggcttctacctgcctcgatggtcaaccttgcggtagcaatttggctccgtctcgaggtttgggatagcactgcagcaggcggttggccaatttgggcagttccggtcctctttgggtcgtttattctcgctttcattgttctcgccatagacgaagacgaagatgcattggagctgaatcgaaggatgtatcatactcagaccttggaaaaggctagcccaggtacacacagagattga

SEQ ID NO: 220951 - DNA, 1492 bp, Unknown
  Bacterial polypeptide expressing nucleotide sequence isolated from the Sargasso Sea
tatgacaagtttgatttatagctttatattgcttccagtaattaactcaatattagtttttcttattccagacataaggaaagaactcttcagacctttaacagtttatttaagcctgatcccattaggtctctgtttgtatatgtttgtaaaccaaaatttaaaaacaagctttttagaagttgattcaataccttggattacagcatatggaatagatttgattattggattttctggaatgtcatttttattaattacattaaattgtttgcttgtattattgtcaattctttcagtaaatcaagaatatgcagaaagtaaaggatttcttgggtcaatcatgctcttacaagctgctgtaaatggagtattcttggcaggtgacttagtttcactattcatattttttgaagccttgctaattccaatgtatttcttaatgggaatctggggtggaagtaatagaagatatgcaacaattaaatttattttatatacagtctttggttcaatttttatactcgctggaacaatatatacaggagttttaagctacatttcatctggaaaatttgcgttagattttgaatcaatagcatctatgtcaattacaaccagccagtcagaaatattatttttactattcacatttggtttccttgtaaaagtgcctttatttccacttcacacctggttaccagatgctcacgtggaagcaccaaccgcgggaagtattttgttggctggagttcttttaaaagttggagcctatggaatcttaagagtatcaattcctttttttacagaaggatttcttaggtaccagtacataattgcatttctatctgttgtagggataatttatggtgcaattgtagcaattgttcagatagacattaaaaaacttattgcatattcctctataagccacatgggatttgtaatgcttggtatttcagcaggaagatacttaagtcttgaaggtgctgtaattcaaatgataaatcacggcataacttctggtgcattatttatgcttgttggatttttgtatgatcgaagacacactaggaggatatcagatttcgggggtttgaaaaaatcaatgcctatatatgcatcaatatttttatttacctcatttgcttcaataggactgccaggacttaatgggtttgttggtgagtttatgattctaatgggaagttatccgacatttaaagttcttacctctgttgcagcatttggtgttgtccttgcagcaatttatatgctttgggcttatcaaaggatgtttaatggacaattagacaatgatgaaaatgctgtgttatcagatttaaattcaaaagaactggtagcagtaggtccattacttgctttaatgttgttcattggcatatatccaagttttatagaaagctacgttgttcaagatgtatcagtaatttatgaatcaattagcaatctcataggagtttcacaatga

SEQ ID NO: 220952 - DNA, 380 bp, Unknown
  Bacterial polypeptide expressing nucleotide sequence isolated from the Sargasso Sea
aatggaattaacattgttatttcttccattgattggatctataatatctggattatttggcaaacgcataggtgatagaaactctgaaattttaactagtactttagtttctatttcttctattttatcaatcttaatattttataaagttatttttgaaaattataataataatgtaattatttcatcctggataaactcaggatttttaagcgttaattggtcgataaaaatagattctctgtcatcggtaatgttagttgttgtaactttagtatcatccttagttcacatttattcaattggatatatgtctcatgatccacataaaactaggtttatgtcatatttatctttatttacttttgcaatgttaacac

SEQ ID NO: 220953 - DNA, 892 bp, Unknown
  Bacterial polypeptide expressing nucleotide sequence isolated from the Sargasso Sea
atgaattttcctattctttcatctctaatattattaccaacaataggagctttatttttattttttataaaagaaaaagaaggaaataatactacgattaaatatgtagccttattcacaacagtagtaaattttttaatttccatttacttatggattgcttttgatcaatctacttctagttttcaatttatagaagatagaacatggattaaaggttttattaattacaaagtgggcgtagatggtatttcaattttgtttattatactaacaacatttattacaccattatgcattatatctgtaaacaactctatcaaaaatagattaagagattttttaatttcaatactaattatggaaagttttatgattggtgttttctctgcgcttgatttggttgtattttatttattttttgaagctggattaatcccaatgtttttaattattggtatttggggaggagcaagaagagtttattcagcattcaaattctttttatatacattgttaggttctgttttaatgttagttgcaataatttcaatttattggattacaggaacaactgacgtggttcaactatatgaacttggtatagatgttaaatatcaaaatcttttgtggttagctttttttagttcttttgcagtgaaaactcctatgtggccagtacatacatggttaccagatgctcatgttgaagctccaacagctggatcagtattgctagcagcgattttattaaagatggcgggttatggatttatcagattttctttaggattatttccagttgcctctgaagttttcacaccattaatttatactttaagtgttatagcaatcatatttacttcactgaatagctttaatgcaggaagat

SEQ ID NO: 220954 - DNA, 1129 bp, Unknown
  Bacterial polypeptide expressing nucleotide sequence isolated from the Sargasso Sea
tttatgattggtgttttctgctcacttgatctagtagtattttatttattttttgaggcaggtcttataccgatgtttttaataattggtatttggggtggagaaagaagagtctactcggcttttaaattttttctgtacactttattgggatcagttcttatgttggttgctattattgcaatttattggataacaggaaccactgatgttgaaaaactttatgaacttggtatccaggtggaatatcaaaatttattatggctagcattttttagttcttttgcagtaaaaactcctatgtggcctgtacatacttggctacctgatgctcatgtagaagctccaactgttggctctgtattactagcagcaatactcctcaaaatggctggatatggatttattagattttctctaggtttatttcctatagcttcggaaaattttacaatgttagtgtatatcttaagtttaattgcaattatttacacatctctagtagctttgatgcaagacgatatgaaaaaacttatagcatactcgtctgttgcgcatatgggctttgtaacactaggcatcttcacaatgacccaacaaggcattgagggaagcattttccaaatgattagtcatggacttgtatcagctgcacttttcttaagtgttggagttgtttatgaaaggcatcacacaaggttaattaataaatatgggggtttagtctctataatgcctagatatgcaattgtctttatggttttcacactaggagctttaggactgcctggaacaactggttttattggagaatttttaattttgatgggtgcatttgagaaaaatatcttagtagcaatgattgcaagtttaggagtaattttaggagcagcatatatgttgtggctatttaaaagagttgtttttggcgaaatgaaaaatcaagagcttaaaagtatgaaagatttaaaatcttttgaaattatcaccttatcagctctagtagtaccaattttattttttggtttttatccagagcctttgataaattcaattgaagtatctgtcgagaatactttaaacatgtataactttgacttagttaacaacattgcatcaagagactaat

SEQ ID NO: 220955 - DNA, 1099 bp, Unknown
  Bacterial polypeptide expressing nucleotide sequence isolated from the Sargasso Sea
aatgtcaactgagttaataattgcattaattaaatcaaatattgttttagctgttttgcttactaacacaatactgttgatatggcttgaaaggaaattagttgctggaatgcagtccagagtagggcctgacagagctggcccctttggaatattacaaactgtagcggatgcaattaaattattattaaaagaacaaataatgcctctaaaagctgatagagcaatgtatctattggctccaattattgctttagtgccgtcttttttaatttttatgatcattccattgggtccggacttaaacattgaaatcggtggtaaaaattatatggttgattttgttggtgcggacttgaatgtaggtgttctttattttttagctttgtcctctattgctgtatatagtgtagttttagctgggtggtcttccggctccaaatatccacttcttgggggtgttagagcatctgcacaaatgatttcttacgaggcagctatgggattgtctttagtaccggtaatcctatattctggttctctatctcttgtagatatagttagtagccaatcaggaaatttgtcaacaacgattccgattcttagctcaattgtttcatttattcctaaatggaatatttttcctcaatttattgcatttggaatatttttcatagctgctgtagctgaagtaaacagagccccttttgacttggtcgaagcagagcaagaattggttggagggtttcatactgaatactctggatttaggtttgctatgtttttcttggctgaatatataaatatgttcaatatgtgtgcaattactgcaacattttttctaggtgggtggcttggtcctacttttgaggggttttttcctccaatattatctgcaattatgccaataatttggttaggagttaaaacgtttgcacttttattcatatttgtttggataagagctacattaccaaggctcagatatgatcaattgatggagcttggatggaaaaggcttataccagcatctctagtttggcttatattgtccgctattgttctaggattaagagagtttggtttaccttggagttaa

SEQ ID NO: 220956 - DNA, 751 bp, Unknown
  Bacterial polypeptide expressing nucleotide sequence isolated from the Sargasso Sea
aatgtttgataatattaacatattttcctatgttgaaaactttttactctccctcaatgagatagttcttgtttttatttctataatcgtattgataacaattctattagttttcgtcgcttattatacttatgcagaaagaaaagtaattgctgcaatgcaaattagaaaaggcccaaatgttgttggtccttacggattactgcaaccacttgctgatggtgtaaagttatttttgaaagaaataataatacctactaactctaacacttttctatttttattagctcctataataacttttattactgcttttagtgcatgggctgtaattcctttttccagcaccttagttatttctgatataaatgctggactactttacattttagctttaacttcaatgggagtatatggaattattattgctggatgggcatcgaattcaaaatatgcacttttaggagcaatgagatcagcggctcagattgttgcttacgaaatagcgatgggttttgctttagtcggtgttgtgatgataaccggtagtttaaatctaggagagattattgatgctcaaaaaggatctgtttttaattggctgtggttaccacttctaccattatttattgtttatgttgttgctggagttgcagaaactaatagagctccatttgatgtcgcagagggtgagtccgaactagttgctgggtttcatgttgagtattcaggtatggcttttgcaatattt

SEQ ID NO: 220957 - DNA, 550 bp, Unknown
  Bacterial polypeptide expressing nucleotide sequence isolated from the Sargasso Sea
aatgcttaaaaaaattaatcttaaaaataaaattgctttagtaacgggagctggaaaaggtattggtaaagcttgtgctgtagctttagctgaggcaggagcaaaagtaataatattgagtagaacaaaatctgatctaataaaggtaaataaaattataaaaaaaaccaaaggttcaagtcaatcatttgtttgtgatgtaacaaatttagaagagttacaaaaagttttaaaaaaaataagtagattagatattcttgtaaataatgctggaaataatagaccccaacattttactaaagttagtcaagtgaatatggaatacttaaccaatttaaatatgaaggcagcttttaatgttgcacaattgtgttctcaaaaaatggttaaagcaaaaaatagaaaaaaaattggtggatctattattcacatgtcatctcaacttggaaaagttggttgtgaaggacgtaacgtttataacatgaataaattcggggtagaaggtcttgcaagaggtatggcatatgagctggcacgttataacataaga

SEQ ID NO: 220958 - DNA, 1516 bp, Unknown
  Bacterial polypeptide expressing nucleotide sequence isolated from the Sargasso Sea
atgttagattctttgcctatacttagtatattaatttggatgccaataatgggcggattaatattattatttctgaataatatctctgaaaaatatattagagtctttggtcattctgtttctgtagcaacattattacttagtatcatcattttaaatgaatttgacactgataagtattatttgcaatttactgaaaaatttttatggattagtaattttgatattttctatcatcttgcgatagatggattctctattgtattcataatgttaactacaatcacgacttcacttattcttatattcagtttttctgaaaacagagcacaaaataataagtttatctctttatttcttattttggagggattacttataggtgttttctctgcatttgatagtattttattttacatattctttgaatctatgttgatacctttatttttaataatagggatatggggtggcagcaatagaatctatgcgactcttaaattttttatatatacttttgtaggctcagtattaatgctgatttctttaatatatttatcgaatcaggcggatagttttaatatcgtagatttttacaatctgaatttaccacttgagacgcaaatctacatatttttggcgttcctgattgcttttggtataaaaataccaatgtggccagttcatacatggttaccagatgcacatgtggaagcgccatcctctggatccgtcatactagctgcagttttacttaaagtcggaggttacggcctaataagatttttgttgcccatcacatcggatgcaggtttttatcttaatagcatactaatcacactctctttaatcgctataatctacatctcatttgtagcacttgctcaaaaagatatgaagaagttaattgcgtactcctcagtagcacatatggggtttgttacgctaggaatatttcttgcttttaacatagcaaaacccggtatcgacaaagatattttattgctaggcttacaaggctcggtcatgcagatggtttcgcatggtttaatttctgctggtctgtttttttgtattggaataatttatgctagaacaaaaaatagggcaattgatggtcagagcggtataggtcaagtaatgccacttttttctgcaatgatgatgttttttctcttatcgaatgccggtctccctggaacttctgggtttgttggagaatttatggtaatgatcgcaggactagaagtaagttatttatatgcctttttggcatccatgacacttattcttgcagcatcttattctctatggctcggaaaaagagttttatttgggatgccttctaatgacagtataaataatatgtcatctataaaaagcgaggaattttggccattaataattttaattctttttgtcatactattgggtgttaagcccgggattatcctagatatttctctcgtttcttctgaatatatgattgatattgttcgcggagatattaaatgat

SEQ ID NO: 220959 - DNA, 1501 bp, Unknown
  Bacterial polypeptide expressing nucleotide sequence isolated from the Sargasso Sea
catgattctcgatttgatgatttgggcacccattatatccggcttaatcatacttatgattggtaaaaattacggatcactttcatactcgctatctatattctcatcctctttggtatttgttatcagtttgtatgcattatcaatgtacgattccagtcaaactggtatccaatttgagttgatcacttcatggatagagcgtttcgatataaattatcatctcggtgttgacggcatttcttttccactcattcttctgacaacatttattacaccgatagtcttattgacctcaagaacttcagaaaaacccaacctccaccaatacttagcttcattcttaatattggaaggtttaatgatcggagtattcagtgctttggatgctttcctgttttatgttttctgggaagccatgttgattccaatgttcatcatcataggaatatggggtggcaagaatcgagtttatgcaaccattaaattcttcctatatacattcctcggatcagtctttatgttgatagcaatcatctatctatacattcaaaccggatcatattcgatctttgatttttacaatattgacttatccagaactgagcaaattcttatattcctagcattcttgttcgcttttgccgttaaaattccaatgtggccagttcatacctggttgcctgatgctcacgtcgaagcaccaactggaggatcagtgattcttgcagcgatacttcttaagatgggcggttatggtttacttagattcagtttaccaatcacgccagatgcatcgagtgaactctcaatgattatggttgtgctatcccttattgcaatcatctacatcggtatggtcgcactgtctcaaacagatatgaaaaaactcatcgcttattcatcggttgctcacatgggctttgtaacgctcggtacttttgtcgttttcctggatcatgaaattgcttctctagagaatatgaatttagcaatcagtggtgcaatgatacagatgatttcacatggattaatatcgggtgctttattcctatgcataggtgtgatgtatgacagagttcatagtagagaaatagatgattatggtggtgttgctttaatgatgcctcgttttgcaggtttgatggtcttttttgcactagccaatgcggctctgcctgggacatcagggtttgttggagaggttttggtcattctagcgagcttgaaagttaatttctggattgcacttttatcaggtacaaccttagtcattggagcggcatacacattgtggatgatcaagcgtgttatttttggtgatgtcactaatgaaaaaatcaatgatattcaggatatttctgcaattgagctcataccactgatgattcttgcgatcatggtattggcaatgggtgtataccctgaaccgttaatgaatttgatgtatgtatccatcaatgacttatctaaattagtgtttctaggagctgggatatga

SEQ ID NO: 220960 - DNA, 1327 bp, Unknown
  Bacterial polypeptide expressing nucleotide sequence isolated from the Sargasso Sea
aatgcacgcttatccgattctcagtatcgcgatctggttaccgatcctcgtaggtctgctggtccttgccattggctccgaccggaatccggctccggcgcgctggatcgcgctgattggctcggtcgtcagtttcctagtgacgatcccgctgattaccggctttgattcgagctccgccgatctgcagttcgtcgaaaaggcgaactggatcgagcgcttcaatattacgtaccacctgggtgtcgacggcatctcgatgtggttcgtcgtgttgaccgcattgattacggtgatcgtcgtgatcgccgcgtgggaagtcatcacgaagaacgtcgctcagtacctcgctgcgttcctgatcctgtcgggcatcatggtcggcgtgttcagctcggccgacggcatgctgttctacgtgttcttcgaagcgacactgattccgatgtacatcatcatcggcgtgtggggcggggcgaaccgcgtgtacgcggcgttcaagttcttcctgtacacgctgatgggttcgctgttgatgctggttgcgctgctgtacctgtacatccagaccggcacgttcgatctggctacatggcagaacgcgcaaatcggcatgaccccgcagatattgttgtttatagcgttcttcatggccttcgccgtgaaggtgccgatgtggccggttcacacgtggttgcctgacgcccacgtggaagcgccgaccggcggctcggtcgtgctggccgcgatcatgctgaagctgggcgcctacggtttcctgcgcttctcactgccgatcacgccggacgcaagccacttcctcgcaccggtcgtcattacgctgtcgctgatcgctgtgatttacatcggtctggtcgcgatggtgcaggccgacatgaagaagctggtcgcgtattcgtcgatcgcgcacatgggtttcgtgacgctgggtttcttcatcttcaatcagctcggcgtggaaggcgcgatcgtgcagatgatctcgcacggcttcgtgtcgggcgcgatgttcctgagcatcggcgtgctgtacgaccgtatgcactcgcgtcagatcgccgattacggcggcgtcgtcaacgtgatgccgaagttcgcggcgttcgtgatgctgttctcgatggccaactgcggcctgccgggtacgtccggtttcgtcggcgagttcatggtgattctggctgctgtccagtacaacttctggatcgcaggcggtgcggccgttacgctgatcctcggcgcggcctacacgctgtggatgtacaagcgcgtgtacttcggcgcgatcgccaacgatcacgtgaag

SEQ ID NO: 220961 - DNA, 969 bp, Unknown
  Bacterial polypeptide expressing nucleotide sequence isolated from the Sargasso Sea
aatggaattatctgtaataacattaccattaattgcatcaatcatatcaggcttttttggaaaatatataggagatagaaattcagagctaattactagttttttagtttcagtgtctgcaattatatctttagttattttttataatgttattatttatgattatgaagaaaatattataatagcgacttggatcaattctggaagtttaaatgttaattggtcaatgaatattgatcctttatcgtcagttatgcttgttgtagtcactttaatatcttcattagtacatatttattcaattggttatatgtcacatgatccccataaaccaagatttatggcttatttatctttatttacatttgcaatgttaatgttagttacttcagataatttcattcaattattttttggttgggaaggtgttggtctttgttcatattttttaattggtttttggtttaaaaaagaatctgctaatgcagctgctataaaagcctttttagttaatagagttggtgattttggattagctttgggaatctttttaattttctatttatttggaacagtaaattttgatgaagtttttaatcaaattccttcagagtctgcggccggtattacaccatttcttaataaagaattaatatttttaggtttaaattttaaggctgtagacttaatttgtttacttttgtttttaggagcaatgggaaaatctgcacaaattttcttacatacctggttacccgacgcgatggagggtcctacgccagtatcagccttaatccatgctgctactatggtaacagcaggagtattcttagtagtaagatgttctccattatatgaatattcagagttagctttaaatgtaattactattgttggaatgactacagcaatatttgccgccactgttgctttggtcaaacagatattaaaaaaattattgctttattc

SEQ ID NO: 220962 - DNA, 370 bp, Unknown
  Bacterial polypeptide expressing nucleotide sequence isolated from the Sargasso Sea
atgttatctgattttctaaaagattacttacctattataatttttctaatcatagctctaggactgagttgtgcatttgtggtaattaattttattctatcaccaaaaaatcctgatcctgaaaaactatcagcttacgaatgtggatttgaaccatttgaagactcgagacttgaatttgatgttagattttatttagttgcaatattatttattatttttgatttggaaatagctttcttatttccgtgggcaatttcattaggcaacatcggattacttggtttttcatcaatgatgatttttttattcattttaacaattggttttatatatgaatggaaaaaaggcgctttagattgggaataaa

SEQ ID NO: 220963 - DNA, 860 bp, Unknown
  Bacterial polypeptide expressing nucleotide sequence isolated from the Sargasso Sea
gatgcaatgggagggacccacaccagtatcagctcttattcacgcagctacaatggtaacagccggtgtgtttttagttgtaagatgttctacgttgtttgaatattctcaaaccgctttgaacttagttacaattgtgggaatgatcactgcaatatttgcagcatcagttgctctagttcagaatgatattaaaaaaataattgcttattcaacttgtagccaattaggttacatgttttttgctgcaggtgtaggcgcatatcatgtagcaatgttccatttattcacccatgcattttttaaagctttgttatttctaggttccggatctgttattcatgcatttaaagatgagcaagatattaggaatatgggtggtgtgagaaaaaaacttccctatacctatatttttatgttgataggaactttggctttaactggatttccctttttgtctggtttttactctaaagatgcaattattgaatttgcttatttaacaaattcttctttagggaactatgcggcaactattggaatttttactgcttttttaacttcaatttattcttggaggttattctttaaaacatttcacggtccatacaataattcaaaagtaccgataaatgaaactcatgagtctcctttcgtaatgttagttcctttattatttttggctattggtgcaattttcgctggttatttttttaaaacaacatttattggtcatcatagcaatgaattttggcaatcatcaatattctttttaaatgaaataaaacatgatccaatccctttatggtttttaattttaacaccagtgttagtagtaatttctataccaatctcatatt

SEQ ID NO: 220964 - DNA, 973 bp, Unknown
  Bacterial polypeptide expressing nucleotide sequence isolated from the Sargasso Sea
atttctgtaatttcaacaattgaacaccgtttaaaagattttttaatagcaatacttataatggaaactttaatgattggagttttctgctccctcgatttaataattttctatttattttttgaaggtggcttaatacctatgttcctaatcatcggtatctggggtggtgaaagaagagtttattcagcattcaaattctttttatataccttgctaggctcagttttaatgttgattgcaataatatctatttattggatatctggtacaactgatgttgaaaagttgtatgaaattggaattggagaacaatatcaaaaacttttatggctggctttctttagttcatttgcagtaaaaacacctatgtggccggtgcacacttggttgccagatgctcacgttgaggcaccaactgctggatctgttttgcttgcagcaatattactaaaaatggctgggtatggatttataagattttctgtaggattatttccaatagcttctgaatattttgtgccacttgtctttgcattaagtttgattgcaattatttacacatctttagttgctctaatgcaggaagatatgaaaaagttgattgcttattcttctgttgcgcatatgggttttgtaacacttggaatttttaccatgactcaacaaggcatcgagggcagtatatttcaaatgatcagtcatggattggtatcggcagctctattcttaagcgttggtgttgtttacgacagaaatcatacaagattgataaaaaaatatggcgggttagtaaccgtgatgccaaaatatggtattgtatttatgatatttgccctaggttctctaggacttccagggacaagtggatttattggtgaatttctaattctaatggggacattcaaaaaaagttttctagttgcaactattgcaagtttaggtgttattttaggagcagctttatatactt

SEQ ID NO: 220965 - DNA, 897 bp, Unknown
  Bacterial polypeptide expressing nucleotide sequence isolated from the Sargasso Sea
ttattttttggctgggaaggtgttggattgtgttcttatttgctcataggtttttggtttaaaaaacaaagtgcaaatgctgctgctataaaagcatttctcgtaaaccgagtaggtgacttaggtctcattttgggtatttgcgttatatataaattaactggaagtttagattttaatatagtttttgctaatgtctcttcattcataaatactagtattttattttttaatataaatataccatacattgagttggcatgttttttattatttatcggagctatgggtaaatctgctcaaattggtctacatacttggttagcagatgcaatggaaggtcctactccagtatcagcacttattcatgcagctactatggtaacagctggcgtattccttgtcgctagatgctctccattatttgaatacgctcctatatctctaaattttgtaattttggtgggggctgcaacgtcaattttcgccgcttgtattgctatcactcaaaatgatataaaaaaaattattgcttattctacatgtagtcaattaggttatatgttctttgcatgtggagtttctgcatattctgctggcatgtttcatctaatgacacatgcgttttttaaggctttattatttttaggagcgggttctgtcattcatgcattatcagatgagcaggatataagaaaaatgggtgggcttgctaaaactcttccatatacttgtatagcaatgtggataggttcacttgcattagctggccttcctccatttgcaggttttttctcaaaggatattatattagaggctgcatgggcacataatagtggttttggatatattgcattttatttaggccctgattgcggctttttgacagcttttatt

SEQ ID NO: 220966 - DNA, 973 bp, Unknown
  Bacterial polypeptide expressing nucleotide sequence isolated from the Sargasso Sea
tttataacttttgcctttatattattaaagattatagcattagtagttccactattaattattgttgcgtttttgacatatgctgagagaaaggttatcgcttctgttcagttgaggaaaggtcctaatgttgtgggtccatttggacttttacagcctctcgcagatgggctaaaacttttttcaaaagaaaccatatttcccacagtttcaaataaaattgtttttcttttagcgccaatggttgcattttcactttctatagctgcctgggcagttattcctattgctgatggctgggttatttctaatattaatgtaggtattttatatttatttgctatatcttccttatcagtatacggcattataatggctgggtgggcaagtaactcaaagtatgcttttatgggagctttaaggtctgcagctcaaatggtttcttatgaagtatcaataggtttagtaattgttacggttttagtttgtgttggctcacttaacttaagtgatatagtttatgctcagaaatcagtttggtacgtttttccattatttcctatgttcgtagttttttttatttctgctcttgctgaaactaacagagcgccatttgatttgcccgaagatgaatcatcattagttggaggatattttacggaatactcctctatgctttttgccatgtttttcttaggagaatatgctgctatgattatgatgagtggaatggcaactattttatttttaggaggttggttacctccttttaatatagccttattaaatgaaattccgggttttatttggtttgctgcaaaaacatctttaatgttatttacttttttatgggtaagagcaacttttccaaggtttagatatgatcagttaatgagaattggctggaaagtttttctgcctttttctttattatgggttgttttaacctccaggttttttaattatttttgat

SEQ ID NO: 220967 - DNA, 1132 bp, Unknown
  Bacterial polypeptide expressing nucleotide sequence isolated from the Sargasso Sea
acatgtacttttattgttttagcagcgttcttttctttttatattttcattgtcaatataggtagccccagtgttgtttctttaaagttatttacatggattgagtcaggctctttttctgctgattggtctatttatttagactctgtaaccagtgtaatgttagtggttatcacaagtgtttctgctttggtgcatgtttattcaattggatacatgtcacatgatgatagtaagcctagatttatgggttatttgtcattgtttacatttgctatgatcatgctcgttacagcagataattttttgcaattattttttggctgggaaggagttggtttagcttcatatttattaattggcttttggtacaagaagcctacagcaaacgcagcagccataaaagccttcatagtcaaccgcgttggtgactttggattggcacttggaatttttacaatttttattgtctttggaagtattgagtatgaaaatgttttcaacagtgttgccaaattttcagatactcaatttgcttttattggatacgagatccatgcgttaacactaatttgtatctttttatttataggtgcgatgggaaaatcagcccaactttttttacacacgtggctgcctgatgctatggaaggccctacacctgtttcagcattaattcatgcggcgactatggttactgctggtgtttttctagtagtaagatgctcaccgctttttgatttagcgccaattgcgatggattttgtcgtagttattggcgctagtactgcattttttgctgcaactattggacttgttcagaacgatattaaaagagtaattgcttattcaacatgcagtcagctcggttacatgtttgttgctgcaggtttaggcgcttacggggtagcaatgttccatttgttcactcatgcattttttaaggcacttcttttccttggagcaggctcagttattcatgctgtaaatgaagagcaggacattagaaaaatgggagggataagtaattttataccaatcactcaagtcatgatgattatcggaacaatttcattaatgggatttccatttacatctggctattattcaaaagacgcaattattgaaacag

SEQ ID NO: 220968 - DNA, 636 bp, Unknown
  Bacterial polypeptide expressing nucleotide sequence isolated from the Sargasso Sea
catggaactatcaattatatttcttccacttattgcatcaattatttcaggtttttttggaaaatacatcggtgatagaaattctgaaatagtaactagcgtgcttgtttcaatctctgctctcttatcaatttttgttctttatcaagtaatcgtaaatcagtatgaagaaaatattgttatagctacctggataagctccgggtcacttgatgtaaattggtcgatgttaattgatccattatcagctgtgatgctcgtagttgtaacttctgtatctgctttagtacatatctattcaattggttacatgtctcatgatcctcataaaccaagatttatggcttatttatcattattcacatttgcaatgttgatgcttgtgacatcagataatttcatacaattattttttggttgggaaggtgttggtttatgttcttacttcttaattggtttttggtttaaaaaggaaagtgcaaatgctgctgcaataaaagcatttgttgtaaacagagtaggtgattttggttttgctttgggaatttttttaatattttatttatttggaactgttaattactcagaagtttttcaacaaattccaacagttgtagataaaaatttatcattttt

SEQ ID NO: 220969 - DNA, 832 bp, Unknown
  Bacterial polypeptide expressing nucleotide sequence isolated from the Sargasso Sea
atggaatactctattatttttttacccttaatttcctcaattattgcagctttttcaggtaaatttatcggagaaaaaattatacttataatatctagtaccttagtttcattatcggcaattttatctattcttctattttttgatgtacttcaaaatagttaccaaaataatttaattattttttcttggatagactcaggtcttttgagtgtaaattggtctataaaagttgatgcattgtcatcagtaatgtttgtaatagttacttttgtatcagcattagtgcatatttactctattggctacatgtcccatgatccaaacaaaccaagatttatagcttatttatctttatttaccttcgcaatgctttcacttgtttcagctgataactttttacaacttttttttgggtgggagggtgttggtttatgttcttatcttttaataggtttttggtttaaaaaggagtctgctaacgccgcagcaattaaagcatttttagtaaacagagttggagattttggtttagctttgggaattttcttaattttttatttatttggatctcttaattttattgatgtttttcaagaaattccaaataatttacaaaatgaaacattatttctaggactcaaatttaactctattgatttgatttgcttactactttttataggggcaatgggtaaatcagctcaaatttttcttcacacttggttaccagatgctatggaaggaccaactccagtatcagccttaatacatgcagctacgatggtaacagcaggcgtatttttggtagtaagatgttcaccaatttttg

SEQ ID NO: 220970 - DNA, 991 bp, Unknown
  Bacterial polypeptide expressing nucleotide sequence isolated from the Sargasso Sea
caaaacgatataaaaaaaatagttgcatattcaacttgtagtcaattgggatatatgttttttgctgcaggagttggagcttatcatgttgcaatgtttcatttgttcactcatgctttttttaaagcactactctttttaggagctggttctgtaattcatgcttttaaagatgagcaagatattagaaaaatggggggcgtaagaaaaaaattaccttttacttatatatttatgttaataggaactttggcattaacaggttttcctttcctttcaggattttattcaaaagacgcaattattgaatttgcctacctaaaaaattcctctttaggaaattatgcagcaagcgttggtatattgactgcttttttaacctccatttattcctggagattattttttaaaacattccatgggccttataacaacgaaaagatatcaataaacgatactcatgagtcaccttttgtgatgttagttcctctaatgtttttaagcattggtgcagttttttcaggttatttttttaaagaaactttcattgggcatcatagcaatgatttttggcaaacgtcagtgttttttcttaacgagataaagcatgatgtaatacctctttggtttttgttgaccactccactaatagtcttgatatctataccaatctcattttatttatatattattaacccaaaagttctggaagacttcaaaaataccaacatgccactctatgactttttattaaataaatggtatatagatgaactttatataaagatattcgtaaacccaacaaaaaaaattggttcatttttttggaaaaaaggtgatatcggtgtaattgataaatttggccctgacggtatctcaaaacttgtaaaaattatttcaaataaaactggtcgtttacaaacaggatttatctatgattatgcatttgtaatgttattaggattatcaattttattaacatatttgattt

SEQ ID NO: 220971 - DNA, 862 bp, Unknown
  Bacterial polypeptide expressing nucleotide sequence isolated from the Sargasso Sea
aatggaatacgctatattgttcttaccattaatgggtgcattactcgggtattttggcagatcttttacaaaatattttgctgaaatttctacgagtctatttgttagtgcctcagcagtgctttcattacttgttttttggaatggaattcaaaacgatatttatggaaattatataatttttgaatggataagttctggaaattttaaggcaaactggtcaattaatattgatcctttaagttcagttatgttagtggttgtaactttcgtatctgcattagttcacatttactccatcggttatatgagtcacgaccctcataaaccaaggttcatgtcctatttatcattatttactttctcaatgttagctttagttgtttcagataatttcttacaacttttctttggatgggagggagtgggtttatgctcttatttattaataggtttttggtataagaaagaaactgcaaataacgctgcaattaaagcttttatagtcaatagaataggtgattttggtttagctattggaatatttttaatctttttctattttggtacaattaattttgaggaagcttttcaagctacaagccaatttgctgaaaaaaaaatagactttttaggctttgaattaaatttagtaactttaatttgtgtgtttttatttattggtgcaatgggaaaatctgcacagtttttacttcacacttggctacctgatgcaatggaaggcccgacaccagtttctgctttaattcatgcagcgacgatggtaacagcaggtgtttttcttgtcgtaagatgctcgccgatttttgaatattctcaggttgctttaaatttagttact

SEQ ID NO: 220972 - DNA, 724 bp, Unknown
  Bacterial polypeptide expressing nucleotide sequence isolated from the Sargasso Sea
ttctgtaaatagtacgattaaatatagattaaaagattttcttgttgcgatacttgttatggaatctttaatgattggtgttttttgttcattagacttagtcatattttatcttttttttgaaggtggtttaattccaatgtttttaataatcggtatttggggtggtgaaagaagagtttattctgcttttaaattttttctttatacacttcttggatctgttcttatgcttgttgcaattatttcaatatactggtttacaggaagcacagatataacttatttatataactttggaattgatgagaagtatcaatatttattatggttagcatttttcagttcttttgctgttaaaactccaatgtggcctgttcatacttggctaccggatgctcatgtagaagctccaaccgctggctcggtcttattagctgcaattttattaaaaatggctggatatggttttattagattttctgttggtcttttccctttagcttctgaatattttattcctttgatctatattttaagtttaattgcaattatttacacatcacttgttgcattaatgcaggaagatatgaaaaaattaattgcctactcctcggtagcacatatgggatttgtaactttaggtatatttacatttacacaacaaggattagaagggagcatatttcaaatgattagtcatggattagtttcggcagcactt

SEQ ID NO: 220973 - DNA, 370 bp, Unknown
  Bacterial polypeptide expressing nucleotide sequence isolated from the Sargasso Sea
atgatttataattttttaacagactatttatctataataatttttttatttttagccttaattttaagcattggctttatattaataaattttatttcttcaccaaaaaatcctgatccagagaaattatccgcttatgaatgtggatttgatgcatttgatgactcaaggatggaatttgacgttcgtttttacttagttgcaattctttttataatatttgatttagaaattgcattcttgtttccctgggcaattaccttaggaacgattggcatatttggattttggtcaatgatgttgtttttagccattctaacaattggttttatatatgagtggaaaaaaggagctttggagtgggaatgag

SEQ ID NO: 220974 - DNA, 949 bp, Unknown
  Bacterial polypeptide expressing nucleotide sequence isolated from the Sargasso Sea
tcaaattttcaattcgtcgaagatagaaattggatagatggatttataaattataaaattggagttgatggaatttcaattttatttataattctaactacatttataactccactttgtgttatctctgtaaacaattctgtaaaaaaaagactaagagattttttaatcgccatattaattatggaaagttttatgattggagttttttgtgctcttgatttagttgttttttatttattttttgaagctggtttaattccaatgtttataattattggaatttggggaggtccaaaaagagtttattcagcatttaaattttttttatatacattacttggttcagttttaatgttggtagctattatttcaatttattggatttctggaacaactgatgttattaaactttatgaactcggtattgacgtaaaatatcaaaatcttttgtggcttgcatttttcagttcctttgctgttaaaacgccaatgtggccagttcatacttggttacctgatgcacacgtagaagctccaacagcaggttctgttttgcttgctgctatattgcttaaaatggccggttatggttttattagattttctttaggcctttttccagttgcttcagaaactttcacacctttaatttattgtttaagtgtcattgcaattattttcacttcttttatagctctaatgcaagaagatatgaaaaagcttattgcttattcatctgtagctcatatgggttttgtaacattaggtatttttacaattcaacaacaaggcttagaaggaagtattattcaaatgataagtcatggtttggtctcagcagctttattcttaagtgttggtgttatttatgaccgttttcattcaagattaattagtacttatggaggcttagtaacagttgttccaaaatactcaattttactta

SEQ ID NO: 220975 - DNA, 947 bp, Unknown
  Bacterial polypeptide expressing nucleotide sequence isolated from the Sargasso Sea
actaccatcaataggtgctctttttattttatttgcaaaatcaacaagtggaaaatatcaagcaagcaagtatctttcattatttatagctttagcaaactttattctttcaatttatttatggtatgcatttgatagagagtcagtaaattttcaatttgtagaagatagggagtggttgttaggttttgttaattataaagtaggaatagatggtatttcgattttatttattgttttaacaacatttgttacttcaatatgtataattttagttaattcaacaattaaaaaaagattaaaggattttttaatagctatattaataatggaatcttttatgattggtgttttctgctctcttgatttagtagtgttttatttattttttgaagctggtctaataccaatgtttttaattattggtatatggggaggtgaaagaagagtttactcagcatttaaattttttctttataccttattgggatctgtcctgatgttagtcgctattatttctatttattggataacaggaactactgatgttgaaaaattatatgaaatcggaatagactctaaatatcaaaatttactatggttggcttttttcagctcatttgctgtaaaaacaccaatgtggcctgtacatacatggttacccgatgctcatgttgaagctccaacagctggatcagttttattagcagctatattacttaaaatggccggctatggctttataagattttcattaggactttttccaattgcctcagagtattttgttcctttggtatattttttaagtttggttgcaataatttacacatctttagtagctttaatgcaagaagacatgaagaaactcatagcttattcatctgtggcacatatgggatttgttactcttggaatatttactatgacccaaccaaggtattgaa

SEQ ID NO: 220976 - DNA, 370 bp, Unknown
  Bacterial polypeptide expressing nucleotide sequence isolated from the Sargasso Sea
atgttatttgactttttaaacgaatacttgtcgataattatttttttgggaattgctttattgttaagtataggatttatttttgtaaattttgttttttcacctaaaaatccagatcctgaaaaattatctacatacgaatgtggatttgaggcttttaatgactcaagaatggaatttgatgttaggttttatttagtcgcaattttatttataatatttgatcttgagatagctttcctttttccttgggcaatttcattgggtaaaattggtttattcggttttatatcaatgatgatatttttgtttattttaaccattggatttatttatgaatggaaaaaaggtgctttagactgggaataga

SEQ ID NO: 220977 - DNA, 743 bp, Unknown
  Bacterial polypeptide expressing nucleotide sequence isolated from the Sargasso Sea
aactgttggcgctctttttttattttttacaaaaaataaagatggaaataacttaactgctaaatatgtttctttatttacaactatagttaatttttttatctcaatttatttgtggatttattttgatcaatcaacgtcaaactttcaatttattgaagaaagacaatggattgatggattcgtaaattacaaagtaggaattgatggtatttcaatcctatttgtaattttaactacgtttataacgccactttgtattatctctgtaaataattctgtaaagacaagactaagagattttttgattgcgatactaattatggaaagtttcatgatcggagttttttgtgctcttgatttagtagtattttatttattttttgaagctgggttaattccaatgtttttaattattggtatttggggtggtccaaaaagagtttattctgcttttaaattctttttatatacgcttcttggttctgttttaatgttagttgctattatatcaatttattggatcacaggcacaactgatgtaattcaactttatgaacaaggtatagatacaagatatcaaaatttattatggttagctttttttagttcgtttgctgttaaaactccaatgtggccggtacatacctggcttcctgatgcgcacgttgaggctccaacagcaggatctgtactattagctgcaatattacttaaaatggcaggatatggttttattagat

SEQ ID NO: 220978 - DNA, 421 bp, Unknown
  Bacterial polypeptide expressing nucleotide sequence isolated from the Sargasso Sea
tttttttttttcacgctagctgaaacaaatagggctccatttgacttgcctgaaggagaatctgaattagttgctggctacatggtagaatattcctcaatgagctttgctttattctttcttggtgaatacgcaaatatgatacttatgagtgctatgacttcagttttatttttggggggctggttgccattatttgatattgccccctttaattatatacctggacctgtttggttaattttaaaaatttctctttgtttattcgtttttctttgggtaagagctacaacaccaagatataggtatgaccaattaatgcgtttaggctggaaagtgtttttacctttttctttattatggttagttttaacagcaggcttcttggtttatacaggtagtgcaccagtcttatattagg

SEQ ID NO: 220979 - DNA, 370 bp, Unknown
  Bacterial polypeptide expressing nucleotide sequence isolated from the Sargasso Sea
catgcttgcggaatttttaaaagattatttgccaataattgtatttttattagttgcacttgtcctaagtgtagcatttgtggcagttaattatttagcatctccaaaaaaccctgatccagaaaaattatcagcgtacgagtgcggatttgaaccatttaatgattctagaatggaatttgatgtcagattttatcttgttgcaatattatttattatttttgatttagaaatcgcttttctgtttccctgggctatatccctaggcaaaatcggaatattcggatttacatcaatgatgatcttcttatttattcttactataggttttatttatgaatggaaaaaaggagcattagattgggaataa

SEQ ID NO: 220980 - DNA, 841 bp, Unknown
  Bacterial polypeptide expressing nucleotide sequence isolated from the Sargasso Sea
attttcattctattatctaaagataaaacaactaataacagttcaatttatatctctttatttagtagttttgccacttttttactatcgttatttttatggtattctctagattttaatacatcagaatttcaatttgtagaagaaaaatcatggataaataactttattaaatttaaattaggtattgacggtatatcaatactttttattgttttaacaacttttatcactccaatttgtataatttcttgtgtaaacagtattaaagttagagttaaagaatttttaattgcgattttaatactagagacatttatgatcggtgtattctgttcacttgatcttgtaattttttacttattttttgaagcaggtttaataccaatgtttttgattataggtgtttggggaggaccaaaaagagtttactcggccttcaaattctttttgtttactttacttggttcagttttgatgttagtggctataattgttatttattggttaactggcacaactgatataactcaaatatatgagataaaaataccaaaagagtatcaaaatcttctatggctcgctttctttagctcctttgcagttaaaatgcctatgtggccggtacatacttggctgccagatgcacatgtcgaagcaccaacggctggctctgtaattcttgctgctattttattaaaaatggctgggtatggatttttaagattttcaatacctatgtttccaatagcatcagaatattttacaccattagtttataccttaagtataatagcaattatttacacatctttagttgcgcttatgcaagatgacatga

SEQ ID NO: 220981 - DNA, 370 bp, Unknown
  Bacterial polypeptide expressing nucleotide sequence isolated from the Sargasso Sea
atgcttgtggaatttttaaaagattatttgccaataattgtatttttactagttgcacttgtattaagtgtagcatttgtggcggtcaattatttagcatctccaaaaaatcctgatccagagaaactatcagcatatgagtgtggtttcgaaccatttaatgactctagaatggaatttgatgttaggttttatcttgttgcgatattatttattatttttgatttagaaatcgcttttctattcccctgggcaatatctctaggcaaaatcggaatattcggatttacatcaatgatgatattcttatttattcttactatcggttttatatatgaatggaaaaaaggagcattagactgggaataaa

SEQ ID NO: 220982 - DNA, 913 bp, Unknown
  Bacterial polypeptide expressing nucleotide sequence isolated from the Sargasso Sea
tttggtaaaatacttggattaagacttagtcattttatttcttgttctttaattttagtttcttctattctttcagcatatttattttatatgacactaaatggctatcaaactagcaatcaatttttattcgactggattaattctggggcaatagatgcatcttggtccttaaaatttgatactttaacctctgtaatgcttgttgttgttacttctgtttcagcattagttcatatttactctattggttatatgagtcatgacccttatcaatacaggtttttctcatatttatcattttttacatttgctatgcttatgcttgttacatcagataacttattacagttattttttggatgggagggcgtaggtttagcatcatacctattgattggtttttggtatgaaaaaccatctgctaatgctgctgcaatgaaggcttttgtagttaatagggttggagattttggttttcttttaggtattgcggtaatttatatcgcaacaggatcaataagctttgatgttatttttcaaaaaattaataatgttaatcaatttactataaatatagcatgtttattgctttttatgggagcaatgggaaagtctgctcaactctttttacatacatggttgcccgatgcaatggagggtcctacaccagtttcagctttaattcacgcggcaactatggttacagctggaatatttcttgtggcaagatgctcaccaatttttgaaaattctgatcttgcgttatcatttatcataattactggagcatctactgcgttttttgcagcaacagttggacttgtacaaaatgacattaaaagaattattgcttattcaacttgttctcaattaggctatatgtttgttgctttgggtgttggggcatatc

SEQ ID NO: 220983 - DNA, 860 bp, Unknown
  Bacterial polypeptide expressing nucleotide sequence isolated from the Sargasso Sea
aagcagtaagtacgtagctttatttatttcattagctaattttatattatctttatatctatggtttatatttgatagcacagtttcagaatttcaatttgtcgaaaatagagaatggataccagggtttgtaagttataaagtaggagttgatggtatttctatactattcataattttaacaacctttataacacccctatgtattatttctgtaaataacacgattaataatcgcttaaaggattttttagtagctattcttttaatggaaactttaatgattggcgtattttgctctttagatttgttggttttttacctattttttgaaggtggcttaattcccatgtttttaataattggtatttggggtggagagagaagagtttattcagcattcaaattttttctatatacacttttaggttcagttttgatgttagtggcaattattacgatttattggctaactggaacaacggatgttgaaaaactttaccaaataggaattgatcctaaatatcaaaatttattgtggttagctttttttagttcatttgcagtaaaaactccaatgtggccagtacatacatggttaccagatgcacatgttgaagctcctactgctggatcagttttattagcagctattcttttaaaaatggctggatatggttttattagattttcaattggtttattccctattgcttcagagtattttgttccattaatatattttttaagtttaatcgctattatctatacttctcttgtagctttaatgcaggaagatatgaaaaaattaattgcctattcctctgttgcgcatatgggatttgtaacattaggaattt

SEQ ID NO: 220984 - DNA, 844 bp, Unknown
  Bacterial polypeptide expressing nucleotide sequence isolated from the Sargasso Sea
tatccttggttaacttcaggtaacttagttgtaaactggaatctaaaatttgacacattaagttgtgtcatgatgatggttgttacaactgtatcaactatggttcacatatattctataggatatatgtttcatgatcattctaagtctcgtttcatggcttatttatctttttttacatttgcaatgctgctgttagtttcttcaagtaatttgttacaattgtttgttggctgggaaggtgtaggggttgcatcttatcttttgattggcttttggtacaaaaaaaaatctgcaaatttagctgctataaaagctttcgttgttaatagagtaggtgatctcggttttgcaattggattgatatttatttatttgaattttcaaactttagattttgataaaatttttcaattggctccatcgtttgtagatgtaaatacaacaatatttaatttagaatttaatgttttggaattttcttgttttatgctttttattggcgcaatgggaaagtctgcacagttatttttgcatacatggttaccagacgctatggaggggcctactccagtttcagcattaattcatgccgcaacaatggtgactgctggtgtttttatggtttgtagactttctccagtttttgagtatgccccatttgtacttaattttattactattattggcgctttaaccgctttatttgcttcaacaatagctttgacacaatttgatattaaaagagtaattgcgtattcaacgtgttcacaacttgggtatatgttttttgcagtcggattgtctgcttatcctgcagcaatgtttcatttaacaactcatg

SEQ ID NO: 220985 - DNA, 826 bp, Unknown
  Bacterial polypeptide expressing nucleotide sequence isolated from the Sargasso Sea
tgctttgacttagttactgtagtaggaatgataactgcaatatttgctgcctcggttgcttttgtacaaaacgatattaaaaaaatagtagcttattcaacttgtagccaattagggtatatgttttttgctgcaggagttggagcttatcatgtggcgatgtttcatttatttacacacgctttctttaaagctttattattcttaggagctggatcaataatacatgcattcaaggacgagcaagatataagaaatatgggcggggtaagaaaaaaactcccttatacttatgtatttatgctattaggaactttagcattaactggatttccttttttatcaggcttttattcaaaggacgcaataattgaatttgcatatcttaaaaattcatatttaggaaattatgcagctacaattggaattattactgcatttttaacttcaatttactcctggcggctattttttaaggctttccatggaccttataacaataaaaaaatttctttaaaccaggcgcacgagtctcctctggtgatgttatttcccttggtgctcttaagtattggagcaatattctctggatacatctttaaagagacttttataggacaccacagcaaagaattttggcaaggttcaatcttttatttaaatgaaataaaacacgaagctataccgctttggtttctactaattactcccatcttagttttgatatctattcctatctcattttatctattcatttcaaacccaaaagtattgggggactttaaaaatactaatatgccattatataattttttattaaacaaat

SEQ ID NO: 220986 - DNA, 370 bp, Unknown
  Bacterial polypeptide expressing nucleotide sequence isolated from the Sargasso Sea
atgttatctgattttttacaaaactacttacctattataatttttttgattttagcgctagggctaagttgtgcttttgtggttattaattttattctttcgcccaaaagacctgaccctgaaaagctttctgcatatgaatgtggatttgaaccatttgaagattcaaggatggagtttgatgtaagattttatttggtagcaatactatttattatttttgatttagaaattgcttttctttttccatgggcaatttctcttggaaatatcggtttattaggtttttcatcaatgatgattttcctcttcatacttacaattggttttatttatgagtggaaaaaaggtgctttagactgggaataaa

SEQ ID NO: 220987 - DNA, 756 bp, Unknown
  Bacterial polypeptide expressing nucleotide sequence isolated from the Sargasso Sea
tatgaatttcccaattttatcctcaataatttttttaccactattaggagctttatttattttcttgagtcagagtaagaccagctcaattaaaagcgcgatatatgtttcattatttacaagtattgcgaatttcttattatcaattttcctctggtattcgtttgataggaattttactggcttccaatttgtagaggataaaaattggattagtggacttataaaatttaaattgggaatagacggaatttcaattctatttattgttcttacaacttttattgcaccgatatgtattttgtcatgtattaatagcgttaaaacaagaataaaggagtttctcatagctattttagtgctggaaacttttatgcttggagttttttgctcattagatcttgtaattttttatcttttttttgaagcaggtttaataccaatgtttttaattataggaatctggggtgggccaagaagagtctattcggcgtataagttttttctttatactcttttgggttcggttttaatgttaatagcaataattgcaatttattggatttcaggcacaacagactttgttcaaattctcgaatttaaaatacctaaggaatatcaatatatactttggctggcattttttagctcttttgctgttaagttacctatgtggcctgttcatacctggttaccagatgcacatgtcgaagctcctacagcaggctctgtgatactggcatcaatacttttaaa

SEQ ID NO: 220988 - DNA, 880 bp, Unknown
  Bacterial polypeptide expressing nucleotide sequence isolated from the Sargasso Sea
tatactgaaatttttgaattaaaaattcctagggagtatcaatatttactatggttggccttttttagttcttttgctgttaaaactcctatgtggcctgtgcatacctggttaccagatgctcacgttgaggcgcctaccgctggttctgtaatactagcagccatacttttgaaaatggctgggtatggtttcttaaggttttctttaggaatgtttccaattgcttcagaatttttcacccccttggtttttgctctaagtattattgcgattatatatacttcattagtagctttaatgcaggatgatatgaaaaaattgattgcttactcatcggtcgcgcatatgggttttgtaacattaggtatattcacttttaataaacaaggaattgagggcagcatttttcaaatgatcagtcatggaataatatctgccgctttgttcttatgcgtaggtgttttatatgacagaactggttcaagaatgatcaaaagttttggtggagtagttaattatttaccaaatttttcactaatatttattatatttgtgcttggagcattaggcctgcctggaacaacaggttttattggagagttccttgtattattgggcgcgttcaaaataaattatttagttgcaatattagccagcaccggagttgttctctgtgctgcatatatgctttggatggcaaaaagagtagtttttggaattactaacaatactattgtcacaaaattaaaggacattaattatttagaagccacgatcttaattgttttatgtttggcaagtataattttcggattttatcatgagccattactgaatactatggatatttcagtcaatgaaataatcaaaatcacca

SEQ ID NO: 220989 - DNA, 370 bp, Unknown
  Bacterial polypeptide expressing nucleotide sequence isolated from the Sargasso Sea
tatgctcgctgactttttatacgattatttatcaataataatatttctagcgctagccttattactaagcgttggttttatctttgtaaattttgttttttctccaaaaaacccagatccagaaaaattgtcaagttacgaatgtggatttgagccatttaacgattcaagaatggaatttgatgtcagattttatttggttgctattttatttataatatttgatcttgaaattgcttttttatttccatgggcgatttcacttggaaaaattggtttatttggatttatttcaatgatgatttttttatttattttaactattggatttatatatgaatggaaaaaaggagcacttgactgggaataa

SEQ ID NO: 220990 - DNA, 454 bp, Unknown
  Bacterial polypeptide expressing nucleotide sequence isolated from the Sargasso Sea
aatgacatggtggtatatcataccccatttcccaatgtttattattttttttatatccactttagctgaaactaatagagcaccgttcgaccttccagaagcagagtcagagcttgttgcaggttataatgtggaatactcttcaatgtcatttggtcttttttttcttggagaatatggaaatatgattttaatggcctcaatgtcaacgattctatttttaggtgggtggttacctccatttaattggcatttttttgattatattccaggatatatatggtttttatcaaaagtaatgattttattatttatttttctatgggtgagagctactttacctagatatagatatgatcagttaatgtcactagggtggaagttatttctccccttgtctttactttggattatattaacatcatctttattatttttttggaaatatgtctaa

SEQ ID NO: 220991 - DNA, 838 bp, Unknown
  Bacterial polypeptide expressing nucleotide sequence isolated from the Sargasso Sea
tttgttgaaaatagagaatggttagggataattaattataaagttggcattgatggtatttcaatactttttgttattttaactacttttataactcctctttgtattttatcagtaaactctacaattaaatataggctcaaagagtttttgatatctattttggttatggagtcattaatgattggggttttttgctcattagatttagtaattttttacctattctttgagggcggtttaattccaatgtttcttataattggtatttggggtggtgaaagaagagtttattcagcatttaaatttttcttatatactctattaggctctgtattgatgttagtagcaattataacaatatattgggtaaccggcacaactgatgttgttgagctatattcaattggtattccaaaagagttacaaaatatattgtggttagctttttttagttcttttgcagtcaaaacccctatgtggccagtgcatacatggttacctgatgcacatgtagaagctccaactgctggatcagttttacttgctgctatactgctaaaaatggcagggtatggatttattagattttcattagggttgtttcctatcgcatcggaatattttataccattcgtttacactctaagtattgtagcaattatttacacttctctcgttgctttaatgcaagaagatatgaaaaaacttattgcttactcctctgttgctcatatgggatttgtaacgttaggtatttttactatgacacaacaaggtattgagggaagtatttttcaaatagataagtcatggtttagtttcggcggcgcttttt

SEQ ID NO: 220992 - DNA, 788 bp, Unknown
  Bacterial polypeptide expressing nucleotide sequence isolated from the Sargasso Sea
tgcatttttctcctcttttgcaattaaaattccaatgtggccttttcatacctggttgcctgacgcgcatgttgaagctccaacagagggttcggtaatcttggctggtattcttttaaaattaggtgggtatggttttataagatttaatctttcaatacttcctgatgcatctattttcttcactccttttgtgtattttctgtcagttacagctatagtctacacctctattattgctttagttcaagaagacatgaaaaagctcattgcatattcatcagttgcacacatgggctttgtaactattggaattttttctgctaatattcaaggtttacatggtgctattattcaaatgatatcgcatggtataatttcagcagctctattcttctcaattggatctatttataatcgttttaagacaaaacagataggattctttgggggactaaattccgtcatgcccaaatttgcagttttttttttaatttttgttcttgggtcgatcggatttcctggcacatcaggctttgtaggtgagtatttaactttactttcagtatttggtaaaaatacaaccattgcattcatagcttccacaggggtgattctagcagcttcatacatgttgcttttatataaaaatgtttttttaggtccagtaaatgaaaactatcaatcaaaaaaaattacagatatcaatgtttttgaaaattctgtttatataattctagttattttaattatagttattggtaataagccaaaattttattcttgac

SEQ ID NO: 220993 - DNA, 562 bp, Unknown
  Bacterial polypeptide expressing nucleotide sequence isolated from the Sargasso Sea
gatggaaatttcaattttagcattaccattaatcgcatcagttatatctggattttttggcaagttaataggtgacagaaattctgagatagtcacaagtttgttggtatcaatttcagctgttttttcagcaattatattttatgaggtaatttttaatcaatacgaggaaaatattaaaattgctacctggattaattctggatcgctacaggtaaactggtcaatgaaaattgatgcattatcatcagtaatgttagtagtcgtaacttttgtttctgcattagttcacatctattcgattggatacatgtctcacgatcctcacaaaccgagatttatggcttacttatcgttatttacatttgccatgttaatgttggtaacggctgataattttatacaattattttttggttgggaaggggtaggtctttgctcgtattttttaattggtttttggtttaaaaaagaaactgcaaatgcagcagcgattaaggcatttgttgtaaatagggttggagattttggtttcgctcttggtatatttttgattttttat

SEQ ID NO: 220994 - DNA, 779 bp, Unknown
  Bacterial polypeptide expressing nucleotide sequence isolated from the Sargasso Sea
tctcacgacccacataaaccaagatttatggcttatttatctctatttacatttgctatgcttactttagttacttcagataattttcttcagttattttttggatgggaaggtgttggcctatgttcatatttccttataggattttggtttaaaaaagaatcagcaaatgcagcagcaataaaagcttttttagttaatagagtcggtgattttggttttgctttaggaatatttctaatttttcatttatgtggaactgtaaactatgaggaagtttttaaacaaataccctctgtagccgccgctggagtcataccatttcttgatagagaattaatatatttaggactaaattttaaggcagttgatttaatttgtatacttttatttattggagcaatgggcaaatcagctcaaatatttttgcatacatggttacccgatgctatggagggacctacgccagtttctgcattaattcatgcagcaacgatggttacagcgggagtttttttagttgttagatgttcaccaatctttgaatattcgacattaacgttaaatataataacaattattggtctatcaacagcttttttcgcagcaacagttgcccttgtacaaaatgatataaaaaaaataattgcttactcaacttgtagtcaattaggttatatgttttttgctgctggcgttggagcttataatgttgcaatgtttcatttatttacccatgcattctttaaagcattactatttttaggtgccggttcagt

SEQ ID NO: 220995 - DNA, 883 bp, Unknown
  Bacterial polypeptide expressing nucleotide sequence isolated from the Sargasso Sea
tcttgagacagttatgataggaatgtttgcttctattgatattttgcttttttacatattttttgaagtagttttaattccaatgtatttaataattggtatctggggcggagagaaaagaatttatgcatcttttaaattctttttatatacactacttggctcagtattaatgttaatagctataattgtaatttatagattaacaaactcaatgagtattgaatatttgcaaggtaatttttttgccaaaaatgttcagatttatatttggttagccttctttgcttcatttgctgtcaaaatcccaatgtggccttttcatacatggttgcctgatgcccatgttgaagctcctacagctggttctgtaatattagctggtgtacttttaaaaatgggaggatatggttttattagattttctttaggaatgcttcccgaggcttcagaatatttctcacctttaataatgactttaagtatagttgctgtagtttatacttctcttgttgctttagctcaaactgacataaaaaaattaattgcttactcatcagtagcccatatgggcttagttactattggtatatttatagtaaattcccaaggtctagaaggggcgatgattcaaatgataagccatggcgtagtttcaggagctctatttttgtgtgtaggagtaatttatgatcgaatgcatacacgggaaattaatttttatgttggtttagttaataaaatgccaatttacgcaactgtttttatgatatttatgctgggatctgtaggccttccaggcacaagtggttttattggagaatttttagttattgtaggagcttttaaatattcaagtattgtagtgattggggctgctact

SEQ ID NO: 220996 - DNA, 895 bp, Unknown
  Bacterial polypeptide expressing nucleotide sequence isolated from the Sargasso Sea
tttctttttcggaagtattaattttgatgaggttttccaagcctcaagtcaatttgcagaaaacaaaatagaattttttggttttgagtcaaatttaattactttaatatctatttttctttttataggagcaatgggaaaatctgctcaatttttacttcatacttggttaccagatgcaatggagggaccaacaccagtttctgccttaattcatgctgctacaatggtcacagctggagtttttcttgttgttagatgttcaccaatatttgaatattctcaagtggctttaaacctagtcacgatagtgggaatgacaacagcaatatttgctgcctccgttgcattagttcaaaatgatataaaaaaaattgtagcttattcaacgtgtagtcaattaggctatatgttttttgcagcaggtgtcggcgcttacaatgttgcaatgtttcatttatttactcatgctttcttcaaagctttactatttttgggtgctggttctgtaatacacgcatttaaggatgagcaggatataagaaatatgggtggagttcgaaaaagactaccttttacttatttctttatgttaatagggacattagctttgaccggatttccttttctttcaggcttttattcgaaagatgcaatcattgaatttgcttaccttaaaaactctgctttaggaaactatgctgctacagttggaatatttacagcatttttgacatcaatttattcatggagattattttttaaagcttttcatggtccctataacaacaggaaaatttcaataaatgaaacccacgagtcaccgtatgttatgttgattcctttagtttttttaggattaggagcaatattttctggatatatttttaaaagc

SEQ ID NO: 220997 - DNA, 889 bp, Unknown
  Bacterial polypeptide expressing nucleotide sequence isolated from the Sargasso Sea
aaatttaaataataaattaactttttttggtcttcaacttaattcaatagatttaatttgtatgcttctatttattggtgcaatgggtaaatctgcacaaatattactacacacttggcttccagatgcaatggaagggccaacacctgtttccgcattaatccacgccgctacaatggttacagctggcgtttttctggttgttagatgttcacctatttttgaatattctcaatttacattaaatataattacttttgttggaatgatcacagcattttttgcagcaacagttgccctggtgcaaaatgatattaaaaaaattatagcatactccacatgtagccaattaggttacatgttttttgcagctggtgttggcgcttacaatgttgctatgttccatttgtttacacatgctttttttaaagctttattatttttaggttcaggatcagtcatacactctttcaaagacgagcaagacattaatcaaatgggtggagtatggaaaaaattaccatatacatgggttttaatgatcattggaactttagcattaacaggcttcccattattatcaggcttctattctaaagatgccattattgaatatgcatatttgagaggaaatactgcggggtattatgctgttgtggtaggaatctttacagctttattaacttcaatttattcatggaggttaatttttaaaactttccatggagattataataataataaattgaaaattgatacaatgcatgaatccccattagttatgttaattcctttaatagtactagcaattggcgctgtatttgctggttacttctttaaagagctatttattggtcatactagtagcaattatttctggtctgattca

SEQ ID NO: 220998 - DNA, 261 bp, Unknown
  Bacterial polypeptide expressing nucleotide sequence isolated from the Sargasso Sea
aacccgataatgaaaagctatctgcatatgaatgtggttttgaagcatttgatgatgccagaggaagatttgatgttcgattttatttggtagcaatattgtttatcatttttgatttagaagtagcatttttatttccatgggctgtttcattaggaagtattggaatttttggattttggtcaatgatgattttcttattaattctcactattggttttatctatgagtggaaaaaaggagcccttgaatgggagtaga

SEQ ID NO: 220999 - DNA, 343 bp, Unknown
  Bacterial polypeptide expressing nucleotide sequence isolated from the Sargasso Sea
ttgcctattattttatttttaataattgcatttgggttaagttgtgcatttataattgtgaattttatactttcaccaaaaaatccagatcctgaaaaattatcagcatatgaatgtggatttgaaccatttgaagattccagaatggaatttgatgtaagattttatctagttgctattttgtttattatttttgatcttgaaattgcgtttttgtttccatgggcaatttcactgggtaacataggaatctttggttttacttcaatgatgattttcctatttattttaactatcggctttatttatgaatggaaaaaaggcgctttagactgggaataat

SEQ ID NO: 221000 - DNA, 220 bp, Unknown
  Bacterial polypeptide expressing nucleotide sequence isolated from the Sargasso Sea
tgaaccttttcaagactcaagaatggagtttgatgttagattttatctagttgcaattttatttattatatttgatttagaaattgcatttttatttccttgggcaatttctcttggaaatattggactacttggtttttcatctatgatgatttttttattcatacttacaattggttttatttatgagtggaaaaaaggcgctctagactgggaataa

SEQ ID NO: 221001 - DNA, 643 bp, Unknown
  Bacterial polypeptide expressing nucleotide sequence isolated from the Sargasso Sea
atggaatacgcaatactatttttaccattaatcggctctatactaggttatttaggaagatctattaataaattttttgcagaaattactacaagtttattagtaagtgtatctgctattctttcaataattgttttctggaacggatttcaaagtgatatttatggaaactataaaatttttgagtggattagttctggtggtttcacagcaaattggtcaataaatatcgacccattaagttctgtcatgctggtcgtagtaacatttgtatccgcattagttcatatttattctattggttacatgagtcacgatcctcacaagccaaggtttatgtcatatctttcactttttactttttcgatgctagctttagttgtttcagataattttttacaactctttttcgggtgggaaggagttggtttatgttcatacttgttaataggtttttggtataaaaaagaaaccgctaacaacgctgcaataaaagcttttattgtaaatagaattggagattttggtttagctattgcaatttttttaatatttttcttttttggatcgataaactttgaagaggtttttcaagctacaagtcaattcacagaaaaaaaaatagaatttttgggttttgagt

SEQ ID NO: 221002 - DNA, 592 bp, Unknown
  Bacterial polypeptide expressing nucleotide sequence isolated from the Sargasso Sea
cttaggtgcgttgcgttcggcagcacagatggtgtcttatgaagtgtcgatagggttggtgattatcaatgtcctgctatgcgctgggtcattgaatttgttggatattgttgaagcacagcgcgacatttggtttgccttacctttgttgcctatgttcgtggtatttttcatttcaacgctggctgagacaaaccgtgccccctttgacctaccagaaggggagtccgaactcgttgccggctattttgtggaatattcgtcaatgtcatttgcgcttttcttccttggggaatatgccaatatgattttgatgagcagtatgacggttattctgttccttggtggatggttgtcgccaattgacatctggccgctgaatgttatccccggaccactatggtttattatcaagattatgctggttctttttgtgttcttgtgggtgcgcgccacaaccccgcgctaccgttatgaccaacttatgcgcttgggctggaaaatctttttaccgttctcgctgatttatgttgtgttgacggctggttttttgctgatgactgaccgtttaccagccgtggtgttgggttga

SEQ ID NO: 221003 - DNA, 301 bp, Unknown
  Bacterial polypeptide expressing nucleotide sequence isolated from the Sargasso Sea
ctgtctatttgtttggcaaatttcttagttgcagtaaataaccctgatcctgaaaagaattctgcctatgagtgcggatttgaacagtttggagactctagaatgaagtttgatgttcgtttttatttagtcacattactttttattatttttgacctcgaagtcgcgttcctatttccttgggctgttacatttggaaccttgggcttatttggttttgtttcaatgatggtttttctagctattcttacaattggtttcatatacgagtggaaaaaaggagcattggagtggcaataaa

SEQ ID NO: 221004 - DNA, 769 bp, Unknown
  Bacterial polypeptide expressing nucleotide sequence isolated from the Sargasso Sea
tgtatggtagctttagttgtaagtgacaatttaattcaattattttttggatgggagggtgtcggattagcctcttatttactgataggtttctggcaccacaagaaatctgcaaatttagcagctatgaaagcatttttagtaaatagggttgcagattttggctttcttattggtatcgctactctttacatatttttagatacattatccattaacgaaataatagaaggtaaagaagaattattaaattatgatattaattttctaggctttaatattaacgcgttagttttttcatgtttttttctttttgtcggtgctatgggaaaatctgctcaatttggttttcatacttggttacctgatgctatggagggaccaactcctgtttcagcattaattcatgcagctacaatggtaacagctggtgtttttttgactgttagattttcagaattaatggtcatgtctgattttattatgacttttgttctcattataggactccttacagcattctttgcagcatcagttggattttttcaaaaagatataaaaaaggtaattgcatactctacttgtagtcaattaggtttcatgtttgtagcttgcggactaggtgcattcaacattgccatatttcatttaataacacatggttattttaaagctttactctttttatcatcagggtcagttattcatggagttcatgatgaacaagatatggataaaatgggtaatctttttccaaagatgaaaataa

SEQ ID NO: 221005 - DNA, 805 bp, Unknown
  Bacterial polypeptide expressing nucleotide sequence isolated from the Sargasso Sea
aatgttaattgatccattgtcagctgtaatgttagtagttgtaacttctgtatctgctttagtgcatatctattcaattggttatatgtctcatgatcctcataaaccaagatttatggcttatttgtcattgttcacatttgcgatgttgatgcttgtaacttcagataattttattcaattattttttggttgggaaggtgttggattatgttcttacttcttaattggtttctggtttaaaaaagaaagtgcaaatgctgcagccattaaagcatttgttgtaaacagagtaggcgattttggttttgctctaggaattttcttaatattttatttatttggaaccgttaattactcagaagtttttcaacaaatcccaacagttgtagataaaaatttaccatttttaggttttgaagttaaagcaatagatttagtttgtttacttctatttattggagcaatgggtaaatctgcacagatattgctacatacttggctacctgatgctatggagggtccaactccagtttctgcattaattcatgcagcaacaatggtaacagctggtgttttcttagtagtaagatgttctccagtttatgaatattcaccattaatactaaattttataactattgttggaatgaccaccgcattcttcgcagcaactgtcgctctagttcaaacagatattaaaaaaataattgcttattctacatgtagtcaacttggttatatgttttttgcagctggagtaggcgcatacaatgttgccatgtttcacttatttactcacgcc

SEQ ID NO: 221006 - DNA, 535 bp, Unknown
  Bacterial polypeptide expressing nucleotide sequence isolated from the Sargasso Sea
atggaatacctaattttatttctacctctaattggagctgtaattagtggtttttttggaaagaaaataggagacagaaattctcaaattttgacaagttcgtttgtgagtatctcagcaatactctctttacttgttttgtataaagttattagttcagattattcaaacaatcttgttatagctacttggattaactttggaacattaaatgttaattggtcaataaaaattgatgccttatcagcagttatgtttgttgtggtaaactttgtttcagctttagttcatatttactcaattggttacatgtcacacgatcctcataaaacaagatttatggcatatttgtccttatttacttttgcaatgttaactttagtaagttcagataactttattcaactattttttgggtgggaaggtgtaggcttatgctcatattttttaattggattttggtttaaaaaagagagtgcaaacaaggctgcaataaaagcttttgttgttaatagagttggtgattttggtttag

SEQ ID NO: 221007 - DNA, 370 bp, Unknown
  Bacterial polypeptide expressing nucleotide sequence isolated from the Sargasso Sea
atggcagaagaatttttaatggattatttttcaattattttatttttaataattgctctggttttaagttgtggatttattttactgaattttgttttttcacctaaaaatccagaccctgaaaaactatcaccctatgagtgtggttttgaaccgtttgatgattctagaatggaatttgacgtgagattttatctagttgcaattctatttataatttttgatttagagatagcttttttatttccttgggcaatttcgctaggaaaaattggtttatttggttttatctcaatgatgatttttttatttatattaactattggttttatatatgagtggaagaaaggcgcattagactgggaataaa

SEQ ID NO: 221008 - DNA, 874 bp, Unknown
  Bacterial polypeptide expressing nucleotide sequence isolated from the Sargasso Sea
tttgatataaatttgataactttaatatgtgtattcctttttattggtgcgatgggaaagtcagcacaatttttacttcatacatggttacctgatgcaatggagggcccaactccagtttcagctttaattcatgcagctacgatggtaacagctggtgtttttctagttgttagatgttcaccaatgtttgagtattctcaagttgctttaaatttagtcactattattgggatgataacagctatatttgctgcatcagttgcattagtacaaaatgatattaaaaaaatagtagcttattcaacgtgtagtcaattgggatatatgttttttgctgcaggagtaggagcttatcatgtagcgatgttccacttatttacacatgcattttttaaagcattattattcttaggagccgggtctattatacatgctttcaaagatgagcaagatataagaaatatgggtggcataagaaaaaaacttccttatacatatgccttcatgttagtaggcactttagcgttaactgggtttccatttctttcaggtttttattcaaaagattcaattatcgaattcgcatatctaagaaactcaactttaggtaattatgcagctacaataggtattcttactgcattcataacatcaatatattcctggaggttgttttttaaagcttttcacggatcttataacaataaaaaaatatcaatagataagacacatgagtcgccattaataatgttaatacctttaattttcttaggtcttggagccattttttctggatatctttttaaaagcacatttataggacatcacagcaatgagttttggcaaggtttcatcttttttttaaattgaa

SEQ ID NO: 221009 - DNA, 873 bp, Unknown
  Bacterial polypeptide expressing nucleotide sequence isolated from the Sargasso Sea
aatgcacgcagcgacaatggttactgcaggagtctacctattagcaagaatgtttcctttttaccaagggatagcaaacgacgcattggatattgtaatgttatttggagtagtcactcttctcactgccggacttatagcaattgttcaagatgatctaaagaaagttctcgcttattcaaccgtaagtcagcttggatacatggttgcagcaattggttccggagcgtacactgcggcactttttcatttgtggacacatgcattttttaaagctttattatttctaggggctggatcagtaatccattcagtacacagtaatagtatgttagaaatgggtggtttaaggaaggttatgccaaaaactttttcaacatttattattgggacagtagcacttgccggtttaccaccatttgcaggtttcttttctaaggatgaaatcctagcttcttttaatcatgaaggcgaaacaacctttttctttatagctgtgttaggtgctttcataacggctttttatatgactagagcagtgtgtcttacttttttaggagagtacagaggtcatgggcatccacatgagtcagactccatgatgaccacaccattagttgttttagctgtatttgcagcagcttctggttgggttaatattccaggggtttacacaggctttaccaaatgggtaactactcgtaaaacacctattattgaatatcacccagaaagcttcgatttatttgcactaggacttggcttaactgcagggttgcttggaatagtcctaggttactatttataccaactcccaggtagtgccgagactggagacgataaaataaaattgaaccattttggagagttttg

SEQ ID NO: 221010 - DNA, 823 bp, Unknown
  Bacterial polypeptide expressing nucleotide sequence isolated from the Sargasso Sea
aaaatcttccaattggtacctaatttcactgatcaaaaaatcaactttcttggttttaatgccaacttaattacactaatttgtctattcttattcattggtgctatgggtaaatcagcgcagttttttttacatacctggttgcctgatgcaatggaaggaccaacacctgtttcagcattaatccacgcagcaactatggtaactgcaggtgtttttttggttgtaagatgctccccaatttttgaatattctcaatttgcatctaatattgttgcaataattgggatgataacagcatttttcgctgcaacagttgcgatagtgcaaaatgatattaaaaaaataattgcttattcaacctgcagccaactaggatatatgttttttgcagcaggtgtaggagcatatcatgttgctatgtttcacttatttacacatgctttttttaaagcacttttatttttaggatctggctcagttatccatgcaatggatgacgagcaagacattagaaacatgggggatctttggaaaaaaatgcctttcacatggcttggaatgttaattggaactctagcacttactggcttcccttttttttccggtttttattcaaaagacgcaataatcgaatttgcatatttaagccaaagcagtattggatatatagctacagcaataggaataataaccgcttttttgacagccatatattcctggagactaatgtttaaaacttttcatggaaaatataataataaaaattattcaaaatctaaaattcatgaatcaggattgtcgataactatacctttgggta

SEQ ID NO: 221011 - DNA, 532 bp, Unknown
  Bacterial polypeptide expressing nucleotide sequence isolated from the Sargasso Sea
gaggtatctatttggtcttataataatttctgttttaattacatctggttcgttgaatcttagcgagattgttatgaaacaggaaaatatgtggtatgtaattccgcattttccaatgtttgtcattttctttatatctaccttggctgagacaaatagagctccttttgaccttcctgaagctgaatcagagttagttgctggttataatgttgaatactcttcgatgtcttttggccttttttttcttggagaatatggaaacatgattctcatgagttcaatgtcaacaattctctttttaggtggttggttaccaccttttgatattcaatttttccaaaatattccaggttttatttggtttttattaaaagttacattcttactgtttctttttctctgggtaagagccactcttcctagatatagatatgatcaattaatgagattgggttggaaagtttttcttcccttatcattagcttggataataattacatcttctgttgttatttacttgcaaaactag

SEQ ID NO: 221012 - DNA, 367 bp, Unknown
  Bacterial polypeptide expressing nucleotide sequence isolated from the Sargasso Sea
tttgcaggcgcttctcgtcgaatatctgccaattttgattttcctgggtatagccattatagtcgcagggagtgcagtagttgcatccgtagttatcgcgccgcagcgccctgatgttgaaaaaaattcagcgtacgagtgcgggtttgaagctttctccgattctcgacataaattcgacgtccgcttttatctagttgctattcttttcattatctttgacttagaggtagcctttctgttcccctgggctataagtctgggcaagattggcatttttggcttttggtcaatgatgatttttcttggtattctgaccatcgggtttatctacgagtggcgaaaaggagcgctcgaatgggagtaa

SEQ ID NO: 221013 - DNA, 875 bp, Unknown
  Bacterial polypeptide expressing nucleotide sequence isolated from the Sargasso Sea
attttttggttgggaaggtgtaggcttatgttcgtattttttaataggattttggtttaaaaaagagtcagcaaacaaagctgcaattaaagcatttgtagtaaatagagtgggtgatttcgggtttgctctcgggatatttttaattttttatttatttggaacagtaaattactctgaggtttttgctaaaattccaagcattatagataaagatttggtatttttaggtatcacatttaatgctgtagatttgatttgcttacttttattcattggtgcaatgggtaaatcagcacaaattttacttcatacttggttaccagacgctatggagggaccaacacctgtttctgccttaattcatgccgccacaatggtaacagcaggagtttttctagttgtaaggtgttctccaatttatgaatactctgatctagctttaaatatcattacaattgttggtatgagtactgcattctttgctgcgacagtagcattggtacaaaatgatattaaaaaaataattgcgtattctacttgtagccaattaggttacatgttttttgccactggcgtgggagcatataatgttgcaatgtttcatttattcactcacgcgttttttaaagcactattatttttaggatccggttcagttattcatgcgtttaaagacgaacaaaatataaataatatgggtggtgtgtggaaaaaacttccatacacctattcactaatgattataggaacgctagctttaacggggtttccatttttgtcaggtttttattctaaagatgcaataattgaatttgcttatttgagaggaaatacaacaggttattatgctgctggtataggtatttttacag

SEQ ID NO: 221014 - DNA, 763 bp, Unknown
  Bacterial polypeptide expressing nucleotide sequence isolated from the Sargasso Sea
taaatttatatttattttatcacctatccttacctttacattagccttaatcggctgggctgtgattccaattgattataaacttgttctagcggatattaacgttggtgtaatgtatattttcgctatttcatcacttggtgtatatggaataattatggctggttgggctagtaattcaagatatgcatttcttggagcactaagatctgctgctcaaatgatttcttatgaagtgtcaattggtctaattataatttctgttttaattacatcaggttcattaaatcttaccgagatagtcatgaaacaacaaaatatgtggtatctaattcctcattttccaatgtttgtcattttttttatatctactttagcggagacaaatagagctccatttgaccttcccgaggctgaatcagaattagttgctggttataatgttgaatactcttcaatgtcttttggactgttttttcttggggaatatggaaatatgattctcatgagctcaatgtcaacaattctttttttaggtggctggttgccaccagctgatattaacttttttcaaaatattccaggctttatatggtttttattaaaagttacatttttactttttctctttctatgggtcagagctactcttcctagatatagatatgatcaattaatgagattaggctggaaagtttttctccctttatcattagcttggataataataacatcttctgttgtcatttacttacaaaattag

SEQ ID NO: 221015 - DNA, 792 bp, Unknown
  Bacterial polypeptide expressing nucleotide sequence isolated from the Sargasso Sea
gcgaattggtctattaatgtagatccattaagttctgttatgttagtggttgttacttttgtatcagctctggttcatatttattcaattgggtacatgagccacgaccctcataaacccagatttatgtcttatttatcactctttactttttctatgttagttttagtagtttcagacaatttcttacaattattttttggctgggaaggggttgggttatgttcatatttattaataggtttttggtataaaaaagaaactgcaaacaatgcagctatcaaagcttttatagtaaatagaattggagattttggtcttgcaataggaatctttctaatttttttcttttttggaagtataaattttgaagaagtttttcaatctgcacccgaacttactgaaaaaaaactattattttttggagttgaattaagtttaattacattaatttgcttatttttatttgtaggagcgatgggaaaatctgcgcaatttttactgcatacctggttacctgatgctatggaaggtcctactccagtttctgcattaattcatgcagcgacaatggtaacagctggagtatttcttgtggttagatgttctccattatttgaattctcccaattagcattaaacgtcgttactgttgtaggaatggtaacagcaatttttgcagcatctgttgcattagttcagaatgatatcaaaaaaattgtagcttattctacttgtagtcaattaggttatatgttttttgcagcaggtgttggagcatatcacgttgca

SEQ ID NO: 221016 - DNA, 370 bp, Unknown
  Bacterial polypeptide expressing nucleotide sequence isolated from the Sargasso Sea
atgattgcggaatttttaaaagattatttatcaattattatatttttaatagtagctctaggattaagctgtgcgtttgttttaatgaattttattctagcgccaaataatccagatcctgaaaaactttcatcttatgaatgcggatttgaaccatttacagactctcgtatggaatttgatgttaaattttaccttgttgcaatcttatttattatatttgaccttgagattgctttccttttcccttgggcaatttcattaggaaatattggattagttggctttatatcaatgatgatttttctgtccattttaacaattggttttatctatgagtggaagaaaggtgctttagactgggaataat

SEQ ID NO: 221017 - DNA, 722 bp, Unknown
  Bacterial polypeptide expressing nucleotide sequence isolated from the Sargasso Sea
aattgcaatcctagtactagaaacttttatgataggggttttttgctctcttgatttagttattttttatcttttttttgaagcaggtttaataccaatgtttttaataataggaatatggggtggtactagaaaagtatattctgcgttcaaatttttcttatttactcttttaggatcaattttaatgctgattgctataattgcaatatactggataaccgggacaacagatgtaacacaaatttacgaaattaaaattccacaagaatttttttatttattatggttagccttttttagctcctttgcggttaaactgccaatgtggcctgtacatacttggttaccagatgcacatgtcgaagcgcctactgctggatcggttattttagctgcaattttattaaaaatgggtgggtatggttttttaagattttcggtaggtatgtttcctattgcatcagagtattttactccattaatttttgccttaagtataattgcagtaatttatacatcacttgttgccttaatgcaggatgatatgaaaaaattaatagcttattcatcagtagcacatatgggatttgtcactattggtatcttcacttttaacaaacaaggaattgagggaagcctaatacaaatgctcagccacggtcttatatctgcagcattatttttgtgtgtaggtgttttatatgacagaactcattcaa

SEQ ID NO: 221018 - DNA, 850 bp, Unknown
  Bacterial polypeptide expressing nucleotide sequence isolated from the Sargasso Sea
atgttaacattggtaacatctgataattttttacagcttttttttgggtgggaaggagttggtctttgttcatattttctaataggtttttggtataaaaaggaaagtgcaaatgctgctgctataaaagcttttatagtgaatagagttggagatttcggttttgcattaggtatatttttaatcttttatttatttggaactgttaattataatgaagtttttgaatctatacctcagataattgataaaagattaaattttttaggcatagatgtaaatgctattaatttaatttgtatattactttttattggagcaatgggtaaatctgctcaatttttattacacacttggttgccagatgcaatggaaggacctactcctgtatcagcattaattcatgcagctacaatggttactgctggagtttttttagttgttaggtgttcaccaatatatgaatattcaattttagctcaaaatttaattactattgtaggtgcaacaactgctttttttgcagcaagtgttgctttagttcaaaacgatataaaaaaaataatagcatattcaacatgtagtcaattaggttatatgttttttgctgctggtgctggagcttataatgtagcaatgttccatttatttacacatgctttttttaaagctcttttatttctaggatcaggttcagttattcattcttttaataatgagcaagatattacaaaaatgggaggcgtttggaaaaaactaccttacacatggatattaatgttaataggtactcttgctttaactggttttcctttcttttcaggattttattccaaagatgcgataattg

SEQ ID NO: 221019 - DNA, 904 bp, Unknown
  Bacterial polypeptide expressing nucleotide sequence isolated from the Sargasso Sea
ttatgattttcaatttatagaagagtttttttggataagcgggtttataaaatttaagtttggaatagacggtatttcaattttatttattttacttaccgcttttgtcacgcctttggcaataatttcatgcatcaatagtgttaaagtaaggttaaaagaatttttaattgcaattctagttttagaaacttttatgatcggtgttttttgttcgctcgatctcgttattttttatttgttttttgaagcaggtctaataccgatgttcctaataattgggatctggggaggtccaagaaaagtttattctgcgtttaaattttttctatttacactacttggttctgttcttatgcttgttgcaataattgcaatatattggataactggcactacagacgtaactgagatatataaaattaaaattccaaaggaatatcaatatttactatggctggccttttttagttcttttgcagttaaacttccaatgtggccagttcatacatggttacccgatgcacatgttgaagccccaacggcaggttcagtaatattagctgcaatcttacttaaaatgggaggatatggatttttaagattctcggttggaatgtttccaattgcatctgattattttgtacctttagtttttgtattaagtgtaatagctataatttacacatctttagttgctttaatgcaagacgacatgaaaaaattgatcgcttactcatccgttgcccacatgggatttgtaactttgggaattttcacttttaacaaacaaggaatagaagggagtataattcaaatgttaagccacggtttaatttcagctgctctctttttaagtgtcggttttctttatgacagagttaattcaagaattattaagtca

SEQ ID NO: 221020 - DNA, 808 bp, Unknown
  Bacterial polypeptide expressing nucleotide sequence isolated from the Sargasso Sea
tttttttttattttttactagaagtagtgaaaaaaataataacacagtaaagtacgttgctttattcacttccttcgtaaatttctttctatcaatatatttatgggtattatttgatcaaacaacttcagaatttcagtttgttgaagatagagtttggattgaaaattttattaattataaagtaggtattgatggaatttcaattttatttattttattaacaacatttattacacctctttgtattttatcaattaacaattccatcaagaatagattaagtgaatttctgatagctgtactaattatggaatcttttatgattggtgttttttgctctttagatcttgttgtattttatttattttttgaagctggcttaattccaatgtttttaattatagggatttggggtggtgcaagaagagtatactctgcatttaaattctttttatataccttactaggatctgtgttaatgctaattgcaataatttcaatatactggataacaggaacaactgatgtagttgagctttataaaataggaatagatgttaaatatcaaaatcttttatggttagctttttttagctcttttgcagtaaaaacaccgatgtggccagttcatacatggttacctgatgcccatgtagaagcgcctactgcagggtcagttttacttgcagcaattttattaaaaatggcaggctatggttttataagattttctttaggcttattccctgctgcctcagaagtttttacacctttaatttatgcgctaagcgttatcgcaataatt

SEQ ID NO: 221021 - DNA, 807 bp, Unknown
  Bacterial polypeptide expressing nucleotide sequence isolated from the Sargasso Sea
tatgtttcatctttttactcacgcattttttaaagcattattatttctaggatcaggttctgtaatccatagttttaaagaagaacaggatataagaaaaatgggaggtgtgtggagaaaattgccatttacttggattttgatgattattggaacattggctctaacaggctttccttttttgtcaggcttttattcaaaagatgcaattattgaatatgcatatctaaaagatactaacttaggatattcagctgctacgcttggaatttttacagctttgttaacagcaatatattcttggagactaatgttcaaaacatttcatggaggatttaataatgaaaaaattgagttaaattctatacatgaatcgccatcttctatgctaatacctcttataattttggctattggatcattgttttcaggattattttttaaagatttatttattggtaatattgagccaagtattttttggcaagattcaattaaatttttagttccattaagtactaatcatccaccgtcttggtttattttaattacacctgttttggtatgcatagcaatacccatttcgtattatttatttgttaaaaataaaaatattactaaatggttagtagatgaaaataaaccattgtatgattttttattaaataagtggtactttgatgaattatatgattatctatttgttaaaaattcaaaaaaaattggttcttatttttggaaaaatattgatttaaatattattgacaaatatggaccagatggaatttcaaaactaataaaaaattt

SEQ ID NO: 221022 - DNA, 865 bp, Unknown
  Bacterial polypeptide expressing nucleotide sequence isolated from the Sargasso Sea
ttaattttattaccatcaattggtgccctttttttattctttaccaaaagtaacaataaaaataatttcactgtaaaatacgttgctttgtttacatctcttgtcaattttgctttatctatctatttatggatattatttgatccaaccacatcagaatttcagtttgttgaagataggatatggattgagaattttattaattacaaagttggtatagacggaatttctatattatttataatactaacaactttcataactcctttatgtataatttcaattaacaattctataaagagtagattaagtgaatttttgattgctgtgctaatcatggagtcatttatgattggcgtattttgctctctagatcttgttattttttatttattttttgaagctggtttaataccgatgtttctaattattggtatttggggaggaagtagaagagtttattcagcttttaaattctttttatatacattattaggttcggtcttgatgttagttgctataatctcaatatactggattactggaacaactgatgtagtgcaactttataacttaggtattgatacaaaatatcaaaatttactctggttagcttttttcagttcttttgcagttaaaactccaatgtggcctgttcatacttggctaccagatgcccatgtagaagcgccaacagctggatcagtattattagcagcaattttacttaaaatggctggttatggttttataagattttctttaggtttattcccagttgcttcagaggtttttacacctctaatttatactctaagtgtaattgcaataatttttacatcattaattgcattaatgcaggaag

SEQ ID NO: 221023 - DNA, 868 bp, Unknown
  Bacterial polypeptide expressing nucleotide sequence isolated from the Sargasso Sea
tttgaatattcacaattcgctttaaacctaacgacaattgtaggaatgattacggcgattttcgctgcatctgttgcacttgttcaaaatgatattaaaaaaattgttgcttattcaacctgtagtcaacttgggtacatgttttttgcagctggggtgggagcttaccatgttgcaatgtttcatttatttacgcatgctttttttaaagcgttattatttttaggtgccggttcagtaatacatgcatttaaagatgaacaagatattagaaatatgggaggggtaagaaaaaaacttccatacacttatatatttatgttattaggaactttagcgttaactggatttccttttttgtcaggcttctattccaaagacgcaattattgaatttgcatatctaagaaattccactttaggaaattatgcggctacaattggtattcttacagcatttttaacatcaatttattcatggagattattttttagagcttttcatggaccttataacaataaaaaaattcctataactgaaacacatgaatcaccgttagtaatgttaatcccgttaatttttttaagtattggagcagtatgttctggataccttttcaaagacacatttattggtcatcacagtaacgaattttggcagagctcaatcttttttttaaatgaaataaaacacgatgctattccattatggtttttactgattacgccaacgttagttttgatttcaatacctatctcattttacttttatattaaaaatccaaagattttagaagattttaaaaatactaatttgcccttatataaatttttattaaataaatggtacattgatgaacttacgaaaa

SEQ ID NO: 221024 - DNA, 442 bp, Unknown
  Bacterial polypeptide expressing nucleotide sequence isolated from the Sargasso Sea
aatggaatacgcagtaatatttctacccttattaggatcagtaattacttattttggaaaaaaattaggtactttgttttctcaaattttttcatgttcaatggtttctatagctgcaataatgtcttttattattttttataacgggcttatctatgacaattatggaaattatttaatttttgaatggatacaatctggaaatctgaaagttaattggtcaattaaaattgatcctctaagttcaattatggtaatggtagttacctctgtgtctgcattagttcacatatattcaattggatatatgagtcacgatcctcacaaacctaggttcatgtcgtacctatccttatttacattttcaatgctgtgtttagtggtctcggataattttttacaattattttttggttgggaaggagttggattatgttcttat

SEQ ID NO: 221025 - DNA, 492 bp, Unknown
  Bacterial polypeptide expressing nucleotide sequence isolated from the Sargasso Sea
tttgattattttaatagtatttttaccattattaggttttttatattgtgcattcctaggtaatagatttccagatcgatatgctcaaattattacatgcttatttttatttttttctacatttttatcatgggttattttctttaaatatttaagtggagctaatctagaactttattttataattaattggattacatccggattatttgtagctgattggattttgagagttgatgcgctaacatcaactatgctcatagtagttaattcagtttcattatgcgtccacatatattcgattgggtatatgcaaacagataaatctatcccaagatttatgggatatttaagtttatttactttttttatgttggttttagtaactagtaacaacttattgcaaatgttttttggttgggaaggtgtgggacttgcttcttatttacttattggtttttggtttaacaaaaaaagtgcaaatcaagcagc

SEQ ID NO: 221026 - DNA, 862 bp, Unknown
  Bacterial polypeptide expressing nucleotide sequence isolated from the Sargasso Sea
aatgatttctagctggccaatcttgagtataacaacctttcttccactctgtggcgctttctttataattttaatttctaaagaaagtgaaaataataactcgagtttcaatgttaaaacagttgccttgtggacaagtatcatgacttttttagcttcaattattatattaataaattttgattttaatagtaaaggttttcaatttgaagaaatttcagaatgggtgccaaaattaggaattgtttatcattttggaattgatggtatttctttatcttttattttactaacaacttttctcatacctatatgtattttgttgagctggaattcaataaatcataggttaagagaatacatgatatcttttctagtattagagacttttatcataggtatgttttgctctttagatctaattgttttttatattttttttgaaggtgttttaataccaatgttcctaataataggcatatggggaggagttaatagggtttatgctgcattcaaattttttctttatactcttttaggttctgtcttaatgctaatagcaataatatatattttaaatgttgttggctcttcagatttagttgatgttcaaaattttgattttaatttttatacacaaatatatttgtttttagcattcatgatatctttcgctgttaaagttccaatgtggccatttcatacttggcttccagacgctcacgtagaagctcctactgctggatcagttatacttgcaggtgtattgctaaaaatgggaggatacgggtttcttaggttttcccttcctcttttccctgaggctagtcaattttttcaaccctattattttttttctttc

SEQ ID NO: 221027 - DNA, 946 bp, Unknown
  Bacterial polypeptide expressing nucleotide sequence isolated from the Sargasso Sea
gtgttggtttatgttcatatctactaattgtttttggtataaaaaagaaacagctaataacgcagctataaaagcttttatagttaatagaataggagattttggtttagcaatcgcaatatttttaatctttttcttttttggttctattaattttgaggaaatttttcaagccacaagtcaatttgctgaaaaaaatatagctttttttggttttgaggcaaatttaataacattaatttgtgttttcctttttattggagcaatgggaaaatctgcgcaatttttacttcatacttggcttccggacgcaatggaaggtccaacaccagtgtcagctttaatacatgccgcaacaatggttacagctggtgtttttcttgttgtaagatgttcgccaatatttgaatattctcaagttgctttaaatttagttactatagtaggaatgataacagcaatatttgctgcatcagtcgcacttgtgcaaaacgatatcaaaaaaattgtagcttattcaacttgtagtcaattaggttacatgttttttgctgcaggaattggagcttatcatgttgcaatgtttcatttgtttacacatgctttttttaaagcactattatttttaggagctggttcaataatacatgcatttaaagatgagcaagatataagaaatatgggcggggtaagaaaaaaactcccatatacttacgtatttatgttgctaggaactttagcattaacaggatttcctttcttatcaggattttactcaaaggatgcaattattgaatttgcatatctcagaaactcctcattaggaaattacgctgctactattggtataataacagcattattaacatcaatttattcctggaggttattttttagggtatttcatggatcttacaataataaaaaaattaaaattgatgagaca

SEQ ID NO: 221028 - DNA, 922 bp, Unknown
  Bacterial polypeptide expressing nucleotide sequence isolated from the Sargasso Sea
tatttcaattttatttgttattctaactacttttattactccactatgtatagtttcagttaacaatactattaaaaataaattaaaagaatttctaatagctattttattgatggaaacattaatgattggtgttttttgttctctagatttagttatattttatttattctttgaaggtggtcttatcccaatgtttttaataattggaatatggggaggtgaaagaagggtatattcagcttttaagttttttctttatacattgttaggatcagttttaatgttaattgctattatttcaatttattggattaatggaacaaccgatgtaactgaactttataaattaggaatagattcaaaatatcaaaatttattatggttagccttttttagttcatttgcagttaaaactccaatgtggccagtccatacttggttgccagatgcccatgttgaagcaccaactgctggatctgttcttttagctgcgatattacttaaaatggctggatacggctttataagattttcactcggactttttcctattgcgtcagattttttcgttccattgatttattcgttaagtttaattgcaattatttacacttctttagttgctttaatgcaagaagatatgaaaaaattaattgcttattcttcagttgctcacatgggatttgtaacacttggaatttttacttttacaaaacaaggtatagaaggaagtatttttcaaatgttaagccacggtttaatctcagcagcactatttctatgcgttggcgttatatatgatcgaatgcatactagattaataaatgattatggtggcttagtatcagtaatgcctaaatacgcagtcttattcatgatttttacattaggtgctatcggattaccaggaacaagcgga

SEQ ID NO: 221029 - DNA, 798 bp, Unknown
  Bacterial polypeptide expressing nucleotide sequence isolated from the Sargasso Sea
aatgagtgaaattccaatcttaagcattttaatctttataccggttgttggtatattttttatgttattgataagaaataatgatgaccaaagctcgcaaaatttaaaacacaccgctttatggatcacttttttaaatttttttatatcactttcgttacttttttcatttgacttaaataacccggattttcaatttgtagaaaactacgcatggatagaaagtggtattagttatcatttaggtatagatggagtttcaattttatttgtaatactaacaacaatgcttgtgcctatttgcatacttgcaagttatgaaagcattaaattttctgtaaaagaatatttaatttcatttttagcgttagaaacttttatgataggggttttctgctctcttgatcttgtcctattttatctattttttgaaggaggtttaattccaatgttcttaatcattgggatatggggtggagaaagaagggtttattcaactttcaaattttttctttatacacttgcgggctcagtatttatgttacttgcgataatttatatttttatttctacaggcacaaccgatgttgaaacactgttggtttataattttacttcaaacgaacaattgatattgtggattgcattttttacttcattcatggtcaagataccaatgtggccttttcacacttggctaccagatgcgcacgtagaagcaccaacagctggatcagttatacttgcgggtgttctattaaaaatggctgggtatggctttataagattctctattgg

SEQ ID NO: 221030 - DNA, 370 bp, Unknown
  Bacterial polypeptide expressing nucleotide sequence isolated from the Sargasso Sea
atgatttataattttttatcagactacttatctataataatatttttgtttgttgctttattcttaagcataggctttattcttattaactttctttcgtcacctagtaatcctgatccagaaaaactatctgcatatgaatgtggttttgaggcttttgatgactctcgaatggaattcgacgtaagattttatcttgtagcaattctatttattatttttgacttagaaattgcatttcttttcccttgggcaatttctttaggtaatttaggagctctaggttattggtcaatgatgttttttttgggaatattaacgataggttttatctatgaatggaaaaaaggagctttagaatgggagtaac

SEQ ID NO: 221031 - DNA, 307 bp, Unknown
  Bacterial polypeptide expressing nucleotide sequence isolated from the Sargasso Sea
ttgagctgtggatttattgttttaaattattttttatcaccaaaaatgcctgaccctgaaaaactatcttcttatgaatgtggttttgagccctttaatgattctagaatggaatttgatgtcagattttatttggttgcaatattgtttataatttttgatcttgaaatagccttcctttttccatgggcaatatctttaggaaaaataggaatttttggatttttctcaatgatgatctttttgtttattttaacaataggatttatttatgaatggaaaaaaggtgcgttggattgggaataaa

SEQ ID NO: 221032 - DNA, 845 bp, Unknown
  Bacterial polypeptide expressing nucleotide sequence isolated from the Sargasso Sea
catttggggcgggaataaccgaatctatgcttcttttaaattttttctctacacccttttgggttcaatattgatgttaatagccttaatagcaatgtggaaaatttctggcacaagtaatatagcctatttaactgattttaagtttagtcaccagacttttcctgtgcttggtatagacattcttggtggcactcaaatgcttctttggtgggcattttttgcatctttcgctgtcaaactgccaatgtggccgtttcacacgtggcttcctgatgctcatgttgaggcaccaactgcaggttcagtagttctcgctgctatacttctaaaattagggggttatggttttttacgatttagtgttccaatgtttccaaacgcttcaaacctaatgcaggactttgttttctttttatctgtggtggcgataatatatacctctttagttgctttaagacaaacagatatgaaaaaattaattgcgtactcgtcagttgcgcatatgggatttgttacgattggtattttctcgttcaacaggcaaggtattgatggggcgatctttcaaatgcttagccacgggtttatttctgctgctttatttctaattgttggtgtgatttatgatcgaatacatactagagacatcgaggcatatggtggattggttttgaggatgccattttatgccttaattttcatgttttttacgatggctaatatcggtttacctggaacttctggttttgtgggagaagtattggctcttgttggagttttccaagtgagtaaattgacagcgcttggtgccgcaatcggagtgattttatccgctgcatatg

SEQ ID NO: 221033 - DNA, 862 bp, Unknown
  Bacterial polypeptide expressing nucleotide sequence isolated from the Sargasso Sea
tcttgtaccgcattatttgctgcatcggtcgctctagttcaaacagacattaagagaattatcgcttactccacctgttctcagttgggatatatgttcgttgcagctggcgcagggttctatcatgcagctatttttcatctgtttacccatgccttctttaaagctttattatttctaggcgctggatcaattatacattctatgcatcatgaacaagatgtaagaaagtttggtggactgatgtcgaagcttccttggacttttgtaatgatgcttataggtacactagctataactggagcgggcatccctttaagctattacctgtttggtttcaacttcggcttatcgggttttgtttcgaaggatattatcattgaaggtgtttttgcctcaacaaatagcgtcacagcctttgctttttatgtgttggtattttcggctttcttgacgagtttttatagctggagattagtgttcctaactttttttgggcaatatagagggaataaggatgttcttctgcattgccatgaaccaagctggaatatgttagtcccattaattcttttgagcttgggctcaatattttttggtagtttatttgagtattcttttactaacgaaaaataccaaattttttcagatgcaatttttctttctctaaataatacaattttgcgtgattttcattatgtacccacgggcgttaagattgctccgttttgtgctatgttactaggattttctttggctttttatttctattttttcaatacaaaagctcctaaattgttagcaaaagaattaaacatactttatcagttcttattaaataagtggtacttcgatgagatct

SEQ ID NO: 221034 - DNA, 775 bp, Unknown
  Bacterial polypeptide expressing nucleotide sequence isolated from the Sargasso Sea
atgattggagttttctgttcacttgatcttgtagttttctatttattttttgaggcaggtttaatacctatgtttttgataattggtatatggggtggagaacgtagagtgtattctgcatttaaattttttttatataccttactaggatcagttttaatgctgatagcaattattgcaatttattggattactggcactacagatgttgaaaaattatatgaattaggaattgatgcaaaatatcaaaatcttctttggttggcttttttcagttcatttgccgttaaaacaccaatgtggccagttcatacatggttacctgatgctcacgttgaggcccctacggctggatcggttttacttgcagctatattgttaaagatggctggatacggttttattagattttctcttggtttatttccaattgcatctgaatattttgttccacttatttatacattaagcttaatagctatagtttacacttctttagtagctttaatgcaagatgatatgaaaaaattaatagcttattcttcagttgctcatatgggatttgtaactttagggatttttacaatgacgcaacaaggtattgaaggaagtatttttcaaatgattagccatggcctagtatcagctgcattatttttatgtgtaggcgttgtttatgaaaggcaacacaccagattaatcagtaagtacggtggtttagttaatataatgccaaagtacgcaattgtattaatggttttcactttaggtgcca

SEQ ID NO: 221035 - DNA, 895 bp, Unknown
  Bacterial polypeptide expressing nucleotide sequence isolated from the Sargasso Sea
tctcatcatttcgatgttattgccaattgcgctattactcggatttatcacgatttatggatttggtgtaatttattcggaaataaaagtatcatcattcatccaagataaaacagggcctatggggcagggaccaggtctgcatgctggtaaatggggactattgcagccagtggcagatgggttaaaattatttataaaagaagatattattcctgcaagtgctgataggcctctatttatactagctccatttttgatttttattggagccttaacatcatttatcgcagtgccattcggggaaaaaatcataatcactgatatgaatattggtattttctatattgtcgggatgggtagtcttgctgtaattgcattgattcttgctggctggtcctcaaataataaatgggcattatatggtggtatgagatctgctgcacagattattagctatgagataccagcaggaatctctcttgttgccgtcataatgattgcaagttcattaagtatgcaagaaattatagcatatcaaagtggtggtattactaattggattatatttgataatccatttatgccaatagtttttattattttttttataagcactcttgcagaaacaaatagaacaccatttgatttaccagaatcagaatcggagttagtagcaggatttgtaactgagtattctggtactcgttatgctattttttttcttagtgaatacgcaaatatgtttgttgtgagtgctgttagcgcaacagcctttttcggaggttggcaaagccctgtagatggatttttagattcacctgcgtggagtgtgttttggatgataagtaaaacgtttttcctgattttcgtgatgatatggattagatggaca

SEQ ID NO: 221036 - DNA, 370 bp, Unknown
  Bacterial polypeptide expressing nucleotide sequence isolated from the Sargasso Sea
aatgattacaaactttttgacagaatatctgtctataataatattcttatttatatccctgctattaagcatcggttttatcgtcattaattatgtagcgtctccaaaaaatcccgaccctgaaaaattatccgcatatgaatgtgggtttgaggcttttagtaatgccaggatagagtttgatgtaagattttatcttgtagcaattctatttataattttcgatcttgaaatagcatttttatttccatgggctgtatcattagggagcattggacttttaggcttctactcaatgatgttatttttatttatcttaaccatcggatttatttatgaatggaagaaaggggctctagaatgggaatag

SEQ ID NO: 221037 - DNA, 808 bp, Unknown
  Bacterial polypeptide expressing nucleotide sequence isolated from the Sargasso Sea
agttatattttatcttttttttgaaggtggtttaattccaatgtttttaataattggtatttggggtggtgaaagaagagtttattcagcttttaaattttttctttatacacttcttgggtctgttcttatgcttgttgcaataatctcgatatattggattacaggaacaacagatataacttatttatataccctgggaattaatgaaaagtatcaatatttattgtggttagctttttttagttcgtttgcagttaaaactccaatgtggccagtccatacttggctaccggatgctcacgttgaagcgccaactgcaggatcagtcttattagctgcaattttattaaaaatggctgggtatggatttataagattttcagttggtctttttcctgtagcttctgaatattttattcctttaatatatacactaagtttaatcgcaattatttacacttcactagttgcattaatgcaagaagatatgaaaaaattgattgcttattcctctgttgcacatatgggttttgtaactttaggaatattcacatttacacaacaaggattagaagggagtatatttcaaatgattagtcatggtttagtttcggcggcacttttcttatcagttggtgtaatttatgagagaatgcatacaagattaatagcaaattatggtggacttgtttctgtgatgcctaaatacgctattgttttaatggtatttactcttggtgcagtaggtcttccaggaacaagtggatttataggggaatttttgattctgattggagcattaaaa

SEQ ID NO: 221038 - DNA, 946 bp, Unknown
  Bacterial polypeptide expressing nucleotide sequence isolated from the Sargasso Sea
tttataggtgcaatgagaaaatcagctcaaatatttcttcatacatggctaccagatgcaatggaaggtcctaccccagtgtcagctttgattcatgcagccacaatggtaaccgcaggtgtctttttagttgtgaggtgctctcctatttatgaatattctgagttagctttaacaataattatacttgtaggttcttttacagctttttttgcagcaaccattgcattagttcaaaatgatataaaaaaaataattgcttattcaacttgcagtcagcttgggtatatgttttttgctgctggagttggtgcatataatgttgctatgtttcatttatttactcatgctttttttaaagctttattatttttaggatctggttcagtaatacatgcatttaaagacgagcaggatattaacaaaatggggggtgtttggagaaaattgccttacacatatgccttgatgattattggaacacttgcattaaccggtttcccttttctatcgggtttctattcaaaagacgcaatcattgaatttgcttatttaaaaggaagtggtttaggtttcttcgcttcctatattggcatttttactgcatttttaacagccatttactcttggagattaatatttaaaacttttcatggatcttataataatgaaaaaataaattttagtgagacacatgagtctccactaattatgttagttcctttagtttttttaggaataggtgcaattggagctggattcgtatttaaagacttattcataggacaccatctcatgtatgacttttggggtgactcaatattttttattaataaattaagcgaagaccatccacctacatggtttgttttatttacacccgtaatggtaaatattactattcctatttcttactttctatttattaaaaataaaattattctaa

SEQ ID NO: 221039 - DNA, 841 bp, Unknown
  Bacterial polypeptide expressing nucleotide sequence isolated from the Sargasso Sea
aatgaattttcccatcctttcaactttaatttttttaccgttggttagttcaatatttatctttttatcgaaggaacaaaaaaataattatggagcaatttatatttctttgtttagtagtttagctactttaattttatctttatttttatggtactctttggatttaaattcttcagattttcaatttgttgaagagcagtcatggataaatgattttataaagtttaagttaggagtagacggaatttcaattgtatttatagttttaactacttttgttacgccgttatgtattctttcttgcataaacagtattaaaaaaagaataaaagagtttttaattgcaattttagttttagaaacgcttatgataggggttttttgttctctagatttagtaattttctatttattttttgaagctggtttaattccaatgtttattattataggtgtttggggtggagctaaaagaatttattcagcttttaaattttttttatttacgttattaggatcagttctgatgttagtagcaattattgcgatttattggttaactggaactacagatataactcaaatttatgagataaaaattccgcaagagtatcaaaatatactctggttagctttttttagttcatttgcagttaaaacgcccatgtggccggtacatacttggttacccgacgcccatgttgaagcgcctactgcagggtcagtaattctagctgctatacttttaaaaatggctggatatggattcctgagattttcaataccaatgtttcctatagcttcagaattttttactcctctagtatattttttaagt

SEQ ID NO: 221040 - DNA, 728 bp, Unknown
  Bacterial polypeptide expressing nucleotide sequence isolated from the Sargasso Sea
atttctattttgtttattcttttaaccacttttattactccaatttgcattatctcctgtattaacagtgtaaaaactagattgaaagaatttctcattgcacttctaattttagaaacttttatgataggagttttttgttctctagatctagtagttttttaccttttctttgaagctggcttaataccaatgtttttaattattggtatttggggaggtcctagaaaagtttattcagcttttaaatttttcttatttactcttttaggatctgttttaatgcttgttgcgattattacgatttactggattactggaacaacagatgtaacccaaatttatgaaattaaaattccactagagtaccaatatttattatggttggctttcttcagttcttttgccgttaagttgccgatgtggcctgtacacacatggttaccagacgctcatgttgaagcacccacaccaggctcagttatactggcggcaattttattaaaaatgggtggttatggctttctaagattttcgattggaatgtttccatttgcttcagagtattttactccattaatttttactttaagcgttatagcagtaatttacacttcgttagtagcgctaatgcaagatgatatgaaaaaattaattgcatattcatcagttgctcatatgggttttgttacaatggggatttttacctttaataaacaaggtataga

SEQ ID NO: 221041 - DNA, 826 bp, Unknown
  Bacterial polypeptide expressing nucleotide sequence isolated from the Sargasso Sea
ggttttgctttaggaatttttttaatttttttcttttatggcactgtcaattataatgaagtttttcagcagactcctttatttacaaaagaacaaattgtttttttaggtattgagtttaatttaattacgttaatctgtcttcttctctttattggcgcaatgggaaaatctgcacaaattttattacatacttggcttccagatgcaatggaaggtccgacgccagtatcagctttgattcatgcagctacaatggtaacagcaggcgttttcttggtagttagatgctcaccaatttttgaatattctcagacttctttaaatgttgttgctatggttggaatgttaaccgcattttttgccgcaacagtagcgctagtacaaaatgatatcaaaaagatcattgcctattcaacttgtagtcaattaggttatatgttttttgcagctgggataggcgcctatcatgttgctatttttcacttatttactcatgcattttttaaagcacttttatttcttggctctggttgtgtgattcattcttttaatgaagaacaagatattcgatcaatgggtggcgtttggaggaaaattccttatacatattttttaatgataataggcacattagctttaacaggatttccatttttatcaggttattattcaaaagatgccattattgagtttgcttatataaaaggtggtatcatcggctattctgctgctgctgtaggtatttttactgcagtactgacagcattatattcttggagactaatatttaaaacttttcatggaaaatataataataagaaaa

SEQ ID NO: 221042 - DNA, 794 bp, Unknown
  Bacterial polypeptide expressing nucleotide sequence isolated from the Sargasso Sea
aatggctgagttctggacaatttatgcatttccgacgattaaaatcgttggctatatcttggcgattgttattcccttgttgactgccgtcgcctatttgacccttgcggagcgcaaagtgatcgcggcaatgcagcttcgcaaggggcccaatgtggtcggcccttttgggctgctgcagcctttagcggatggtttaaagttgttgtttaaagagacaataattccatcgggtgcaaataaaattgtttttattctcgcaccaatgattacgtttattttgagtttactggcttgggcggtgattccattcagtgaaacctgggtgctcgctgacattaatgtgggcatattatacctctttgccatctcgtctttaggtgtatacggaataataatggcgggctgggcggctaattctatatacccgttcttgggtgccttgcgttcggcggctcaaatggtgtcctacgaagtatccataggctttgtgattatcactgtgttgttgtgcgttggatcactgaacctcaatgacatcatcgaggctcaacggggtttatggttctgcatcccgcttctaccgatgtttgtgattttctttgtttcgggcctagctgaaactaaccgcgcaccctttgatctacctgaggcagaagcagaattggtttcaggttataacgttgaatattcgtctatgaccttcgcccttttttttctcggtgaatacgccaatatgatccttatgagtgggatgacggtaattctgttccttggaggatggttgccaccaa

SEQ ID NO: 221043 - DNA, 938 bp, Unknown
  Bacterial polypeptide expressing nucleotide sequence isolated from the Sargasso Sea
tttatttactttttcaatgctagcgttggttacttctgataattttttacaattattttttggatgggaaggagtaggtctttgctcatactttttgattggtttttggtttaaaaaagattcagctaatacagcggcaatcaaagcttttgttgttaatagagtcggagactttggttttgcccttggaatatttttaattttctacatatttggaacagtgaattataatgaagtgtttgaacaaattccagaatttcataaaaatgagataaacttttttggcatcaggatcaattctataaatttaatatgcattttgctgtttataggagcaatgggtaaatctgctcaaatttttttacatacctggttacctgatgcaatggaaggaccaactcccgtttcggcacttattcatgctgcaacaatggtaactgccggagtttttttagtagtgagatgttcacctatttttgaatattctgaattagctttaaacatcatcactatagttggtatgagtacagctttttttgcagctactgtggctttagtacaaaatgatataaaaaaaataatagcctattcaacatgtagtcaattaggttatatgttttttgcagccggtgtaggcgcttacaacattgcaatgtttcatttattcactcatgctttttttaaagctttgctttttttaggatcgggttctgtaattcattctttcaaagatgagcaagacataaatcaaatgggaggaatttggaaaaaattaccttacacgtggattttaatgattattggtacacttgcactgaccggctttccatttctatcaggcttttattcaaaagatgctattattgagtttgcttatttaagaggaaatacaacaggttattacgctacaattattggtatttttactgctttgttaa

SEQ ID NO: 221044 - DNA, 850 bp, Unknown
  Bacterial polypeptide expressing nucleotide sequence isolated from the Sargasso Sea
tttctttgccgcaacagtggcgcttgttcaaaatgatataaaaaagattattgcttattctacatgtagtcaattaggttacatgttttttgctgcgggagttggtgcatacaacgttgcaatgtttcatctatttacacacgccttttttaaagctttgctttttttaggagctggtgctgtaattcactcatttaatgaggaacaagatataaataaaatgggtggagtaataaagaaacttccatacacgtatgtattaatgcttataggaactcttgctttaactgggtttccttttttatcaggtttttattctaaagatgctataatagaatttgcttacttaaaaggaaatgggattggaatacttgcagcttttgtaggtattgttacagctttattaacatcaatttactcatggagacttatttttaaaacattccatggtaattttaataacaaaaaaatcagtgctgataaaatacacgagtctccttttgttatgatttttcctttaattatcttggcaattggcgcaatttttgccggcatgacatttaaagatatgtttatcggtcatgaaacagcatatgaattttggggtcaatctattaaattcctgaaaccactaagtacagatcatccaccaacatggtttttattactcacaccaatacttgtagtcattgctattccattttcttattttttatttttaaaaaatacaaaaatagttaatggtttaagagaaatgaatgaaccaatatatcaatttttagtaaagaaatggtacttcgatgaaatgtatgattatttatttgttaatccttcaaaaaaaatttggtaa

SEQ ID NO: 221045 - DNA, 370 bp, Unknown
  Bacterial polypeptide expressing nucleotide sequence isolated from the Sargasso Sea
atgatttataattttttatcagaatatttatccataataatttttttatttatcgctctgatattgagtgtaggatttataattgcaaattatcttgcatcgccctccaatccagacccagataaattatcagcttacgaatgtggttttgaagcttttgacgactcaaggatggagttcgatgtaagattttatttagtggcaatattatttataatttttgacttagaaatagcttttttatttccgtgggcaatttctttagggaatataggtttattaggtttttggtcaatgatgttatttttagctattcttacgataggttttatttatgaatggaagaaaggcgcattagattgggagtgaa

SEQ ID NO: 221046 - DNA, 589 bp, Unknown
  Bacterial polypeptide expressing nucleotide sequence isolated from the Sargasso Sea
tttttaggagctttaagatcagctgctcagatggtttcgtacgaggtgtcaataggtttaatcataatttctgttcttctttgtgttggatctttaaatttaacagacatagtcttggctcaaaaaaatatttggtttgctatacctttgatgcctatgtttattatgttttttatctcgacattggctgagactaatagagctccttttgatttgcctgaaggtgaatctgaacttgtagcgggttattttgtagagtattcatctatgtcttttgcattattttttcttggtgaatatgcaaatatgattttaatgagtgcccttacagtaattttgtttttaggtggttggttgccaccgtttgatatatttccttttaacttaattccaggtttcttatggtttgtgttaaaagttatctttattttatttatatttctttgggttcgagcttcgactccaagatatcgatatgatcaattaatgagattaggttggaaaattttccttccattttcacttggatgggtggtattaacctctggggttttggttttttttgatatggtacctaaaaatatttaag

SEQ ID NO: 221047 - DNA, 838 bp, Unknown
  Bacterial polypeptide expressing nucleotide sequence isolated from the Sargasso Sea
aagtgaatttttgatagctgtacttatcatggagtcttttatgatcggtgtattctgctctttagaccttgttattttttatttattttttgaggcaggtttaattcccatgtttttgattattggtatctggggtggtgccagaagagtttattcagcatttaaattttttttatataccttgcttggttcagttttaatgttagtagctataattacaatatattggttgaatggaactacagacgtagttgaactttataattctgggattgatattaagtatcaaaaccttttatggttagctttttttagctcttttgcagttaaaactcctatgtggccagttcatacatggttaccagatgctcatgttgaagcaccaacagcaggatctgttttattagcagctatattattaaaaatggcaggttacggttttataagattttctcttggattatttccggcagcatcggaaattttcactccattgatttacacactcagtgtaatcgcgattatttttacttctttcatagctttaatgcaggaagatatgaaaaagctaattgcttattcatcggttgcgcatatgggttacgttactttaggaatttttacaattcagcaacaaggtattgagggaagtattattcaaatgatcagtcatggactagtttctgcagcactttttttatgtgtaggtgttgtttatgacagaatgcattcaagacttataaatacttatggtggaatcgtaagtattattccaaaaatattcaattatattcatgttatttactttagcagctctaggcctacctggaacaagtgg

SEQ ID NO: 221048 - DNA, 616 bp, Unknown
  Bacterial polypeptide expressing nucleotide sequence isolated from the Sargasso Sea
gcaagtaattcaaaatatgcgtttttgggcgctcttcggtcggccgcacagatggtgtcttatgaagtgtcaatggggctggtgattatcaatgtgctattatgcgccggatcgctgaatttatctgctatcgttgaggctcagcgtgatatgtggtttgcgctgccgctattgccaatgtttgtggtgtttttcatctcgacattggctgaaacaaaccgcgcgccatttgatttgccagagggtgagtcagaactcgttgccggttattttgttgaatactcatctatgtcattcgcgctgttttttcttggtgaatacgccaatatgatcttaatgagcagtatgacagttatcttgttccttggtggttggttgccgccattggatatctggccgctgaatatgattccggggccgttatggttcattttgaagatcatgctgttgttgtttgttttcctgtgggtgcgggccactacaccgcgctatcgttacgaccaattgatgcggttaggctggaaaattttcctaccattctcattgatttacgttgttctcacggcagggtatttgctggtttctggcaatttgccagacgtttcgttgggctagt

SEQ ID NO: 221049 - DNA, 243 bp, Unknown
  Bacterial polypeptide expressing nucleotide sequence isolated from the Sargasso Sea
tttctgcttatgagtgcggctttgaagcttttgatgatgctagaggaagatttgatgtaaggttttatttagttgcaatcctttttataatatttgatttagaagttgcttttttatttccttgggcaatatcattaggaagtattggcctgtttggattttggtcaatgatgatttttttattaatccttaccattggttttatttatgagtggaaaaaaggagctcttgaatgggagtaga

SEQ ID NO: 221050 - DNA, 892 bp, Unknown
  Bacterial polypeptide expressing nucleotide sequence isolated from the Sargasso Sea
catgccttctttaaggcgctcctgttcctgggcgccggctcggtcatccatgcgatgtctgacgaacaagatatgcgtaaaatgggcgggctctataagatgatcccagtaacctacatcgttatgtggatcggcagtctggcgctcgctggtatttggccgtttgcgggattcttctcgaaggacatcgttctcgaagctgcctgggccgccgagagtggggtgggccaatatgcattctggctggggattgccgcagcgttcctaacagcattctattcctggcgcctcctaattatgaccttccacggaaccccgcgagccgacgaagtaaccatggcacatgtccatgaatcgcccaaagtcatgttaatacccttagctgtgttggcattgggtgcaatatttgttggcttcgcgaccttcgaatacttcgttggcggcaagaccatcgaattctggggcaactcaattttcgtgctggaaactcacaaggcgcttgagaacgcccaccatgcgccgctatgggttaaattcctaccgttggcagtcggcatcgtgggcattgtgtttgcctacgtgctgtatatgtggcggcccggtatcccggttgagatcgccgcacggttccaccgcgtttatcaattcctgctccacaagtggtacttcgacgaactctacaacatgatgtttgtccgcccggcattcagggttggccgcaatttttggcggaccggagatggcgccttaatcgatggcttcggtccaaatggtgtcgcgtcgatgacacttgatttagcgcggcgaattgcatcgctgcagtcgggatacctctaccactatgcctttgccatgctggtcgggattgccgccctgatcacctggttcctgt

SEQ ID NO: 221051 - DNA, 951 bp, Unknown
  Bacterial polypeptide expressing nucleotide sequence isolated from the Sargasso Sea
tttaaaaaagaaagtgctaatgcagctgctataaaagcatttattgttaatcgtgtaggagattttggatttgcactaggtatatttttaatattttatctatttggaacagttaattatgtagaagtatttgaattaataccacagtctttaaatataaatttaaccttcttagggttaagttttaatgcaattaatttaatttgtattcttttatttataggtgcaatgggtaaatctgcacaaatatttctacatacatggttacccgatgcaatggaaggacctactcctgtatctgcactgatccatgctgcaactatggttacagctggtgtattcttaattgttagatgttcgcctatatatgaatattctccacttgcattaaatattattactcttgttggtatgtccacagccttttttgcagcaacaatagctttagcacaaaatgatatcaaaaaaataatagcttattcaacgtgtagtcaattaggatatatgttttttgcggctggtgttggtgcttacaatgttgccatgtttcatttatttacacacgctttttttaaagctctattatttttaggatctggttcagtaattcattcatttaaagatgagcaaaatatcaatttaatgggaggagtttggaaaagacttccatacacgtggatattaatgataataggaactcttgcactaactggatttccatttttatctggcttctattcaaaagatgcaattatagagtttgcttacttgagaggtaatacagcaggctattttgcagctggaataggtgtatttacagctctattaacttcaatttactcttggaggctggtgtttaaaacttttcatggtgactacaataataaaaaattaaacatatctagcatgcatgagtcacctatggtcatgataattcccattaataattct

SEQ ID NO: 221052 - DNA, 571 bp, Unknown
  Bacterial polypeptide expressing nucleotide sequence isolated from the Sargasso Sea
aatggaatacctaattttatttctacctctaataggagctgtaattagtggtttttttggaaagaaaataggagacagaaattctcaaattttgacaagttcatttgtgagtatttcagcaatactctctttagttgttttgtataaagttattagttcagattattcaaacaatcttgttatagctacttggattaactctggaacattaaatgttaattggtcgataaaaattgatgccttatcagcagttatgtttgttgtggtaaactttgtttcagctttagttcatatttactcaattggttacatgtcacacgatcctcataaaacaagatttatggcatatttgtccttatttacttttgcaatgttaactttagtaagttcagacaactttattcaactattttttgggtgggaaggtgtaggtttatgttcatattttttaattggattttggtttaaaaaagagagtgcaaacaaggctgcaataaaagcatttgttgttaatagagttggtgattttggtttagcacttggaatttttctgattttctatatttttggt

SEQ ID NO: 221053 - DNA, 826 bp, Unknown
  Bacterial polypeptide expressing nucleotide sequence isolated from the Sargasso Sea
attggtgtattttgctcactcgatcttataattttttacttattttttgaaggtggattgataccaatgtttcttattattggtatttggggaggatcaagaagagtatactctgcttttaaattttttctgtttacattgcttggttcaatattaatgctcgtagctataataactatctactggatatcagataccaccgatataactatcctttattatctaggcattgatccaagttatcaaaaattgctttggttagcattttttagctcttttgctgttaaaactcctatgtggccagttcatacatggcttccagatgcccacgtggaggcgccaacagcgggatctgttttattagcagctattttacttaaactagctgggtatggttttataagattctcaattggattatttcctattgcatctgatttttttacacctttaattttctcattaagccttgttgcaattgtatttatttcattggttgcgctaatgcaggaagatatgaaaaaattgatcgcatattcatctgtagcccatatgggttttgtaacattaggaatatttacacttactcagcaaggtttagaaggaagtataattcagatgatcagtcatggaattgtatctgctgcactttttttttcagttggggttttgtatgacagaacacaatcaagaataataaataattatggtggtctagtatctttaatgccaaaatactccgtgatgttgatggttttttgtctagctgcactaggtttacctggaacttttggttttattggtgaatttttgattcttttaggaa

SEQ ID NO: 221054 - DNA, 643 bp, Unknown
  Bacterial polypeptide expressing nucleotide sequence isolated from the Sargasso Sea
atggaatatttaattttactcttgccactttttggttctatagtctctggattttttggaaaatttattggtgacaagaattgtcaaatattaacaagcttttttgtatctgtttctgcaatactttcattggtaattttttttaaagtaattaacgatggatattctgataatttaatcgttgcaacgtggattaattctggatccttaaatgtaaattggtcaattaatattgatgctttatcatcagttatgctagttgtcgttactcttgtatcagcattagtacatatttattctattggttatatgtcacaagatcctcataaaccaagatttatgtcttatttatctttatttacatttgctatgctgacacttgtaacttcagataattttatacagttattttttggatgggaaggcgttggtttgtgttcttattttttaattggtttttggtataaaaagaaaagcgccaatgctgctgcaataaaagcttttttggttaatagagtgggcgattttggatttgctttaggtatatttctaatattttatatatttggtactgtaaattatgacgaagtttttgataaaattccagaaatattagaaaataaattattttttttaggcatta

SEQ ID NO: 221055 - DNA, 805 bp, Unknown
  Bacterial polypeptide expressing nucleotide sequence isolated from the Sargasso Sea
aatggaaatttcgattattgcattacctttgatagcttcaattatctcaggtttttttggaaaatttattggtgatagaaactctgaaattgttacaagttcgttggttacaatatctgcaatactttctgtgttagttttctatgaggttatggtcaaccaatatcaagataatataattattgccacatggataaattctgggtcattagatgtaaattggtccatgaaaattgatgctttgtcatcggtgatgttagttgttgttacttcagtttctgctttagtccatatttattccattggatatatgtcccatgatccacacaaacctagatttatggcttatttatcattgtttacttttgcaatgttaatgttggtaacttctgacaactttattcaattattctttggttgggaaggggttggtctctgttcttattttttaattggtttttggtttaaaaaagaaacagcaaatgctgcagcaataaaagcattcgtagtaaatagagtaggtgattttggttttgctttaggaatatttttaattttttatttatttggaactgtaaattattctgaagtttttgaacaaatacccttaattacagataaagaattagtttttttaggcattaaagtaaatgcaattaatttaatttgtatacttttgtttattggtgcaatgggaaaatctgcgcaaattttactacacacttggttgccagatgccatggaaggtccaacaccagtctcagccttgattcatgcagcaactatggtgaccgcaggtgttttt

SEQ ID NO: 221056 - DNA, 767 bp, Unknown
  Bacterial polypeptide expressing nucleotide sequence isolated from the Sargasso Sea
ttgtttcttgattgctccaattataacaatggtacttagtttagctggttgggctgtaatcccatttgctcctggttgggttatttcggatataaatgtgggtgtaatgtatatatttgctgtttcttcacttagtgtctatggagttattatggctggttggtcaagtaattcacaatatccattcttgggagcacttagatctgcagctcaaatggtatcttatgaagtatctataggctttgttattattacagttttgttatgcgtaggttctttgaatttaagtaaaatagtagaagctcagcaaactgtttggtttgcaatacctttactgcctatgtttattattttttttatttcagcattagctgaaactaatagattaccatttgatcttcctgaagatgaatcaactttagttgcaggtttttttacagagtattcctctgcttcatttgtattattttttttagctgaatatgcaagcatgattttaatgagctcacttactgttattctatttctaggaggttggctccctccttttgatatttatcctttaaatgctttgcctggtattttttggtttactttaaaaattatttttattttatttttatttatatgggtccgcggtacttttccaagatacagatatgatcaattaatgagattaggatggaaggtatttcttccactatctttactttgggttgttttgacttctggttttttagtaatttttaacaaacttcctatataga

SEQ ID NO: 221057 - DNA, 649 bp, Unknown
  Bacterial polypeptide expressing nucleotide sequence isolated from the Sargasso Sea
atggaactatcaataatatttcttccacttattgcttcaatcatctctggattttttggaagatatataggtgacagaaactctgaaataataacaagtactctcgtttcaatttctgcacttttgtcaattcatgttctttatcaagtaattgtaaatcagtacgaggaaaatattattatagctacatggattagctctggatcacttgatgtaaattggtcaatgttaattgatccattatcagccgtcatgttagtagtagtaacttctgtatctgctttagttcacatctattcaattggttatatgtctcatgaccctcataaaccaagatttatggcttatttatcattgtttacttttgcaatgttaatgttggtaacgtcagataattttattcaactattttttggatgggaaggtgttggtttatgttcgtattttttaattggtttttggtttaaaaaagaaagtgcaaatgctgcagcaataaaagcatttgttgtaaacagagtaggagactttggttttgccttaggaatttttttaatattttatttatttggaactgttaattatttagaagtatttcaacaaattccaacagtaattgataaaaatttatcctttttaggacttgaagtta

SEQ ID NO: 221058 - DNA, 214 bp, Unknown
  Bacterial polypeptide expressing nucleotide sequence isolated from the Sargasso Sea
tttcacgactctagaatggaatttgatgtaagattttacttagtagcaatattatttttaatttttgatcttgagatagcatttttatttccttgggcaatttcacttggtcaaattggtctatttggtttctgttcaatgatgttatttctatttattttaactgttggatttatatatgagtggaaaaagggagcattagattgggaatagt

SEQ ID NO: 221059 - DNA, 199 bp, Unknown
  Bacterial polypeptide expressing nucleotide sequence isolated from the Sargasso Sea
aatggagtttgatgttagattttatttagttgctatactatttattatatttgatttggaaattgcttttttatttccatgggcgatttcacttgggaacattggattattaggtttttcatcaatgatgatttttctattcattcttacaattggatttatttatgaatggaaaaaaggcgctttagactgggaataa

SEQ ID NO: 221060 - DNA, 844 bp, Unknown
  Bacterial polypeptide expressing nucleotide sequence isolated from the Sargasso Sea
tttttttagcaagtatataggccaaagaaattctgaatttgttacaagctttttagtttcagtttcagcattactagctttaattatttttaaagatgtaattattaatggttatgaaaataatcttataatagctaaatggattacttctggagaattaaatgttaattggtcaattaaaattgatcctgtctcttctgtaatgctagttgttgtgtgcgttatatcatccgtagtacacatttattccattggatacatgtcccatgatccacacaagtcaagatttacttcttatttatctttatttacttttgcaatgttgattttggtaacttcagataactttcttcaacttttttttgggtgggagggagttggtctttgctcatattttttaattggtttttggtttaaaaaatcttctgctaactcagctgcaataaaagcatttgttgttaatcgtgttggagattttggttttgctttaggcatttttcttattttttatttatttggaactgtaaattatgatgaagttttttctcaagtgcctatgtatctatacaaagaaatttcatttttaggaattaattttgttgcactagacttagtctgtatacttttatttattggagcaatgggtaaatctgctcagtttttacttcatacttggttacctgatgcaatggaaggtcccacgccagtttcagctttgatacatgcagcaacaatggttactgctggagtttttttggtagtaagatgttctccaatttttgaatattcaacattagcattaaatattatttgtatagttggtatgacaactgccatttttgca

SEQ ID NO: 221061 - DNA, 835 bp, Unknown
  Bacterial polypeptide expressing nucleotide sequence isolated from the Sargasso Sea
actgtggttatgttgattgtagtgacatcggtttcttcctgcgttcacatttattctataggctatatgcacaatgataacgcacgtgcacggtttatggcctatcttagcttgtttacctttgccatgctgatgcttgttactgctgataacttgcttcagctgttttttggatgggaaggtgttggggttgcctcttaccttttaattggattttggtaccataagccaacggctcataaagctgcgatgaaagcatttatagtaaatagagtgggtgattttggatttgccctaggcatttttgttatattttttatatttggaagtattcaatttgatgacgtttttgataacgcttcaaagtatgcggatgtatcaatcttattcttggggattgagttgcctgcgctagaggttgccgggatattattattcattggagcaatgggcaaatcagcacagcttggtttgcatacgtggctacccgatgcaatggagggacctaccccggtgtcagcacttattcatgcggcgacgatggtaacagctggtgtttttctggtatgcagaatgtctccggtgattgaatatgctccaatagcgcttgatgtaattacattggtaggagcgcttactgcgatatttgcagctacaattggcatgacccagtttgatattaaacgtgtgatagcttattccacctgttcacagttaggatatatgtttttcgctgcaggtatgtccgcctatcctgcggctatgtttcatttgactacacatgcatttttcaaagctttactttttttaggagccaggttctgtgattcatgcg

SEQ ID NO: 221062 - DNA, 915 bp, Unknown
  Bacterial polypeptide expressing nucleotide sequence isolated from the Sargasso Sea
tgttctttatcaagtggttgtaaatcagtacgaagaaaatattattatagccacatggattaactctggatcacttgaagtaaattggtcaatgttaattgatccattatcagctgtgatgttagtagtagtaacttctgtatctgctttagttcacatctattcaattggttatatgtctcatgatccacataagccaagatttatggcttatttatcattgtttacatttgcaatgttaatgctggtaacttcagataattttattcagctattttttggatgggaaggtgttggcttgtgttcctacttcttaattggtttttggtttaaaaaggagagcgcaaatgctgcagcaataaaagcatttgttgtaaatagagtaggtgattttggttttgctttaggaattttcttaatattttatttatttggaactgttaattattcagaagtattccaacaaattccaacagttgtagataaaaatttatcctttttaggttttgaagttaaagcaatagatttagtatgtttgcttttatttattggagcaatgggtaaatccgcacagatattacttcatacatggttgcctgatgctatggaaggtccaacaccagtttctgcactaattcacgcagcaacgatggtaacagctggtgttttcttagttgtaagatgttctccaatttacgaatattctccattaatactaaattttataacaatcgttggaatgactactgcattctttgcagcaacagtagccttagttcaaacagatataaaaaagattattgcttattctacatgtagtcaacttggttatatgttttttgcagctggagtaggtgcatataatgttgctatgtttcacttatttactcacgcattttttcaagctttattatt

SEQ ID NO: 221063 - DNA, 877 bp, Unknown
  Bacterial polypeptide expressing nucleotide sequence isolated from the Sargasso Sea
aatgaaagagtttttaatagcaatattaattttagaaactttcatgattggagttttctgttctttagacttagttattttttatttatttttcgaagctggcctaataccaatgtttttaataataggaatatggggtggtcctaaaagagtttattcagcatttaaattttttttattcactttgctcgggtctgttttgatgttggttgcgattataagtatttattggataacaggaaccacagatattgtagaaataatttatgaaataaaaataccaaaggagtatcaatatttattatggttagctttttttagctcgtttgcggttaaaatgccaatgtggcctgttcacacttggttacctgatgctcatgttgaagcgcctacggctggatcagttattcttgcagcaattttattaaaaatggctggatatggttttctaagattttcaattccaatgtttccaatagcatcacattattttacaccttttatttttgttcttagtattgttgcaataatttacacatctttggttgcactaatgcaagatgatatgaaaaaactaattgcatattcatcagttgcgcatatgggatatgttacgcttggaattttcacttttacaaaatatggtgttgagggaggaatgtttcaaatgataagtcatggtcttatatctgctgcactgtttttatgtgttggagtactatatgacagaactcactcaagaatgataagtgattatggaggtgtcgtagactatcttccaaaattttcatttatatttataattttcactctaggtgcacttggcctaccaggaactagtgggtttattggagagtttcttgtccttgtcggagct

SEQ ID NO: 221064 - DNA, 370 bp, Unknown
  Bacterial polypeptide expressing nucleotide sequence isolated from the Sargasso Sea
atgcttgcggattttttaaaagattactttccaattattctatttctaataatagcaatagggttaagtattgtttttattgctataaattacttagcttcacctaaaaatccagatcctgaaaaattgtctgcttatgaatgtggatttgaaccttttaatgattttagaatggaatttgatgtaaggttttatcttgtagcaattttatttattatttttgatctagaaattgcatttttgtttccttgggcaatctcattgggaaaaataggcttgtttggttttatttcaatgatgatttttttatttattttaaccataggttttatttatgagtggaaaaaaggagcattagattgggaataaa

SEQ ID NO: 221065 - DNA, 673 bp, Unknown
  Bacterial polypeptide expressing nucleotide sequence isolated from the Sargasso Sea
tctgctctacttacttcaaattgggacttttattctgagtttaattttatggttacaatttgattatacaaatccctcttatcaatatgtagaaaaatttagatggtttgatgattttaattttttttatcatataggagttgatggtatctcactttttatgattttattaagtacatttttgacaccactatgcattctttccagttggaataacattaaaaagagagttaaggaatatgttctttcctttttgtttttagaaactgtaatgattggtatgtttgcttcaatagacatacttcttttttatattttttttgaagcagtattaatacctatgtatcttattattggtatatggggaggaactagaagaatatatgcctctttcaaattctttctttacactcttttgggctcagtgcttatgttgattgcaattattgtaatgtacagaaatacaaattcaatgagtattgagtttctccaaggtaattatttctcgtttaatacccaattatttttgtggcttgccttttttgcttcttttgcagtaaaaattcctatgtggccatttcatacttggttaccagatgcacacgtagaagctccaactgccggatctgttattttggctggtgttctattaaaaatgggtggctatggtttt

SEQ ID NO: 221066 - DNA, 706 bp, Unknown
  Bacterial polypeptide expressing nucleotide sequence isolated from the Sargasso Sea
atggaatacattgtaatatttttacctttattaggtgcagttatttcaggtttttttggaaatttaataggtaataaattttctcaaattttaacctctgcttttgtatctatctcggcaatattttcaattttaattttttataatgttttaacaaatgattatgaaagcaacctaatagttgctaaatggattaattcaggaacactcaatgtaaattggtctatcaaaattgatgcattatcctctgtaatgcttgtggtggttacatttgtatcatctctagttcatatttattctattggatacatgtctcacgatcctcataaaccaagattcatgtcttatttatccctgtttactttctcaatgttaactttagtaacatcagataattttttacaattattttttggatgggaaggagttgggttgtgttcatattttctaattggattttggtttaaacgcgaaactgctaatgctgctgctattaaagcatttttggtaaatagagtaggtgatttcggattagcgttaggcatattcttaattttttatatgtgcggaacaattaattatgaggaggtttttcaacaaatatctttactaagtcagagtgaactcaattttgtaggtataaatttaaatccaatcaatcttatttgcgtacttttatttataggtgcaatgggtaaatctgcac

SEQ ID NO: 221067 - DNA, 777 bp, Unknown
  Bacterial polypeptide expressing nucleotide sequence isolated from the Sargasso Sea
tatgattggtgtgttttgtgcacttgatcttgttgttttttatttattttttgaagctggattaattccaatgtttttgataattggaatttggggaggagctaggagagtttattcagcatttaaattctttttatatacgttgcttggctctgtattaatgttagtagcaattatttcaatttattggattaatggaaccactgatgttgttcagctctatgaaattggtatcgatgtaaaatatcaaaatcttttatggctagcattttttagctcatttgctgttaagacacccatgtggccagttcatacttggttacccgacgcacacgttgaagctcctacagctggatccgtactattggctgcaatattattgaagatggctgggtatggtttcataagattttcattaggtcttttccctgttgcatccgaaatttttacacctttgatttatgttttaagtgtaatagcaattattttcacatctctcattgccttaatgcaagaagacatgaaaaagttaatagcatattcatcagttgcccatatgggatttgtaacattaggtattttcactcttcaacagcaaggtattgaaggaagtataattcaaatgataagtcatggattagtttcagcagctttgtttttaactgtaggggtagtttatgatagaatgcattctaggttaataagtacttacggaggattagtttctgtagttccaaaatattcaatattatttatggtattcgctctagcatctct

SEQ ID NO: 221068 - DNA, 367 bp, Unknown
  Bacterial polypeptide expressing nucleotide sequence isolated from the Sargasso Sea
ttggacgggttacttagagaatatttgccaatactaatttttcttgggcttgcaatagtcttgggagttttcttaatgctttcagctatgataattgcagtaaggaacccagactcggagaaaacatccgcctacgagtgtggttttaatgcctttgatgatgctagaatgaaatttgatgtcagattttacttggtagctattctttttatcatttttgacttagaggtcgcgtttttatttccttgggcggccggctttcagcatcttggtatacttggtttttggtcaatgatggtgtttttgattattttgactattggctttgtctatgaatggaagaaaggagctctcgaatgggattaaa

SEQ ID NO: 221069 - DNA, 550 bp, Unknown
  Bacterial polypeptide expressing nucleotide sequence isolated from the Sargasso Sea
atggaatatttaattttatttttaccattaattgcatcattaatttcaggtttttttggtaaattgataggagataaattttctcaaattattacatgtctttttatatcaatttcagcgatattatcatttgtagtattttataatgttataaatcatggttattcaaataacttgattatagcaacatggatacaatcaggaaacttaaatgttaattggtcaattaatgtagatactttatcttctgtaatgtttgttgtggtgaccttggtttcatcattagtacatatttattctattggatatatgtctcaagatccacataaaccaagatttatgtcatatttgtctttgtttacttttgctatgcttacattagtaagttcagataattttattcaactattttttggatgggaaggtgttggtttatgttcttattttttaatagggttttggtataaaaaagaaagtgcaaactcagcagcaatcaaagctttcattgttaatagagtaggagattttggttttgctttaggaatttttt

SEQ ID NO: 221070 - DNA, 829 bp, Unknown
  Bacterial polypeptide expressing nucleotide sequence isolated from the Sargasso Sea
ttagaaacattcatgatcggcgtattttgttcacttgatcttgtaatattttatttattttttgaagcaggtttaataccaatgtttttaattatcggagtttggggtggtccaagaagagtttactctgcttttaaattttttctatttactttacttggctcagtactaatgcttgtagctattattgttatttattggttgacaggtacgacagatattactcaaatatatgagattaaaattcctaaagagtatcagaatatattatggctagcttttttaagttcttttgcagtgaaaatgcctatgtggccggttcatacttggttaccagatgctcacgttgaagctcctacagctggttctgtaatacttgctgctattttattaaaaatggctggatatggttttttaagattctcaatacctatgtttcctttagcttcagaatattttacaccattaatatttactttaagtataatcgctattatttacacatccttagtcgcattaatgcaagacgacatgaaaaaattgattgcttattcttctgttgctcatatgggttatgtcacattgggaatttttacactcactaaacaaggtatagagggaagcatataccaaatgatcagtcacggattaatatctgcagcattattcttatgtgttggagtagtctatgataggttacattccagaatgattagtacttatggagggctagtgaattatattccaaagtactcttttttatttttaatatttgctttagctgcacttggtttaccaggaacttcaggctttctaggtgagtttcttg

SEQ ID NO: 221071 - DNA, 370 bp, Unknown
  Bacterial polypeptide expressing nucleotide sequence isolated from the Sargasso Sea
catgactgcggaatttttaaaagattatttgccaataattttattcctaataattgcattagggcttagttgtgcgtttatagttataaactttatactatctccaaagcacccagatccagaaaaattatcggcttacgaatgtggttttgaaccatttcaagattcaagaatggaatttgatgtaagattttatttagttgcaattttatttattatctttgatttagaaatagcatttttattcccatgggcaatttccttgggaaatattggcatccttggttttacttcaatgatgatttttttattcatacttacaattggttttatttatgaatggaaaaaaggtgctttagattgggaataa

SEQ ID NO: 221072 - DNA, 346 bp, Unknown
  Bacterial polypeptide expressing nucleotide sequence isolated from the Sargasso Sea
atatcttccaatattaatatttatttttattggttttggaatagccgtaggaatgactttgctatcatttattgtaggtgactcaaaacctgacagtgaaaaattatctgcctatgaatgtggatttgaagcttttgatgatgcaaggggtagatttgatgttagattttaccttgtagcaattctttttataatatttgatttagaagttgcctttctttttccttgggcaatttctttaggtaaaattggtttatttggtttttggtctatgatgatttttttattaattttaactataggttttatttatgaatggaaaaaaggcgctctagaatgggagtag

SEQ ID NO: 221073 - DNA, 926 bp, Unknown
  Bacterial polypeptide expressing nucleotide sequence isolated from the Sargasso Sea
accagtatctgcattaattcacgctgcaacaatggtaacagctggagtatttttaattgtaagatgctcacctatgtatgaatactctccattagctcttacagttataaccataattggaatgactactgctttctttgcagcaacagttgcacttgtacaaaatgacataaaaaaaattattgcttattctacttgtagtcaattgggctatatgttttttgctgcaggagtaggtgcttataatgttgcgatgtttcatctatttacacatgctttttttaaagctttgctatttttaggagctggtgctgtaattcattcatttcatgaggaacaagatataaataaaatgggtggagttataaagaaactcccatacacatatgtattaatgcttattgggactcttgctttaacaggttttccttttttatcaggtttttattctaaagatgcaataatagaatttgcctacctaagtggaaatggagttggaatgcttgcagcttttgtgggtattgttacagctttattaacatcaatttactcatggagacttatatttaaaacattccatggtaattttaacaataaagaattcagtattgataaagtaaacgagtcaccttttgtaatgatttatcctttaattatcttggcaataggttctatttttgcaggtatggcgtttaaaggtttatttatagggcatgaaatagcatatgaattttggggtaaatctataaaatttttagaaccactcagtacagatcatccaccaacatggtttttgtttttaacacctatacttgttactgctgcaattccattttcttattatttatatctaaaaaataaaaatatagttataggattgaaagaaatgaatgaaccaatttatcaatttttagttaagaaatggt

SEQ ID NO: 221074 - DNA, 367 bp, Unknown
  Bacterial polypeptide expressing nucleotide sequence isolated from the Sargasso Sea
atgcaggaccttttgttaagttatctcccgatctttatttttttaggggtcgccatagtcatcgccggtatagccgtggctgcttcgcttattatcgtaccccaaaaacccaatgtggaaaaaacttccgcgtatgaatgcggctttgaagcatttacagacgcaagacacaaatttgatgtaaggttctatcttgtggccattctctttatcatttttgatctagaggtagcgtttttgttcccgtgggctatcagcctcagtgagacaggggcatatggcttttggtcaatgatgatttttcttgggattcttaccattggtttcatctatgagtggcgaaaaggggcgttagaatgggaatgaa

SEQ ID NO: 221075 - DNA, 325 bp, Unknown
  Bacterial polypeptide expressing nucleotide sequence isolated from the Sargasso Sea
ttgcccattttattatttataatcattggatttagtttagctgttggaatgacccttctttcttttatttttggtgaatctaagcctgatagtgaaaaactttcagcttatgaatgtggttttgaagcatttgatgatgcaagaggtagatttgatgtaaggttttatttggttgctattttatttattatttttgatttagaagttgcatttttatttccttgggcaattacattaggaaaaattggtatatttggtttttggtcaatgatgatttttttattaattttaactattggatttatttatgagtggaaaaaaggag

SEQ ID NO: 221076 - DNA, 861 bp, Unknown
  Bacterial polypeptide expressing nucleotide sequence isolated from the Sargasso Sea
atatctatttatccaaatgatattggaatatgatcctggatttagtcatggtgctagtttctcatggattgacctggatgcatttaaaattgatttgggtattttagtggataatctcacaattatcatgcttctgattgtgacattggtctcaagttgtacacatattttttctcttgaatatatgaaaggggacatccgatatcacagatattatgcatatctaggtctatttactttttcaatgaatggtattgttttagccgataatctaatttcgatgtacatgagctgggaactggttggcgttagttcgtatttattaatcggtcattggtttgaaaaagacagcgccgcagatgctagtaagaaagcattccttacaaatagagtaggagacatagggtttttcattggtattatgctaatatattcagcaattgggtcttttgcttttaccccgatctttgattctatatccaccgggaatactatagctggaatgacattaacacttgctggtttggggatatttatgggtgcagtggggaaatcgtcgcaatttcctcttcatatatggctacctgacgccatggagggacctactcctgtatctgcattgatgcacgctgctacaatggttgcggcaggtgtatacatgtctgtcaggttgttccctatttttactccagatgcattacttgtgatcgcatatattggtggaatcacagctatgctagctgctcttattgctattacgcagaatgacatcaaaaaagttcttgcttattcaactgttagtcagcttggttatatgattttagctgttggtacaggtgtgtacacagcggcattttttca

SEQ ID NO: 221077 - DNA, 721 bp, Unknown
  Bacterial polypeptide expressing nucleotide sequence isolated from the Sargasso Sea
atgttaagttataaattacttttttttcttcctctaatttcaactattttcacatatccgtttggagtgttattaggtgaaaaaactgctcaatatttctcatctactctaatatctatagcagctgttttaagttggttcttatttatcagtttttctagttcatcatcatcagaaattataattcctgtcctagagtggttttttgtttctggtcaattctttaattggggaatttctgtaaattctctcactcttttgatgttaacacttgttctcacagtttctgcattggttcatatttattcaattgagtacatgtctcatgataattcaaaagtgaggttcatgacttatttgagtctatttacattttgtatggttgccttagttgtaagtgataatttaattcagttattttttggttgggagggagttggtttagcctcttatttattaataggtttctggcatcataagaagtccgcaaatttagctgcaatgaaagcttttttagtaaacagagttgcagattttggatttcttattggtattgcaactctctatatatttttagatacattgtctattaatgaaataattgcagggaaagaaaaattattaagttatcaaattaattttttaggatttgaaattaatgcattagttttttcttgtttttttcttttcataggtgctatgggtaaatctgctcagtttg

SEQ ID NO: 221078 - DNA, 945 bp, Unknown
  Bacterial polypeptide expressing nucleotide sequence isolated from the Sargasso Sea
tattttttatttgtttggaacggttaattattcagaagtatttcaacaaattccaactattgtagataataatttattatttttaggcatcgaaattaaagcgatagatttgatttgtttacttttatttattggagctatgggtaaatcggctcaaatttttttacatacttggttgcctgatgcaatggaaggcccgactcctgtatcagcgttaattcatgctgcaacaatggtgactgcaggagtatttttagtagttagatgttcgcctatctatgaatattcacctttaatattaaatttaattactatagttggtatgacgactgcattttttgctgcaactgttgctttagttcaaaatgatattaaaaaaatcatagcttattctacatgtagccaacttggttatatgttttttgctgctggtgtaggtgcttacaatgtagcaatgtttcatttgtttactcacgctttttttaaggctttattatttttaggatcaggttctgtaatacatgcttttaaagatgagcaaaacattaataacatgggaggtgtatggaaaaaattaccttacacttatgtattgatgataattggaactttagcattaactggattcccatttttatcaggattttattctaaggatgctattattgagtttgcttatttaaagggaaatacagttggctattatgcagctgctattggaatttttactgctttattaacttcaatatattcatggagactaatttttaaaacctttcatggtgaatataataataaggaaattagcattgatgaaacacatgagtctccacttgtgatgttaattcctttaattattttggcttttggttcaatatttgcgggttttttatttaaagatttgttcattaatcatgatggaattaattatttctggaacgagtc

SEQ ID NO: 221079 - DNA, 793 bp, Unknown
  Bacterial polypeptide expressing nucleotide sequence isolated from the Sargasso Sea
aatgactgatatccctatattatcactaactattttcttaccattgttaggcgccctagttattcttctaattaaagatgatgaaaactctataaataatattaaaaaagttgcattattgacatcagttggtgtttttctcttaagcttgtttatatggttgcagttcgacagcagtaatcccggttatcaatttcaagaaaaatttagatggtttaatgactttaatttttactatcatattggcattgatggaatatctctctttatggttatcttaagtacttttttaacacctttatgtatcttagcaagctgggaaagcataaaaaaaagagttaaagaatatatgatcgcatttttatttctagagacagtaatgataggaatgttttcatctgttgatattttgcttttttatatattttttgaagtcgttttaattcctatgtatttaataattggtatctggggtggagagagaagaatttatgcatcttttaaattctttttatacacactgcttggctcagtgctaatgctaatagctataattgcaatttataaattaacaaactcaatgagtattgaaaatttgcaaggtaactattttgaaaaaaatgttcagatttatctttggttagctttctttgcgtcatttgctgtcaaaattccaatgtggccttttcatacatggttacctgatgcccatgttgaagcccctacagctggctctgtaatattagccggagtgcttttgaaaatgggaggatacggatttattcgattttct

SEQ ID NO: 221080 - DNA, 526 bp, Unknown
  Bacterial polypeptide expressing nucleotide sequence isolated from the Sargasso Sea
attggggcttataataatttcaattttattaacagcaggttctcttaatctgactgaaattgtaatgtctcaagaagatcagtggtacttgttgccgcattttccaatgtttgtaattttttttatttcaacattagctgaaactaatcgtgctccatttgacttacctgaagccgaagcagaattggttgctggatataatgtagaatattcctctatgtcttttggattatttttcttgggtgaatatggaaacatgatcttaatgagctcaatgacaacaattttatttcttggtggatggttgcctccatttaataatgattttttaacccttatacctggttatatctggtttttattgaagatctcatttttgttatttgtttttctttgggtaagggcaactttaccaagatatagatatgatcaactaatgtcattaggatggaagttattccttcctttatcattactatggattataattacttcagtatatttatattacaataatgtgtattag

SEQ ID NO: 221081 - DNA, 589 bp, Unknown
  Bacterial polypeptide expressing nucleotide sequence isolated from the Sargasso Sea
aattaatattgatccattaagttcagttatgttatttgttgtaacttttgtctcttctttagtgcatatttattctattggttatatgagtcatgaccctcacaaacctaggtttatgtcttatctatcattgtttactttttcaatgttagctttagtagtttcagataatttccttcaacttttctttggatgggaaggtgtgggtttatgttcttatctattgataggattttggtttaaaaaagaaactgctaataatgctgctataaaagcttttatagtaaatagaattggagattttggtttagcaatagctatattcttaatcttttttttctatggcactattaattttgaagaggtttttcaaacaacaagtcaattagctgaaaaaaagatatctttttttggagtggagtcaaatttaataactctaatatgcgttttcctatttatcggagcaatgggaaaatctgcacaatttttattacatacttggcttcctgacgcaatggagggccctacaccagtttcagctttaattcatgctgccacaatggttactgcaggtgtttttcttgttgta

SEQ ID NO: 221082 - DNA, 417 bp, Unknown
  Bacterial polypeptide expressing nucleotide sequence isolated from the Sargasso Sea
ttttttttatttcagcattagctgaaacaaacaggttaccttttgatttaccagaagatgaatctactttggtagctggtttctttactgagtattcatcagcatcatttgtacttttctttttagcagaatatgcaagtatgattttaatgagtgccatgactgttatattatttttgggagggtggttacctctttttgatatatatcctttaaatataattcctggagtaatatggtttactgtaaaaataatgtttgtattatttttatttatatgggtgaggggaacatttccgcgttatcgctatgatcaattaatgagattgggatggaaggtttttttacctttatcattattttgggtagttatcactgcaggttttctagtaacttttgatattgtgccaaattaaa

SEQ ID NO: 221083 - DNA, 836 bp, Unknown
  Bacterial polypeptide expressing nucleotide sequence isolated from the Sargasso Sea
ggagatttaacttcacaactaaccacatccttttttgtttgtatatctgcaattttatcaattattttattttataatggaattattcatggagagtacggaaactttttaatctacgaatggatttcttcaggtaactttattgttaattggtcgataaaaatagatccattaagttcaattatgttggttatagtaacatcagtatctgctttagttcatatttattcaatcggatatatgcaacacgatccagataaaccaagatttatgtcatacctttcattatttacattcgctatgctaacgttagtcgtttcggataactttttgcagttatattttggttgggaaggagttggtctttgttcttacttgcttattggattctggcacagaaaagagtctgcaaataaagctgctataaaagctttcattgtaaatagagtaggtgattttggatttgctataggaatatttttaatttttatgtatttcggaactatgaactataatgaggtttttaatttagttcctgagttttctcaaaaggagattaattttttaggttttaattcaaatttaattacagtgatttgtttatttttatttataggagccatgggcaagtcggcccagttctttttacatacttggttgcctgatgcaatggagggaccaacgcctgtatcggctcttattcatgctgctacaatggttacagcaggtgtatttttagttgttaggtgctcacctatatttgaatactctcagtttgctttaagttttgttgcaattataggaatgttaacagctttttttgcttgcactgttgc

SEQ ID NO: 221084 - DNA, 355 bp, Unknown
  Bacterial polypeptide expressing nucleotide sequence isolated from the Sargasso Sea
tatgacagaatatttaccaatattaatatttttaatattagcattcgcaatatcaattggggctttatttacctcacttgttgttggaaaaaaaaatccatatgctgataaaatttctacctatgaatgcggttttgatccttttgatgattctaggagcaaatttgaagttaaattttatctggtggcaattctctttataatttttgatcttgaaataatttttctttttccctgggctattgcgtttaatgatattggaatgttcggttttctgtctatgatgttttttttattagttttaacaataggctttgtctatgaatggatgaaaggtgctttagattggaattaa

SEQ ID NO: 221085 - DNA, 810 bp, Unknown
  Bacterial polypeptide expressing nucleotide sequence isolated from the Sargasso Sea
tatggaaatttcaattatagcattacctttaatagcttcaataatatctggtttttttggaaaattaattggtgatagaaattcagaaattgttactagttttttagtaactatttcagcaattttatctgcaatagttttgtatgaagttattatcaatcagtatcaagataatatagttatagctaaatggattagctctggatcattagatgtaaattggtcgatgcagattgatcctttgtctgccgtgatgttagtagttgtaacttccgtttcatccttagttcatatttattctattggttatatgtcccatgaccctcataagccaagatttatggcttatttatctttgtttacttttgcaatgttgatattggtaacttctgataatttcattcaattattctttggttgggaaggtgtaggtttatgctcatattttctaattggattttggttcaaaaaagatactgctaattcagctgctattaaagcctttttagttaatagggtaggagatttcggttttgctttgggaatttttttaattttttatttgtttgataccgtaaattattcagaagtttttgagttgattccaactattactgataagaacttattatttctaggctttaatattaatgctatagatttgatttgtttacttttatttgttggagcgatgggtaagtcagctcagattttacttcacacatggctaccagatgccatggaaggtccaacacctgtttcagcacttattcatgctgctactatggttacagcaggtgtttttttagt

SEQ ID NO: 221086 - DNA, 860 bp, Unknown
  Bacterial polypeptide expressing nucleotide sequence isolated from the Sargasso Sea
aggtaagtgggggcttttacagcctgttgcagatggactaaaactctttatgaaagaagatataattcctgctactgcagacaggcccctcttcattcttgcgccttttcttatctttataggtgctttaacagggtttattgcggtgccgtttggggaaacaattattatcaccgatatgaatatagggatcttttatattgttggagtaggaagtcttgcggtaattgccttaattcttgctggttggtcctctaacaataaatgggcattgtatggaggtatgagatctgcagcgcagattataagctatgagataccggcaggcatatctcttgttacggtaattatgttagctagttctttaagcatgcaggaaattatctcttaccaaagtggaggattatttaattggattatctttgacaatccatttatgcctattgtttttataatattttttataagtactttagctgaaactaatagaactccgtttgatcttccagagtcagagtctgagcttgttgccggctttgttacagaatattcaggtaccagatacgcgctctttttcttaagtgaatatgcaaatatgtttgttgtttgtgcagtaagtgcaaccgcattttttggaggatggcagagtccatttccaaactttttaaactctccagcctggagtgttttttggatgctttcgaaaactcttgcacttgtttttgtaatgatttgggtaagatggaccgtacctagattacgtgtagatcagttaatgcatatgtgctggaaggtttttatcccaatagggctttttaatgattttggagtagcaatatggacagttttaagagggtagt

SEQ ID NO: 221087 - DNA, 559 bp, Unknown
  Bacterial polypeptide expressing nucleotide sequence isolated from the Sargasso Sea
tatcctacgaagtttcataggctttgttattattactgttcttttgagtgtcggatctttgaacctcagcactgtggtagaggcacaagggaacggattttggaattggcatttttgtggtctgctatttccaatgtttattattttctttatttctgcactagcagaaacgaaccgtgcaccctttgatcttccagaggcggaagcagaactcgtatcaggctataatgttgaatattcatcaatgacctttgcattatttttcttgggtgaatatgcaaatatgatcctaatgagtgcgatgactgttattttgttcttaggcggctggatgtctccattcaatatagagccattcacatggatacctggcccaatatggtttgccgttaaaatctccctagtgttattttgttttctgtgggtaagggctacatttcctcgttaccgttatgatcagttaatgcgcctagggtggaaagtctttcttcctttttctcttttatgggtgatcatcacagctgctgtgttgatttggatggaatggttgcccaaatga

SEQ ID NO: 221088 - DNA, 673 bp, Unknown
  Bacterial polypeptide expressing nucleotide sequence isolated from the Sargasso Sea
gtacgtcctcgctctcacgtcgatgggcgtgtacggcgtggtcatcgcaggctgggcgtccaactcgaagtacgcgtttcttggagcaatgcggtctgcagcgcagatcgtagcttatgagatcgctatgggctttgccttggtcggggtcctgatggctgcgggctccctaaatctgcgggagattgtagttgcccagtcgggggggatacacgaatggttcttcctgccgctgttgccgctttttctggtttatctgatcagcggcgttgccgagaccaatcgttctccttttgacgtagctgagggtgagtcagagatcgtggcaggttttcatgtcgattattcgggaatgggcttcgcggtcttcttccttgcagagtacgcgaacatgattctgatttcggcactgaccgtcatcatgtttcttggcggttggcacgcaccgcttgagatcgcgcccttgacctggatcccggggatcttctggttttttgggaaattggcggcagtcgcgtttttgtttctttggtttcgcgcgacattcccacggtatcggtatgaccagatcatgcgtctggggtggaaagtgttcatccccgttaccctggtgtggattaccgtcatcggggtcgcgaaattttttactccgattgggcactggtttggttag

SEQ ID NO: 221089 - DNA, 574 bp, Unknown
  Bacterial polypeptide expressing nucleotide sequence isolated from the Sargasso Sea
aatggaatacgctataatttttttacctttagccggatctatacttggctttttaggtaagtctttaataaaatatttttctgaaattactacaagcttattcgtaagtatttcagctgtattttcaataattttattttggaatggaattcaaaataatacatacggaaattttaaaatttttgaatggattagttcaggaaattttactgctaattggtcaataaatattgatcctttaagctcagttatgcttgtagttgtcacttttgtttcagcattggttcatatttattccatcggctacatgagccatgatccgcacaaaccaagatttatgtcttacttatcattatttacgttttcaatgttagttcttgttgtatcagataactttctgcagttattttttggctgggaaggagtaggattatgttcttatctgttaattggtttttggtataaaaaagaaagtgcaaataatgcggcgataaaagcttttatcgttaacagagtaggtgattttggtttagcgattggaatttttctaatatttttttattttggttctata

SEQ ID NO: 221090 - DNA, 745 bp, Unknown
  Bacterial polypeptide expressing nucleotide sequence isolated from the Sargasso Sea
tttttattttttaccaaagataaagaaggaaataatttaactgctaaatatgtcgctttatttacaactgtagtaaattttttaatttcgatttatctttggatttcttttgaccaatcaacgtctagttttcaatttgtagaagatagaacatggattgaaggatttattaattataaagttggagttgatggtatttcaattttatttataatattaacaacatttataactcccctttgtataatatctgtaaataattctgttaaaaatagattaagagattttttaattgcaattctaatcatggaaagtttcatgattggtgttttctgtgcacttgatttagttgtattctatttattttttgaagctggattaataccaatgtttttaattatcggtatttggggaggtgcaagaagagtttattctgcattcaaattctttttatacacattgttaggttctgttttgatgttggttgcaataatttcaatttattggattacaggaacaactgacgtggttcaactatacgatattggaattgatgttaaatatcaaaatttattgtggttagcattttttagttcatttgctgttaaaacacctatgtggccagttcatacatggttaccagatgctcacgttgaagctcctacagcaggatctgtattactagctgcaattttgttaaagatggctggatatggttttataagattttctttaggtcttttcc

SEQ ID NO: 221091 - DNA, 346 bp, Unknown
  Bacterial polypeptide expressing nucleotide sequence isolated from the Sargasso Sea
catgacagcagtatttttaaaagattatttaccaataatattgttcctaattatagcattaggattaagttgtgctttcattgtaatcaattatattttgtctccaaaaaatccagatccagaaaagttatcagcatatgaatgtggatttgaaccatttcaagattccagaatggaatttgatgttcgtttttatttggttgcaatactttttataatttttgatcttgaaatagcatttttatttccatgggcaatctcgttaggaaatattggaattttaggttttacttcaatgatgatttttttattcatacttacgattggatttatttatgaatggaaa

SEQ ID NO: 221092 - DNA, 805 bp, Unknown
  Bacterial polypeptide expressing nucleotide sequence isolated from the Sargasso Sea
ttctccaattttatgaatactcgcccaataattttaaattttataacagttataggaatgtccactgctttgtttgcagcaactgtagctttagttcaaaatgatatcaaaaaaataattgcatattcaacatgtagtcaattgggatatatgttttttgctactggtgttggagcttataatgttgcaatgtttcacctatttacacatgcttttttcaaggcattattatttttaggagcaggttctgttatacactcatttcatgatgaacaagatattaataaaatgggaggtgtttataaacatttaccttatacatatatcttgatgattattggaactttagcattaactggatttccttttttatcaggtttttattccaaggatttaataatcgaatttgcttatctaaaagatgatactgttgggtattatgcttgcgcgataggaatatttacagcattgctgacttcaatttattcttggcgattagtatttaaaacattccatggagaatataataataaatctcaacctatatctagcatgcatgaatcgccattaattatgttggcaccattagttattttagcaattggttcaatattagcaggatttgtttttaaagatttgtttatgggttatggttctttttctaatttttgggaaggatcaattttctttttagaaccattaacaactgaacatcccccaggatatattttgtttttaactccaatactggtaactgtttctattccgtttagttattatatatttctgaaaaataaagcatttg

SEQ ID NO: 221093 - DNA, 790 bp, Unknown
  Bacterial polypeptide expressing nucleotide sequence isolated from the Sargasso Sea
agtcattttatttcttgttctttaattttagcttcttctattctttcagcatatttattttatatgacactaaacggttatcaaaccagtaatcaatttttattcgactggattaattctggggcaatagatgcatcttggtccttaaaatttgatactttaacttctgtaatgcttgttgttgttacttctgtttcagcattagtccatatttactctattggttatatgagtcatgacccttatcaatacaggtttttctcatatttatcattttttacatttgctatgcttatacttgttacatcagataacttattgcagttattttttggatgggagggtgtaggtttagcatcatatctattgattggtttttggtacgaaaaaccatctgctaatgctgctgcaatgaaggcttttgtagttaatagggttggagattttggttttcttctaggtattgcggtaatttatatcgcaacaggctcaataagttttgatgttatttttcaaaaaattaataatgttgatcaattcactttaaatatagcatgtttattactttttatgggagcaatgggaaagtctgctcaactctttttacatacatggttacccgatgcaatggagggtcctacaccagtttcagctttaattcatgcggcaactatggttacggctggaatatttcttgtagcaagatgctcaccaatttttgaaaattctaatcttgcgttatcatttataataattattggagcatctactgcgtttttgcagcaaccag

SEQ ID NO: 221094 - DNA, 655 bp, Unknown
  Bacterial polypeptide expressing nucleotide sequence isolated from the Sargasso Sea
gcgaccgacgcgatgctgttctacgtgttcttcgaagcgatgctgatcccgatgttcctgatcatcggcgtctggggcggcccgcgtcgcatctacgcggcgatgaagttcttcctgtacaccttcctcggctcggtgctgatgctggtggcgctgatctacctgtacctgaagggcggcagcttccagctggccgacctgtaccagctgcagctgtcggctgccgagcagacctggatcttcttcgccttcctgatcgccttcgcggtcaaggtgccgatgttcccggtgcacacctggctgccggatgcccacgtggaagcgccgaccgccggttcggtgatcctggccgccatcgcgctgaagatcggcgggtacggtttcctccgcttcaacctgccgatcgtcccggacgcgtcgcaggaatgggcgtggctggtcatcgccctgtcgctgatcgccgtgatctacgtcggcctggtcgccctggtgcaggacgacatgaagaagctgatcgcgtattcgtcgatcgcgcacatgggctttgtcacgctgggcaccttcatcgccctgtggctggtgcgcgacgcctgcaacccggacgccgcgcgtctgggcctgcatggcgcgatggtgcagatggtctcgcacggtt

SEQ ID NO: 221095 - DNA, 553 bp, Unknown
  Bacterial polypeptide expressing nucleotide sequence isolated from the Sargasso Sea
aatggtttcatatgaagtatctataggttttgttataattacagtacttctgtgtgttggctctttgaatttatctaaaattgtagaagctcaaaaaacattatggtttgcaatacctttattaccaatgtttataattttttttatttctgctttagctgaaacaaatagattgccttttgatttacctgaagatgagtcaactttagttgctggattttttactgagtattcatcagcttctttcgtacttttttttctagcagaatatgcaagtatgattttaatgagtgcaatgacggtaattttgtttttgggtggatggctaccaccttttgatatatttccactaaatgttttgccaggagtagtttggtttacccttaaaataatttttatactttttttatttatttgggttagaggaacctttccacgatatagatatgatcaacttatgagattaggttggaaagtttttttaccattgtctctattctgggttgtagtaactgctggtttcttagtaatattcgataaggttcctagttaa

SEQ ID NO: 221096 - DNA, 961 bp, Unknown
  Bacterial polypeptide expressing nucleotide sequence isolated from the Sargasso Sea
agtaccatgaccgtttcagcactgactgcagcttgcatcctattattcggtggagcaatgggtaaatctgcacaaatgccgcttcatgtatggctgccagattcaatggaaggtccaacaccaatatcggcccttatacatgcagcaaccatggtcactgctggcgttttcttacttgcaagaatgtcaccattatttgaactttccactacagcactctcatttgttctgattattggagcaactacggcattgtttactggcatcctgggtctgattcaaaatgatattaaacgagttgtcgcatattcaacgctctcacaactggggtatatggttgctgctgctggtgtttctgcatactctgccagtttattccacttgatgactcatgctttttttaaagcgttactatttctagcagcaggatctgtcattgttgcattacatcatgagcaagacatcaggaaaatgggtggattgaaaaacaaattaccaatcacttatgtgacatctctgatcggatcattggcattaatagggttccccggattttctggctttttctcaaaagatgcattgattgaagcgattggtcatgcagacattattggctcgggttttgcatacgcatcagttttaattggggttttcattacagcactgtatacgttcagactgtttttcacagtatttcatggtgctttggatgaacatcaccatgatgtcaaagagtcaccgttatcaattacgcttcccttagtactattggcaattccatcagtactgattgcctggcctacggttggtcccatggtttttggttcatattttacaactgccatttcgcagcctgatgcataccagatattcggatatgaattcacgtctgcttacggtttcttgatccatgcattttcaagcccagtgaatatacattgcattatttggagtcgctaca

SEQ ID NO: 221097 - DNA, 370 bp, Unknown
  Bacterial polypeptide expressing nucleotide sequence isolated from the Sargasso Sea
aatggctatagattttttaaaagattatctgccaattataatatttttaatcatcgcattagggttaagtgtagcttttgtatttttaaattttattttttcacctaaaaaaccagatccagaaaaactttcagcttatgaatgtggctttgagccttttaatgactcaagaatggagtttgatgtaaggttttatctggtagctatattatttattatctttgatttagagatagcttttttatttccttgggcaatttcattaggaaaaattggtttttttggatttgtttcaatgatgatatttctatttattttaactataggttttatttatgaatggaaaaaaggtgctttagattgggaataa

SEQ ID NO: 221098 - DNA, 704 bp, Unknown
  Bacterial polypeptide expressing nucleotide sequence isolated from the Sargasso Sea
aatggaaatatcaattatagcgttaccattgatcgcttctatcatatctggtttttttggcaaatatattggtgatagaaactcagaaatcctaaccagcttattagtatcaatatcagcaatcctttcaggaatagtattttatgaagtaatcgtaaatcagtatgaggaaaatattgtaattgcctcatggataaattctggatcattggaggttaattggtctatgaagatagattcattatcagcagttatgctggttgttgtgacacttgtttctgctttggttcatatttattctgttggatacatgtcacatgatccacacaaaccaaggtttatggcttttttatctctgtttactttcgcaatgctaatgttggtaacagctgataattttatccaattattttttgggtgggaaggtgtaggtttgtgctcttattttttaattggcttttggttcaagaaagaaagtgcaaatgcagctgccataaaagcttttgttgtaaacagagtaggagattttggttttgctcttggaatattcttaatcttttatttgtttggaacagtaaattattcagaagtttttgaacaaataccatcaattgtagatcaaagattaattttccttgggattggagttaatgcgatagatttaatttctttgctattgtttattggcgcaatgggtaaatcag

SEQ ID NO: 221099 - DNA, 850 bp, Unknown
  Bacterial polypeptide expressing nucleotide sequence isolated from the Sargasso Sea
ggtgttgatggcatctcgattctttttatagttctcacaacatttataaccccaatttgcataatatcttgtgtaaacagtgttaaaacaagagttaaagagtttctgattgcaattttaatactcgaaacatttatgttgggggttttctgctctttagatttagtagtattctatctattttttgaagcaggattaattccaatgtttttaatcataggagtttggggtggacctaaaagagtttattcagcatttaaattcttcctttttacccttttaggttcagttttaatgttagcggctatcatatttatttattggttaacgggcacaacagacatcacccaaatatacgaaataaaaatacctaaagaatatcaaaatatattatggctggccttttttagttctttcgcagttaagatgccaatgtggcctgtccatacttggttaccagatgcccatgttgaagcaccgactgcaggttcagtgatattagccgccatacttcttaaaatggcgggttatggttttttaagattttcgttacctatgtttcctttggcatctgaatactttacaccattaatttttaccttaagtataattgcaattatttatacatcattagtagctttaatgcaggaggacatgaaaaaactaatcgcttactcgtctgttgctcacatgggatacgttactttaggtatttttacttttacaaaacaaggtatagagggaagtatttttcagatgataagtcacggattaatttccgcagcgctttttttatgtgtaggggttgtatatgacagactaaactctagaatgataagtacatacggag

SEQ ID NO: 221100 - DNA, 681 bp, Unknown
  Bacterial polypeptide expressing nucleotide sequence isolated from the Sargasso Sea
ccaatttgtattatttcagttaacgctacaattacaaatagacttaaagatttcttaatcgcgatattaattatggaaacatttatgattggtgttttctgttcacttgatctagtagtattttatttgttttttgaggcaggtcttataccaatgtttttaataattggtatttggggtggagaaagaagagtctactcggcttttaaattttttctgtacactttatcaggatcagttcttatgttggttgctattatctcaatttattggataacaggaaccactgatgttgaaaaactttatgaacttggcattaaggcagaatatcaaaatttattatggttagctttttttagttcttttgcagttaaaactcctatgtggccagtacatacgtggcttccagatgctcatgtagaagctccaactgctggatctgtattactagcagcaatattgcttaaaatggccggatatggatttattagattttcgataggattatttcctatagcatctgaaaattttacaatgttagtttatatcttaagtttgattgcaattatttacacatctctggttgctttaattcaggaagatatgaaaaaactcatagcatactcttcagttgctcatatgggatttgtaacactaggcatattcacaatgacccaacaa

SEQ ID NO: 221101 - DNA, 946 bp, Unknown
  Bacterial polypeptide expressing nucleotide sequence isolated from the Sargasso Sea
cttgttcttactgtatctgctttagtccatatatattcaatgaaatacatggcacatgacaattcaaaagtaagatttatgacttacttaagtttatttacattttgtatggtagctttagttgtaagtgataatttaattcaattattttttggatgggagggtgttggattagcctcttatttacttataggtttctggcaccataagaaatctgcaaatttagcagccatgaaagcttttttagttaatagggttgcagattttggctttcttattggtatcgctactctttacatatttttagatacactatccattaacgaaataattgcaggtaaagaagaattattaaattatgatattaatttcttaggctttaatattaacgcgctagttttttcatgtttttttctctttataggtgctatgggaaaatctgctcaatttggttttcatacttggttgcccgatgctatggaaggaccaactcctgtttcggcattaattcatgcagctacaatggtaacagctggtgtttttttgactgtaagattttcagaattaatggtcatgtcaaattttattatgacctttgttcttattataggactacttacagcattctttgcagcatcagttggattttttcaaaaagatataaaaaaggtaattgcatactctacttgtagtcaattaggtttcatgtttgtagcttgtggattaggtgcattcaacattgccatatttcatttaataacacatggttattttaaggccttactctttttatcatcgggttcagttattcacggtgttcatgatgagcaagatatggataagatgggtaatctttttccaaagatgaaaattacagcagtgatgatgtggataggcactcttgctataattggttttccaatattcattctggttatttttcaaa

SEQ ID NO: 221102 - DNA, 370 bp, Unknown
  Bacterial polypeptide expressing nucleotide sequence isolated from the Sargasso Sea
atgtctacagattttttaaataattatttaactataataatttttttggctatcgcattaatattgagtttaggttttcttatattaaattttgctttttcaccaaaaaaccctgatccagaaaaattatctgcttatgagtgtggttttgaaccatttaatgactctagaatggaatttgatataaggttttatttagtagcgatattatttattatttttgatttagagatagcatttttatttccatgggcgataactttaggtaacttaggtttatttggtttcttttctatgatgttgtttttatttattttaaccattggttttatttatgaatggaaaaaaggtgcattagattgggaataat

SEQ ID NO: 221103 - DNA, 716 bp, Unknown
  Bacterial polypeptide expressing nucleotide sequence isolated from the Sargasso Sea
agagtactttattatttctaatattaatgcagggctattatttattttagcgctgacatcattaagtgtttatggtgtgatattagctggatgggcttcaaactccaaatatgcgttcctgggttctatgagatcggccgcacaaataatcgcatatgagattgcaatgggttttgccttggttggagtgttgatgctttcgggaagtcttaacttgcaaaatattatttatgcccaatctggaggcctgtttaattggtactggctgccgttattcccattatttttaatatacttcattgctggtgttgcagaaactaatagagcaccatttgatgtatctgagggtgagtctgagattgttgctggttttcatgtggaatattctggtatggcgtttgccatgttttttctagccgagtacatgaacttaatattaataagcatcttatgcagtattatgttttttggaggctggttatcgccatttcaagggactttaatagattcatatttgtcttttattcctggatttatttggctttctctcaaaacacttatatttatttttatatttctctggctcagagctactctcccacgatacagatatgatcaaatcatgagattgggatggaaagtatttctcccaattacttttttttggcttaccattatcggaattttaatatatcttgagtatttacccctataat

SEQ ID NO: 221104 - DNA, 826 bp, Unknown
  Bacterial polypeptide expressing nucleotide sequence isolated from the Sargasso Sea
cctattttatctactcttatatttttaccattaataagttctctatttattttcttatccagagggcaaaataacaatagcgcaatttacatttctttatttagtagtttagcaacatttatattatctttatttatttggtattcattggactatgcatcagcagattttcaattcgtagaggaacaatcttggattaatgattttattaaatttaaacttggcatagatggaatttcaattctctttatagttctcacaacattaataactcctatttgtataatttcatgcattaatagcgttaaaaatagagtaaaagaatttctaatagcgattatgatattagaaactttcatgatcggagttttttgctcattagatttagttgtattctatttattctttgaggctggattaattccaatgtttttaatcataggagtttggggcggaccaaaaagagtatactcagcttttaaattttttctattcactctactgggatcagttttgatgcttgttgctattattgcgatctactggataacagggacaactgatgtcactcaaatttatgaaataaaaatacctaaagagtatcaaaatttattatggttagcttttttcagttcttttgcagtgaaaacgccaatgtggccagttcacacctggttgcctgatgcgcatgttgaagcgcctacagctggatcagtaatactagctgcaatacttttaaaaatggctgggtatggttttttgagattttctcttcccatgtttccactagcttcagaattttttacaccattaatttttacactaa

SEQ ID NO: 221105 - DNA, 913 bp, Unknown
  Bacterial polypeptide expressing nucleotide sequence isolated from the Sargasso Sea
tatgcaatcaagattggggacctaccagagttggcccaagcggtatttttttcccattgcagatgttattaaattagcaacaaaagaaattattattccctcaaattctaataaaggactatttctaactgcgccaataataatgctagtaccatctctgatggtatggtcagtaattcctctttctgagtattttgttattgcaaatattaatgctggattacttttcgtattggctttgacttctctgagtgtctatggagtaattatagcgggctgggcctctaattctaaatatgcttttctagggtcaatgaggtcagctgcacaaattattgcctatgaaattgcaatgggatttgcattagtgggagtattgatggtggcaggaagtttaaatttacaagaaatagtcttatctcagaaaggcggcatattacattggtattggcttcccttgtttcctctatttttaatttattttatatcaggagttgcagagacaaatagagctcctttcgatgtttctgaaggagagtcagaaattgtagctggtttccatgtagaatattctggaatggcattcgcaatgttttttttagctgagtacatgaatcttattttaataagtattctggcaagtatcatgttctttggaggttggttgtctcccttagagggaacttttttagattcttattttgactggattccgggttttatctggctatcaattaaaacaatattttttatttttgtttttttatggcttagagctactttgccacggtacagatatgatcaaataatgagattgggttggaaggtatttttaccaataactcttatttggattttctttgagggtattatgatatattacagtgttgaaccttggtttgttaaatcatga

SEQ ID NO: 221106 - DNA, 918 bp, Unknown
  Bacterial polypeptide expressing nucleotide sequence isolated from the Sargasso Sea
tcagtaataacattaccattaattgcatcaatcatatcaggtttttttggaaaatatgttggagatagaaattcagagttagttactagtgctttagtttcagtgtcggcaattatatctttcattattttttataatgttattgcacataattatgaagaaaatattataatagcaacttggatcaattctggaaatttaaatgtaaattggtcaatgaatattgatcctttatctgcagttatgcttgtagtagtaacttcagtatcttcattagttcatatttattcaataggttacatgtcaaatgatccacataaaccaagatttatggcttatttatctttgttcacatttgcaatgttaatgttggttacttcagataatttcattcaattattttttggttgggaaggtgttggtctttgttcatattttttaattggtttttggtataaaaaggaaactgctaatgcagctgctataaaagcctttttagttaatagagtgggtgattttggattagctttaggaattttcttaattttctatttatttggaacagtaaattttgatgaagtgttcaaacaaataccttcagtgtctgcagctggtgttacaccatttcttgataaagaattaatatttttaggtttaaatttcatggctgttgatttaatttgtatacttttatttttaggtgcaatgggaaaatctgcacaaatttttttacatacttggttacctgatgctatggaaggacctacaccagtatcagccttaatccatgctgctactatggttacagcaggagtatttctagtagtaagatgttccccattatatgaatattcagaattagctttaaatataattacacttgttggtatgacaacagcaatatttgctgccacagtt

SEQ ID NO: 221107 - DNA, 367 bp, Unknown
  Bacterial polypeptide expressing nucleotide sequence isolated from the Sargasso Sea
tatgacattatatttttcacagtatgcgggtttatttatttattttattatttgttgcattttagcctttattttttttggtttgtcttatgttgttgctgctcaaaatggagatactgaaaaattatcagcatatgaatgtgggtttgatccgtttgatgatgctcgaagtacatttgatgttcgattttatttagttgcgatattgtttattatttttgatctagaagtaagttttctttttccatggtgtgttgtgattagtaatttacctttatttgcattttggtctatgtttgtgtttttatttatattaactattggatttgtatatgagtggaaaaagggtgcattagaatgggagtaa

SEQ ID NO: 221108 - DNA, 884 bp, Unknown
  Bacterial polypeptide expressing nucleotide sequence isolated from the Sargasso Sea
cttgttcaaaatgatattaaaaaaattattgcttattctacttgtagtcaattaggttatatgttttttgctgccggggtaggtgcttataatgttgcaatgtttcatctatttacacatgctttttttaaagctttactatttttgggagctggtgctgtaattcattcatttcatgacgagcaagatataaataaaatgggtggagttatcaagaaacttccatacacatatgtattaatgctcataggtactcttgctttaacaggttttccttttttatcaggtttctattctaaagatgcaataatagaatttgcgtacttaagagggaatggagttggaatgcttgcagcttttgtaggtattgttacagctttactaacatcaatttattcctggagacttatatttaaaacattccatggtaattttaataataaagaacttagtattgataaagtacacgagtccccttttgttatgattgctcctttaattatcttagcaataggagctatttttgcaggtatggcctttaaaggtttgtttataggtcatgagatagcatatgaattttgggctcaatctataaaatttttagaaccactaagcacagatcatccaccaacgtggtttttgtttttaacgcctatacttgttacctctgcaattccattttcttattatttatatctaaaaaacacaaacatagtaaatggactgaaagaaatgaacgaaccattttatcaatttttagttaagaaatggtacttcgatgaaatttatgattatttattcgtcaatccttcaaaaaaaattggaaagtttttatggaaaaaagttgatggatcaataatagataaatttggtcctgatgggat

SEQ ID NO: 221109 - DNA, 808 bp, Unknown
  Bacterial polypeptide expressing nucleotide sequence isolated from the Sargasso Sea
tatttaatttcatttttagctttagaaacttttatgattggcgttttctgctctcttgatcttgtcttattttatttattttttgaaggaggtttaattccaatgttcttaatcattgggatatggggtggagaaagaagggtttattcaacttttaaattttttctttatacacttgctggctcagtatttatgctacttgcaataatttatattttcatttctacaggcacaactgatgttgaaacactcttgatgtataattttactacaaacgaacaattaatattgtggatcgcattttttacttcattcatggtcaagatacctatgtggccttttcacacttggctaccagatgcccacgtagaagcaccaacagctggatcagttatacttgcgggcgttctattaaaaatggctgggtatggctttataagattttctattggtttttttccggatgcatcagaattttttgcgccatttatattttctcttagtgtcatagcaataatagttacttctctaattgcattagtgcaagaagatatgaagaaactaattgcttattcatcagttgctcatatgggatttgtaacattaggaatatttacatttaccgtacaaggaatagaaggtggcataattcaaatgataagtcatggcattgtttctgctgcattatttttatgtgttggcgtggtatatgatcgtcttcatacaagagaaatcgcaagatatggaggcttagttagtaaaatgcctttttattcattttcatttatgatttttgtattagccagtc

SEQ ID NO: 221110 - DNA, 916 bp, Unknown
  Bacterial polypeptide expressing nucleotide sequence isolated from the Sargasso Sea
gatgctatgggaaggcccaacgccagtatcagcattaattcatgcagcaacaatggtaacagctggagtatttctgattgttagatgctcgcctatatatgaatactctccattagctctcacagctataaccatagttggaatgactactgctttctttgcagcaacagtcgcacttgttcaaaacgatataaaaaaaattatagcttattctacttgtagtcagttgggctatatgttttttgctgctggagtaggtgcttacaatgttgctatgtttcatctatttacacatgccttctttaaagctttgctatttttaggagctggtgctgtaattcattcatttcatgaggaacaagatataaataaaatgggtggagttataaagaaactcccatacacatatgtattaatgctcataggaactcttgctttaacaggttttccttttttatcaggtttttattctaaagatgcaattatagaatttgcgtacctaagaggaaatggagttggaatacttgcagcttttgtaggtattgttacagctttattaacatcaatttactcatggagacttatttttaaaacgttccatggtaattttaataataaagaatttagtgttgataaaatacacgagtctccattggttatgattgccccattagtaatcttggcaataggagctatttttgcaggtatggcctttaacggtttgtttataggtcatgagatagcatatgaattttggggtaaatctataaaatttttagaacctctcagtacaaatcatccaccaacatggtttttgtttttaacacctatacttgttacctctgcaattccattttcttattatttatatctaaaaaacacaaacatagttaatgggattgaaagaaatgaataa

SEQ ID NO: 221111 - DNA, 847 bp, Unknown
  Bacterial polypeptide expressing nucleotide sequence isolated from the Sargasso Sea
ttttcagtgaattggtcaataaacattgatccgctaacatcagttatgctggtagtagtaactttaatatcatcaattatccatttttactcaattgggtatatgagccacgatccgcacaaacctcgcttcatgtcatacttatcactttttacttttgccatgctagttttggttacatctgacaactttttacaattattttttggatgggagggagttggattatgttcatatttgctaataggtttttggtataaaaaaccaacagccaatgcagctgcgataaaagcctttattgttaatagagttggtgattttggatttatgattggtatatttttaattttcttattttatggaaccgtaaattacaatgaagtttttcaactaactcctttattaatagaaaaaaaagttattttttttgggtttgaatttaatttgattactttaatttgcgttctcctttttgttggagctatgggaaagtcagctcaaatattacttcacacctggttacccgatgctatggagggcccgacaccagtttctgcactaattcacgcggccacaatggtaacagctggggttttcttggtagttagatgttcaccgatatttgaatattctcaaatagcattaaacatagtggcctctgtaggaatgataactgctttttttgcagctacagtagctcttgtacaaaatgatataaaaaaaattatcgcttattcaacatgtagtcagctaggttatatgttttttgctgctggcgttggagcttaccatgttgctatttttcatttgtttactcatgctttttttaaagcacttttatttcttg

SEQ ID NO: 221112 - DNA, 928 bp, Unknown
  Bacterial polypeptide expressing nucleotide sequence isolated from the Sargasso Sea
ttttaactacaaagatccaaactttcaatttatagaacaacacgagtggataattaattttgttaattataaagttgggatagatggtatttcgctatcatttatattattaacaacattcatcacaccaatatgcattcttgcaacaataaatagtattaaagatagattaagagaatttctaattgcattacttttaatggaaacaatgatgataggagtattttgctctttagatttatttatattttatctattttttgaagcaggattaatcccaatgtttttaattattggtatttggggcggtgaaagaagagtttactctgcctttaagttctttctgtataccctattcggatcaatatttatgttgatatcaataatatatatatattttgatacaggaacattagatgttgaaaaacttttaaatattcaaatcaatagagattatcaaaaatatttgtggctaggatttttcgcgtcttttgcagtaaaaactccaatgtggcctttacatacatggttaccagacgcacacgttgaagctcctacatctggttcagttattttagctgcaattttgttaaaaatggcaggatatggttttattagattttctttaggtttatttccagaagcttcaatttactttgcaccttttgtttttgtactaagtattattgcaataatttatacctccttggtagcactcgtacaaaatgatatgaaaaagttgattgcatactcatcagttgctcatatgggattcgtaacaattggtatatttgtatttaataaacaaggcatagaaggcagtatattccaaatgatcagtcatggaataatttcatccgcattatttttgtgtgttggtgtaatatatgatcgaatgcatacaagacaaatttcccagtatggtgga

SEQ ID NO: 221113 - DNA, 914 bp, Unknown
  Bacterial polypeptide expressing nucleotide sequence isolated from the Sargasso Sea
gtttattctataggatatatggctaaagatcctcatagaccgagatttatgtcttatctttcattgtttacctttgcaatgttaacattagtaacgtcagataattttttacaattattttttggatgggaaggcgttggtctttgttcttattttttaattggtttttggtataaaaaaaatacagcaaatagtgctgcaattaaagcatttatagtaaatagaattggcgattttggatttgcgcttggaatttttttaattttttatttatgtggtacagtaaactattctgaagtattcgatttaatacctaaaattgataataaaaatttgataattttaggaatcaattttaatgcagtagatttaatttgtattttactatttattggagcaatgggaaagtctgctcaattctttcttcatacttggctgcctgatgcaatggaaggcccaactccagtttcagctttaatccatgcagcaacaatggtaacagctggagtatttttaatagtaagatgttcgcatatttatgaatattctgaattatctttatcaataattactattattggaatgaccacagctttatttgctgcaacagttgcacttgttcaaaatgatattaaaaaaattattgcatactcaacatgtagtcaactaggttatatgttttttgcaactggtgtaggagcttataatgtagctatgttccatttatttacacatgctttttttaaagctttgttatttttgggggctggatcagtaattcattcttttcaagatgaacagaatataaataaaatgggaggtatttcaaaaaatttaccatacacttattttttaatgttaattggaactttagctttaactggttttcctctattatcaggttattactcgaa

SEQ ID NO: 221114 - DNA, 915 bp, Unknown
  Bacterial polypeptide expressing nucleotide sequence isolated from the Sargasso Sea
ggcgtaagctttttagtacacgtatatcaaatcgcctacatggctcacgacaatgcatttgcgcggttctttgcctggctaccactgttcgtgttctcgatggtgatgctggtaatggccaataatttcctaacgctgtttgtattctgggaactcgtcggcgtctgctcatacctgttgattggattctggcatgatcgcgacagtgcaaacaatgccgccatgaaggcgtttcttgtcaaccgggttggtgacttcggatttgccattggggtttttatgatcttctggaacttccgaaccctagactatggagaagtattttcgtccttggacagcgtggagtccaccaccgtcttggccatcgcacttctgttatttgttggggcaatgggtaaatctgctcaattcccgctccacatttggcttcctgatgcgatggaaggccctaccccagtcagtgcattgattcacgcagcaacgatggtaacagcaggggtatatatggtagccagaacggtaccactatttgaggtccatgaagcagcactcatcatagtaggactggtcggaacgtttactgccctatttgctgccacgatcgcactaacccagaccgacatcaaaagagtgcttgcttattccacggtaagccaactaggccttatgtttctgggcctagcgtccggcgcatatgcagccgcaatctttcatttagcaacacacgcattctttaaagccctcttgtttcttgggtcaggcagtgtcattcatgctatgcaagacgagcaagagatgaccaagtatgggggcctacgaagcaagatgaagtggacatatataacatttatgatcggatcactagcacttgccgcaattttccctctagccggatttggagtaaggatgagattt

SEQ ID NO: 221115 - DNA, 841 bp, Unknown
  Bacterial polypeptide expressing nucleotide sequence isolated from the Sargasso Sea
aatggaatatataattttatttttgccgttacttgcctcattcgttgcaggtttttttggaaaattaattggtgaaagaaattctgaaattcttacaactttatcagtttcaattgcagcaatattatctattataattttttataatgtagttacacaagattataataacaacattgtaattgcttcatggatcaaatctggatcattagaaataaattgggcaatcaatatagatgcattgtcctctgtaatgttggtagttgtcactttaatatcctcaatagttcatatttactcaatcggttatatgtcccacgactctcataaaccacgatttatggcttacttgtcattatttactttcgcaatgttgactctggtaacatctgataattttttacaattgttttttggatgggaaggtgttggattatgttcatatcttttaattggattttggtttaaaagagaaagtgcaaatgcggcggctattaaagcatttttggttaatagagtaggtgattttggactagcattagctattttcttaattttttatatttttggaacaattaattatgatgaagtgtttaaattaataccaaccatcctagatgaaaaaataaatttcttaagttttgatttcaattcaatagatttaatatgcatacttctatttattggagcaatgggtaaatcagcacaaattatattgcatacttggttgccagatgccatggaaggaccaacacctgtttctgcactaatacatgcagcaacaatggtcacggcaggagttttcttagtagttagatgttccccaatttatgaattttct

SEQ ID NO: 221116 - DNA, 613 bp, Unknown
  Bacterial polypeptide expressing nucleotide sequence isolated from the Sargasso Sea
tgggcctcaaactcaaaatatgcatttttaggtgctcttagatccgcagcgcaaatggtttcctacgaagtttcgattggatttgttatggtatcagttttgttgtgtgttggttcattaaatcttggtgacattatcaatgcacagaaaaatttatggtttgttgttcctctctttccaatgtttgtagttttttttatttcaacgctagctgaaacaaatagggctccatttgatttgcctgaaggagaatctgaattagttgctggctacatggtagaatattcctcaatgagctttgctttattttttcttggtgaatacgcaaatatgatacttatgagtgcaatgacttcagttttatttttgggagggtggttgccattatttgatattgccccctttaattatataccaggacctatttggttaattttgaaaatttctctatgtttattcgtttttctttgggtaagagctacaacaccaagatataggtatgaccaattaatgcgtttaggttggaaggtatttttacctttttctttattatggctagttttaactgcaggcttcttagtttatacaggtagtgcacctgttttatattagg

SEQ ID NO: 221117 - DNA, 754 bp, Unknown
  Bacterial polypeptide expressing nucleotide sequence isolated from the Sargasso Sea
gccgcttctgaccattgccaccttccttccaatccttgccggtctcgcgctcatggcgctgccggaccggtccacgaaaacggcacatacggtgtctatcgcggccacgggggccgtgttcctcgtcacactggcgatctgggcacgcggcaccaccgcaggagagtttgcacaggtcgaggaaatcgcctggatcccagccataggcgcggcctaccggctgggcgtggacgggttgagcctgccgctggtgctgctgacctcgctgctcttcttcttgtcggcgatctattcggcgcggatcggtgagcgggcggcctcctacgtggtgctgatgctgatgctggaaaccgcgtcgcttggcaccttcatggcgctcgacggcttgctgttctacgtcttcttcgaggtctcgctggtgggcatgtatttcatgatcgccggctggggctatgaagagcggcagcgggccgcgctcatgttcttcctctacacgcttctgggctctctgccgctgcttttggcgatcatcgggctttatcttggttcggggaccttcgacatgcgtgtctgggtcgaaggcacgtcgctgggcgggctttccgccatgcttgcgctgatcgcgatgctcgtgaccttcgctgtcaagatcccggccttcccggtccacacatggcttccggcagcgcatgtgcaggcgcccacggcgggcagtgtgatcctggccggcgtgatgctgaaattcggcacctac

SEQ ID NO: 221118 - DNA, 841 bp, Unknown
  Bacterial polypeptide expressing nucleotide sequence isolated from the Sargasso Sea
acacctgtctcggctttaattcacgctgcaactatggttactgctggtatatttttagttgttagatgttcacctttatttgaaaattctgtaataatattaaattttattactattataggagctagtaccgcgctttatgctgccactgttgcactagtgcaaaatgatataaaacgggtgattgcatattcgacgtgtagtcaattaggttacatgtttgttgctacaggattaggagcttatcatattgctatttttcatttatttacacatgctttttttaaagctctacttttcctaggagctggctctgttattcattctttaagtgatgagcaagatatgagaaaaatgggtggattatggaaaaaaattccatttacgtatatttttatgattataggtactttagctatcacaggattcccttttttatctggttactattcaaaagatgcgattatagaggcaacatattattcacaaaacaaatacgctggatacgctgttttcacttgtgtttttacagctattctaacctcaatatattcatggcgattaattattaaaacctttcatggtaattttcaaaattcggatttaaatttcattaagataaaagactctggtttatgtatttttatacctttatttatattagctataggcgctttatttagtggaatgatgtttagagatgtattggtcggagagaattacattaattattggaaaaattcaattttttttagcaaaacatatattttagaacaacccccaatatggtttatatttttaacccctgtgcttacaattttaactatacctttgtcgattt

SEQ ID NO: 221119 - DNA, 806 bp, Unknown
  Bacterial polypeptide expressing nucleotide sequence isolated from the Sargasso Sea
ttctattttatttatagttctaacagcgttcattactccaatatgtataatttcttgtattataagcgtgaaaaaaagactcaatgagtttttaatagcaattttaattctagaaacttttatgataggtgtattttgttctctagatttaattattttttatctatttttcgaagcaggacttattcctatgtttttaataataggtatttggggaggccctaaaaagatctattcagcttataaattcttcttatttactttactaggttcagttttaatgctggctgctattatttttatttattgggccgttggaacaactgattacactgaaatatataaattaaaaatagctaaagaatatcaatacttattatggttggccttttttagttcttttgctgttaaaacccctatgtggcctgtacatacttggttaccagatgctcatgttgaggcgcccactgcaggctctgtaattctagcagctattcttttaaagatggctggatatggtttcttgaggttttctctaggaatgtttccaattgcttcagaatttttcactcccttagtttttgctctaagtattatcgctattatatatacttcattagtagctttaatgcaggatgatatgaaaaaactgatcgcttattcctcggttgcacatatgggttttgtaactctgggtatatttactttcaataaacaagggatcgagggcagcatgtttcaaatgattagtcacggaataatatctgccgctttatttttatgcgtaggtgttttatatgacagaa

SEQ ID NO: 221120 - DNA, 754 bp, Unknown
  Bacterial polypeptide expressing nucleotide sequence isolated from the Sargasso Sea
gtgtcttcggtaatgttattagtagtttgtattatttcttctttagtacatatttattccattggttacatgtcacacgatcctcataaaactcgttttatggcatacctatctttatttactttttcaatgctagtattagtaacatctgataattttctacaacttttttttggttgggaaggtgtaggcctttgttcttattttttaattggtttttggtttaaaaaagattctgcaaattcagctgcaattaaagcatttgttgttaatcgtgtaggtgattttgggtttgctattgggatctttctcattttttatttgtttggcactgttaattatgaagaagtttttaataaaatacctcagaatgtagataaagaaatttccttcattggcttaaatgtaggagcaatagacctaatttgcatacttctttttataggagcaatgggtaagtcagcacaatttttacttcatacttggcttccagatgctatggagggaccaactccagtgtcagctctgattcatgcagcaacaatggttacggcaggtgtttttctggttgtaagatgttctccaatttttgaatattcgcagttagctttaaataccatttgtactgtaggaatgactacagctttttttgcagcaactgttgccttagttcaaaaagatattaaaaaaattattgcttattcaacaggtagccagttagggtatatgttttttgctgctggtgtggagctta

SEQ ID NO: 221121 - DNA, 847 bp, Unknown
  Bacterial polypeptide expressing nucleotide sequence isolated from the Sargasso Sea
tcttgtattaatagtgtaaaaataagattaaaagaatttttgatagcaatactagttcttgaaactttcatgataggagttttttgttctttagatcttgtaattttttacctttttttcgaagctggtttaataccgatgtttttaattattggtatttggggaggaccaagaaaagtttattcagcttttaaatttttcttgttcacgctattaggatctgttttgatgttggttgccataatagctatttactggattacaggtacaaccgatgtaagtgaaatatataaaatcaaaatcccagaagattatcaatatcttctgtggttagcctttttcagttcttttgcagttaaactgcccatgtggcctgttcacacctggttaccagatgcacatgttgaagcaccaacagcaggttcggtactgcttgctgcaattttattgaaaatgggagggtatggatttttgagattttctgtcgggatgtttcctatagcatctgattattttgtgccgttaatttttactttaagtatcgtggcgataatatacacatcgttagttgctttgatgcaggatgatatgaagaagttaatagcctactcatcaatagcgcatatgggttttgtgactttagggatatttacctttaataaacaaggaatagagggaagcatgcttcaaatgataagtcatggactaatatctgctgctttatttttaagtgttggagttctttatgacagaatacattcaagactaataaaatcatacggtggtttagcaaatattatcccagaggtattcattaatatttatggtttttgttcttgcagcctta

SEQ ID NO: 221122 - DNA, 799 bp, Unknown
  Bacterial polypeptide expressing nucleotide sequence isolated from the Sargasso Sea
gatttagtcgtattttacttattttttgaagccggattaattccaatgtttctaattattggaatttggggaggtgcaagaagagtttattctgctttcaaattttttttatacacacttttaggctctgttttaatgcttgtagcaataatctcgatttattggattactggaacaactgatgtggttcaactctatgaaattggtattgatgctaaatatcaaaatcttttatggctggcattttttagttcttttgcggttaaaacacctatgtggccagttcacacatggttaccggatgctcatgttgaggctcccacagcaggatctgttttattagctgcaatattattaaaaatggctgggtatggatttataagattttcattgggtctttttccagtggcatctgaaatctttacacctttaatttatattttgagcgtgatagcaattattttcacatcacttatagctttaatgcaggaggatatgaaaaaactgattgcttactcatcagttgctcatatggggtttgtgacattaggtatttttactttacaacaacaaggtatagagggaagtataattcaaatgataagtcatggattggtctcagcagctttgtttttaactgtaggtgtagtttatgatagaatgcattctagactaataagtacctatggagggttagtttctgtaataccaaaatattctatattatttatgatatttgccttggcgtctttaggtttaccaggaacaagtggatttattggagagtttttaattttaa

SEQ ID NO: 221123 - DNA, 880 bp, Unknown
  Bacterial polypeptide expressing nucleotide sequence isolated from the Sargasso Sea
ggtgaatttttaatgcaatttcttattatggagtcattcatgataggtgttttttgttcattagatttaatagtattttatttgttttttgaagctggattaatacctatgtttctaattattggaatttggggaggtgcaagaagggtttattcagcgtttaagttttttttatttacattattaggatctgtcttaatgctagtagcaataatttctatatattggttaaccggaaccacagatgtaatagagctttatagattaggaatagacccaaaatatcaaaatctcttatggttagctttctttagttcttttgctgtcaagactcctatgtggccagttcatacatggttacccgatgcccatgttgaagctcctaccgcagggtctgtgttattagcagctattttactcaaaatggcaggctatggattcatcagattttcattaggtttattccctgttgcatcagaagtttttacaccactaatttatattttaagtgtcattgctattattttcacatcattcattgcattaatgcaagaggacatgaaaaagttaattgcatattcttcagtagcccacatgggttttgttacattgggaatttttacaataaaacaacaaggaattgaggggagtatcgttcaaatgattagccatggtcttgtagctgcagcactcttcctatgcgttggggtggtttatgatcgaatgcattctagattaataaatacttacggtggtatagtgaccatagttccaaaatactcagttttatttatgctatttactttagcagcattaggcttacctggaaccagcggttttgttggtgaatttttaattttaatgggagctttcaaagata

SEQ ID NO: 221124 - DNA, 700 bp, Unknown
  Bacterial polypeptide expressing nucleotide sequence isolated from the Sargasso Sea
atggagtacgcggttatttttttaccgttattaggaacaataattggatatttatctaaatactttggtgatttagcctcacaattgctgactactcttacggtttgtattgctgcaatattatcaatagtaattttttataatggtttagttcatgacaattatggaaattatattatttttgagtggataaggtcaggcaattttcagattaattgggcaataaatattgatccactgagctcaataatgttagttgtagttacatttgtctctgcattagttcatatttattcaataggttacatgagtcatgacccgtttaaacctcgatttatgtcttatctttcattatttacatttgccatgttagttttagttgtatcagataatttcatacaactattttttggatgggaaggggttggtctgtcatcttatcttttaattggtttttggtacaaaaaagattctgctaacaaagccgcaatcaaagcatttttggtaaatagaattggcgattttggcctcgccatcggcgtatttttaatatttttgtattttggaacattaaactatgaagaagttttccaacaagtttcaaatttttctagtaaagagatcaatttcctaggtttagaggcaaatttaataactttaataagtttgtttctttttattggtgccatgggtaaatcgg

SEQ ID NO: 221125 - DNA, 835 bp, Unknown
  Bacterial polypeptide expressing nucleotide sequence isolated from the Sargasso Sea
gttcttcacctatctgaacctattcgtgttctcgatgctcgtcctgatcctcgcgaataactacctgctgatgttcgttgggtgggagggcgttggggtgtgttcgtatctgctgatcgggttctggttcgaacggaagtctgcttctgacgccggtaagaaggctttcatcgtgaaccggatcggagacttcggcttcctgatcggcatcttcacgatgttcgggtatctcggaacggttcagttcagcgaagtgtttgcggcagctccgggcgcgctgtccggcggtgtggcgacagcgatcgcgcttctgctgttcctaggcgcttgcggcaagtccgctcagttcccgctgtatgtctggctgcccgacgctatggaaggtccgacacccgtttccgcgctgatccatgccgcgaccatggtcacggccggtgtttacgtggttgctcgctcgaacgtgctgttcacgcttgcgccgacggcaggtgcggttgtggcttgggttggtgtgtttacggctttgttcgccgcatcgatcgcgctagtcaacacggatatcaaacgtgtgctggcttactctacggtcagccagctgggatatatgttcatcggtgtaggcgttggtgcttacacggccggaattttccacctgttcacgcacgccttcttcaagggattgatgttcctagcggctggaagcgtcatgcacgcgatgcaggacgagttggatatgaggaagtatgggggtctgctcgggaagatgaaggtgacgggatatacattcatcctgcgtacgatcgcgattgccggcatccctccgctgagcggtttc

SEQ ID NO: 221126 - DNA, 370 bp, Unknown
  Bacterial polypeptide expressing nucleotide sequence isolated from the Sargasso Sea
catgttatctgattttcttaaagattatttaccaattataatttttttaatcatagctctaggtttgagttgtgcatttgtggtaattaattttattctttcgccaaaaaaacctgatccagaaaaactatctgcctacgaatgtggttttgaacctttcgaagactctagattagagtttgatgttagattttatttagttgcaatattatttattatatttgatttggaaatagcctttctatttccatgggcaatttctcttggcaacatcggattactaggtttttcatcaatgatgatatttttattcattcttacaattggttttatttatgaatggaaaaaaggcgctttagattgggaataa

SEQ ID NO: 221127 - DNA, 370 bp, Unknown
  Bacterial polypeptide expressing nucleotide sequence isolated from the Sargasso Sea
catgttatctgattttttaaaagattacttaccaataataatatttttagtattagctcttgggttaagttgtgcttttgtggttgtaaactttattctatcaccaaaaaaacctgatcctgaaaaactttcagcttatgagtgtggttttgaacctttcgaggactcaagaatggaatttgatgtgagattttatttagttgcaatcctatttattatttttgatttagagatagcatttttatttccatgggcaatatctcttggaaatattggattattaggtttttcatcaatgatgatttttttgttcatacttacaataggttttatttatgaatggaaaaaaggtgctttagactgggaataa

SEQ ID NO: 221128 - DNA, 793 bp, Unknown
  Bacterial polypeptide expressing nucleotide sequence isolated from the Sargasso Sea
tagatgttcaccaatttttgaatattcacaggtagcattaaatgttgttaccgcagtaggaatgataacagctttttttgctgctacagttgcacttgtccaaaatgatataaaaaaaattattgcttactcaacttgcagtcaattgggctatatgttttttgctgcaggtgttggagcttatcatgtagcaatatttcacttatttactcatgctttttttaaagcacttttatttcttggatctggatgtgtaattcattcatttcatgaggaacaagatattcgttcaatgggaggagtttggaaaaaaataccatacacttatgtattgatgattattggaactttagctttgacaggattcccctttttatctggctattactcaaaagatgcaattatagaatttgcgtatcttaaagggtcatcaataggttattttgctgcaacaataggtattattacagcattactaacatctatttattcatggagattaatatttaaaacatttcacggaaaatataataataaagataataactttagtgctattaaagagtcaccgctaataatgttattaccctcgctactattagctataggagcaattttttcaggaatgttatttaaagaaatttttataggaagtgatagtagtgaattttggagtagttctattttatttttacaaaatatagaacatcatcatccaccattctggttgcttatattgactccaatattagtttcaataatgattccagtttcatactatttatttataaaa

SEQ ID NO: 221129 - DNA, 613 bp, Unknown
  Bacterial polypeptide expressing nucleotide sequence isolated from the Sargasso Sea
tttacatggataaattcaggttcattaaatgttaattggtctatatatattgatagcctaacatcagtaatgttggtcgttgttactctggtttccgctttagttcatgtttattcattgggttatatgtctcacgacccagataaaccacgatttatggcttatctgtctttatttacatttgctatgttagttttagtaacctcagataattttctgcaattattttttggttgggaaggagttggtctttgttcatatttcttaattggattttggtacaaaaaagataaagcaaatttagcagcaattaaggcttttttagtaaatagagtaggtgattttgggttggcattaggaatttttttaattttttatatctttggaacaataaattttgatgaaatctttaataaattatacctctacaaggatattaaaattaattttttaaatttaaatttaaattcaatagatcttatttgttttttattatttgtgggggcaatgggaaaatctgcacaaatatttctacacacttggttacctgacgcaatggagggtccgacaccagtctcagcacttatacacgcagctactatggtaacagcag

SEQ ID NO: 221130 - DNA, 902 bp, Unknown
  Bacterial polypeptide expressing nucleotide sequence isolated from the Sargasso Sea
gcaatactctctttagtcgttttgtataaagtttttagttcggattattcaaacaatcttgtaatagctacctggattaactctggaactttaaatgttaattggtcgataaaaatcgactccttatcagcagttatgtttgttgtggtaaattttatttcagctttagttcatatttactcaattggttacatgtcacatgatcctcataaaactagattcatggcatatttatcattgtttacttttgcaatgttaactttagtaagttcagacaattttattcaactattttttgggtgggaaggcgtaggtttatgctcatattttttaatcggattttggtttaaaaaagagagtgcaaacaaagctgcaataaaagcctttgttgtaaatagagttggtgactttggtttagctcttggaatttttctgattttttatatttttggtacagtcaattatgatgaggtttttgaacaaattccaaatattttagacaacaaaataaatttcattggcattgatatagaaattattgatttgatttgtttgcttctattaattggagcaatgggtaaatcagctcaatttttattacatacatggttgcctgatgctatggaaggcccaacaccagtatctgcattaattcatgcagcaacaatggtaacagcaggggtattcctgattgttagatgctcacctatatatgaatactctccattagctctcacagttataaccataattggaatgaccactgctttctttgcagcaacagtcgcacttgttcaaaatgatataaaaaaaattattgcttattctacttgtagtcaattgggctatatgttttttgctgctggagtaggtgcttacaatgtagcgatgtttcatctttt

SEQ ID NO: 221131 - DNA, 672 bp, Unknown
  Bacterial polypeptide expressing nucleotide sequence isolated from the Sargasso Sea
aatggaatatacattagttttttcgccattgttaggagcaataatgtcaggtttttttggacgttatattggtgatagaaattctgaaattattacatcacttttagtttcaatttctgcattgttatctttaataattttcaaagaagttgtgctttataattatgagaataatcttgttatttttaactggattagttcaggaacattaaacgtaaactggtcaattaaagtagatgctgtatcttcagttatgttagttgttgtttgtttaatttcttcattagtacacatttattcaattggttatatgtcacacgatcctcataaaaccagatttatggcttttctatctttatttacttttgcaatgcttattttggttacttctgataatttcttacaacttttttttggttgggaaggtgtcggtttatgctcttattttttgattggtttttggtttaaaaaagaaagtgcaaatgccgcagcaataaaagcatttctagttaacagagttggtgatttagcatttgccttaggaatttttttaatattttatttatttggaactgtaaattatgacgaagttttcaaacaaattccttcggtggctaatgctgacgttacgcccttccttaacagaaaattagtatatttaggagtaaattt

SEQ ID NO: 221132 - DNA, 719 bp, Unknown
  Bacterial polypeptide expressing nucleotide sequence isolated from the Sargasso Sea
aatgataggtgttttttgctcgttagacttatttgtattttatcttttttttgaaggtggtttaattccaatgtttttaataattggcatttggggtggtgaaagaagagtttattccgcctttaaattttttctttatacacttcttggatctgtactcatgcttgttgcaatcatttcgatatattggtttacaggaagtacagatataacatatttatataacctcggaatagatgagaagtatcaatatttattatggttagcttttttcagttcatttgccgttaaaactccaatgtggcccgttcatacttggctaccagatgctcacgtagaggccccaacagccggctcagtcttattagctgcaattttgttaaaaatggctggatatggttttattagattctcagttggtctttttcccctagcttcagaatattttattccattgatctatattttaagtttaatcgcaattatttacacttcgctagttgcattaatgcaagaagatatgaaaaaattgattgcctattcttctgtagcgcatatgggatttgtaactttaggaatatttacatttacacaacaaggattagaagggagtatatttcaaatgattagtcatggtttagtttcggcggcacttttcttatcagttggtgtaatttatgagaggatgcacacaagactaatatcaaattatggtggat

SEQ ID NO: 221133 - DNA, 799 bp, Unknown
  Bacterial polypeptide expressing nucleotide sequence isolated from the Sargasso Sea
tatagcaacctggataagctctgggtcacttgatgttaattggtcaatgttaattgatccattgtcagctgtaatgttagtagtagtaacttctgtatctgctttagtacatatctattcaattggttatatgtctcatgaccctcataagccaaggtttatggcttatttatcattgttcacatttgcgatgttgatgcttgtaacttcagataattttattcaattattttttggttgggaaggtgttggattatgttcttacttcctaattggtttctggtttaaaaaagaaagtgcaaatgctgctgccataaaagcatttgttgtaaacagagtgggcgactttggttttgctttaggaattttcttaatattttatttattcggaactgttaattactcagaagtttttcaacaaataccttcagttgtagataaaaatttaccatttttaggttttgaagttaaagcaatagatttagtttgtttacttctatttattggagcaatgggtaaatctgcacagatattgctacatacttggctacctgatgccatggagggtccaactccagtttctgcattaattcatgcagcaactatggtaactgctggtgttttcttagtagtaagatgttctccaatttatgaatattcaccattaatactaaatattataactatcgttggaatgaccactgcgttctttgcagcaactgtcgctttagttcaaacagatataaaaaaagttattgcttattctacatgcagccaacttggttatatgttttttgca

SEQ ID NO: 221134 - DNA, 787 bp, Unknown
  Bacterial polypeptide expressing nucleotide sequence isolated from the Sargasso Sea
tggttcaagaaaccaactgcaaacgcagcagctattaaagcatttatagtcaatagagtgggagattttgggtttgcgctaggaatttttttggttttttacgtctttggaacagttaattatgaagaagtattcagacaagtatccatatatacagatattaagttaaattttttaggtattgaacttcatgcaataaatttaatttgttttttattgtttattggtgcgatgggcaaatctgctcaaatttttttacatacctggttgccagacgctatggagggacccactccagtttctgcattaatacatgcggcaacaatggttaccgctggagtatttctagttgtaagatgctcacctatttatgaatattctcctattatattaaattttataacaattataggaatgacaaccgccctatttgctgcaagcattgcattagtacaaaatgacattaagaaaataattgcctattcaacttgtagtcaattaggctatatgttttttgcaacaggtgttggagcttataatgttgcaatgtttcatttgtttactcacgcattttttaaggctcttttgtttttaggttctggttctgtaattcactcgtttcagaatgagcaagacataaatagaatgggaggtgtttacaaacatcttccctacacgtatgctttaatgattataggaacattggctttaactggctttccatttttatctggattttattcaaaagatttaattatagaatttgcttatttaaaaggaaatacgg

SEQ ID NO: 221135 - DNA, 817 bp, Unknown
  Bacterial polypeptide expressing nucleotide sequence isolated from the Sargasso Sea
acgtaagtggattttaggattttttaattacaaagttggagttgatggtatttcaattttgtttataattttaactacttttattacacctatttgtataatttctgttaactcaactattaataatcgtcttaaagatttccttatcgcaatattaattatggaagcattaatgattggtgttttttgttctttagatttgataattttttatcttttttttgagggaggattaattcccatgtttcttataatcggaatatggggtggtgaaagaagagtttattcagcttttaaatttttcctttatacgttacttggttcagttttgatgttaatagcgataattactatttattggaccacaggaacaaccgacgtagaaaaattgtatgaaataggaatagagcttaattatcaaaaattattatggcttgctttttttagttcttttgctgtcaaaactccaatgtggccttttcatacatggcttccagacgcccatgtagaagcaccaacagctggttctgtattactagctgcgattcttttaaaaatggctggttatgggtttataagattctccctaggtttgtttccacttgcttctgaatattttataccattgatatttattttaagtttaatagcaattatttacacttctttagtggcattgatgcaagaagatatgaaaaaattgattgcatactcatcagttgcacatatgggatttgtaactttgggaatatttactatttcacaacaaggtattgaaggaagcatttttcaaatgataagtcatggtctagtttca

SEQ ID NO: 221136 - DNA, 810 bp, Unknown
  Bacterial polypeptide expressing nucleotide sequence isolated from the Sargasso Sea
ttacatacttggttgcctgatgctatggagggcccaacaccagtatcagcattaattcatgcggcaacaatggtaacagcaggggtattcttgattgttagatgctcacctatatacgaatactctccattagttctcacagttataaccataattggaatgactactgctttctttgcagcaacagttgcacttgttcaaaatgatataaaaaaaattattgcctattctacttgtagtcaattgggctatatgttttttgctgctggagtaggtgcttacaatgttgcgatgtttcatctatttacacacgccttttttaaagctttgctatttttaggagctggtgctgtaattcattcatttcatgaggaacaagatataaataaaatgggtggagttataaagaaactcccttacacatatgtattaatgcttattgggacacttgctctaacaggttttccttttttatcaggtttttattctaaggatgcaataattgaatttgcttacctaagaggaaatggagttggaatgcttgcagcttttgtgggtattgttacagctttattaacatcaatttactcttggagacttatttttaaaacattccatggtaattttaataataaagaacttagtgttgataaaatacacgagtctccttttgttatgattgccccgttaataatcttggcaataggagctatttttgcaggtatggcatttaaaagtttatttatagggcatgaaatagcatatgagttttggggtaaatctataaaatttttagaacctctcagcaca

SEQ ID NO: 221137 - DNA, 925 bp, Unknown
  Bacterial polypeptide expressing nucleotide sequence isolated from the Sargasso Sea
ctccaattttcaattcttagaagagagggcttggatcccaagtttagggatatcgtatttcttaggaattgacggcatctctattatttttattgttcttacatcttttttgagcttcatctgcatcttggccagctgggaagcggtaaccgaccgtgtccgggagtatatggttggatttcttgtgctggagaccatgattctaggtgccttttgtgcactagatacagttttgttttatatgttttttgaaggtcttcttatcccaatgttcattataattgggatttggggagggcctggtaggattcgggccaccttaaagttctttttgtatacactggctggatcggtcttatttctagttgccattcttttactctatttaggagcaggatctagcagcattccgatgctaatgagaaacgaatttcctttcaatttccaaatttggctatggctgcttgtttttgcttcatttgcagtaaagataccgatgtggccattccatacttggctacccgaggcccacgttgaggctcccaccgctggttccgtaatacttgcgggtgtgcttttaaagcttggtgcttacgggtttcttcgcttctcattgcctatgtttccggatgccacggcatatttcactccgtttgtttttattttaagtgtgatcgccataatttatacgtcattagtcgctcttgttcaggaggatatgaagaaacttatagcgtattcctcagtagctcatatggggtttgtaactatcggattgttttctctgaccattcaaggcgttgagggtgcagttgtgataatgttgagccatgggttagtctcagcctctttatttttgtcggttggggccttgtatgacagaactcattctcgactgatcaaagattatggcgggtttggttga

SEQ ID NO: 221138 - DNA, 841 bp, Unknown
  Bacterial polypeptide expressing nucleotide sequence isolated from the Sargasso Sea
tttttacaattattttttggctgggagggtgtaggtttatgctcctatttacttataggtttttggtataaaagagagacagctaacaatgcagctattaaggcgtttatagttaacagagttggtgattttggtttagcaattggaatatttttaatttttttaagctttggaacagttgaatttcaagcggtttttgagaaagttccggaatttacagagtcaaagattaatatttttggcggagagtttaatctagtaactctaatatgtgtatttttatttattggtgcaatgggaaagtctgcacaatttctattacacacttggttaccagatgcaatggaaggcccaacaccagtatcagctttaatacatgcagcgacgatggtaacagctggtgtatttttagttgtgaaatgttctcctatatttgaatactcagcttttgcacttaatttaatagctatagttggaatgattactgcgttatttgctgcttcagttgcattggtacaaaacgatataaaaaaaataattgcatattcgacttgtagtcagttgggctatatgttttttgctgcaggagttggagcttatcatttagcaatgtttcatttatttactcacgctttctttaaagctttattatttttgggagctggttccgtaattcatgcatttaaagatgaacaggacataacaaaaatgggtggagtttggaaaaaacttccttatacaatggtgctaatgctgatcggaacattggctttaactggctttccttttttatccggtttctactcaaaagatgcgataatagaatttgcttatttaaaaa

SEQ ID NO: 221139 - DNA, 370 bp, Unknown
  Bacterial polypeptide expressing nucleotide sequence isolated from the Sargasso Sea
atgacagcagtatttttaaaagattatttaccaataatattgttcctaattatagcattaggattaagttgtgctttcattgtaatcaattatattttgtctccaaaaaatccagatccagaaaagttatcagcatatgaatgtggatttgaaccatttcaagattccagaatggaatttgatgttcgtttttatttggttgcaatactttttataatttttgatcttgaaatagcatttttatttccatgggcaatctcgttaggaaatattggaattttaggttttacttcaatgatgatttttttattcatacttacgattggatttatttatgaatggaaaaaaggtgctttagactgggaataaa

SEQ ID NO: 221140 - DNA, 899 bp, Unknown
  Bacterial polypeptide expressing nucleotide sequence isolated from the Sargasso Sea
agatggtatttccattttgtttattcttttaaccacttttattaccccaatctgtattatctcttgtattaacagcgtaaaaactagactaaaagaatttcttattgcgcttctagttttagaaacttttatgataggagttttttgctctctagatctggtagttttttaccttttctttgaagccggtttaatacctatgtttctaattattggtatctggggaggccctagaaaagtttattcagcttttaaatttttcttatttactcttttaggatctgttttgatgcttgttgcaatcattgcaatttattggattactggaacaacagatgtaactcagatttatgaaattaaaattccacaagagtttcaatatttattgtggttggcttttttcagttcttttgctgttaagttgccaatgtggcctgtacacacttggttgccagatgctcacgttgaagctcctacaccaggttcggttatactggcagcaattttattaaaaatgggcggatatggctttctaagattttcgattgggatgtttccatttgcttcggagtactttactccattaatttttgctttaagtgttatagcagtgatttacacttcgttagtggcgctaatgcaagatgatatgaaaaaattaattgcatattcctcagtcgctcatatgggttttgttacgatgggaatttttacctttaataagcaaggtattgaaggaagtataatccaaatgtttagccatggattaatttctgcagcactttttttatgtgtaggagttctttatgacagaacacattctaggttaattaaatcatatggaggggttgttcacatattgccaaaatactcttttctttttatggtttttgcttttg

SEQ ID NO: 221141 - DNA, 890 bp, Unknown
  Bacterial polypeptide expressing nucleotide sequence isolated from the Sargasso Sea
tatgaccgtagctctaggggcatctgcttacgctgctgctattttccacttgtttactcatgccttttttaaggcactactatttttgggtgcagggtcagtaataataggtatgcaccacgtacaagatatgagacagatgggagggctcaagaagtttatgcctttaacctactggacctgttttgtaggtaccttagcgttgattggttttcctggtctttctggtttttattccaaagacatgattattgaggtagtccatgcgattggaacgcccttttcaggagtcgtatattgggctttattagcaggagtgttcgttacctccctttattcctttagactgttgttcctggtgtttcatggtgaaacgcgattgagtgagaaagcgcagtcccacatatcagaatcaccctacgtggtaacgattcccttattggcattggctattccctctgtacttataggtggaatttttattgaatcggctttattcggagatttttttgatgggagtatctatgtaaggcctgacagggattctttgggcttactaagagagaacttccaaggtccgctagcaatgatgactcatggtttcgtaacactgcccttctgggcagcaatcagcggaattatcgtggcttggtatttatatttaaaagcgccgaatttaccgccgaagattgcctctaattgctctattattcataagttgtttatcgagaaatacggctttgaccgattcaatagttggtttttttctggaggaggtcgagggcttggaggcttgctttggaaaaggtttgacgttttcctgatagacgggattttggtgaacggttctgccaaaataacagaggctgcggcttttatggttcgaaagg

SEQ ID NO: 221142 - DNA, 686 bp, Unknown
  Bacterial polypeptide expressing nucleotide sequence isolated from the Sargasso Sea
tttagtcatagtgctagtttctcatggattgacctggatgcatttaaaattgatttgggaattttagtggataatctcacaattattatgctcctaattgtgacattggtttcaagttgcacacatattttttctcttgaatacatgaaaggtgacattcgttatcataggtattttgcttatctaggtctttttaccttttcaatgaatggaattgttttagccgataacctaatttcgatgtacatgagttgggaactagttggtgttagttcgtatttactaatagggcattggtttgaaaaagatagcgccgcagatgctagtaagaaagcattccttacaaacagagtaggggacataggctttttcattggtattatgctgctatattcagcaattggatcttttgcttttgggccaatttttgaatctatagccgctggaaatactatagctggaatgaccttaacgcttgctggtttggggatatttatgggtgcagtgggaaaatcatctcaatttcctcttcatatatggctacctgacgccatggaggggcctactccagtatctgcactaatgcacgctgctacaatggttgctgcaggcgtatacatgtctgtcagattgttccccatttttactccagatgcacttattgtgattgcatatattggaggtat

SEQ ID NO: 221143 - DNA, 827 bp, Unknown
  Bacterial polypeptide expressing nucleotide sequence isolated from the Sargasso Sea
tatggaatatgcaatactatttttaccgttagcaggctcactgatagggtatctcggtaaatcaattacaaaatactttgctgaaatctctacaagcttatttgttagtatctcagcagtactttcaattattgtttttttaaatggaattcaaaatgataactatggaaattatataatttttgaatggataagttctggaggctttaaagccaattggtcaataaatattgatccattaagctcaattatgttagtagttgtcacttttgtatccgcacttgtacatatttattcaataggttacatgagtcatgatccgcataaaccaaggtttatgtcttatctatctctgtttactttttcaatgctggctttagttgtttcagataatttcctacaacttttttttggatgggagggagttggattatgctcatatctactgattggattttggtataaaaaagaaacagcaaataatgcagctataaaagcttttatagtaaataggataggtgattttggcctagccattgcgatatttttaatctttttattttttggtactattaattttgaggaagtttttcaagcaacaagtcagtttgctgaaaaaaaaataactttttttggtaaagagtcaaatttaataacattaatttgtgtgttcttattcattggagcaatgggaaaatctgcacaatttttacttcacacatggctaccagacgcgatggaaggtccgacaccagtgtcagctttaattcatgctgctacaatggttacagctggtgtttttcttgttgtcaaatgttcgcctattt

SEQ ID NO: 221144 - DNA, 469 bp, Unknown
  Bacterial polypeptide expressing nucleotide sequence isolated from the Sargasso Sea
tgtggaaatcttaataataatattaccattaattgcttcaattatttcaggattttttggaaaatttattggagatagaaactcagagatagttacaagttttttggtaacaatatcagcaattctatcagctttagtattatacgaagttatagttaatcaatatcaagaaaatattacaattgctacctggataaattcagggacactaaatgtaaattggtcaatgaaaattgactctttatctgctgtaatgcttgttgttgtaactttagtctcatctttggttcatatttattcaattggatatatgtcacatgatccacacaaacctagatttatggcttatttatcattgtttacttttgcaatgttaatgttggtaacttcagataattttattcaattattttttggttgggaaggtgtaggtctctgctcttattttttaataggttttttggtttaa

SEQ ID NO: 221145 - DNA, 828 bp, Unknown
  Bacterial polypeptide expressing nucleotide sequence isolated from the Sargasso Sea
tacgcatcttataagtttttcttgtatactttggcaggttcagttttgattttgttggctataatttcaatgattatacactctggcacctcagatataacaaaattacttctttatgattttcccgtttccatgcaaccatggttatggttggctttttttgcttcctttgctgtaaaagttccgatgtggccggttcatacctggttacctgatgcccatgttgaggccccgacagcaggttcggttattttagcgggtgttttattaaaatttggtggctatggatttttacgtttctctattccaatgttgccgatagctaccgcagactttgtgccttttgtttttggtttgagtgttgttgctatcatttatacttcattggttgctcttgcccaggaagatatgaaaaaattaatagcatactcctctgtggcgcatatgggttttgtaaccatgggctgcttttccttaaaccagcaagctgttgaaggtgctgtcattcagatgttgagtcatggggtggtatcagcagctttgtttttaattgttggggttgtgtatgatagaattcactctcgtttaattgatgattatggtgggttgattaagcgaatgcccctttattcgtttgtattcatgatattcatgatggcgtctataggaatgccagggactagcggttttgtcggagagtttttaattcttattggtacgtttaaggtcaatagttgggtagcacttttgggcgctacgggagtaatattgggtgctgcatacatgctatatctttatcggcgggtcatttttgggaagttaattaaa

SEQ ID NO: 221146 - DNA, 358 bp, Unknown
  Bacterial polypeptide expressing nucleotide sequence isolated from the Sargasso Sea
atttttaaaagattatttttcaattattatttttttaataattgcattagggcttagttttgtttttattatactaaactatttgttatctcctaaaaatccagatccagaaaaactttcagcatatgagtgtggttttgaaccattcaatgattccagaatggaatttgatgttaggttttacttggttgcgattttattcattatttttgatttagaaattgcattcttatttccttgggcaatttcattaggcagtattggtctattaggctttgtatcaatgatggtttttttatttattcttaccataggttttatttatgaatggaaaaaaggtgccttagactgggaataa

SEQ ID NO: 221147 - DNA, 817 bp, Unknown
  Bacterial polypeptide expressing nucleotide sequence isolated from the Sargasso Sea
atggaatatttagtaatatttttacctttaataggatccatcatcacttactttggaaaaagttttggaaacttgttttctcaaattttttcctgttcaatggtttttatatcagctgtaatttcttgtttcattttttatgacggtcttattaatgataattatggaaattatttaatttttgaatggattaattctggaaatttaaatgttaattggtcgattaaaattgatccattgagctcggtaatgataatggtagtaacatccgtatcagctttagttcatatttattcaattgggtatatgagtcatgatccacataaaccaaggtttatgtcttatttatctttatttaccttctcaatgttatgtctagttgtttctgataattttcttcagttattttttggatgggaaggagttggtttatgctcttatttgttaattggtttttggtttaaaagagagacagctaacaatgctgcaataaaagcttttattgtgaatagggtgggagattttggactagctattggaatatttattattttcttcatatttggaacattaaattttgaagaagtttttcttcttgttccagaatttacaaaaacaaatttaggtatttttggtggagaatataatgtcatcacattaatttgtgtatttttatttatcggtgcaatggggaaatctgctcaatttttattgcatacttggttaccggatgcaatggaaggacccacaccagtctcggctttaatccatgccgcaacaatggttaccgctggggtatttttagtagttagatgtt

SEQ ID NO: 221148 - DNA, 838 bp, Unknown
  Bacterial polypeptide expressing nucleotide sequence isolated from the Sargasso Sea
attttatggatctattttcatgcaggtactacagattatcaaatcttattgacaaccgaattcgatgaagatgttcaaaaattcttatggttagctttctttgcttcattcgcatcaaaagttcctatggtaccagttcatatttggttaccagaagctcacgtggaagctccaacagctggttctgttattctagcaggtattttattaaaattaggtacatatggtttcttacgcttttcaatgcctttattcccatatgctactaattattttactcctctagtttatacatttgcttgtatcgcaattgtttatacttcattaacagcgattcgccaaactgatttaaaacgtattattgcgtattcatctgttgctcatatgaatttagttatggtagggttatttactcttaatagccaaggaattgaaggtgctatccttcaacaattaagtcacggattagtttctggtgctttattcctttgtattggagtaatttatgatcgtcatcatacacgtttaattaaatattatggtgggttagctcatacaatgcctttatatattatgattttccttttctttactatggcaaatattgctttacctggaacaagtagttttgtaggtgagttcttaattttagcaggatcttttcaagctaatactacagtatgtttcttagcagccacagggatggttttaggaggatgttattcactatggttatttaatcgagtagcttatggtaatatcaaaattcaatatatcaaccaattcggggatatgaatcgacgtgaatttgctacatttttacctttagtaattttaa

SEQ ID NO: 221149 - DNA, 916 bp, Unknown
  Bacterial polypeptide expressing nucleotide sequence isolated from the Sargasso Sea
tttgtatgaagttattcaaaatcaatacgaggaaaatattattatagcaacttggatcaattcaggatctttggatgttaattggtcgatgaaaattgactctttgtctgctgtaatgttggtagttgttacatcaatatcagccttggttcatatttattctattggttatatgtctcacgatccacacaaacctagattcatggcttatttatctttattcacttttgctatgttgatgttggtgacctctgataattttattcaattattttttggttgggagggtgtaggactgtgttcctactttctaattggtttttggtttaaaaaagacactgcaaataatgcagcgattaaggcttttatcgttaatcgaattggtgattttggatttgcactaggtatatttttaatattttatttattcggaacagtaaattattctgaagtttttgaacaaattccaaatataacaagtaaaaaccttaattttttaggtgttgaaatcaatgcaatagatctaatttgtatacttttgtttgttggcgccatgggtaagtcggctcaaatttttcttcatacttggttaccagatgctatggagggaccaactcctgtttcagcacttatccatgcggcaacaatggttacagcgggagtttttttagtggttagatgttcacccatttatgaattctcagatttagctttaaacataataaccatcgttggtatgagtactgcattttttgcagccacagttgcactcgttcaaactgatattaaaaaaataattgcatattcaacttgtagtcaattaggctatatgttttttgcaactggtgtaggagcatacaatgtagcaatgtttcatttatttactcatgctttttttaagctttattatttctag

SEQ ID NO: 221150 - DNA, 894 bp, Unknown
  Bacterial polypeptide expressing nucleotide sequence isolated from the Sargasso Sea
aatggaaactttaatgttaggagttttttgttctcttgatttagtaatcttttatttattttttgaaggtggtttaattccaatgtttttaataattggtatttggggagggcctaagagggtttattctgcatttaaattttttttattcaccttattaggttctgtattaatgttgatagcaattatttcaatttattggattacagggactactgatgtaataaaattattagatataagaattaaccaagattaccaatacttactatggttagctttttttagttcatttgcagtcaaattacctatgtggccagttcatacatggttacctgatgcgcatgttgaagccccaacagccggctctgttattttagcagctatacttttaaaaatggctggttatggttttattcgtttttcattaggcttgtttcctgttgcttctgattatttttcatcacttatttttagtttaagtgttatagcaataatttacacttcattagtagctcttatgcaggaagatatgaaaaaattaatagcttattcatccgttgctcatatgggttttgttacaattggtatcttttctattacaaaacaaggtttagaaggaagtatcatacaaatgataagccatggattaatatcagctgctttatttttatgtgttggtgttgtttatgacagatatcattcacgaatgatttcttcgtatggaggtttagttaattttatgcctaaatatgcgcttgtatttatggtttttactttagcagctttgggattaccaggaaccagcggttttgtaggtgaatttttagtgctcgtaggaatttttaaaaaaaatattttagttgctgttttagcaagtttaggagttatttt

SEQ ID NO: 221151 - DNA, 812 bp, Unknown
  Bacterial polypeptide expressing nucleotide sequence isolated from the Sargasso Sea
aaacttttggattaataattatattaaatttaagcttggaattgatggaatttctattctttttattgttttaacaacttttatcactccaatatgtattatttcctgcattaacagcgttaaagaaagagtgaaagaatttttgatagcaatattaattttagaaacttttatgattggagttttttgttcattagatttagtaattttttatctattttttgaagcagggttaataccgatgtttttaataatcggagtttggggaggaccaaaacgagtttactctgcatttaaatttttcctttttacactattgggatcagttttaatgttagtagcaattatagtaatttattggttaacaggcactacagatattactcaaatatacgaaattaaaattcccgaagaataccaaaatctattatggcttgcattttttagttcttttgctgttaagactccaatgtggccagtacatacatggctgccagatgcacacgtcgaagcaccgactgcaggatcagtaatattagcggcaattcttttaaaaatggctggctatggttttttaagattttcaattccgttgtttccaattgcgactgaatttttcactcctctaatttattttttaagtataattgctatcatttacacgtctttggtagctttaatgcaagatgacatgaagaaattaatcgcttactcttctgttgcacatatgggctatgtgacgttagggatttttacactaacaaagcagggtatcgaaggcagcatctttcaaatgataagccatggtttaa

SEQ ID NO: 221152 - DNA, 814 bp, Unknown
  Bacterial polypeptide expressing nucleotide sequence isolated from the Sargasso Sea
atgattgaatggccaataatttcagcaacaatttttttacctttgattggtgcgttgattatatttttgatcaaagatgatgatctatcttcaaacaatattaagtgggctgctttatggacttctgtaggaacttttgttttaagttgtttaatttggttacaatttgatagttcaaatccaaactatcaattaactgaaaagtataaatggtttagtgattttaattttttttatcatgtaggggtagatggaatttcgttatttatgattttgttaagtacttttttaactcctttttgtattttagctagttgggtaagtgttaaaaaaagaattaaagaatatatgattgcttttctttttttagaaacagttatgataggaatgttttcttctattgatattttattattttatattttttttgaatcggttttgattccaatgtttttaataataggtatttggggaggagcaagaagaatttatgcttcatttaaattttttctatatactcttctgggttcagttttaatgttattagcaattatttttatttaccgaacaactaattcaatgaatattgctgatctgcaaggaaatatttttaccgcaaatattcaagtatacttatggatagctttttttgcttcatttgctgttaaaattcccatgtggccatttcatacttggttacctgatgcacatgttgaggcaccaacagcaggttcagtaattttagcaggtgtattactaaaaatgggaggttatggatttattcgtttttcaataggaatgcttcctgaagcat

SEQ ID NO: 221153 - DNA, 928 bp, Unknown
  Bacterial polypeptide expressing nucleotide sequence isolated from the Sargasso Sea
ttttatttattttttgaagctggcttaataccgatgtttcttattattggaatatggggaggaactagaagagtttattcagcttttaagttttttttatatacattacttggttcagtattaatgttagttgctataatttccatatattggataactggcacaacagacgtggttgagctttatgaattgggtatcgacgctaaatatcaaaacttactttggttggcattttttagctcatttgctgtaaaaacacccatgtggccagtgcatacatggttaccagatgctcatgtcgaggctccaacagctggttcagtgttattggcagcaatattacttaaaatggcaggatatggttttatcagattttcattaggcttatttcctgttgcttcagaaatctttacccctttaatttatactttaagtgtaatcgcaattatttttacatcctttattgctttaatgcaggaggacatgaaaaaattaattgcctactcttcggtggctcacatgggttttgtaactttgggaatttttacaattgaacaacaaggaattgagggaagtataattcagatgataagtcatggccttgtatcagcagcactatttttatgtgttggagttgtgtatgacagaatgcattcaagacttataaatacatacggtggcatcgtaagtattgtcccaaaatatgcagtattatttatgatatttactttagctgccctaggtctaccaggaacaagtggttttgtaggcgaatttttaatcttaatggcagctttcaaagataattttttagttgcggtaatagcaagttttggagtcataataggtgcagcttatatgctttggttatacaaacgagttgtttttggaagattaataaatactgatttaaaacaaaatgattgat

SEQ ID NO: 221154 - DNA, 473 bp, Unknown
  Bacterial polypeptide expressing nucleotide sequence isolated from the Sargasso Sea
gatggctgagttatgggctgcatatctttggccgtttatctggatcgtcattaagatcgtcctaatcattgtcccgttgctgatcggtgtggcctatctcacctatgccgagcgcaaggtgattggcgccatgcatctacgccgggggccgaacgtggtcggaccatacggacttttgcaaccgattgccgacggcatgaagctatttttcaaggaaacaatcattccgtctggtgcaaaccgaggagtgttcattcttgcgccgcttctaacgtttactctagctctggtcgcctgggcggtgatcccagtcggtgcggggctggtcatctcaaatatcaatgtgggaattctttatttgttcgcgatttcctccttgggcgtctatggcgtactgatggcaggttgggcgagtaattcaaaatacgcgtttctcggtgcgttacgttctgccgcgcagatggtatcgtacg

SEQ ID NO: 221155 - DNA, 817 bp, Unknown
  Bacterial polypeptide expressing nucleotide sequence isolated from the Sargasso Sea
ttttgagagtgttcttattccaatgtttttaatcattggagtgtggggttcacgcgaacgaaaaattcgagctgcttaccaatttttcctttacacactgatcggttctcttttcatgcttttagctatcttattaatttattttcaagtagggaccacggatttacaagtgctcagtactgtagaatttagtgaacgacgacaattttttttatgggcagcttttttcttatcatttgctgtaaaagtgcctatgattcctttccatatttggttacctgaagctcatgttgaggcgccaactgcaggatccgtgattcttgcagggattctactaaaactcggaacttatggttttttaaggttttcaattcctttatttcctgaagcgactgtttactttaccccgttaatttatactttaagtgttttaggtattatttatgcatctttcacaactttacgacagattgatttgaaaaaaattattgcttattcatcggtcgcacatatgggtttcgtcactttaggactctttagtctcaatgctcaaggaattgaaggtgccattttattgatgctcagtcatggttttgttgcctcagctttgtttctctgtattggtattctgtatgatcgaacacatacaaggttagtaagatattacggtggcttagtccaaacaatgcctttattctcctttttcttttttgtgtttactctaggaaatctaagtttacctggaacaagtagttttgtaggtgagtttttaattttattaggggtctttcaaacaaatacttttattgcgactttg

SEQ ID NO: 221156 - DNA, 571 bp, Unknown
  Bacterial polypeptide expressing nucleotide sequence isolated from the Sargasso Sea
tatggaattagagtattttattttatttttaccacttttagcggcttttatttctggctttttaggaaaatttgttggtcacagaagctcagaaataattacaagtttatttacttcagtatcagcaattttatcaattctaattttttataaagttgtggatcaaaattatgaaaataacataattatatcaacatggttaaattctggatcacttaacgttaattggtcaattaaaattgatgctttatcttcagtgatgttggtagtagtaactttgatttctgccttagttcatatttattcaattggatacatgtcccatgacccccacagatcaagatttatggcttacctttcactatttacgttttcaatgttaactttagttacatctgataattttttacaattattttttgggtgggaaggagttggtttatgttcttattttttaataggtttctggtttaaaaaagaaagtgcaaatgcagctgctattaaagcatttattgttaatagagtgggtgattttggttttgcattaggtatttttttaattttttatctt

SEQ ID NO: 221157 - DNA, 852 bp, Unknown
  Bacterial polypeptide expressing nucleotide sequence isolated from the Sargasso Sea
gtgtttgatacagtaaattatagtgaggtttttttttctgtaactttacatcttgataataatataaattttttaggtttaagtattaattcaattgatttgatatgtattctgctatttgtcggagcaatgggcaagtcagctcaaatttttttacatacctggttaccagatgcgatggaaggtccaaccccagtttctgcactcattcatgctgcaaccatggtaacagcaggtgtatttttagttgtaagatgttcgcctatatatgagtattcagaattatctttaaatttaataactattattggtatgagtacagctttttttgcagctacagtagccctggttcaaaatgatataaaaaaaataatagcttattcaacatgtagtcaattaggttatatgttttttgcagctggtgtaggagcatataatgtagcaatgtttcatctttttacgcacgcattttttaaagctttattattcctaggagctggatcagttattcattcttttaaaaatgaacaaaatataaatctaatggggggagtctggaaaaaaattccatatacttggatattgatggtcataggaacattggctctaaccggttttccttttttgtcaggtttttactcaaaagatgcaattattgagtttgcatatttaaaaggaagcattattggatatacagctgcaggaattggtatattgacagcttttcttactgctatttactcatggagactaatatttaaaacatttcatggagattttaaaaatcataaattaaagattgaaagttacatgaatcacccatggttatggtattgccattattgttttagc

SEQ ID NO: 221158 - DNA, 345 bp, Unknown
  Bacterial polypeptide expressing nucleotide sequence isolated from the Sargasso Sea
aatgctttcagaatttttaaaagattatttatctattataatttttttgtttattgccctaggtttgagcataagctttatagttttaaattttattttctcaccaaagaaccctgatcctgaaaaactttctgcatatgaatgtggatttgaaccatttgacgattcaagaatggaatttgatgtaaggttttatttagttgcgattttatttattatatttgatttagaaatagcttttttatttccatgggctatttctttaggaaatattggtttgttaggtttttgttcgatgatgatatttttatttattcttaccattggttttgtttacgagtggaa

SEQ ID NO: 221159 - DNA, 187 bp, Unknown
  Bacterial polypeptide expressing nucleotide sequence isolated from the Sargasso Sea
gtgaggttttatttagtagccatcctatttataatttttgatttggaagtagcttttttgtttccttgggcaatatcactaggaagtattgggttatttggtttttggtcaatgatgatttttttattaattctcactattggttttatttatgagtggaaaaaaggagctctcgaatgggagtaga

SEQ ID NO: 221160 - DNA, 249 bp, Unknown
  Bacterial polypeptide expressing nucleotide sequence isolated from the Sargasso Sea
agaaattatcagcatatgaatgtggatttgaagcatttgatgatgctcgtggaagatttgatgtaagattttatttggtggcaattctcttcataatctttgacttggaagttgccttcttgtttccatgggcaataacattaggtaaaataggtttgtttggtttttggtcgatgatgatatttttaactattttaactattggttttatttatgaatggaaaaaaggggcactggaatgggagtaga

SEQ ID NO: 221161 - DNA, 739 bp, Unknown
  Bacterial polypeptide expressing nucleotide sequence isolated from the Sargasso Sea
atacaaaatgatattaaaagagtcgtcgcatattcaacgctctctcaactgggatatatggttgctgctgctggtgtttctgcatactctgccagtttattccacttgatgactcatgctttttttaaagcgttactatttctagcagcaggatctgtcattattgcattacaccatgagcaagacatcaggaaaatgggtgggttgaagaacaaattaccaatcacatatgtgacatctctgatcggatcattggcattaatagggttccccggattttctggctttttctcaaaagatgcattgattgaagcgattggtcatgcagatattattggctcgggttttgcatacgcatcagttttaattggggttttcattacagcactgtatacgttcagactgtttttcaaagtatttcatggtgcattggatgaacatcaccataatgttaaagagtcaccgttatcaattacgcttcccttactattgttggcaattccatcagtaatcattgcctggcctacggttggtcctatggtttttggttcatattttacaactgccatttcgcagcctgacgcataccagatattcggatatcaattcacatctgcttacggtttcttgatccatgcattttcaagcccagtgatatacattgcattatttggggtcgctacagcgtatatcctatacatccaaaaaccgggtattctcgatgatgaaacttataaat

SEQ ID NO: 221162 - DNA, 805 bp, Unknown
  Bacterial polypeptide expressing nucleotide sequence isolated from the Sargasso Sea
ttatgaaaaaaaattagttttttttggatttgagttaaacttaattacattaatttgtattttcttatttattggtgctatgggaaaatcggcacaatttttacttcacacttggcttcctgatgcaatggagggacctacaccagtttcagctttaattcatgccgcaacaatggttactgcaggtgtttttctagtagtgagatgttcacctatgtttgagtattcccaagttgctttgaatttagttgctattgttggaatgataacagcaattttcgcagcatcagttgcattagttcaaaatgatataaaaaaaatagttgcctactcaacttgtagtcagcttggctatatgttttttgcagcaggtattggtgcatatcatgttgcaatgtttcatttgtttactcacgctttttttaaagcactattatttttaggggctggttccgtaattcatgcatttaaagatgagcaggatattagaaatatgggcggagttagaaaaaaacttccttatacttatatttatatgttattgggaactttagctttaactggattcccttttctttctggtttttactcaaaagatgcaattattgagtttgcgtatttaagaaattcatctttaggaaattatgtagcatcaatcggtattctcacagcatttttaacttctatttattcatggagattgttctttaaaacttttcatggaccttataataacaaaaaaattccaattaatgaaactcatgagtccccactggttatgttgatccctttggtatttttaggc

SEQ ID NO: 221163 - DNA, 1000 bp, Unknown
  Bacterial polypeptide expressing nucleotide sequence isolated from the Sargasso Sea
tatcttcagcataccctttggacccgctttaaccgatctacagcggatatgcagttcgttgagcggtccacctggatcgagcggttcaatattgagtactttctaggcgtagacggcatctctgtcccgctggtcctgctgacgacaatattgacaattgtggttgtagcagcaggctggaaagtgattcagagtcgtgttgcccagtattttgccgcctttctgatcatggaagggttaatgattggggtgttctgcgcgctcgatggcatcctgttttaccttttctgggaggcgatgctcatccccatgttcctgatcattggggtatggggtggacctaaccgcgtttacgcggcaatcaagtttttcctctacaccctgcttgggtcgctactcatgctggtggcgctcctctacctctaccaggcctccggggggtcatttgatttgttgggcttccaccatctgccgctgaccggtggcgtgcagacacttgtgtttcttgcatttttcgctgcgttcgccgtcaagattcccatggtcccggtgcatacctggctgccggatgctcacgtggaggcgcctaccggcggttcggtcattctggctgccatcacattgaagatgggtgcgtacggctttcttcggattgcgatgcccattgcgccggatgcggcccatcagattgcgcccgtcattattggcctgtccctgttagcggtggtctacatcgcgttggtcgcgctggtgcagcaggacatgaagaaacttattgcctactcttcgatctctcatatggggtttgtcacgctcgggttctttgtgtttgagactcgggcgatggagggtgccatcgtccagatgatttcccatgggtttgtttcgggcgcgctttttctttgtgtcggggtgctctacgaccgtctgcattcgcgggagattgccacctacggtggcgtgatcaaggtcatgccggtgtttgcgtttttcattgtat

SEQ ID NO: 221164 - DNA, 888 bp, Unknown
  Bacterial polypeptide expressing nucleotide sequence isolated from the Sargasso Sea
ggatagtttaacagctattatgcttgctgtagttactactatatcagcttttgttcatttttattctttaggttatatgtcacatgatccaaattgggaaattactgaaaaatacaaacctagatttttttcgtacttatcactttttacatttgcaatgcttatgttggttacctcaaataactttgttcagttgttttttggttgggaaggtgtgggtttggcctcatatttattaataggattttactacaaaaagtcttctgcaaatttggcttcaataaaggcattcattgtaaatagagtaggggatattggattagctttagctatttttagtacttttttttatgtaggttctttaaattttgatgaactattttctaagtcccaagaactttcaaataaaaatattgaaattctattttttaattttaatgtcttggaatttattgtaattttatttttcttaggtgccatgggaaaatctgcacaactttttcttcatacatggttacctgatgcgatggagggaccaacaccagtatctgctttaatacatgcagcaacaatggtcacagctggagtatttttagtatgtagactttcaccagtgattgaatataccccaatcgcttcaaatctaataatattagttggagcaattaccgctttctttgcaggtacagttgctttagttcaaaatgatgtaaaaagaataattgcttattcaacatgttctcagcttggttttatgtttgctgcagctggtattggactatatcaggctgcgatgtttcatttgttcacacatgctttttttaaagccctattatttttatgtgctggatcaattatccattccatgcatcaccagcaagatataag

SEQ ID NO: 221165 - DNA, 763 bp, Unknown
  Bacterial polypeptide expressing nucleotide sequence isolated from the Sargasso Sea
aacttttacagcgaattggtcgataaatatagatcctcttagctcaattatgcttgtagttgttacccttgtttcatcattagtacatatttattcaattggttacatgagccatgacccccataagccaagattcatgtcttatctttctttatttactttctcaatgttgtcactagttttatcggacaattttctacaattattttttggatgggagggagtcggtttgtgctcctatttactaattggtttttggtataagaaaaattcagctaataatgcggctattaaagcatttattgttaatagagtaggcgactttggcttagcagttggtatttttcttattttttatcatttaggatcaataaactatagtgaagtatttcaactaattcctcagttcgttaataaagaaataaattttttaggttttgaaataaatttaatcaccttaatttgtatttttttgtttattggtgcaatgggaaaatctgcacaatttttacttcatacttggctaccagatgcaatggaaggaccaacacctgtttcagcattaattcatgctgcaactatggtaacagcaggtgtttttcttgtcgtaagatgttcaccgatatttgaatattcgcaaatagctttgaacatagttgcaatagtaggagttataactgcaatttttgctgcatcagttgcaatagtacaaaatgatataaaaagaataatagcatattcaacctgtagccaattaggttat

SEQ ID NO: 221166 - DNA, 779 bp, Unknown
  Bacterial polypeptide expressing nucleotide sequence isolated from the Sargasso Sea
tattttattattttatattttttggaaagctgttttgatcccaatgtatttgattattggaatatggggcggtcaaagaagaatttatgcttcttttaagttttttttatatactcttttaggttctgttttaatgttaatagctattattgtgatttttaatctgactgaatcgatgaatatagaaaaattacaaggtaactttttcaataaaaagattcagatttttttatggttagctttttttgcttcttttgctgttaaaattccaatgtggccttttcatacttggttaccagatgctcatgtagaggcaccaactgccggttctgtaattttagctggtgttttacttaaaatgggaggttacggttttatacgtttttcaatcggaatcttgcctgaagctacagaatatttctttccgttaatcatgatattgagcattatagcaatcgtgtacacatctttagtagctttggcacaaactgacataaaaaaattaatagcatattcttctgttgctcacatgggcattgtcacaataggtatttttttagtaaatcaacaaggtttagaaggtgcaatgatacagatgattagtcatggagttgtttcggctgcactctttctttgtgttggtgttatttatgacaggatgcatactaggcaaatagatttttacaatggattggttaataaaatgcctatttatgcaacagtatttatggtttttatgttagcttcagttggacttcctgggacaagtggtttatagg

SEQ ID NO: 221167 - DNA, 370 bp, Unknown
  Bacterial polypeptide expressing nucleotide sequence isolated from the Sargasso Sea
aatgctttcagaatttttaaaagattatttatctataataatttttttgtttattgctctcggtttgagcataagctttatagtgttaaattttattttctcaccaaagaaccccgatcctgaaaaactttctgcatatgaatgtggatttgaaccatttgatgattcaagaatggaatttgatgtaaggttttatttagttgcgattttatttatcatatttgatttagaaatagcttttttatttccatgggctatttctttaggaaatattggtttgttaggtttttgttcgatgatgatatttttatttattcttaccattggttttatttatgagtggaaaaaaggtgcattagactgggaataa

SEQ ID NO: 221168 - DNA, 769 bp, Unknown
  Bacterial polypeptide expressing nucleotide sequence isolated from the Sargasso Sea
gctgcaattaaagcatttgtagtgaatagagtaggtgattttggatttgccctaggaatatttttaattttttatttatttggaactgtaaattatactgaggtttttgatgaaattccaaacattacagataaaaatttggtatttttaggtatcacatttaatgctgtagatttgatttgcttacttttattcattggtgcaatgggtaaatcagcacaaattttacttcatacctggttgccagacgctatggaaggaccaacacctgtttctgccttaattcatgccgccactatggtaacagcaggagtttttctagttgtaaggtgttcacctatttatgaatactctgatctagctttaaatatcattacaattgttggtatgagtactgcattctttgctgcaacagtagctctggtacaaaatgatataaaaaaaataattgcatattctacttgtagccaattaggttacatgttttttgccactggcgtgggagcatataatgttgcaatgtttcatttattcactcacgcgttttttaaagcactattatttttaggatctggttcagttattcatgcttttaaagacgaacaaaatataaataatatgggcggagtgtggaaaaaacttccatacacctattcactaatgattataggaacgctagctttaacagggtttccatttttgtcaggtttttattctaaagatgcaataattgaatttgcatatttgagaggaaatacaacaggttatt

SEQ ID NO: 221169 - DNA, 892 bp, Unknown
  Bacterial polypeptide expressing nucleotide sequence isolated from the Sargasso Sea
gcaatgggaaaatctgctcaatttttattacacacttggcttccagatgcaatggaaggccctacacctgtttcagccttaattcacgctgcaaccatggttacggctggagtttttttagtagttagatgctcacctctttttgaatattctcagtttgcaatgaatcttgttgctattgttggtatgattacagctttattcgctgcttctgtagctcttgttcaaaatgatattaaaaaaattattgcttactcaacttgcagccagttggggtacatgttttttgctgcaggtgttggtgcgtatcacattgctatgttccatttatttactcacgcattttttaaagcgcttttatttttaggagctggttcagttatccatgcatttcatgaagaacaagatattacgagaatgggaggagtttggaaaaaaattccttatacaatgatactaatgttaattggaacattagcattgacaggttttccgtttttatcaggtttttattccaaagatgctattattgaatttgcttatcttaaaggcacttctgttggttactatgtcagttcagttggtatttttacagcccttttaactgcaatctattcttggagattattttttaagactttttttggagattataacaataaatctatctcaatcgaaaaaactcatgagtcaccattggtgatgatcattccacttattattttggcaatcggtgcgttatctgctggatatttatttaaagatttattaataggaaataactctagctattggggtgatactattctatttttaaactttgtaaaattagaaaatattcctatttggctaataataataacccccagttttaatcacagcagctatcctc

SEQ ID NO: 221170 - DNA, 876 bp, Unknown
  Bacterial polypeptide expressing nucleotide sequence isolated from the Sargasso Sea
agcggttttataaaatttaaatttggaatagatgggatatcaatattatttatacttttaactgctttcataacacccctatgtattatttcctgtattaacagcatcaaaaatagacttaaggaatttcttatagcacttttagttctagaaacatttatgattggtgtcttttgttccctagatttagtagttttttatcttttttttgaggctggtttaataccaatgtttttaattataggtatttggggtggaccaagaaaagtatattcagcatttaaattttttttattcactcttttaggatcagttttgatgcttgttgctattatagctatttattcaatttcgggaacgaccgatataattcaaatctatgaaaccaaaatcccggaaaaatttcaatatttattatggcttgctttttttagttcttttgccgttaagttgccaatgtggccagtacatacttggcttcctgatgctcacgtagaagcacctacgcctggttcagttattttagctgctattttacttaaaatgggaggttacggttttttaagattttctgttggtatgtttccacttgcatcagagtattttacacctttgatttttgctttaagcataattgctatcatatacacttctttagttgcattagttcaagatgatatgaaaaaattaatagcttattcatctgttgcacacatgggttttgtcacaatgggaattttcacttttaataaacaaggtatcgaaggaagcattgttcaaatgataagccacgggttaatttctgcagccctctttctttgtgtaggagttctttacgacagaacacattccagattaataaattcttacggaggt

SEQ ID NO: 221171 - DNA, 880 bp, Unknown
  Bacterial polypeptide expressing nucleotide sequence isolated from the Sargasso Sea
ccaattttaattgttttacctcttatcggactagcttttatttttttttcatctgaagaagacgaaaatgcagttcagtcaaaaaaatctgcattatggacttgtgcaagtaatttttttttatcactatatttaccaataaactttgacaaatcaattccacactttcaattcgtaaattctttttcctggttcaacagtgataatcttagatttgcccttggtgtcgatggtttgtctatgccatttgttttactgtctacatttttgattttgatatgtattgtttttctcttaccacaatcaaaaaaaaatatgaaaatgtatttagcctcttttttattattggaatcatttttagtgggaacttttagtgcaattgatttgttttctttttacattttttttgaatcaatattaataccaatgtatttaattataggattttggggtggtgaaagaagaatatattcagcctacaagttttttctttacacgttacttggttcagttttaatgttaatagcaataatatttttgtaccaagaatttggtacaataagcatacccaaactattggattatactcttccattttatatacaggtttggttatggctagcatttttctcgtcatttgctgttaaaatcccaatgtggccatttcatacatggcttccagatgcacatgtagaggctcctactgagggttctgttatattagccggaatacttctaaagcttggaggttatggttttataaggtttaatttatctattcttcctgatgcatcaatcttttttacaccttttatttattttctctacggtcttagcaataatttacacttcttatatagctttagtacaagaggataga

SEQ ID NO: 221172 - DNA, 370 bp, Unknown
  Bacterial polypeptide expressing nucleotide sequence isolated from the Sargasso Sea
catgttatctgattttttaaaagattatttacctataataatatttttgatcatcgctcttgggttgagttgtgcatttgtcataattaattttatactttcgccaaaaaaacctgatccagaaaaactttcagcttatgaatgtggattcgaaccctttgaagactctagaatggagtttgatgttagattttatttggttgcaattctgtttattatttttgatttggaaatagcttttctatttccttgggcgatttctcttggaaaaattggattattaggtttttcatcaatgatgatttttttgttcatacttacaattggctttatttatgaatggaaaaaaggcgctttagactgggaatag

SEQ ID NO: 221173 - DNA, 820 bp, Unknown
  Bacterial polypeptide expressing nucleotide sequence isolated from the Sargasso Sea
tgttttttgttcatggatttggttgttttttatttattttttgaaggtggactaattccaatgtttttaataattggaatatggggcggagagagacgaatttactctgcatttaagttttttctttatactcttttaggatcagtattaatgcttgttgcaatactttcaatttactggctgaacggcacgactgatattgagaaattatatgaaattggtattgagtctaaatatcaaaatatcttgtggctggctttttttagctcatttgctgtaaaaaccccgatgtggcctgtccatacttggttacctgatgctcatgttgaggctccgaccgcaggttctgttttactagcagctattcttttaaaaatggcaggatatggttttataagattttcagtaggcctttttccggtcgcctcagagcactttactccgttagtttatactttaagcataatagctataatctacacatcactagtagccttgatgcaagaagatatgaaaaagttgattgcttattcctcagttgctcacatgggatttgtaactttaggaatttttacaatgacagagcaaggaatcgaaggcagtatatttcaaatgatcagtcacggtcttgtctctgcagcattatttttaagtgtaggagtaatttatgagagaaatcactcaagaataattaaaaattacggaggattagtttctgtaatgcccaaatacgcaattgttctgatgatatttacattaggagcagttggattgccaggcacaacagggtttgttggagaatttttgattttaatgggag

SEQ ID NO: 221174 - DNA, 867 bp, Unknown
  Bacterial polypeptide expressing nucleotide sequence isolated from the Sargasso Sea
ttttttttctaaattagcaaaaaaagaaatattaatttttctttctacattttttatttttttagcatcttatatttcattaaaaacaacaaatgaaattataagtacaaataattcttttcaattttatttatttaattggcttaattctggaaatctcatatcaacttggtctataaatattgatttctttacttctgttatgatttctattgtcaatattatatcagcattagttcaactctattcaattggatatatgaagaatgatgattttattaatcgtttcttttgttatttaaatttatttactttttttatgctcttattagtttgttcagaaaatctattacaattatacattggttgggaaggagtgggactttgttcttatttattaattgggttttggttttataaggaaagtgcttctaatgctgctaaaaaagctttcattgtaaatagagtaggtgatatgttttttatattaggaattattcttatttacataacatttgaaacaataaatttttcaaatatcttccaaaattttgataaatacgaaaccacaacatttaattttcttttttttaatattaaatccttagatgctatttgtatttttttaatattgggcgctatggcaaagtcagctcaatttggtcttcatacatggttgccagatgctatggaaggccctacacctgtttcagcattaatacacgcagcaacgatggttacagctggtgtttttttaatatgtaaaatgtctattttttttaatgattctttatttgcatctaatcttataattttaattggatcattaacggctgtctttgcagcatcagtagcattagttcaaaa

SEQ ID NO: 221175 - DNA, 826 bp, Unknown
  Bacterial polypeptide expressing nucleotide sequence isolated from the Sargasso Sea
gatttagttatcttttacttgttttttgaaggtgggcttatccctatgtttttaataattggcatatggggaggacacaaaagagtctattcagcttttaaattctttctttttacgttgcttggttcagttttaatgttgatagcaattatctctatctattggataacaggaactaccgatgttattaaattgttgcaaataaagataccttcagaataccaaatcttactttggctagcattctttagttcttttgcagtaaaattaccaatgtggccagttcatacttggttgcctgatgctcatgttgaagcgcctaccgctggatcagtaattttggcagcaatattgttaaaaatggccgggtatggttatattagattttcaatcggcttatttcctattgggtccgatttttttacacctttaatttttatattgagtcttatagcaataatttacacatcattagtagctttaatgcaagaagatatgaaaaaattaattgcatattcttctgtagctcacatgggttttgttacgataggcattttttcaataactaagcaaggattggaaggaagcattattcaaatgataagccacggttttatttcagctggactttttttatctgtaggagttttatacgacagatttcattctagaatgatttcatcttatagcggtttagtaaatattatgcctaaatatgcattaatattcatgatttttaccttagcggcattggggttaccaggcacaagtggttttgttggagaatttttagttttggttggagtatttcaaaaaaatatgattg

SEQ ID NO: 221176 - DNA, 757 bp, Unknown
  Bacterial polypeptide expressing nucleotide sequence isolated from the Sargasso Sea
atggaactttcaataatatttcttccattgatagcttcaataatatcaggcttctttggtaaatttattggtgatagaaattcagaaatagtcactagcactttagtttcaatttctgccatactatcaatttttgttttatataaagtaactgtaaatcaatatgaagaaaatatacttattgcaacttggatcaactcagggtcattaaatgtaaattggtcaatgttaattgatcctttgtcagctgtaatgttggttgtggttacttcaatatcttctttagttcatatttattcaattggttacatgtcccatgatccgcataaaccaagatttatggcatatttatctttatttacatttgcaatgttaatgcttgtaacttcagataattttgttcaattattttttggatgggaaggggtaggtttatgttcatactttttaataggtttttggtttaaaaaggaaagtgctaatactgcagcgattaaagcatttgttgtaaacagagtgggtgattttggatttgctttaggaatatttttaatattttatttatttggtacagtaaattattctgaagtgtttcaacaaataccaacagttgttgataaaaacttattattcttgggacttgaaatcaaagcaatagatttgatttgcttacttttattcattggtgcaatgggtaagtcagcacaaattttgttacacacttggttgccagatgcaatggaaggcccaacgccag

SEQ ID NO: 221177 - DNA, 295 bp, Unknown
  Bacterial polypeptide expressing nucleotide sequence isolated from the Sargasso Sea
aatgaccacgttatcttttgttgttggtgaaagaaaacctgataatgaaaaactttctgcatatgaatgtggttttgaagcttttgatgatgctaggggcagatttgatgtaaggttttatttagtagccatcctatttataatttttgatttagaggtggcttttttatttccttgggcaatatcattaggagctattgggctgtttggattttggtcaatgatgatttttttattaattcttactattggttttatttatgagtggaaaaaaggagctcttgaatgggagtag

SEQ ID NO: 221178 - DNA, 916 bp, Unknown
  Bacterial polypeptide expressing nucleotide sequence isolated from the Sargasso Sea
tttttacctcttatttggtgctttattatcatggttggttggtgatagatggtcatcaaaaggtgcttttataagtactataacttgcatgttgctatctatgataatctcatggacagctttttttgacatagcaataaatgataatacgtttcaaggaatatcctttccctggatactttctggcaatttaaatataaactggggattttccttcgattctcttacttgtgtaatgttaatagtagttacaaccgtttcttcaatggttcatatttattcaattggatatatgtctcatgataaatcaaaatctcgttttatgagttatttatctttttttacttttgcaatgttaatgctagtcacatctgataatttatttcaattattttttgggtgggaaggagttggattagcttcttacttgcttattggtttttggtataataaaaaatctgctaatttagctgcaattaaagctttcgtagttaatagagtgggtgacttgggttttgctataggcattatctttatatttgttacatttgacgcaatagactttaaagttatattcgaattagcaccatctatggtagatgaaaatgttaacttgattggatacgaggttagcgtaattgaattttcctgtcttatgctttttattggagctatgggaaaatctgcacagctttttttacatacatggttgcctgatgcaatggaaggcccgactccagtttcagcattgattcatgctgcaacaatggtaactgcaggagtatttatggtttgtaaattgtcacctctttttgaatatgcaccaattacattgagcttcattacgatcattggcgctataacagcgctttttgcttcaactattgctttaactcaatttgatattaaaagagta

SEQ ID NO: 221179 - DNA, 370 bp, Unknown
  Bacterial polypeptide expressing nucleotide sequence isolated from the Sargasso Sea
aatgatttttgattttttatcagggtatttgtccataataattttcgtatttatagcattagctttaagctgcggatttataattattaatttagctttttctccaaataacccagatccagaaaaactatctgcttatgaatgtggctttgaagcttttagtgactcaagaataaaatttgacgtaaggttctatttagttgcaattttatttattatttttgatttagaaatagcctttctttttccatgggcaatttcattaggtagcataggacttctaggattttattcaatgatgatttttttatttattttaactataggctttatttatgagtggaagaaaggagcattagaatgggaataa

SEQ ID NO: 221180 - DNA, 611 bp, Unknown
  Bacterial polypeptide expressing nucleotide sequence isolated from the Sargasso Sea
tatggaattagccttattatttcttcctctagcatctttcattatttctgggttttttggaaaatatattggagatagactatccgaaattattacaagtttattggtttctacatcagctatactagctttatttattttttacgaagtcataacagaagggtacactaataatattgttatagcttcatggattaaatcaggatcactaaatgttaattggtcaattaaagttgatgctgtatctgcggtaatgcttgtagtagttacattaatatcttcattggtacatatttattcaataggctacatgtctcacgacaaacataaaccaagatttatggcatacttgtcactttttacctttgcaatgttgactttagtaacatcggataattttttacaattattttttggatgggaaggtgtcggtctttgttcatattttttaattggtttttggtttaaaaaagattctgcaaactcagcagctataaaagcttttgttgttaatagagttggtgactttggttttgcactaggaatatttttaattttttatttatttggaacagtaaattacaatgaagtatttcaacaaattccacaga

SEQ ID NO: 221181 - DNA, 652 bp, Unknown
  Bacterial polypeptide expressing nucleotide sequence isolated from the Sargasso Sea
aatggaatacctaattttatttctacctctaataggatctgtgattagtggtttttttggaaataaaataggagacagaaattctcaaattttgacaagttcgtttgtcagtatttcagcaatactctctttatttgttttatataaagttattatttcagattattcaaacaatcttgttatagctacctggattaactctggaacattaaatgtaaattggtcgataaaaattgattcattatcagcagtaatgtttgttgttgtaaattttgtttcagctttagttcacatttactcaattggctacatgtcacacgatccccataaaacaaggtttatggcatatttatcgttgtttacttttgcaatgttaactttagtaagttcagacaactttattcaactattttttggttgggaaggtgttggcttatgctcatattttttaattggattttggtttaaaaaagagagtgcaaacaaggctgcaataaaagccttcgttgttaatagagttggtgactttggtttagcgcttggaatttttctgattttttatatttttggtacagtcaattatgatgaggtttttgaaaaaatcccagatgttttagataaaaaaataaatttcattggtattaatatagaa

SEQ ID NO: 221182 - DNA, 370 bp, Unknown
  Bacterial polypeptide expressing nucleotide sequence isolated from the Sargasso Sea
aatgttatctgattttttacaaaactacttacctataataatttttttaattctagcattaggactaagttgtgcttttgtggtaattaattttattctttcaccaaaaagacctgatcctgaaaagctttctgcttatgaatgtgggtttgaaccatttgaggattcaaggatggagtttgatgtaagattttatttggtagcaatattatttattatttttgatttagaaattgctttcctttttccatgggcaatttcactaggaaatattggtttattaggcttttcatcaatgatgatttttctcttcatacttacaattggttttatttatgagtggaaaaaaggtgctttagactgggaataa

SEQ ID NO: 221183 - DNA, 594 bp, Unknown
  Bacterial polypeptide expressing nucleotide sequence isolated from the Sargasso Sea
aatggaatacctaattttatttctacctctaattggagctgtaattagtggtttttttggaaagaaaataggagacagaaattctcaaattttgacaagttcgtttgtgagtatttcagcaatactctctttacttgttttgtataaagttattagttcagattattcaaacaatcttgttatagctacttggattaactctggaacattaaatgttaattggtcgataaaaattgatgccttatcagcagttatgtttgttgtggtaaactttgtttcagctttagttcatatttactcaattggttacatgtcacacgatcctcataaaacaagatttatggcatatttgtccttatttacttttgcaatgttaactttagtaagttcagataactttattcaactattttttgggtgggaaggtgtaggcttatgctcatattttttaattggattttggtttaaaaaagagagtgcaaacaaggctgcaataaaagcttttgttgtaaatagagttggtgattttggtttagcgcttggaatttttctgattttttatattttttgtacagtcaattatgatgaggtttt

SEQ ID NO: 221184 - DNA, 913 bp, Unknown
  Bacterial polypeptide expressing nucleotide sequence isolated from the Sargasso Sea
tttgttctcatcatttggcgcttccacagctctattcactggcatcctgggtctagtgcaaaatgatattaagagagttattgcttattcaacgctctctcaactgggatacatggttgctgctgccggtgtttctgcttactcagttagcttgtttcatttgatgactcatgcttttttcaaagctttgttgtttcttgcagctggctcggtcatcgtagcactgcatcatgaacaagacataagaaaaatgggcggactaaggagtaaattgccgattacatatttggcatctttgatcggatctttggcattaattggctttcctgggttctctgggtttttctcgaaagatgctttgatagaagccataggacatgctgatatccttggatctggatacgcatatgcgtctgttttaatcggagtattcattacagcattgtatacattcaggctctttttcaaggtatttcatggagctcaggatggtcatcatcaagatgtcaaagagtcaccattatcgattactttgcctttgatcttattggcaattccatctgcgattgttgcatggcccacggtgggtccaatggtgttcggctcttattttgctaatagcatctcacaacccgatgcatatcagatttttggatatgaatttacaactgcactcggctttctggtccacgcattttctagtccggtgatatacattgcaatatttggggtcgcaactgcatacgttttatatatctacaaaccgagcattcttgaaaataaatctcttgagtcttctttcatttttcgccttttagataacaaatattactttgacgagctatatgaaaatgtattcgctaaaaaagctcgaaatattggccatcttttatggacgataggtgatgtaaaa

SEQ ID NO: 221185 - DNA, 928 bp, Unknown
  Bacterial polypeptide expressing nucleotide sequence isolated from the Sargasso Sea
ttatttattattttaacaacttttataactccactttgtattatttcagttaattcaacaattaaaaatagacttaaagattttttaatagctatacttgttatggaaactatgatgattggtgttttttgctcgctagatttagtcattttttacttattttttgaagctggtttaattccaatgtttttaattattggtatttggggtggacaaaggagagtttattcagctttcaagtttttcttgtacacattgttaggctctgtattaatgttggttgctataatttctatatattggataacaggaacaaccgatgtaattaaattatacgaacttggtattgatgccaaatatcaacatttattatggttggctttttttagttcatttgctgttaaaactccaatgtggcctgttcatacatggcttcctgatgctcacgttgaagcgccaacagcaggctcagttttacttgctgctattttgttaaaaatggcaggttatggttttataagattttcagtaggtttatttcctatagcatcagaatattttgtatcttttatttttgttttaagccttattgcaattatttacacatcattagttgccttaatgcaggaagatatgaaaaaattaattgcatattcatcagttgctcatatgggatttgtaacaatgggtatttttaccatgacaccagaaggcatcgaaggaagtattttccaaatgataagccacggaattatatctgcagcattatttttatgtgtaggtgtagtatacgaaagaactcatacaagagaaataagcaaatatggtggtatagtatcagtaatgccaagatacgctgttgtatttatggtatttactttaggtgcattggggttgcctggtacaacaggctttattggtgaatttt

SEQ ID NO: 221186 - DNA, 878 bp, Unknown
  Bacterial polypeptide expressing nucleotide sequence isolated from the Sargasso Sea
aatgaattttcctattctttcatctttaatattattaccgatagttggcgctttatttttattttttactaaagataaagaaggaaataatttaactgctaaatatgttgctttatttacgactatagttaattttttaatttctatttatctttggatttcttttgaccaatcaacgtctagttttcaatttgtagaagatagaacatggattgaaggatttattaattataaagttggagttgatggtatttcaattttatttataatattaacaacatttataactccactttgtataatatctgtaaataattctgttaaaaatagattaagagattttttaattgcaattctaatcatggaaagtttcatgattggtgttttctgtgcacttgatttagttgtattctatttattttttgaagctggattaataccaatgtttttaattatcggtatttggggaggtgcaagaagagtttattctgcattcaaattctttctatacacattgttaggttctgttttgatgttagttgcaataatttcaatttattggattacagggacaactgacgtggttcaactatatgaaattggtattgatgttaaatatcaaaatctattgtggttagcattttttagttcatttgcagttaaaacacctatgtggccagttcatacatggctacctgatgcacacgttgaggctcctacggcaggatctgtattactcgcagcaattttgttaaagatggctggatatggttttataagattttctttaggtcttttcccagttgcatcagaggtatttacacctttaatttacaccttgagtgttatagcaattatatttacttcactgatagctt

SEQ ID NO: 221187 - DNA, 711 bp, Unknown
  Bacterial polypeptide expressing nucleotide sequence isolated from the Sargasso Sea
ggttacagttgtttcagcattagttcatatctattcaatcggctacatgagtcatgatcctcataaaccaaggtttatgtcttatttgtctctttttactttttcgatgttagttttggtagtttcagataattttctccaattgttttttggctgggaaggcgttggtctatgttcatatttattaataggtttttggtataaaaaagaaactgcaaataatgcagccataaaagcctttatagtaaacagaattggagattttggtcttgcagtcggaatatttataatttttttcttttttggaagtataaattttgaagaaatatttcaagctgtaccagagatttctgaaaaaaaattattttttgttggactcaaagttaatttaataactttaatttgtttgtttttatttataggagcgatgggaaaatctgctcaatttttactccatacctggttacctgatgcgatggaaggaccaactccagtttcggcgttaattcatgcggctacaatggtaacagctggagtctttctagttgtcaggtgttctccattatttgaatattctcaagtagcgttaaatatggttgctattgtaggaatggtaactgcgatttttgctgcttctgtagctttagttcaaaatgacataaaaaagattgttgcatactcgacttgtagtcaattaggttatatgttttt

SEQ ID NO: 221188 - DNA, 697 bp, Unknown
  Bacterial polypeptide expressing nucleotide sequence isolated from the Sargasso Sea
ttcagctttgatacatgcagcaactatggtgactgctggtgtttttttagttattagatgttcaccaatttatgagtattcagaattagcattaaacatcataactattataggaatgagcacagctttttttgctgcttctgtagcactagtacaaaatgacataaaaaaaataattgcctattcaacatgtagtcagttaggttatatgttttttgcagctggagttggtgcttataatgttgcaatgtttcatttatttactcatgctttttttaaagctttattatttttaggttctgggtcggttattcatgcgtttaaagatgaacaaaatataaataatatggggggtgtttggaaaaaacttccttatacgtacgctttaatgatcataggaactttagctttaactggatttccttttttgtcaggtttttattctaaagacgcaatcatagagtttgcctatttaagagggaacacaacaggtttttatgctgctggcattggtgttgttacagcctttctcacttcaatatattcttggaggcttatgtttaaaacatttcacggtgaatataataacaaaaatatcaaaattgaagatacacatgaatctcctctagtaatgttgttgccattaattttgttgtcaattggagcagtattcgctggttttgcttttaaagaattg

SEQ ID NO: 221189 - DNA, 279 bp, Unknown
  Bacterial polypeptide expressing nucleotide sequence isolated from the Sargasso Sea
ttattctatcgccaaaaaaacctgatccagaaaaactatcagcttatgaatgtggatttgaaccttttgaagactctaggcttgagtttgatgttaggttttatttagttgcaatcttatttataatatttgatttggaaatagccttcttatttccatgggcaatttcattaggcaatattggattacttggtttttcatcaatgatgatttttctattcattctgacgatcggttttgtatatgaatggaaaaaaggcgctttagattgggaataga

SEQ ID NO: 221190 - DNA, 673 bp, Unknown
  Bacterial polypeptide expressing nucleotide sequence isolated from the Sargasso Sea
aatggaatatttaattttatttttacctttgttggcttctattatttgtggttttttcggaaaattgattggtgacaagatctctcaaattataacaagtttatttgtatctttatcagctttactttctttagttgttttttataaagttgtaactggtggttatgaaaataatttaataattacaacttggattaattcagggtctttaaatgtaaattggtctatcaatatagatgctttgtcatcagtaatgcttgtagtagttacagttatatcatcattagtgcatatttattcaatcggatatatgtctcacgatcctcacaaggcaagatttatgtcttatttatctttgtttacttttgcaatgttaaccctggtaacttcagataattttattcaattattttttggatgggagggtgttggactatgttcgtattttttaattggcttttggtttaaaaaaccaagcgccaatgcagctgctataaaagcatttctggttaatagagtaggagattttggttttgctttaggtatttttttaattttttatatttttggaactgtaaattacaatgaagtttttcaaaaagttcctgagattgtagatagagaattagtttttataggtatcaatataaatgctgttgatttaatatgtttg

SEQ ID NO: 221191 - DNA, 705 bp, Unknown
  Bacterial polypeptide expressing nucleotide sequence isolated from the Sargasso Sea
gatggaatacattgtaatatttttacctttattaggtgcatttttttcaggtttttttggaaatttaataggtaataaattctctcaaattttaacctctgcttttgtatctatctcggcaatattttcaattttaattttttataatgttttaacaaataattacgaaagcaacctaatagttgctaaatggattaattcgggagcactcaatgtaaattggtctatcaaaattgatgcattatcctctgtaatgcttgtagtggttacatttgtatcatctctagttcatatttactctattggatacatgtctcatgatcctcataaaccaagattcatgtcttatttatccttgtttactttctcaatgttaactttagttacatctgataattttttacaattattttttggatgggaaggagttggattgtgttcatattttctaattggattttggtttaaacgtgaaactgctaatgctgctgctattaaagcatttttagtaaatagagtaggtgattttggattagcgttaggcatattcttaattttttatatgtgcggaacaattaattatgatgaggtttttcaacaaatatctacactaagtcagagcaaactcaattttgtgggtataaatctaaatccaatcaatcttatttgcgtacttttatttattggtgcaatgggtaaatctgc

SEQ ID NO: 221192 - DNA, 837 bp, Unknown
  Bacterial polypeptide expressing nucleotide sequence isolated from the Sargasso Sea
ttggttttgaattaaatttaataacaataatatgtgtattcctttttattggagcaatgggaaaatctgcacaatttttgttgcatacttggttaccagatgcgatggaggggccaacaccagtatcagctttgattcacgctgcaacaatggtaactgcaggtgtatttttagttgtcagatgttctccaatttttgaattttctcaatttgctttgaatctagttgccgtggtagggatgatcactgcactatttgctgcatcagttgcacttgtgcaaaacgacataaaaaaaattgtagcctactcaacatgtagtcaattaggttacatgttttttgctgcaggagttggcgcttatcatgttgcaatgtttcatttatttacacacgctttctttaaagcactattattcttgggtgctggttcagtaatacacgcatttaatgatgagcaagatatcagaaatatgggcggcgtaagaaaaaagctaccatatacatacattttcatgttgttaggtactttagctttaactggatttccgtttctttcaggattctactcaaaagatgcaataatagaatttgcttatcttaaaaaatcttctttaggaaattatgcagccacggtcggcatactcacagcatttttaacctcaatctattcttggagattatttttcaaaactttccatggatcttataataataaaaaaattccaattaatgaaactcatgagtcacctttagtgatgttgacaccacttgtatttttgagtgttggagcagtattctcaggttactttttcaaaaagtatttttataggtcatgat

SEQ ID NO: 221193 - DNA, 450 bp, Unknown
  Bacterial polypeptide expressing nucleotide sequence isolated from the Sargasso Sea
aatggaatacctaattttatttctacctctattaggttcaataataagtggttttttcggcaagaaaattggaaacagaaattctcaaatttttactagttcttttgtgagtatttcggcaatactatctctcatagtattatataaagttataggtttaaactactcaaataacttagttatagcaacttggatcaaatctggaacattagacgtaaattggtcaataaaaatcgatgccttatcagctgttatgtttgttgttgttaattttgtttcagcattagttcatatttattctatcggttacatgtcacacgatcctcataaaacaagatttatggcatatttatccttatttacttttgcaatgttaactttagtaagttctgataactttattcaactattttttggctgggaaggtgtaggtttatgctcatatttttt

SEQ ID NO: 221194 - DNA, 372 bp, Unknown
  Bacterial polypeptide expressing nucleotide sequence isolated from the Sargasso Sea
acatgatttacaattttttaacagaatacttatcaatattaatatttcttttcttagctttatttctaagcattggatttatcgtagctaattttttagcagcaccatctaaccccgatcctgaaaaattatctgcatatgaatgtggatttgaggcatttgatgactcaagaatggagtttgatatcaggttttatttggttgcaattttgttcattatttttgatctagaaattgcatttctttttccttgggcaatttccttaggaaatcttggagctttaggcttttggtcaatgatgatttttttagcaatcttaactattggatttatttatgaatggaaaaaaggagctttagaatgggaataaa

SEQ ID NO: 221195 - DNA, 763 bp, Unknown
  Bacterial polypeptide expressing nucleotide sequence isolated from the Sargasso Sea
gatggaatctctaatgattggtgttttttgttcattagatttagttgtattttatcttttttttgaaggtggtttaattccaatgtttttaataattggtatctggggcggagaaagaagagtttattctgcttttaaattttttctttatacacttcttggttctgttcttatgcttgttgcaataatttcaatatattggattacaggaacaacagatataacttatttgtatacactaggaatcaatgagaagtatcaatatttattgtggttagctttttttagttcctttgctgttaaaactccaatgtggcctgtccatacttggctaccagatgctcacgttgaagcgccaactgcgggatcagttttattagctgcaattttattaaaaatggccgggtatggatttataagattttcagttggtcttttccctacagcttctgaatattttattcctttaatatatactctaagtttaattgcaattatttacacttcactagttgcattaatgcaagatgatatgaaaaaattgattgcttattcctctgtagcacatatgggatttgtaactttaggaatatttacatttacgcaacaagggttagaagggagcatatttcaaatgattagtcatggcttagtttcggcggcacttttcttatcagttggtgtaatttatgagagaatgcacacaagactaatagcaaattatggtggacttgtttctgtaatgcctaaatacgctattgtt

SEQ ID NO: 221196 - DNA, 700 bp, Unknown
  Bacterial polypeptide expressing nucleotide sequence isolated from the Sargasso Sea
agctgttgttttatatgaagttatttttaataactatcaagacaatatcataattgctacatggataaattctggaacattggacgtcaattggtcaatgaaaatagaccctttatcagcaattatgttagttgttgtaacctttgtttcatctttagttcatatttactcaattggatatatgtctcatgatccacataaaccacgttttatggcttacttgtcattattcacttttgcgatgttgatgttagtaacttcagataattttattcaattgttttttggatgggaaggtgtagggctttgctcttattttttaataggtttttggtttaaaaaagattcagcaaacactgctgcaattaaagcatttgtagtaaatagagtaggtgattttggttttgctcttggtatttttttaattttttacttatttggaacagtaaattattcagaggtttttgaattaattccaacggtagtcgagaaaaatctcattttcctgggtattgaaattaatgctatagatttaatttgcttacttttgtttgttggagcaatgggaaaatcagctcaaatattacttcacacatggttaccagacgccatggagggtccaacccctgtttctgcgcttattcatgcagctacaatggtaacagcgggtgttttcttagtagtaagatgctcacctata

SEQ ID NO: 221197 - DNA, 190 bp, Unknown
  Bacterial polypeptide expressing nucleotide sequence isolated from the Sargasso Sea
gatgttagattttatttggttgcaatactatttattatatttgatttggaaatagcctttctgtttccatgggcaatttctcttggcaatattggattgttaggtttttcatcaatgatgatatttttattcattctcacaataggttttatttacgaatggaaaaaaggcgctttagattgggaataaa

SEQ ID NO: 221198 - DNA, 808 bp, Unknown
  Bacterial polypeptide expressing nucleotide sequence isolated from the Sargasso Sea
gttccctatttttgaatactctcaacttacattaaatataattacttttgttggaatgatcacagcattttttgcagcaacagttgctttggtacaaaatgatataaaaaaaattatagcatattccacatgtagccaattaggttacatgttttttgcagctggcgttggcgcttataatgttgctatgtttcatttgtttacacatgctttttttaaagctttattatttttaggttctggatcagtcatacactctttcaaagacgagcaagatattaatcaaatggggggagtatggaaaaaattaccatatacatgggttttaatgatcattggaactttagcattaacaggcttcccattattatcaggcttttattctaaagatgccattattgaatatgcatatttaagaggaaatactgccgggtattatgctgccactgtaggaatccttactgctttattaacttcaatttattcttggagattaatttttaaaacttttcatggagattataataataataaattgaaaattgatacaatgcacgaatccccattagttatgttaattcctttaatagtactagcaattggtgctttatttgctggttacttctttaaagaattatttattggtcactctagtagcaataatttctggactgattcaattaaatttttatcaccattaagtttagatcatcctccgttatggataatttattttactccagtgatagtagttttatctataccattttcttactatttatttttaaaaaataaaaatattacccat

SEQ ID NO: 221199 - DNA, 829 bp, Unknown
  Bacterial polypeptide expressing nucleotide sequence isolated from the Sargasso Sea
ttctcgatccgcggtgacgacgagacggtggcgctcaacgcgcgaagcgtggcgttatggaccacgggcattaacttcttcctgtcgctctacatctggttcaacttcgatccatcgacggccgacttccagttcgtcgaaaaagtcgaatggatgccggtactgggccttcaataccacatgggcatcgacggcatttccatgctgttcgtgttgctcacaacactactgtcgccgatctgtatcctggcaagttggagagctacccagacccgggtgaaggagtacatgatatccttcctaattcttgaaacgctgatggtggggatgttctgcgccctagacctgatggtcttctacatatacttcgaaggtgtcctgatcccgatgttcctgatcatcgggatctggggcggaccccgccgcgtgtatgcagcgttcaagctgttcctctacaccctgttaggttcggtcctaatgctgctggcgatgtttgctatgtacgtggacgcgggcaccaccgacatcgtccgactcatgaaccacaacttcccggcggagctacagacatggttgttcctggccttcttcgcgtccttcgcggtgaaggtccctatgtggccagtgcacacatggctgcccgacgcccacgtggaggcgccgacggccggttctgttatactggccggcgtgctgttgaaattcggcggctacgggttcctccgcttttcgctgcccatgttccctctggccaccgtggacttcacgcccatggtttacgcgctcagcattattgccgtggtttacacatcgttcgtggccttggtcc

SEQ ID NO: 221200 - DNA, 760 bp, Unknown
  Bacterial polypeptide expressing nucleotide sequence isolated from the Sargasso Sea
aatgattggcaactggccccttttgacgataatcaccttcctgccgatgatcggtgtcgccttcctgatgatgatccgcggcgaggaagagctcgttgcgcagaacgcgcgcaatgtggcgctttgggtgagcagcttcaccctggtcatttcactggcgcttgtgctgaatttcgatccgcaggcggcgggctaccagttcgaggaacgggcggagtggcttcccggcgccggcatcagctaccatcttggcgccgacggcatctcgatgccctttatcattctctcgacgctgctgacgccgctggcgatcctggcgagctggaaggcgatcacgcatagggtgcgcgagtacatgatcgcctttctcgttctggagacaatgatgatcggcatgttcgcctcgctcgacatgctgatgttctatctgttcttcgaaggcgtcctgatcccgatgttcatcatcatcggggtatggggcggcgcagggcgtgtctacgcggccttcaagttctttctctatacgcttctcggctcggttctgatgcttgtctgcatgctgacaatgtatatcgacgccggctcgaccgatatcccggcgctgagcgcgcacagttttgccgccggcatgcagacctggcttttcctcggtttcctggcgtcattcgccgtcaaggtcccaatgtggccggtccatacctggcttcccgatgcccatgtcgaggcgccgacggcaggctcgatgatccttgccggggtg

SEQ ID NO: 221201 - DNA, 370 bp, Unknown
  Bacterial polypeptide expressing nucleotide sequence isolated from the Sargasso Sea
atgataacagatattttaaaagattatttacctataattttattcttaataattgcactaggattaagttgtgcgtttatagtagtaaattttatcttatcacctaaacatccagacccagaaaagttatctgcatatgaatgtggctttgagccatttcaagattcaagaatggaatttgatgtgaggttttatttagtagctatattatttattatttttgatcttgaaattgcttttttatttccgtgggcaatatcattaggtaatattggaattcttggttttacatcaatgatgatttttttattcatactcacaattgggtttatttatgaatggaaaaaaggtgctttagactgggaataat

SEQ ID NO: 221202 - DNA, 370 bp, Unknown
  Bacterial polypeptide expressing nucleotide sequence isolated from the Sargasso Sea
atgttatctgattttcttaaagattacttaccaattataatttttctaataatagctctagggctgagttgtgcgtttgtggtaattaattttattctatcgccaaaaaaacctgatccagaaaaactatcagcttatgaatgtggatttgaaccctttgaggattcaaggcttgagtttgatgtaagattttatttagttgcaatcttgtttattatttttgatttggaaatagcatttttatttccatgggcaatttctctaggcaacatcggattacttggtttttcatcaatgatgatttttttattcatactaacaattggttttatttatgaatggaaaaagggcgctttagattgggaataaa

SEQ ID NO: 221203 - DNA, 862 bp, Unknown
  Bacterial polypeptide expressing nucleotide sequence isolated from the Sargasso Sea
tgtacaaaatgatattaaaaaaattatagcctattctacttgtagtcagttaggctacatgttctttgccgctggagttggtgcttacaatgtagcgatgtttcatctatttacccatgccttttttaaagctttgctatttttaggtgctggtgctgtaattcactcatttcacgaggaacaagatataaataaaatgggtggagttataaaaaaacttccatacacatatgtgctaatgcttattggaactcttgctttaacaggttttccttttttatcaggattttattcaaaagatgcaataatagaatttgcatacttaaaaggaaatggagttgggatgcttgcggcttttgtaggtatagttacagctttattaacatcaatttattcttggagacttatatttaaaacattccatggtaattataataataaagaacttagtattgataaagtacacgagtctccttttgttatgatagctcctttaattatcttagcaataggcgctatttttgcaggtatggcctttaaaggtttgtttataggtcatgaggtagcatatgaattttgggctcaatctataaaatttttagaaccactaagcacagatcatccaccaacgtggtttttgttgttaacacctatacttgttactgctgcgattccattttcttattatttgtatttaaaaaatacaaacatagtaaaaggattgaaagaaatgaatgcaccaatttatcaatttttagttaagaaatggtactttgatgaaatgtacgattatatattcgtaaatccttcaaaaaaaattggaaagtttttatggaaaaaagttggacggatcaataataga

SEQ ID NO: 221204 - DNA, 859 bp, Unknown
  Bacterial polypeptide expressing nucleotide sequence isolated from the Sargasso Sea
ggaacagtaaattatgaaggtgttttttctgaagttaataattttactaataatgatatttcatttgttggaataaaatttaatactataaatctaatttgcatacttttatttataggtgcaatgggaaagtctgcgcaaatctttttgcatacctggttaccagatgcaatggaaggtccaacacccgtatctgctcttatacatgcagccacaatggttactgctggtgtttttttagtagtcagatgttcacctatatatgagttttctgaatttgctttaaacattattactatagtaggaatgagcactgcattttttgctgcttcagtagcattagttcaaaacgatataaaaaaaattattgcttattcaacatgtagtcaattgggatacatgttttttgctataggcgttggagcatacaatgttgcgatgtttcatctatttacacatgctttttttaaagctctactttttttaggtgcaggatcagttattcattcttttcaaaatcagcaaaatatagatgaaatgggaggagtttggaaaaaaatgccatatacctggattttaatgattatagggacactagcattaactggctttccatttttatctggtttttattctaaagatgcaatcttggaatttgcatatttaaaaggaactacaattggctatttagcagcaggtgttggtgtattaacagcattgatgacctcaatatattcgtggagactattatttaaaacgtttcatggggcatacaaaaatacaaaaattaaatttgaatctatacatgagtcaccaatggaaaggataatacctttaattattttaagtatgggagcag

SEQ ID NO: 221205 - DNA, 784 bp, Unknown
  Bacterial polypeptide expressing nucleotide sequence isolated from the Sargasso Sea
tcttcattggttcatatttattctattggctacatgtcccatgatccacataaaccaagatttatggcttatttatctttatttacttttgcaatgctaaccctagtaacagctgataattttttacaattatttttcggatgggaaggcgttggcctttgttcatattttttaattggtttttggtacaaaaaagaaacagcaaatgctgcagcaataaaggcctttttagttaatagagttggcgactttggtttcgctctaggaattttcttgatattttatttttttggtacagttaattatacagaagtatttaatcaaattcctcagttaatagataaaaacataatatttttaggtgtcagttgcaattcaatagacctaatttgtttgcttttatttataggtgcaatgggaaaatcagcccaaatatttttacacacatggctacctgatgcaatggagggtccaactccagtttctgccttaattcatgctgcaactatggtaactgctggtgtttttttagtagttagatgttcaccaatttttgaatattcaattttagccttgaatattattacggttgtaggcatgtccactgcattttttgctgctacaattgcactagttcaaacggatataaaaaaaattattgcatactcaacttgtagtcaattgggctacatgttttttgcagcaggtgttggcgcttacaacgtagcaatgtttcatttattcactcatgcattttttaaagctttattatttttaggttcag

SEQ ID NO: 221206 - DNA, 370 bp, Unknown
  Bacterial polypeptide expressing nucleotide sequence isolated from the Sargasso Sea
atgatttataattttttgtcagattacctatctataataatttttttatttattgcgttagctttaagtattggcttcatagctattaattttgctttatcgcctaaaaatcctgatcctgaaaagctatctgcttatgaatgtggttttgaggcctttaatgactcaagggtaaaatttgatattagattttacctggtagccattttgtttataatttttgatttggaaattgcatttttattcccatgggcaatttcacttggcaatataggattactaggttttttttctatgatgttttttctagggattttgacaattggttttatatatgaatggaaaaaaggggctttggaatgggaataga

SEQ ID NO: 221207 - DNA, 703 bp, Unknown
  Bacterial polypeptide expressing nucleotide sequence isolated from the Sargasso Sea
atggaatacgcgatattgtttttaccattaatcggttctcttataggctatttgggcaagtcaactacaaaatattttgctgaaatctctacgagtttattcgtcagtatatcagcggtgctctctattgttgtcttttggaatggaattcagaacgatagttatggaaattataaaatttttgaatggataagttctggtgggtttatagcaaattggtcaattaaaattgatccactaagttcgataatgctagtagttgttacttttgtatcagcattagttcatatttattctattggatatatgagtcatgatcctcacaaaccaagatttatgtcttatttatcattatttactttttcaatgttagctttagttgtatcagataacttcttacaacttttttttggatgggagggtgttggattatgttcttatcttttaattggtttttggtacaaaaaagagactgcaaataatgcagctattaaagcatttatcgttaacaggataggagattttggtttagcaattgcaatatttttaatcttcttcttttttggtactattaattttgaagaaacctttcaggttacaagtcagtttaccgaaaaaaaaattatttttttgggctttgaggcaaacttaataacattaatttgtattttcctttttattggagcgatgggaaaatctgctc

SEQ ID NO: 221208 - DNA, 438 bp, Unknown
  Bacterial polypeptide expressing nucleotide sequence isolated from the Sargasso Sea
tcccaatgtttgtagttttttttatttcaacgctagcagaaacaaatagggctccatttgatttgcctgaaggagaatccgaattagttgctggctacatggtagaatattcctcaatgagctttgctttattctttctaggtgaatacgcaaatatgatacttatgagtgcaatgacttcagttttatttttgggaggttggttgccattatttgatattgccccctttaattatataccaggacctatttggttaattttaaaaatttctctatgtttattcgtttttctttgggtaagagctacaacaccaagatataggtatgaccaattaatgcggttaggttggaaggtatttttacctttctctttattatggctagttttaacagcaggcttcttagtttatacaggtaatgcacctgttttatattagg

SEQ ID NO: 221209 - DNA, 370 bp, Unknown
  Bacterial polypeptide expressing nucleotide sequence isolated from the Sargasso Sea
atgttatctgattttcttaaagattacttaccaattataatttttttagttatagctctggggctaagttgtgcgtttgtagtaattaatttcattttatcgccaaaaaaacctgatccagaaaaactatcagcttatgaatgtggatttgaaccttttgaggattcaaggcttgagtttgatgtaagattttatttagttgcaatcttgtttattatttttgatttggaaatagcatttttatttccatgggcaatttctctaggaaacatcggattacttggtttttcatcaatgatgatttttttattcatactaacaattggctttatttatgaatggaaaaagggcgctttagactgggaataaa

SEQ ID NO: 221210 - DNA, 793 bp, Unknown
  Bacterial polypeptide expressing nucleotide sequence isolated from the Sargasso Sea
atgattcattctattgttcttttgcctcttgcaggatttataatttcttgtttactttctttttttaagagtgatcaaactttagatcgtatttcacaagttattacttcaatatttatttcggtttcagcttttttatcattttacttatttgtcaataatctctcagatccacaagtttacaaatttactttattcacatggattacatctggtgaattatctgtgaattggtctttatacatcgatgctgttacaagagtaatgctcgttgttataacttctgtttcagcgcttgttcacatatattcaattggatatatgtcgcatgacgatagtaagccaagatttatgggttacttatcactgtttacatttgcaatgatcatgcttgtaacagctgataacttcttacaattattttttggctgggaaggtgtgggtctcgcctcataccttcttattggcttctggtataaaaagccctctgcaaacgcagcggcaataaaagcatttattgttaatcgtgtaggggattttggtttagctcttggcatcttcactatctacatggtttttggatctattgattatcaagttgtttttgaaaatgctgaaagatttaatgaaacgaattttagtttcattggatacgaaattaatgcaattacattaatttgctttctattatttattggcgcaatggggaagtcagctcaattatttcttcacacatggttacctgatgcaatggaaggaccaacgcctgtatcagctttaatacacgccgcta

SEQ ID NO: 221211 - DNA, 697 bp, Unknown
  Bacterial polypeptide expressing nucleotide sequence isolated from the Sargasso Sea
atggaaatttcgattatagcattaccattaattgcatcaattttatctggattctttggtaagtttataggtgacaggaattctgaaattattacaagtttattagtatcaatatcggctgttttttcagcgattgtattctatgaagtaattttcaatcaatacgaggaaaatattacaatcgctacatggattaattctggatcattagaggtaaactggtcaatgaaaatagatgcattgtcagctgtaatgttggtagtagtaacttttatttctgcactagtccatatttattcaattggatacatgtcacacgatcctcacaaaccaagatttatggcctacttatcactatttacatttgcaatgttaatgttggtaacagctgataattttatacaattattttttggatgggagggcgtaggactttgctcttattttttgattggtttttggtttaaaaaagaaacagcaaatgcagcagcaatcaaagcatttgttgtcaatagggttggagattttggttttgcattaggtatatttttaattttctatttatttggtacagtcaactatacggaagttttcagtcaaatcccaacaatcgtagatgaaaaacttaattttttaggtattcaaattaaagctatcgatttaatttgtatattattgttcattggagcccatgggt

SEQ ID NO: 221212 - DNA, 970 bp, Unknown
  Bacterial polypeptide expressing nucleotide sequence isolated from the Sargasso Sea
tatctttggtacatttttgatccaaatactgcagaatttcagtttgttgaaaatagattatggcttaaaggatttattaattataaagttggcatagatggaatatcaatcttatttattattttatcaacattaatagcttcattgtgtattgtttcggtaaacagcactgtaaatattaaattaaaagagtttttagttgccatattattaatggaaagtttaatgataggtgttttttgttctttagatttagtaattttttatttattttttgaaggtggattgattccaatgtttttaattataggtatttggggaggcccaagaagagtttattcagctttcaagttttttttatttacattattaggatcagttttgatgttggtggcaattatatctatatactggattaacggaacaactgatattactgaactatataaactaggcattgatgcaaaatatcaaaatttattatggttagctttttttagttcttttgcagtaaaaacgcctatgtggccagtccacacttggttaccagatgctcatgttgaggcacccacagcaggatcagttctgttagcagctatcttgctaaaaatggcaggctatggttttattagattttcaattggattatttcctgtagcatcagaaaattttgttccattgatttacgcattaagtttaatagcaataatttacacatcttttgtagctctaatgcaagaagatatgaaaaaattaatagcatattcttctgttgctcatatgggctatgttacacttggcatttttactattactcaacaaggtttagaaggtagtatcattcaaatgattagtcatggtttagtgtcagcggcactatttttatgtgttggcgttgtttatgaaagaatgcattctcggctaatcaaaacctacggaggcattgtatcaataatgcctaaatacgcag

SEQ ID NO: 221213 - DNA, 370 bp, Unknown
  Bacterial polypeptide expressing nucleotide sequence isolated from the Sargasso Sea
aatgttatctgattttttgcaaaattacttgtctataataatttttttaattctagcattaggattaagttgtgcttttatagtagtaaattttattctttcacccaaaagacctgaccctgaaaagctttctgcgtatgaatgtggatttgaaccattcgaggattcaagaatggagtttgatgtaagattttatttggtggcaatattatttattatctttgatttagaaatagcatttctttttccatgggcaatttctcttgggaatattggtttattaggtttttcatcaatgatgatttttctcttcatacttacaattggttttatttatgaatggaaaaaaggtgctttagactgggaataa

SEQ ID NO: 221214 - DNA, 796 bp, Unknown
  Bacterial polypeptide expressing nucleotide sequence isolated from the Sargasso Sea
ctgacatcttttataataccgatatgtgttatctcttgtataaatagcattaaaaacagattaaaagaatttttgatcgctattctagttttagagacctttatgataggtgttttctgctccttagatttagtaattttttatctattctttgaggcaggtttaattccaatgtttttaattattggaatctggggaggaccaagaagggtctactcagcatttaaattttttctttttacgcttctagggtccgttttaatgttgattgcaataatttctatttattggataacaggaacaacagatgtgactgaaatctataaaataaaaataccagctgaatttcaaaatcttctctggttagctttttttagctcatttgcagtcaaaatgccaatgtggcctgttcatacatggttaccagacgcacatgttgaggccccaacagctggctcagttattcttgctgcaattcttcttaaaatggctgggtatggtttcctaagattttcagttggaatgtttccaattgcttcagaatattttacgccattagtttttacattaagtgtaatagcgataatttatacatcgcttgtagcgcttatgcaggatgatatgaaaaaattgatcgcttattcatctgtggcacacatgggatatgttacacttggaattttcacctttaataaacaaggaatagaaggcggtataattcaaatgtttagccacggtttaatctctgcagcattatttttatgtgttggagtactttatgatagagcacattcaa

SEQ ID NO: 221215 - DNA, 505 bp, Unknown
  Bacterial polypeptide expressing nucleotide sequence isolated from the Sargasso Sea
ggttgttgttacttcagtttctgctttagtccatgtttattcaattggatatatgtctcatgatccacacaaacctagatttatggcttatttatcattgtttacttttgcaatgttaatgttggtgacttccgataactttattcaattattctttggttgggaaggggttggtctctgttcttactttttaattggtttttggtttaaaaaagaaacagcaaatgctgcagcaataaaagcatttgtggtaaatagagtaggtgattttggttttgctttaggaatatttttaattttttatttatttggaacagtaaattattctgaagtttttgaacaaatacccacaattacagatagagaattagtttttttaggcattgaggtaaatgcaataaatttaatttgtatacttttgtttgttggtgcaatgggaaaatctgcgcaaattttactccacacttggttgccagatgctatggaaggtccaacaccagtctca

SEQ ID NO: 221216 - DNA, 901 bp, Unknown
  Bacterial polypeptide expressing nucleotide sequence isolated from the Sargasso Sea
atcggatgttaacagccttttttgcagcacaattgctcttgttcaaaatgacataaaaaaaataatagcctattcaacttgcagtcaattgggatatatgttttttgcggcaggattgggtgcatatcatgttgctatttttcatttgtttactcatgcattttttaaagcacttctttttcttggagcaggctgtgtaattcattcatttcatgaggaacaagatatacgttcaatgggaggcgtgtggaaaaaaataccatacacatatgctttgatgatagttgggacgcttgcgttgactggatttccttttttatcaggttattattcaaaagatgcaattatagaatttgcttttttaaaaggatcttcacttggatatttagctgcaactgtaggtatttttacagcttttttaacagcaatatattcatggagattaatatttaaaacatttcatggaagatataataataaaaaaaataatttaagtactattcacgagtcatcattaacaatgctgatcccatcatgctttcttgctctgggagcaattattacaggtatattgttaaaaaatttgttcataggtcatgatactcaattttggagtggatcaattttatttttacaaagtttccatcatgatcatttacctaactggttaattttattgacacctataactgtgattttagcaataccgattggatattatttatttattcaaaacgaaaaaatattaaaaaatttaattttaaaatatcagtttttatataattttcttttaaataagtggtattttgatgaattatatagttttatttttgtaagacctgttaaaaagataggtttatttctttggaaaaaaggtgatgttaatattatagatcgctat

SEQ ID NO: 221217 - DNA, 891 bp, Unknown
  Bacterial polypeptide expressing nucleotide sequence isolated from the Sargasso Sea
tttacgcttgtttcagcgttggttcatatctactcaattggttatatgtctcacgatcctcacaaaccgaggttcatgtcttatttatctttatttacatttgcaatgttagtgctggttacttcagacaattttttacaattattctttggatgggaaggagtaggtctttgttcatattttttaattggtttttggtttaaaaaaaaagctgcaaatgcggctgctattaaagcttttgtagtaaatagagttggagattttggttttgctcttggtatttttttaattttttattattttggaacagtcagttacgatgaggtattcaatcaaattcaaactttgaatgcaaaaaatataaattttcttggatttgaatttaaatcaatagatttaatttgtatattgttatttataggtgcaatgggaaaatcagcccagatttttttacatacttggttacccgatgcaatggaaggaccaacacctgtgtctgcattaatccacgctgcaacaatggttactgcaggtgtttttctagttgtaagatgttctcctatttatgaatattcagaattagcactcaatataattactgttattggaatgagtacagctttttttgctgccacaattgcattagtccaaaccgatataaaaaagataattgcttattcaacatgtagccagcttggatatatgttctttgcaactggtgtaggcgcatataacgttgcaatgtttcatctatttactcatgctttttttaaggctttactttttttaggagctggttctgtaatacactcttttaaagatgaacagaatatcgaaaaaatgggtggggtttacaaaaagattccttacacttacgccttaatgctagtg

SEQ ID NO: 221218 - DNA, 892 bp, Unknown
  Bacterial polypeptide expressing nucleotide sequence isolated from the Sargasso Sea
gatagaaaatggttagttggttttattaattataaagtaggaattgatggtatttcaattttgtttgtagttttaacaacttttattactccgttatgtataatatcagtgaataatactattaaaagcagattaagagattttctaatagcaattttaataatggaatcttttatgataggagtgttttgtgcactagatttatttgtattctatttattttttgaagcgggtttaatcccaatgtttttaataataggaatttggggaggccctaaacgagtttattcagctttcaaattttttctatatactcttttaggatcagtattgatgttagttgcaataatttctatttattggataacaggcacaactgatgttgttgaactttatgaactcggtatcgacactaagtatcaaaatcttttatggctagcttttttcagttcatttgcagttaaaactccaatgtggcctgttcacacgtggttaccagatgctcatgtagaagctccaactgcaggttctgtgttattagcagccattcttcttaaaatggctggttatggatttattagattttcattaggactatttcctattgcatctgatttctttacaccattaatttactttctgagcgttattgcaataatttttacttctttaatagctttaatgcaggaagatatgaaaaaactaattgcttattcatcagttgcacatatggggtttgtaacccttggtgtttttacaattaatcagcaaggaattgaaggaagtataattcaaatgataagtcatggtcttgtttctgcagcattgtttttatgtgtaggagtagtttatgacagaatgcattcaagattaataaattcttatggaggaa

SEQ ID NO: 221219 - DNA, 373 bp, Unknown
  Bacterial polypeptide expressing nucleotide sequence isolated from the Sargasso Sea
tatgagccctgagatatttttagaggattacttttcaattgttttatttttgctaatagcattaattttaagctgtggttttatttttttaaactttatgctttcaccaagtaaaccagatcctgaaaaactctcaccttatgagtgtggttttgaaccatttaatgattcaagaatggaatttgatgttagattttatttagtagcaatcctttttataatatttgatttagaaatagcttttctttttccctgggcaatatctttagggaaaattgggatttttggttttgtatcaatgatgatctttttagcaattctaacaataggttttatatatgaatggaaaaagggagcacttgattgggagtaa

SEQ ID NO: 221220 - DNA, 862 bp, Unknown
  Bacterial polypeptide expressing nucleotide sequence isolated from the Sargasso Sea
gttgctataattggtatgataactgcaatttttgcagcttcagtagctcttgtacaaaatgatattaaaaaaataattgcatattctacttgcagtcaattaggttacatgttttttgctgccggcgttggcgcttaccatgtagctatatttcatttatttactcatgctttttttaaagcacttttatttcttggatcgggctgtgtaattcattcatttaacgaagagcaagatattcgttttatgggaggagtttggaaaaaaataccatacacttatgctttaatgatagttgggactttagcattaacaggttttccatttttatctggatactattcaaaagatgccattatagagtttgcttatttaaaaggtagtaacgttggttattttgcagccaccgtgggtatttttactgctttgttaacagcaatatattcatggagattaatatttaaaacttttcacggaaaatacaataataagaaaaataatttgagttcaattcatgagtctcctttaattatgttgctaccatcatgcttattggctttgggctccattataataggtatttcatttaaggaaatgtttataggttctgagacgcagttttggaataattcaattttatttttaaaagcaattcaatacatccaccctcctttatggttgcttattataacacccttacttgttgtatttactattcccgtctcatattatttatttgtaataaatagcaaaattttaacaaattttattttaaaaaataattttttatataattttttattgaacaaatggtattttgatgaattatacaatttaatttttgtagagcccatcaaaaaaa

SEQ ID NO: 221221 - DNA, 821 bp, Unknown
  Bacterial polypeptide expressing nucleotide sequence isolated from the Sargasso Sea
ttcttttgaccaatcaacgtctagttttcaatttgtagaagatagaacatggattgaaggatttattgattataaagtgggcgtagatggtatttcaattttatttataatattaacaacatttataactcccctttgtataatatctgtaaataattctgttaaaaatagattaagagattttttaattgcaattctaatcatggaaagtttcatgattggtgttttctgtgcacttgatttagttgtattctatttattttttgaagctggattaataccaatgtttttaattatcggtatctggggaggtgcaagaagagtttattctgcatttaaattctttttatacacattgttaggttctgttttgatgttagttgcaataatttcaatttattggattacaggaacaaccgacgtgattcaactgtatgaaattggaattgatgttcaacatcaaaatctattatggttagcattttttagttcatttgctgttaaaacacctatgtggccagttcatacatggttaccagatgctcacgttgaagcccctacagcaggatctgtattgctagctgcaattttgttaaagatggctggatatggttttataagattttctttaggtcttttcccagttgcatcagaggtatttacaccattaatttacaccttgagtgttatagcaatcatatttacttcactaatagctttaatgcaggaagatatgaaaaaattaattgcttattcatcagtagcgcatatgggctttgtaactttaggtatattcactttgcaacaacaaaggaattgaa

SEQ ID NO: 221222 - DNA, 805 bp, Unknown
  Bacterial polypeptide expressing nucleotide sequence isolated from the Sargasso Sea
atgttgagtaatattcctattttgtcttctataacatttttacctttgtttggcgctttaataattctgttaacgtgttcagatgatgagcagggtagaaaaaattcaaaatttgtagctttatggacaagtttgattacttttatactttctctttttattctatttaattttgataacgatttaaataactttcaatttattgaaaaagctagttggataccattgtcaaatatttcttatcatatgggtgttgatggtatctctcttccttttgttatattgtctacttttttaattcctgtttgtatattagctagttttcaaagtattaaaaaacaagttccattatttatgtcgctcttcttaattttagaagtgctgatggttggtactttttgtgcaatggatattctagttttttacattttttttgaagccgtgcttattccaatgtttttaattattggtatttggggtggtgtcagacgagtatattcagcctttaaattttttctttatacacttttaggctctgttttaatgttaattgcaattttctatattttttctaaaacagatactacagaaattaatgagattgcaaaattcagttttccatatgaagttcaaattctattatttttagcattttttgcttccttttcagttaaacttccaatgtggccagtacacacatggttacctgatgctcatgttgaggctcctactgctggatctgtaattttggcaggagttttacttaaaatgggtggttatggctttttaagattctccataccag

SEQ ID NO: 221223 - DNA, 700 bp, Unknown
  Bacterial polypeptide expressing nucleotide sequence isolated from the Sargasso Sea
gagctggctttatcaattattactataattggtatgagcacagcattttttgctgctagtgtagcgctagtccaaaacgatataaaaaaaataattgcctattcaacttgtagtcaactcggatatatgttttttgcagctggtgttggagcatataatgttgcaatgtttcatctatttactcatgctttctttaaagctttattatttttaggatcaggttcggtaattcactcttttaaagatgagcaggacataaataaaatgggtggtatctggaaaaaacttccttacacatacactttaatgattataggaactttagctttaacaggttttccttttctttcaggtttttattcaaaagatgcaattatagaatttgcatttctaagaggaaataatcttggttattatgcatcaagtataggtatatttacagccttattaacttcaatttattcttggaggttaatatttaaaacatttcatggaacttataataattcaaaaataaaaattgaagtaatgcacgagtctcctatgataatgctattgccattgataatcttagcagtgggagcaatttttgcaggtttcttatttaaagatttgtttataggtcatgaagcatcttatgaattttggtctaattcaattaaatttttgacaccattaagcacagaacatccctcctagt

SEQ ID NO: 221224 - DNA, 808 bp, Unknown
  Bacterial polypeptide expressing nucleotide sequence isolated from the Sargasso Sea
gcagataattttattcaattattttttggttgggaaggagttggtttatgctcttatcttttgataggattttggtttaaaaaggactctgcaaacaaggctgcaattaaagctttcctggtaaatagagtgggtgattttggatttgcattagggatatttttaattttttatctatttggaacagtaaattattctgaggtttttaatcaaattacaagtattacagacaaaaaccttgtttttttaggcgttacaatcaatgcaatagatttaatttgtttacttttatttgttggtgcaatgggtaaatcagcacaaatttttcttcatacatggttaccagatgctatggaaggtccaacacctgtttctgctttaattcatgctgcaacgatggttacagcaggagtttttttagttgtaagatgttcaccaatttatgaatactctgaactagccttaaatatcgttacaattgttggaatgagtactgcattttttgctgcatcagtagctttggtacaaaatgatataaaaaagataattgcttattctacttgtagtcaattaggctacatgttttttgctacaggcgttggtgcatacaatgtagcaatgtttcatttatttactcatgccttttttaaagccttattatttttaggatctggatcagttattcacgcttttaaagatgaacaaaatataaataacatgggaggggtgtggaaaaaacttccatacacttattgtctgatgatcatagggactcttgctttgacaggatttccatttttatctggtt

SEQ ID NO: 221225 - DNA, 860 bp, Unknown
  Bacterial polypeptide expressing nucleotide sequence isolated from the Sargasso Sea
catgtcaaatgatcctcatcaacctaggtttatgtcttatttatcattatttacatttgcgatgatagttttggttacttcagataattttttgcaattattttttggatgggaaggtgtagggctttgttcgtattttttaattggtttttggtttaaaaaaccacctgctaatgctgctgccattaaagcctttgttgtaaatagagttggggattttggttttgctttaggaatatttttagttttttatgtttttggaactcttaactatgaagaagtatttaaccaagtatctttatttacagataagaatttaaattttttaggtattgaactcaatgcaataaatttaatatgttttttattgtttattggagcgatgggtaaatcagctcagatttttttacatacatggttgccagatgctatggaaggacccacacctgtatctgcattaatacatgctgccacaatggtaacagcaggtgtctttcttattgttagatgctcacctatttatgagtattcaccaataatattgaatttcattaccattataggaatgacaacggctttgtttgcggcaacagtcgcattagttcaaaatgatataaaaaaaataattgcatattctacttgtagccaattgggttatatgttttttgcaactggtgtaggagcttataatattgcgatgtttcatttattcactcacgctttttttaaagctcttttatttttaggctctggctcagtaattcatgcgtttaatgatgaacaagatataaataaaatgggaggcatatataaacacttaccatacacatatacattaatgataattggaaccttagctt

SEQ ID NO: 221226 - DNA, 739 bp, Unknown
  Bacterial polypeptide expressing nucleotide sequence isolated from the Sargasso Sea
aatggtattgttttagctgatagtataaccatgatatatatattttgggagcttgtaggtttaagttcatacctaattattggtttttggtttgagaaaaattcagctgctatggctagtaaaaaagcatttttagttaatagggttggtgatatagggatgtttattggtattatgatgatttattatgtaggtgattctcattcttttaatttatctgatattattgaaaaagtaaaaaatacagaaattgattctacatatttaactattgcaggtattttaatatttatgggtgctgttggtaagtcagctcaattacctcttcatatttggcttccagatgctatggaaggtccaactcctgcaagtgctatgatccatgcggcaacaatggttgcagctggagtttatatgacattaagagtttttccaatattaacatttgaagcgctaacaattattgcatttattggtgcttgtactgctttatttgccgcaattattgctattactcaaaatgatattaaaaaagtattagcttattctacagttagtcaattagggtatatggtattagctataggtgttggttcttatttagctgccttctttcatttagttacacacgctatgtttaaagcttgtttatttttggcaagtggttctgttattcattcaatgcatcatagcttgcatgagcttcatgatcatgatacagatgctcaggatatgagaa

SEQ ID NO: 221227 - DNA, 370 bp, Unknown
  Bacterial polypeptide expressing nucleotide sequence isolated from the Sargasso Sea
atgacagcagattttttaaaagattatttaccaataatattgttcctaattatagcattaggattaagttgtgcttttgtagttatcaattatattttggctccaaaaaatccagatccagaaaagttatcagcatatgaatgtggatttgaaccatttcaagattcaagaatggaatttgatgttcgtttttatttggttgcaatactttttataatttttgatcttgaaatagcttttttatttccatgggcaatttctttgggaaatattggaattttaggctttacttcaatgatgattttcttattcatacttacaattggatttatttatgaatggaaaaaaggtgctttagactgggaataaa

SEQ ID NO: 221228 - DNA, 619 bp, Unknown
  Bacterial polypeptide expressing nucleotide sequence isolated from the Sargasso Sea
atggaatatactttagtatttttacctttgattggggctatattatcaggtttttttggacgttttataggtgaaagaaactcagaaattattactagtttattagtttcgatatctgcatttttatccttcataatttttaaagaaactattttaaataattatgaaaataatttagttataataaattggataaattctggttttttagatgttaattggtcaatcaaaattgatgcagtttcatctgttatgctagttgttgtttgtctagtatcttccttagtacatatttactcgattggttatatgtcacatgatccacataaaacaagatttatggcatatctctcattatttactttttctatgcttattttggtaacttcagacaactttttacaacttttttttggttgggaaggagttggtctttgttcatattttttaattggtttctggtttaaaaaagactcagctaatagagcagcaattaaagcttttttggtaaatagagttggtgattttggctttgcgctaggaatttttttaattttttatttgtttggtacagttaactataatgaagttttttctagagtacccgaattttgtaaat

SEQ ID NO: 221229 - DNA, 863 bp, Unknown
  Bacterial polypeptide expressing nucleotide sequence isolated from the Sargasso Sea
tacacctctatgtatactttcagttaacaatacaattaaaaatagattaagggattttttaatagcaatattattaatggaatcttttatgataggtgtcttttgttctttagatttatttgttttttatctattttttgaagctgggttaattccaatgtttttaattataggtatttggggtggacctagacgagtttattctgcatttaagttttttttatatactcttttaggttcagtgctaatgttagttgcaattatttcaatctattggatagcaggtacaactgatgttactaaactctatgatgttggtatagacactaaatatcaaaacttattatggttggctttttttagctcttttgcagtcaaaactccaatgtggccagttcatacttggttaccagatgcgcatgtagaggcaccgacagctggttcagtgttattagcagctattcttcttaaaatggcaggttatggatttattagattttccttaggattatttccatctgcatctgaatattttactcctttaatttatattttaagtattatcgctataatttttacctctttaatagctttaatgcaggaagatatgaaaaaattaatagcttattcttcagttgctcacatgggttatgtaactctaggtatttttacgattaatcaacaaggtatagagggcagtataattcaaatgataagtcatggtcttgtttcagcagcattatttttgtgtgttggtgttgtatatgacagaatgcattcaagattaataaatacctacgggggaatagtggagattatgccaaaatactctattttatttatgatatttactctaggtgctt

SEQ ID NO: 221230 - DNA, 801 bp, Unknown
  Bacterial polypeptide expressing nucleotide sequence isolated from the Sargasso Sea
tttgactttatttgtttggtattcttttgatagaaatatttctgaatttcaatttgttgaagaaaaaaattggataagtggtctaattaaatttaaagttggtatcgatggaatttctatacttttcgtaattttaacagcatttattgccccaatttgtattatatcttgcataaacagcatcaaggaaagaataaaagaatttttaattgcaattttggttttagaaacttttatgcttggagttttttgttctcttgaccttgttattttttatttattttttgaagctggtttaattccaatgtttattataattggtgtctggggaggatcaagaaaagtatattcagcgtttaaattttttctttatactcttcttggatcagttttaatgttggtagcaattataacaatttattggttaactggcacaactgacattgtagagatttttaaaattaaaatttctgaagaatatcaatatcttctatggttagcattttttagttcatttgctgtcaaaatgccaatgtggcctgttcatacttggttaccagatgcacatgttgaagcgcctactgcaggctctgttatattagcagctattttattaaaaatgggaggttatggatttttaagattttctataggaatgtttccagtagcatcagaatactttactcctttaatttattttttaagtatcattgcaattatttacacttcattagtagctttgatgcaagaagatatgaaaaaactcattgcatattcatcagtggctcacatggggttttg

SEQ ID NO: 221231 - DNA, 787 bp, Unknown
  Bacterial polypeptide expressing nucleotide sequence isolated from the Sargasso Sea
gctgcctgatgcccacgttgaagcccctacagcgggctcagtaatattagctggagttttattaaaaatggcaggatatggctttatccgtttttcaataggctttttcccagaagcctcagagttttttgctccactcatctttacactcagtattgtggctataatcgttacgtctttgatagcattagttcaggaggatatgaaaaagttaattgcttattcctctgttgcacatatgggatttgtaacgcttggaatttttacgtttactgttcaaggaattgaaggaagcattatccaaatgataagccacggcattgtttccgctgcattatttttatgtgttggtgtggtttatgatcgattacatacaagagaaatttcaaggtacggcgggttggtaaataaaatgccactttacgcatttacatttatgattttcattttggctagtcttgggttaccaggaacaagcggttttgttggagaatttttagtattactctcaatatttagtataaatacttattttgctgtatttgctaccactggcgttgtattagcagcaacatattctctatggctctatcgcagaatgattttcggtgccttgattaaagatgatttgtcagacatgttagatttaacccgaagagaaataattatattcgttccacttatcactctgacaatatttattgggatatatccaaaaccagtcatagatattatcgagccatcagcaaaaaaaattgtgaatcaagtaaacggtaaattaaattaa

SEQ ID NO: 221232 - DNA, 786 bp, Unknown
  Bacterial polypeptide expressing nucleotide sequence isolated from the Sargasso Sea
aatgattgattggccaataatttctgctactatttttttacctcttattgggtctttaataatttttttaattaaagaggatgaaacaacttctaataatataaaatgggctgcgctttggacctctataggaacttttgttttaagttgtttgatttggtttcagtttgatcactcaacttctcaatatcaattagtagaaaagtataaatggtttaatgattttaatttttattatcacgtaggtgtggatggaatttcattgttcatgattttattaagcacttttttaactcctttttgtattttagctagttgggaaaatattaagaaaagaattaaagaatatatgattgcttttcttttcttagagacagtcatgataggaatgttttgctctattgatattttattattttatgttttttttgaagcagttcttatacctatgtttttgattattggaatttggggtggtgaaagaagaatttacgcttcttttaaattttttctatatacccttttaggatcagtactaatgttaatagcgattatttttatctatcaaaaaactaattctatgaatattaattttttacaaggtaattatttttttagtaaaaaagttcaaatttatctttggctagctttttttgcttcttttgctgttaaaataccaatgtggccttttcatacttggctgcctgatgctcatgtagaggcaccaactgctggttcagttattttagcaggtgttttgttaaaaatgggaggatatggatttat

SEQ ID NO: 221233 - DNA, 370 bp, Unknown
  Bacterial polypeptide expressing nucleotide sequence isolated from the Sargasso Sea
atgttatctgattttcttatagattacttaccaataataatttttttattcatagctctaggattgagttgtgcgtttgtggtaattaattttattctttcgccaaaaaaacctgatccagaaaaactatcagcttatgaatgtggatttgaaccttttgaggattctaggcttgagtttgatgttagattttatttagttgcaatattatttattatatttgatctggaaatagcatttttatttccgtgggcaatttctctaggcaatattggattacttggtttttcatcaatgatgatttttctattcattttaacaattggttttatttatgaatggaaaaaaggcgctttagactgggaataaa

SEQ ID NO: 221234 - DNA, 760 bp, Unknown
  Bacterial polypeptide expressing nucleotide sequence isolated from the Sargasso Sea
atgtatctattgttagtttttttgccctttttcgggtttttactagtgactttattcggccgcttctttggatatagaggagccccgttattgagtactagtacagtattggcatctgcagttctatcattttgcgccttgtacgaggttggagtttgtggaagtccctgctatattcaatttttaccttggtttcaaactgaaatgtttgtagcttcttggggatttctttttgacagtttaactgttattatgtgtgttgttgttacttttgtaagcagcctcgttcatatttattcaatttcgtatatgggcgaagatcctcatttgccaagatttatgtcttatttgtcagtatttacattttttatgttaatgttagttacttcagacaattttattcaaatgttttttggttgggaaggggtaggtgtagcttcttacttgcttattaatttttggtttaccaggttacaagcgaataaatctgcaattaaagcgatgttagtaaatagagtcggggattttggattagcgcttgggatcatgacaattttttatacatttaaatcagtcgattttgagactgtttttgcgtgtgcatcagagtttgcaaatcactccattattttttttcatctggaggtccatactttaacttgcattagtttgttgttgtttattggagctatcgggaaatcagctcaacttggcttacatacttggttgcctgatgcgatggaaggaccaacccccgttc

SEQ ID NO: 221235 - DNA, 211 bp, Unknown
  Bacterial polypeptide expressing nucleotide sequence isolated from the Sargasso Sea
tgatgatgccagaggaagatttgacgtaagattttatttggtagctattttatttataatttttgatttagaagtcgcttttctctttccttgggcaatttctttgggttcaataggcctttttggtttctggtccatgattatatttttgctaattttaactataggtttcatttatgaatggaaaaaaggggccttggaatgggaatag

SEQ ID NO: 221236 - DNA, 769 bp, Unknown
  Bacterial polypeptide expressing nucleotide sequence isolated from the Sargasso Sea
gcagcaacaatggtaacagcaggggtgtttttgattgttagatgctcacctatatatgaatactctccactagttctcacagtaataaccataattggaatgactactgctttctttgcagcaacagtcgcacttgttcaaaatgatataaaaaaaattattgcttattctacttgtagtcagttgggctatatgttttttgctgctggagtaggtgcttacaatgttgcgatgtttcatctatttacacatgccttttttaaagctttgctatttttaggagctggtgctgtaattcattcgtttcatgaggaacaaaatataaataaaatgggtggagttataaaaaaacttccatacacatatgtgctaatgcttattggaactcttgctttaacaggttttccttttttatcaggtttttattctaaagatgcaataatagaatttgcgtacctaagaggaaatggagttggaatagttgcagcttttgtgggtattgttacagctttattaacatcaatttactcctggagacttatttttaaaacgttccatggtaattttaataataaagaacttagtgttgataaaatacacgagtctcctttggttatgatcgcgcctttagtaatcttggcagtaggagctatttttgcaggtatggcctttaaaggtttgtttataggtcatgagatagcatatgaattttggggtaaatctataaaatttttagaaccactcagcacagatcatccaccaaccatgg

SEQ ID NO: 221237 - DNA, 602 bp, Unknown
  Bacterial polypeptide expressing nucleotide sequence isolated from the Sargasso Sea
aatggaaatttcaataattgcattacctttgatagcgtcaattatctcaggtttttttggaaaatttattggagatagaaattctgaaattgtcaccagccttttagtgtcaatatcagctattttttcttgcattgttttttatgaagtagtgcaaaatcaatacgaggataacataattatcgcaacctggattaattcaggctctttagatgttaattggtcaatgaaaattgatcctttgtcagcagtaatgttagtggttgttacctctgtttcagcactagttcatatttattcaattggatatatgtctcatgatccacataaaccgagatttatggcttatttatcactttttactttcgcgatgctaatgttagtaacttcagacaattttatacaattattttttggttgggaaggagtagggctttgttcctatttcttaatagggttttggtttaaaaaagataccgctaatgcagcagcaataaaagcttttgttgttaatagagtcggtgattttggatttgctctaggtatatttttgatattctatttatttggaacagtaaattattctgaggtttttgaacaaa

SEQ ID NO: 221238 - DNA, 431 bp, Unknown
  Bacterial polypeptide expressing nucleotide sequence isolated from the Sargasso Sea
catttttccaatgttcgtaattttttttatatcaacattagccgaaactaatagagctccctttgatttgcctgaagcagagtctgaattagttgcaggctataacgttgaatactcgtcaatgtctttcggtttatttttcttgggtgaatatggaaacatgattcttatgagctcaatgtcaactattctctttttaggaggttggttacctccttttgactggtatttatttgaatatataccaggatttatttggtttatctctaaagttgtcctcttgctgttcgttttcttatgggttagagcaactcttccaagatacagatacgatcagttgatgacgctaggttggaagttatttcttcccttgtctctactttggattataataacttcatcatttctaattataaaagattatgtctagg

SEQ ID NO: 221239 - DNA, 475 bp, Unknown
  Bacterial polypeptide expressing nucleotide sequence isolated from the Sargasso Sea
aatggaatatctgattttatttttacctctaataggagctgtaattagtggtttttttggaaagaaaataggagatagaaattcacaattattaacaagtttgtttgtaagtctctccacaatactatcttttgtagtattgtataaagttataagttcagactatacaaacaatcttgttatagctacatggatcaactctgggacgttaaatgtaaactggtcaataaaaattgatgccttatcagcagttatgttcgttgttgtaaattttgtttcagcattagtacatatttattcaattggctacatgtcacacgatcctcataaaacaagatttatggcgtatttatccttatttacttttgcaatgttaactttggtaagttcagacaactttattcagctattttttggttgggaaggagtaggcttatgctcatattttttaattggattttggtttaaaaaagaa

SEQ ID NO: 221240 - DNA, 370 bp, Unknown
  Bacterial polypeptide expressing nucleotide sequence isolated from the Sargasso Sea
atgatttataactttttatctgactacctatcaataataatatttttatttatagctttatttttgagcataggttttattgtcataaattttctatcttctccttcaaatccagacccagaaaaattatccgcatatgaatgtggttttgatccttttgatgactcaagaatggaattcgatgtaagattttacctagttgctatattattcatcatttttgatttagagatagcatttctttttccttgggctatctctcttggagcaattggttatctaggtttttggtctatgatgattttcttaggagttttaacaataggttttatttatgaatggaaaaaaggagccttagaatgggaataaa

SEQ ID NO: 221241 - DNA, 835 bp, Unknown
  Bacterial polypeptide expressing nucleotide sequence isolated from the Sargasso Sea
aaaaaatgttgcaattttctcatctttggcaaattttttgttatctttttttttatggtattcttttgatactaatatatctgactttcagtttgttgaagaaaaaaattggattaataattttataaattttaaattaggtgtagatggtatctcaattttatttatattattgactacttttatagctccaatatgtattttttcgggaattcatagcataaaatttaagattaaagagtttttaatttctattttattaatggaaactttaatgctgggagttttttgttctcttgatttagttattttttatttgttttttgaaggaggtttaataccaatgtttcttataattggtatatggggtggtccaaaaagagtttattcggcttttaaattctttttatttactttgctaggctcagttttgatgttggtagctattatttctattttttggattactgggacaacagatgttactaaattattagatataagaattcctgtagaatatcagtatatactttggttagctttttttagttcattcgcagtaaaaatgcctatgtggcccttccacacatggttgcctgatgcccacgtcgaggcaccgaccgcaggctctgttattctagcagctatattattaaagatggccggctatgggtttatacgcttttcaatagggttatttccagtagcctcagattattttacaccattaatttattcattgagcgttattgcaataatttacacatctttagtagctttaatgcaagagaatatgaaaaaattaatagcatattcatccgtagctcacatgggt

SEQ ID NO: 221242 - DNA, 634 bp, Unknown
  Bacterial polypeptide expressing nucleotide sequence isolated from the Sargasso Sea
aatggaaatctcaatcattgcattacctttaatagcatcaattatttcaggtttttttgggaaattcataggagatagaaactctgagattgtaactagtcttttagtttcaatatcagcgattttttcagcaattgttttatacaatgtcattcaaaatcaatatgaagataatattgtaattgctacttggattaattcaggatcattagatgtcaactggtctatgaaaatagactctttatcagctgttatgctggttgttgttacttcaatctctgctttagtccatatttattctataggttatatgtctcatgaccctcacaaaccacgatttatggcctatttatcattgttcacatttgcaatgttaatgcttgtaacatctgataattttattcaattattttttggctgggaaggagtaggtctttgctcttattttttaataggtttttggtttaaaaaagatacagctaataaagcagcgattaaagcttttgttgtaaatagagtaggtgattttggatttgcccttggaatatttcttattttttatttgtttggaactgtaaattattctgaagtttttcaagaaattccaaccataatagataaaaatcttattttt

SEQ ID NO: 221243 - DNA, 745 bp, Unknown
  Bacterial polypeptide expressing nucleotide sequence isolated from the Sargasso Sea
attttttaactggggtatcgcagtcaattcactgactttgattatgttaactttagttttaacagtttcggcacttgttcatatttattctattgaatatatggctcacgataagtctaaaactcgttttatgacttacttaagtttatttactttctgtatggtcgctttagttgttagtgacaacctcattcaattgttctttggttgggaaggagtaggtctagcttcttatctgttaatcggtttttggcaccataaaaaatcagcaaacctagctgcaatgaaggcatttttagttaatagagttgcagattttggttttttaatcggtatagccactctttatatctttttagatactttatcaatcaatgaaatagttcaaaatcgagagtacttacctttattccaaattaatttctttggctttagtatagatactctcaccttcgcttgcttctttttatttattggggcgatgggtaagtctgcacagtttggttttcatacatggctcccagatgctatggaaggaccaactcctgtttcagctttaattcatgctgcaactatggtcacggcaggtgtatttcttactgtaagattttctgagttaatggtgatgtctgattttgtcatgacatttattttaatcattggattactcactgctttctttgcagcatcagtaggcttttttcaaaaagatataaaaaaggtcattgcttattctacttgtagc

SEQ ID NO: 221244 - DNA, 894 bp, Unknown
  Bacterial polypeptide expressing nucleotide sequence isolated from the Sargasso Sea
aatgggggaaataaaaggcaatcttctaactctggccggtcttggtctattcatgggagcagttggaaagtcttctcaatttccactgcatatctggctcccggatgcaatggaaggaccaactcctgtttctgcattaatgcatgcagctactatggttgcagcaggcgtttatcttacggttaggctgtttccaatatttacacctgatgctctggtcacaattgcatatgttggtggttttacagccatctttgcggcaacaatagcaattactcaaaatgatataaaaaaagtattggcatactcaacggtaagccaactgggttacatgattttagctgttggcgttggaaattatacagcagcattttttcatttattgacgcatgcaatgttcaaagcttgtcttttttatggctcaggatcagtaattcatgcgatgcatcattcgttacacgaccttcatgatcacgataccgatccgcaggatatgagaaatatgggtggctttcacaaaaaaatgccaataacaagcacgacaatgactttagcaactttggctattgctggcgttccttttttctctggttttttatcaaaagatgcaattttagctgggaccttatattttgtagatcaaaacccacaacacacgattttagcattctttggctttggagctgcagcaattactgcattttatatgtttagattgatatttttaactttccacggtgagccaaaaatgccaaaagtatatgatgggattcacgagtcgccaccacttatgactgctccattagtaatattggctgcgcttagtacttatattttttacacacttcccattaatttgattccatggaaggattatggctggtttaccaaact

SEQ ID NO: 221245 - DNA, 370 bp, Unknown
  Bacterial polypeptide expressing nucleotide sequence isolated from the Sargasso Sea
aatgatttataactttttatcagaatacttatccataattctctttttatttatcgctttaatattaagcataggttttattctagctaattttttagcttcaccaagcaatcctgatccagaaaaactatctgcttacgaatgtggttttgaggcattcggggactccaggatggaatttgatgttagattctatttagtagctattttatttataatatttgatttagagatcgcatttttatttccttgggcagtgtcattaggcaacatcggagctttgggtttttggtcaatgatgattttcttagcaatattaacaattggttttatttatgaatggaaaaaaggagctttagaatgggaatag

SEQ ID NO: 221246 - DNA, 895 bp, Unknown
  Bacterial polypeptide expressing nucleotide sequence isolated from the Sargasso Sea
gattaatattcaaaagagagtcaaggagtatatgctgtcttttttattcctagaaactgttatgattggcatgtttgcgtctattgatatacttttattttatattttttttgaagctgttttaattcctatgtatttgattattggaatttggggaggggatagaagaatctacgcatcatttaaatttttcttatacacacttttaggatcagtcttaatgttgattgcaataatagtaatgtacattaatacaaattctatgagtattgaatttcttcagggaaattttttttcttttaacactcaaatttttttatggcttgccttttttgcttcttttgcagtaaaaattcctatgtggccttttcatacttggcttccagatgctcatgttgaagcccccaccgcaggctctgttattttagcaggggtacttttaaaaatgggtggatatggatttatacgtttttctgttggcatgcttccagaagcaacagaattttttgtaccactgattatgactcttagtatagttggaattatttatacctctttagtagcattagcacaaacagatataaaaaaacttatcgcatattcttcaattgcacatatgggaattgttactattggaatttttttagttaaccaacaaggtttagaaggtgcaatgatgcaaatgattagtcacggtatagtgtctgctgctttatttttgtgtgttggagttatttatgatcgaatgcatacaagagaaataaagttttacggcgggttagttcagcgcatgcctttatatgccactgtatttatgatttttatgcttggctcagttggattaccaggaacaagtggttttgttggggaatttttagtaattgttggcgccttt

SEQ ID NO: 221247 - DNA, 789 bp, Unknown
  Bacterial polypeptide expressing nucleotide sequence isolated from the Sargasso Sea
ttaattgcaatattaatattagaaacttttatgattggagttttctgttctcttgatttagttatcttttaccttttttttgaagctggattgatacccatgtttctaataattggaatttggggtggttccagaagaatttattctgcatttaaattttttctgtttactttattaggatcagttttaatgttagttgccataatttcaatttattggattacaggaacaactgatgttatccaaatataccaaattaaaattcctacagaataccaatatttactttggttagcttttttcagctcatttgcagttaaattgcccatgtggcctgttcatacctggttgccggatgcacatgtggaagcacccaccgctggttcggtaatattagcagctattttgttgaaaatgggaggatacggttttttaagattttcagtgggaatgtttccggtggcatcagagttttttgttccattaattttcaccttaagcatagtcgcaataatatacacatcactcattgcgctgatgcaagaggatatgaaaaaattagttgcttattcctctgtagcgcacatgggttttgttacgttagggatttttacttttaataaacaaggtattgaggggagtatacttcaaatgtttagtcatggacttatttctgcagctctttttttaagcgtaggcgttctttacgacagatttaattcaaggttaataagttcttacggaggaattgttaatattttaccaaaatactcgtttattttaatggtt

SEQ ID NO: 221248 - DNA, 911 bp, Unknown
  Bacterial polypeptide expressing nucleotide sequence isolated from the Sargasso Sea
tttattattttacgttttttttgaagcagttcttattccaatgtttttgataattggaatttggggtggtgaaagaagaatttatgcttcttttaaattttttttatatacccttttaggatcagtactaatgttaatagctatcatttttatctatcaaaaaactaattctatgaatattaattttttacaaggcaattatttttttagtaaaaaagttcaaatttatctttggttagctttttttgcttcttttgctgttaaaataccaatgtggccttttcatacttggcttcctgatgcccatgtagaggcgcccactgctggttcagtaattttagcaggtgttttgttaaaaatgggaggatatggatttattagattttctctaggcatacttcctgaagcatcagctttctttgtgccgttaattattattttaagctctatagccattatatatacttcattagtagcattagcccaagaggatataaaaaaacttattgcttattcctctgtcgctcatatgggactagttacgataggaatatttatagttaatcaacaaggattagaaggagccatgattcaaatgattagtcatggaatagtttcagctgctctttttttatgtgttggcattatctacgatagaatgcatacaagaaatataaatttttacggaggtttggttaataaaatgccaaaatattcagttgtttttatgctgtttgttttagcctcgattggattacctggtacaagtggttttataggagaatttttggttattttaggagcatttcaaaaaaattcatttattgcattatttgcagctcttggaattatattaggtgcgatttatatgttatatttatataaaaaaattatttttggcactttagaaa

SEQ ID NO: 221249 - DNA, 868 bp, Unknown
  Bacterial polypeptide expressing nucleotide sequence isolated from the Sargasso Sea
cccccagccgacgcaatagttcacgtagaacatcatggcgatggtcatggcgatggtcatggcgatggtcatggcgacggtcatggcgacggtcatggcgacggtcatggcgacggtcatggtgacggtcatggtgatgatcatggtgataaacacgaagcagcagggggtcactatgacgacggtcatgggggaggacactcaagcccgctaattcgaccggtcatatcgacgttctcgcaatggtggtcgaactcgggtatggacttcgccgtcggaactcttgttgacggccagaccgtccttctactcatggtcgtcgcaaccatctcgttactggttcacatctattcgactgaatatgtcaaaggtgaccgtagatacgttcactactacgcgtttttaagtctcttcacggcggcgatgctcttctttgtgatggctcaaaacatcatccaactcatagtcggttgggaacttgttggtgtttgctcattcgcattaatcggtcactggtgggaagagaaacccaataccgatgcagcacttaaggcctttcttactaaccgcgtaggcgatgtcggacttctcgttggaatgattgtgctctggggcacctttaagacttttgatatcgatgcgatcaacaccctcatatcagccgatcccggcgctcaccactttgcgctgctgatcgcagcatgttgtctcatggctgcggtcgcatcgaaatcgggacagttcccgctccacacgtggttgcccgatgctatggccggcccaaccccggtgtcagcactaatccacgctgccacaatggttgtagctggcgtgtacatgatcgctcgtctatatccagtcttttacg

SEQ ID NO: 221250 - DNA, 820 bp, Unknown
  Bacterial polypeptide expressing nucleotide sequence isolated from the Sargasso Sea
agtaattttcttttatctttatatttacccatcaactttgataaatctatccctcattttcagtttgttaacactttttcatggtttaatagtgattctttaaggttttcacttggagtagacggtttgtcaatgccatttgtaattctttctacttttcttattttggcatgtatcatttttatacttccgcaatcaaaaaaaaatatgaaaatgtatttatcatcttttttgttactcgagtcttttttgattggaacttttagtgctattgatttattttctttttatatttttttcgaatctattttgattccaatgtatttaataatcggattttggggtggcgaaagaagaatttattcagcctataaattctttttatatacattattaggctctgtattaatgttaatagcaattatatttttatatcaagagtttggaacaattagcataccaaaattattagattttacattaccattttatatacaagtttggttatggatagcttttttcacatcttttgcagtaaaaatacctatgtggccatttcatacatggttgcctgatgcccacgttgaggcacctaccgagggttctgtaattttagcaggtgtgttattgaaacttggaggatatggtttcataaggtttaatttgtcaattttacctgatgcgtcaattttttttacgccatttatatattttctttcggttgtagcaattatatatacctcatatattgctttggttcaggaggatatgaaaaaacttattgcatattcatcagttgcccacatgggtttcgtcacat

SEQ ID NO: 221251 - DNA, 809 bp, Unknown
  Bacterial polypeptide expressing nucleotide sequence isolated from the Sargasso Sea
tccgagcgcggcgaacaagggcatattcctgcttgcgcctatccttaccttcacagtggcgcttgctgcatgggccgttgttcctttcagtgccaccgcagtactcgccgatatcaatatcgggctgctgtaccttctcgcgatcagttccctgtcggtttacggtgtggtgatgagcgggtgggcgagtaactccaaatatccgttcttttccgccatgcgcgctgcggctcagatgatttcgtacgaagtctcgatcgggtttatcctggtttgtgtggtgctgttcgcaggtacattcaatttgaatgatatcgtccgctctcagcaagggtttggcctcggcatcgtgaatgcctatgtcattcatccgttgctgtttccgatgtgggtaatgttcttcattagctcgctcgcggagacgcagcgcgttcccttcgatcttaccgaagccgaaagcgaactcgttgccggttatcagaccgaatattcctcgatgagcttcgcgctcttctggttgggtgaatatgccaacatcctgttgatgtgcattctcaatgccctgctgttctggggtggctggctgccgccgattgactgggcaccactgtattacgtgcccggcattgtctggcttctgctcaagactttcttcttcttcttcatgttcagctgggtcatggcgacggttccgcgctatcgttacgaccagctgatgcgcctgggctggaaggtgttccttcctatcagcctcggttttgttgttgtcatttcgggctatctgatggccacgggacatttcggatgag

SEQ ID NO: 221252 - DNA, 896 bp, Unknown
  Bacterial polypeptide expressing nucleotide sequence isolated from the Sargasso Sea
ttaattcatgcagctactatggtaacagcaggcgtttttctagtagttagatgttctccaatgtttgaatattctcaaacagcactaaatgttgttgctttggttggaatgatgactgcatttttcgcagcaacagtggcgcttgttcaaaatgacattaaaaagatagttgcatattcgacatgcagtcaacttggttacatgttttttgcagcaggaattggggcgtatcatgtagcaatttttcatttatttactcacgctttttttaaagcacttttatttctcggttcaggatgcgtaattcattcatttaatgaagagcaagatattcgatcaatgggaggagtttggaaaaaaataccttatacgtatgctttaatggtagtaggaacattggctttaacaggatttccttttttatctggttattactcaaaagatgcaattattgagtttgcgtatttaagaggcactaacataggatatttagcagccgtagtaggaatttttacagcattattaacagcaatttattcatggaggttagtttttaaaacttttcatggaaaatttaataataaagatagtaacttaagttcaatacatgagtctcctttaacaatgttgataccatcatgcctattggcaatcggtgcgattttaacaggtatagtatttaaagaaatgtttattggacatgacagcacgcagttttggaacacttcaattttatttttagaatctattaagtaccaccacccaccgatctggttgcttgttctaacaccgaccttggtggttattattattccagttgtatattatttatttatagaaaatgacaaaatcttaaaaaagctttgttttcaaaaaatcaatttttatataatttt

SEQ ID NO: 221253 - DNA, 736 bp, Unknown
  Bacterial polypeptide expressing nucleotide sequence isolated from the Sargasso Sea
atggattttccaataatttcgtctctcataattcttcccacaatcggtgctgtatttattttgtttggtaggtcatcttcaaattatattgctgctaaaaatatttctttatttgtttctttagcaaattttatactttcactttatctttggtatatatttgataaaaatattaatcaatttcaatttgtcgaggatagaatttggcttgaaggatttatcaattataaagttggaattgatggaatttcgatactttttataatactaacaacatttattactccattatgtatagtgtcagtcaactctacaattaaaaatagacttaaagattttctcgttgctattctgttcatggaaacaatgatgattggagttttttgctcactagatttagtaattttttatttattttttgaagctggattgattccaatgtttttaattataggaatatggggaggagaaagaagagtttattcagcatttaagtttttcttatacacgttgcttggttctgtattaatgttggtagcaattattactatatactggataacagggaccactgatgtcattgagctttataaaattggcattgatactaaatatcagaatttattatggctagcttttttcagttcttttgcagtaaaaactccaatgtggcccgttcatacttggttacctgatgcgcacgtagaagctccaacagctggttcagttttgcttg

SEQ ID NO: 221254 - DNA, 795 bp, Unknown
  Bacterial polypeptide expressing nucleotide sequence isolated from the Sargasso Sea
tatggaatatgcaatattatttttaccattagtaggctcaatattaactggttttttctctaaatatttagatgaaaaaatatctttatttctatcctgtgcattagttttaacatcagcaattttatcaatttttatcttttatcaagtaatatcatttaattatgaaaataatttgttgatatttaattggattgactcaggcgcacttaatgtaaattggtcaattaaaatagacgctttatcatcagtaatgctcgtagttgtttgtgtagtttcatctttagtacatatttattctattggatatatgtctcatgatcctcataaaccaagatttatgtcttatttatctctatttacgttttcgatgttggtcttggtgacctcagataattttatacagttattttttggttgggagggagttggtctatgttcgtattttttaattggtttttggtacgaaaaaaaatcagctaatgccgcagctatgaaagcttttttagtaaatagagttggagattttggattagctttaggaatttttcttattttttatttatttggtactgttaattataatgatgtatttttaaacatccctaattttcaaaatagcgaaatatcacttgttggtttacagttaaactcaataactttaattagcattcttttatttgttggagccatgggaaaatctgcacaatttttgttacatacttggctaccagatgcaatggaaagacccacacctgtatctgctctcattcatgccgccacaatgggtacagc

SEQ ID NO: 221255 - DNA, 370 bp, Unknown
  Bacterial polypeptide expressing nucleotide sequence isolated from the Sargasso Sea
atgttatctgattttcttaaagattatttaccaatagtaatttttttaatcatagctcttggtttgagttgtgcattcgtggtaattaattttattctatcgccaaaaaaacctgatccagaaaaactctctgcctacgagtgtggttttgaaccttttgaggactcgaggctggagtttgatgttagattttatttagttgcaatactatttattatatttgatttggaaatagcgttcctatttccatgggcaatttcacttggcaacatcggattactgggtttttcgtcaatgatgatatttttattcattcttacaattggttttatttatgaatggaaaaaaggcgctttagattgggaataaa

SEQ ID NO: 221256 - DNA, 463 bp, Unknown
  Bacterial polypeptide expressing nucleotide sequence isolated from the Sargasso Sea
gcccaaaaagacctttggtatttcatacccctagctcctatgttcataatatactttatatctgctcttgctgaaactaaccgaactccatttgatttgccagaagctgaaggtgaattagttgcgggctatcaagttgaatattcatctcttgcttttacattatttatgttaggagaatatgccaacattgttctaatgagtggtctttgtgtaatactgttctttggtggctggctaactccttttgatgtagaaccatttacatggattcctggagtagtatggtttttacttaaaactgccctaatcattttccttttcacatggactaaagcaacatttccacgttacagatatgatcaattaatgagacttggttggaaagtctttttacctatatctctcgcatgggtagttataactgcgggagccctgcatctttttggatggatgccataat

SEQ ID NO: 221257 - DNA, 856 bp, Unknown
  Bacterial polypeptide expressing nucleotide sequence isolated from the Sargasso Sea
gtatttcagcagtattatcaatatttgtttttggaatggaattacaaacaacatttatggaaactatattatatttgaatggataagctctggaaattttaaagctaactggtcaataaatattgatccactaagttcagtcatgttagtggttgtaacttttgtttctgcattagtgcatatttattctgttggttatatgagtcacgaccctcataaaccaagatttatgtcttatctatcgttatttactttttccatgttaactttggttgtttcagataacttcttgcaacttttttttggatgggagggagttggtttatgttcttatttattaataggtttttggtataaaaaagaatctgcaaataatgctgctattaaagcctttatagtaaacagaataggagattttggtttagctattgcaatttttttaatttttttcttttttggcacaattaattttgaggaagcctttcaagcatcaagccaatttactgaaaaaaaaatagttttttttggatttgaatcaagtttgataacattgatatgcgtattcttattcattggcgcaatgggtaaatccgcacaatttttgcttcatacttggcttccagatgccatggagggtccaacgcctgtttcagctttaattcatgctgcaactatggtaacagcaggcgtttttctagttgtaagatgttcgccaatttttgaatattctcaatttggtttaaacttagtcacaatagtaggaatggtaacagcgatatttgccgcttcagttgcacttgtacaaaacgatattaaaaagattgtggcttactcaacttgtagtcaattagggtac

SEQ ID NO: 221258 - DNA, 739 bp, Unknown
  Bacterial polypeptide expressing nucleotide sequence isolated from the Sargasso Sea
acattcattttaagtttaattctatggttacaatttgattatttaaatccctcttatcaatttcaagaaaaatttagatggtttgatgattttaattttttctatcatataggaattgacggtgtttcactatttatgattttactaagtacttttttaactcctttatgtattttagctagctggagtaatattcaaaagagagttaaggaatatatgttgtctttcttatttcttgaaactgttatgattggcatgtttgcatctattgatatacttttattttatattttttttgaagctgttttaattcctatgtatttaattattggaatttggggaggagctagaagaatatatgcatcatttaaatttttcctatacacacttctaggatcagtcttaatgttaatagcaataatagtaatgtacataaatacaaactctatgagtattgagtctcttcagggaaattttttttcttttaacactcaaatttttttatggcttgccttttttgcatcttttgctgtaaaaattcctatgtggccttttcatacttggcttccagacgctcatgtagaagctcccaccgcaggctctgttattttagcaggtgttcttttaaaaatgggtggatatggttttatacgtttttctgttggtatgcttccagaagcaacagaattttttgtaccactaattatgatgcttagtataattgcaattatctacacct

SEQ ID NO: 221259 - DNA, 370 bp, Unknown
  Bacterial polypeptide expressing nucleotide sequence isolated from the Sargasso Sea
atgatttataactttttatcagattacctatcaataataatttttctcttcattgctttgtttttaagtattggctttattgttgcaaattttcttgcttcaccttcaaatccagatcctgaaaaattatctgcttacgaatgtggcttcgaagcctttgatgactccagaatggagtttgatgtcagattttacctagttgctatattattcattatatttgatttagaaatagcatttctattcccttgggcgatttctttaggcagtttaggagctttaggtttttggtctatgatgatttttttagctattttaacaattggttttatttatgaatggaaaaaaggagctcttgaatgggagtaaa

SEQ ID NO: 221260 - DNA, 370 bp, Unknown
  Bacterial polypeptide expressing nucleotide sequence isolated from the Sargasso Sea
aatgcttgcggatttattaaaagattatttgcctattattctatttttaataatagctattattttaagttgtgctttcatagttttaaattatttagcatctccaaaaaatcctgatcctgaaaaattatctgcctatgagtgtggctttgaaccatttaacgactcgagaatggagtttgatgtaagattttatctagtggctattttatttatcatttttgatttggaaattgcatttttatttccttgggcaatatctttaggtcaaataggtttttttggatttatatcaatgatgatttttttattcatattaacaataggttttatttacgaatggaaaaaaggtgccttagattgggaataa

SEQ ID NO: 221261 - DNA, 901 bp, Unknown
  Bacterial polypeptide expressing nucleotide sequence isolated from the Sargasso Sea
gttattttttatttattttttgaggctggtttaatcccaatgtttttaattataggaatatggggtggagagagaagggtttactccgcatttaaattttttttatacacgttgttaggttcagtattaatgttagttgccataatttctatatattggatagcgggaacgacggatgttatagaattatatcaattaggaatagatgctaagtatcaaaacttactttggttagctttcttcagctcatttgctgttaaaactccaatgtggcctgtgcatacatggcttccagatgcacacgtagaagctcctacggcaggatctgttctgcttgcagcgatactgctaaaaatggctggttatggatttattagattttctattggattatttccaattgcatcggaatattttgttcctttaatttttgttttaagcttaattgcaattatttacacctcattcgtagcattagttcaagaagatatgaaaaaacttattgcttattcttcagttgctcatatgggttttgttactatgggtatttttacaatgacacctcaaggaattgaaggaagtatttttcaaatgattagccatggaataatttcagctgcactttttttatgtgttggtgttgtttatgaaaggatgcacactagagagattagtaaatatggaggagtggtctcagtaatgccgagatatgcagtcgtgtttatgatatttactttaggtgcactaggtttgccaggtacaacgggatttataggtgaatttttgatattattaggaactttcaaagtaaattttatagttgctacaatcgcaagtttaggtgtaatccttggtgcggcctatatgctttggctttataaaagaatagttttttggtgaa

SEQ ID NO: 221262 - DNA, 871 bp, Unknown
  Bacterial polypeptide expressing nucleotide sequence isolated from the Sargasso Sea
tgctctttcatctgtaatgttagttgttgtaacattagtttcctcaattgttcacatatactcaattggatatatgtctcatgatccacataaacaacgttttatggcttacttatcgttatttacattttcgatgttaatgcttgttacttcagataattttttacagctgttttttggatgggagggtgtagggttatgttcgtattttttaataggtttttggtttaaaaaagaaagcgctaatgcagctgctattaaggcatttgttgttaatagagttggtgactttggatttgcattaggaatatttttaatattttatttatttggaacagttaattattcagaagtttttgaattaattcctaagtcattagatataaacttgaccttcctaggattaagttttaatgcaattaatttagtttgtattcttttatttataggtgcaatgggtaaatctgcacaaatatttttgcatacctggttacctgatgcaatggaaggacctactcctgtatctgcgctcatccatgctgcaactatggttacagctggtgtatttttagttgttagatgttcaccaatatatgaatattctccactggcattaaatattattaccattgttggtatgtctacagccttttttgctgcaacagtagctttagctcaagacgatatcaaaaaaataatagcttattcaacgtgcagtcaattagggtatatgttttttgcagccggtgttggtgcttacaatgttgctatgtttcatttatttactcacgccttttttaaagctttattatttttaggatctggttcggtgatccattcattcaaagatgaacaaaatatcaacttaatg

SEQ ID NO: 221263 - DNA, 178 bp, Unknown
  Bacterial polypeptide expressing nucleotide sequence isolated from the Sargasso Sea
tatttagttgcaatactttttataatctttgatttagaaattgcctttttattcctttgggcaatatcattaggcaaaatagggatgttcggctttgtttcaatgatgatatttttatcaattttgacaattggatttatttatgaatggaaaaaaggagcccttgattgggaataaa

SEQ ID NO: 221264 - DNA, 886 bp, Unknown
  Bacterial polypeptide expressing nucleotide sequence isolated from the Sargasso Sea
atggaaattattcttttatttcttccattgttagcatcaattatttcaggtttttttggaagatatattggtgatagagtttcagaaattgtaacaagtttatttgtttcaatttcagcaattttatcaataattattttttataaagtaatttctgtcaactatgtaaataatattattattgctgaatggataaattcaggatcattgagtgttaattggtcaattcaaattgacacattgtcatcagtgatgttagttgtcgtaactttaatttctgcattagtacacatttattctataggctacatgtctcacgactctcacaaaccaaggtttatgtcttatctatcattatttacattctcaatgttggtattggttacttctgataattttcttcaattattttttggttgggaaggagttggtttatgttcttattttttaattggtttttggtttaaaaaagaggctgctaatgctgcagccattaaagcttttttagtaaatagagtaggagattttggtcttgctttaggaatttttttaattttttatttgtttggcactgtaaattatattgatgtatttcagcaaacaccacaacttttaaatcatgaaatattgtttcttggaattaggattaattcaattgatttaatatgcatacttttattcataggtgccatgggtaaatcagcacaaatatttttacatacttggcttcctgatgctatggaaggtccaactccagtttctgctttaatacatgctgcaacaatggtaactgcaggtgtatttttagttgtcagatgttcaccaattttcgaatattctcaattaacattaaatttaattattattgtcggtacaagcactgctt

SEQ ID NO: 221265 - DNA, 768 bp, Unknown
  Bacterial polypeptide expressing nucleotide sequence isolated from the Sargasso Sea
aggactctgcaacaaggcggctataaaagcttttatagtaaatagagtatgtgattttggttttgctataggaatatttcttatctttatgttttttggaacagttaattattatgaagtttttcaattagttcctcaatttgctgaaaaggaaataaactttttaggattaaacataaatttaattacaataatttgtttatttttatttatcggcgctatgggaaagtctgcacaatttcttttgcatacttggttacctgatgcaatggaaggacccacccctgtatcagcactgattcatgcagccacaatggtaactgctggcgtttttttaattgtaagatgttctcctatatttgaattttctcaaactgctttaggttttgtggcaataattggtatgttaactgccttttttgctgcatcagttgctatagtccaaaacgatataaaaagaataattgcatattccacttgtagccaacttggatatatgttttttgcagcaggtgtaggcgcctatcacgtagcaatatttcatctttttacacacgcattttttaaagcattactatttttaggctcaggatctgtaattcattcattaaatgaggagcaagatataagaaaaatgggaggaatatggaaacaaatgccttttacttggatagctatgattgtaggaactttagctcttactggttttccgcttttgtcgggatattactcaaaagatgcaattattgagttcgcatatctaagagg

SEQ ID NO: 221266 - DNA, 688 bp, Unknown
  Bacterial polypeptide expressing nucleotide sequence isolated from the Sargasso Sea
aggagcttatcatgtagcgatgtttcacttatttacacatgcattttttaaagcattactttttttaggttcagggtcagttatacatgcatttaatgatgaacaagatattagatatatggggggtgtaagaaaaaaacttccttatacttatactttaatgttaattggaactctagcgctaacaggatttccttttttgtcaggattttattctaaagatgccataattgagtttgcttatttaagtaagtcaatatttggtaattacgtagttatagttggagtttttactgcatttttaacttctctttattcttggagattatttttcaaaacatttcatggaagttataataataacaaagtattaatagaggacactcatgagtcacccttaattatgcttttgcctttaatatttttaggtataggcgcagtaataacgggttttatttttaaagaaacatttattggtcaccatagtaatgaattttggagatcatctatcttttttcttgatcaaataaagcatgaaccagtgcctttatggttgttatttttaacaccaactttagttgtaatagcgataccagtttccttttattattttatatcaaatccaaaaattttggataattttaaaaactcgaattcaactttatacaattttttggtgaacaaatgg

SEQ ID NO: 221267 - DNA, 798 bp, Unknown
  Bacterial polypeptide expressing nucleotide sequence isolated from the Sargasso Sea
tttaattgctgttttgattatggagtcattcatgataggggttttttgttctttagatttagttgttttttatttattttttgaagctggtttaataccaatgtttttaattataggtatttggggtggtagtagaagagtttattctgcatttaaattttttttatttaccctattgggttcagttttaatgttagttgcaataatatccatatactggattacaggcaccacggatgtaatcaagctttatgaattaggtatagactccaaatatcaaaatctattatggttagctttctttagttcttttgcagtcaaaactccaatgtggcctgttcatacttggttaccagatgcgcacgtagaggctccaaccgcaggttcagttttgttagcagctattttacttaaaatggctggttatggttttattagattttcattgggattattcccattagcttcagaaatattcactccattaatttattttttaagtgttatcgcaattatttttacttctttaattgctttaatgcaggaagatatgaaaaaattaattgcttattcatcagtagctcatatgggatttgtcactttaggaatttttacaatacaacaacaaggtttagagggaagtattattcaaatgataagtcacggacttgtatcagccgcactattcttatgcgtgggagttgtttatgacagaatgcattctagattgatagatacttacggtggtattgttaccattgttcctaaatattccatattatttatgatatttactct

SEQ ID NO: 221268 - DNA, 370 bp, Unknown
  Bacterial polypeptide expressing nucleotide sequence isolated from the Sargasso Sea
atgttaactaattttttgcaagattacctgtctataataattttcttagtcatagctttgggtttaagttgtgcttttgttgttgttaattttattctttcaccaaaaaaacctgaccctgaaaaactttctgcttatgagtgtggatttgaaccatttgaggactctagaatggagtttgatgtaagattttatctggttgcaattttatttattatttttgatttagaaatcgctttcctttttccttgggcaatctctttaggcaatattggtttattgggtttttcttcaatgatgagttttttattcatacttacaattggttttatttatgagtggaaaaaaggtgctttagactgggaataaa

SEQ ID NO: 221269 - DNA, 741 bp, Unknown
  Bacterial polypeptide expressing nucleotide sequence isolated from the Sargasso Sea
tttaccatgcggctatgtttcatttatttacacatgctttttttaaagctctactatttctgtgcgctggttccataattcatgctatgcaccatgagcaagatctacgaaattatggagggctaagaaaaaaattgcctttaactttcttgaccatgttagttggaacgcttgctattaccggagtaggtattcctttaagttacgattttttccatttctcaattggcttttcaggttttatatcgaaagacgccgtaattgaaggtacttacgcgtcccaaagttcttctggtctttttgcattttgggctttagtactttcagctttatttaccagtttttatagttggagacttatttttctaacattttttgggaattttcgtggaaaagctgactattttgataatgcgcatgaaccggaaaagactatgttggtgccattacttttactgtcgataggttcaatttttgcaggtatggtgttttatagttcttttattggaagtggaacaaaagaattttttaattctgcactttttacaaattcaacaaataacgttctttatgattatcattatgtaccgacgtgggtgaaattattaccttttattgccatgttaatgggtttttggttagcctttaacttctacatcgccaaattaaatttaggaactaagttgtcgaatcaacattttggcttgtacaaatttttatataacacaatggtactttgat

SEQ ID NO: 221270 - DNA, 370 bp, Unknown
  Bacterial polypeptide expressing nucleotide sequence isolated from the Sargasso Sea
aatgatttacaattatttatcagactatttatcaataatcatcttcttattcattgctctatttttaagcattgggttcataatagcaaattttttggcatcaccttctaatcctgatccagaaaaattatctgcttatgaatgtgggtttgaagcttttgatgactccagaatggagtttgacgttaggttttatttagttgcaatactatttattatatttgatttagaaattgcattcctattcccttgggctatatctcttggcaacttaggcgctttaggattttggtctatgatgatctttttaggaattcttacaatcggatttatatatgagtggaaaaaaggagctttggaatgggagtaa

SEQ ID NO: 221271 - DNA, 571 bp, Unknown
  Bacterial polypeptide expressing nucleotide sequence isolated from the Sargasso Sea
atggaaggaccaacaccggtctccgctctaattcacgctgctacattagtaattgcaggagttgtattaatgattcgttgttcaatattttttgataatagtgaatccgttttaacaattgtctccatcgttggtgcttgtacggcttttttcgcggcgtctgttggtttatttcaaaacgatctaaaacgagttattgcttattccacttgtagtcagctggggtacatggtgtttatagtaggactctcccactattccgtttctcttttccatgtagctaatcacgctgtttttaaggctttactatttatgagtgccggttgtgttattcatggtttgtcggacgaacaagatttgcgaaaaatgggtggtttgctgcatatttttccagtctcttccgtaatgatctttattggatcttccgctttaattggtattcccttcttgactggtttctactcgaaagattgtattctcgaattagccattgcgaaatataattatgttggtaatttttgttattttctaggttgtagtgccgctttttgtacggcattctattcgttcc

SEQ ID NO: 221272 - DNA, 370 bp, Unknown
  Bacterial polypeptide expressing nucleotide sequence isolated from the Sargasso Sea
catgatttataattttttaacagactatctttcaatagtaatttttttatttattgctttatttttaagcattggttttatcgttgcaaattatttagcatctccctctaatcctgatccagaaaaattatcagcttatgaatgtggcttcgaagcttttgatgactctagaatggaatttgacgtaagattttatttagtagcaattttattcattatatttgatttagaaatagcatttctctttccttgggcaatatctttaggaagtttaggggcccttggtttttggtcaatgatgattttcctagctattttaacaattggatttatttacgaatggaaaaagggagctttagaatgggagtaa

SEQ ID NO: 221273 - DNA, 763 bp, Unknown
  Bacterial polypeptide expressing nucleotide sequence isolated from the Sargasso Sea
cctaaaactgtagaaaaaaattcgtgctacgtcgcaatttttgcaactatagctaactttttcctatctcttttgctttggtacttatttgatagctctacatcagactttcaatttgtcgaagaaaaaaattggataaatggatttataaattttaaaattggcatagatggaatctctatattatttatattattaactacatttatagcaccaatttgcatattttcaggaattggcagtattaaatttaaaattaaagaatttcttattgcaattcttattatggaaactttaatgataggagttttttgttctttagatttagttatattctatttattttttgaaggcggattaataccaatgtttttaattattggtatttggggtggttctagaagagtttattcggcctttaaattttttttatttaccttacttggctcagtgctaatgttaattgctataatcgcaatttattggatcacagggaccactgacgttgttgtccttcttgatgaaataaaaattgctaaggaatatcaatatttactttggttagcattttttagttcatttgcagtaaaattaccgatgtggcccgttcacacttggttacccgatgctcatgtagaggcacccacagctgggtcagtaattttggcagcaatattattaaagatggctggttatggttttattagattttctttaggcttattccctttggcctcggactattttacacctttagttttta

SEQ ID NO: 221274 - DNA, 901 bp, Unknown
  Bacterial polypeptide expressing nucleotide sequence isolated from the Sargasso Sea
aatggaatatttaattttatttttacctttgttagcttctattatttctggtttttttggaaaattaattggagacaggatgtctcaaattataacaagtttatttgtgtcgatttcagctttgctttctttagttgttttttacaaagttgcaactgtcggttatgaaaataatttaataattacaacttggattaattcagggtctttaaatgtaaattggtctattaatattgatgctttgtcatcagtgatgcttgttgtggttacggttatatcatcattagtgcacatttattcagtcggatatatgtctcgcgatcctcacaaggcaagatttatgtcttatttatctttatttacttttgcaatgttaacactagtaacctcagataattttattcaattattttttggatgggagggtgttggattatgttcgtattttttaattggtttttggtataagaaacctagtgccaatgcagctgctataaaagcatttctggttaatagagtaggagattttggatttgcgttaggaatttttttaattttttatatttttggaactgtaaattacaatgaagtttttcaaaaaattccagaaataatagatagagaactagtttttttaggtattaatataaatgctgttgatttaatatgtctacttttatttataggggctatgggaaaatctgctcagatttttcttcatacatggcttccagatgctatggagggtcccacgcctgtatctgctttaattcatgcagcaacaatggtcactgctggagtttttttagttgttagatgctcacctatatatgaatattcagaattagtattatcaataataactatagtaggcataattacagcattttttgctgcaagt

SEQ ID NO: 221275 - DNA, 913 bp, Unknown
  Bacterial polypeptide expressing nucleotide sequence isolated from the Sargasso Sea
tttttattatttataggagcaatgggtaaatcagcacaaatttttttacatacttggttaccagatgcaatggaaggtcctacaccagtatcagctttaattcatgcggccacaatggtcaccgcaggagtatttttagtagttagatgctcaccaatttttgaatactccacaactgctttaaattttattgctatagttggaatgttgactgctttttttgccgctacagtagcattgactcaaaatgatattaaaaaaattattgcctattctacttgtagtcaattgggatatatgttttttgctgttggaattggcgcttatcatgttgcaatatttcatttatttacacatgctttttttaaagcccttttatttttgggttcaggttctgtaatacattcttttcatgatgaacaggatataagattaatgggaggtgtatggaaaaaattaccatatacctggatattaatgttaatcgggactttagctctaacaggcgtaccatttttatctggatatttctcaaaagatgcaattattgaatttgcatatttaaaacataacaaaattggttactttgcctgttttgtaggtatttttacagcaattctaacatctatttattcatggagattaatatttaaaactttccatggaaaatataataatccaaatttaaaaataagctcaatgcacgaatgctcgaacgtgatgttgattcctttaataatacttggcttagggtctatttttgttggttacgcatttaaagatctcttgataggtaatgacagtataaatttttggaatacttctatatttttcttaaatttaacagttcacgatcatcctccaatttggctattggttcttactccagctttagttataattactataccaa

SEQ ID NO: 221276 - DNA, 682 bp, Unknown
  Bacterial polypeptide expressing nucleotide sequence isolated from the Sargasso Sea
agttcaaaatgatataaaaaaaattatagcttattctacctgtagtcagttaggttatatgttttttgcagctggggtaggtgcatataatgttgctatgtttcatttatttacacatgctttttttaaagctctactattcttaggatcaggctcagtaattcactcatttaaagacgaacaagacatcagttacatgggtggtgtatggaaaaaattgccttatacatgggtattgatgataataggaactcttgctttgactggttttccttttttatcaggattttattctaaggatgctataatagaatttgcttatttaagaggaaactcttttggatattctgcagcagctgttgggatttttactgcattactaacttcaatatattcttggagattattatttaaaacattccatggaacttttaacaatcaaaaaataaaaattgaaagcatacatgaatccccaatggttatgataataccattaattattttagcaattggagcaattttttcaggttttttatttaaagatttatttataggcacggattcatcaagtatattttggaaaggttcaattttatttttagaaccattaagccaagatcacccaccattatggtttttgctattaacaccattattagtaacttcatcaataccaattgtt

SEQ ID NO: 221277 - DNA, 173 bp, Unknown
  Bacterial polypeptide expressing nucleotide sequence isolated from the Sargasso Sea
agttgcaatattatttattatatttgatttagaggtagcttttctttttccatgggcagcttcattaggtaaaataggtatctatggtttttggtctatgatgttttttttattgatactaacaattggattcatttatgaatggaaaaaaggggctttagagtgggaataga

SEQ ID NO: 221278 - DNA, 892 bp, Unknown
  Bacterial polypeptide expressing nucleotide sequence isolated from the Sargasso Sea
agctaatgcagctgccattaaagcgtttattataaacagaataggagattttggttttgcacttggtatatttttaattttttatattttcggaacagttaactatgaaggggtatttaatcaagtatccttatacaaagataataatttgaattttttaggtcttcaacttaatgttataaacttaatttgttttttattatttgttggagccatgggtaaatcagctcagatttttttacacacatggttgccagatgctatggaaggaccaactcctgtttctgcactaattcatgcagcaacaatggtgacagcaggagtgtttcttgtagttagatgttcaccaatttacgaatattcgccaattatattaaattttataactgtaattggaatgaccactgctttgtttgctgcaacagttgcattagttcaaaacgatataaaaaaaataattgcatattcgacatgtagtcaacttggttatatgttttttgcaaccggagttggggcttacaatgttgctatgtttcatttatttacccatgcttttttcaaagctcttttatttttgggcgcaggttctgttattcattcttttaatgatgagcaaaatatcaataaaatgggaggcatttataagcacttaccatacacttatgtattaatgatgattggaactttggctttaactggatttccattcttatctggattttattctaaagatttaattattgaattttcttatttaaaaggcaatacagttggttattttgcatgcacaattggtatattcactgctttattaacatcaatttattcttggcgattaattttcaaaacatttcatggtgaatataataacaaaaatcaatcaatagccgaa

SEQ ID NO: 221279 - DNA, 769 bp, Unknown
  Bacterial polypeptide expressing nucleotide sequence isolated from the Sargasso Sea
tttgttgtctggggtattactatttataggggcaatgggtaaaagtgcacagtttccattacacgtttggcttcccgacgcgatggcgggcccaactccagtttcagcactaatgcatgctgcaacaatggttactgcaggagtctacttattagctagaatgttccctttttatcaaggaatagcaaatggagcattagacattgtaatgttatttggagtaataactcttcttacggccggacttatagcaattgttcaagatgatctaaagaaagttctcgcttattcaactgtaagtcagcttggttatatggttgcagcaattggttctggagcgtacactgcagcactctttcatttgtggacacatgcattttttaaagctttattatttctaggggctggatcagtaatccatgcagtacacagtaatagtatgttggagatgggtggtttaagaaaagtcatgccaaaaactttttcaacatttattattggaacagtagcacttgccggtttaccaccattcgcaggtttcttttctaaggatgaaatccttgcgtcttttaatcatgaaggtgaaacaacctttttctatatagctgtattaggtgcattcataactgctttttatatgactagagcagtttgccttactttcttaggagagtatagaggtcacgggcatccacatgagtcagattccatgatgacaacacctttagttgtactggctgtatttgcagctgcttctggatgggtttaa

SEQ ID NO: 221280 - DNA, 864 bp, Unknown
  Bacterial polypeptide expressing nucleotide sequence isolated from the Sargasso Sea
tctgcccagttcggtcttcacacatggttacccgatgccatggagggcccaactccagtttcagctctaatacatgctgctacgatggtaacagccggagtttttctcttaattttaatgtctcctttaatagaggtttccgaatttgcaagtaaattgatattaattgttggttctttaacttgtatttttgctgcgtcggtagcaattttccaaaacgatatcaaaaaaataattgcttattcaacatgtagccaacttggttacatgtttatggctgttggggcttctgcttattctttagcatactttcatttgatttctcatgccttttttaaagcactactttttttaggtgctggatcagtgattcattcaatgtcagatgaacaaaatattaaaaatatgggcggtttatataataagattccattaacttacttaacaatgattattggttctctttcactaattggaattccatttttcagtggttatttttcaaaagatctgattctagaaacattatttctaagagactctgaattatcctcatatgctttctttgcaggtttacttgctgttctttttacaacattatattctttaagattgataatatatgtttttcataggaaaagtgtggccgatgagaaagttatagctcatattcatgagtccccattcataatgacctttccacttattgtattatcaatttttgcaatattctttggaatgttttcaaattcatattttattggtagtgattacttaagtgtttggtctgaaattatcttcgttgataaatcatttaatgaaaactttatatatgaaaatatgccaatattttataagaagtta

SEQ ID NO: 221281 - DNA, 370 bp, Unknown
  Bacterial polypeptide expressing nucleotide sequence isolated from the Sargasso Sea
atgttatctgatttacttaaagattacttaccaataataatttttctagtcattgctttgggactgagttttgcttttgtggtaattaattttattctatcgccaaaaaaacccaatccagaaaaattatcagcttatgagtgtggttttgaaccatttcaagattcaagaatggaatttgatgtgagattttatttggttgcaattctatttattatttttgatttagagatagcatttttatttccatgggcaatatctcttggaaatattggattattaggtttttcatcaatgatgatttttttattcattcttacaataggttttatttatgaatggaaaaaaggtgctttagactgggaataaa

SEQ ID NO: 221282 - DNA, 312 bp, Unknown
  Bacterial polypeptide expressing nucleotide sequence isolated from the Sargasso Sea
tagcaattagctgtctattgtttttggcaaatttcttagttgcagtaaataaccctgatcctgaaaagaattctgcctatgagtgcggatttgaacagtttggagactctagaatgaagtttgatgttcgtttttatttagtcacattactttttattatttttgacctcgaagtcgcgttcctatttccttgggctgttacatttggaaccttgggcttatttggttttgtttcaatgatggtttttctagctattcttacaattggtttcatatacgagtggaaaaaaggagcattggagtggcaataaa

SEQ ID NO: 221283 - DNA, 370 bp, Unknown
  Bacterial polypeptide expressing nucleotide sequence isolated from the Sargasso Sea
aatgagtgcggaattattaaaagattattttcctataattttatttcttataatagccttaggcttgagttgtgcttttgtggtaataaattttattttatcacctaaacatccagatcctgaaaaactatcagcatatgaatgcggttttgaacctttcgaggattctagaatggaatttgatgttagattttacttggtggcaatactttttataatttttgatttagagatagcttttctttttccttgggctatctccttaggtaacattggaatccttggttttacttcaatgatgatttttttattcatactaacaattggttttatttatgaatggaaaaaaggtgctttagactgggaataa

SEQ ID NO: 221284 - DNA, 891 bp, Unknown
  Bacterial polypeptide expressing nucleotide sequence isolated from the Sargasso Sea
atatttattcttattgggtatatgaaagacgatccagataaatctagattcatgtcttatttatccctgtttacttttgccatgattgtattagttgtatctgacaattttttacaactttattttggttgggagggtgttggcctgtgttcttatttgctaattggattttggtataagaaagattcagcaaacaaagcagcaataaaagcatttgtagtaaatagagtaggtgattttggtttcgctataggaatatttctgatatttatgttttttggaacattaaattatagtgaagtttttcaattagttcctgttctttcaaataaagagattaattttttaggaattaattcaaatataataacccttatttgcttatttttgtttgttggtgcaatgggtaagtcagcacaatttttcttacatacttggttacctgatgctatggaaggacctacacctgtgtccgctttaattcatgctgctaccatggtgacggcaggagtatttttagtcgtaagatgttcaccaatattcgagtattctcagtttgccttaaatttagttgcgataataggaatgttaacagctttttttgctgcatctgtagctatagtacaaaatgatataaaaaaaataattgcatactctacatgcagccagttaggttatatgttttttgcggctggtgttggagcttatcatgttgcaatttttcatttatttacacactcttttttcaaagcactattatttttaggatcaggttcagtaatacattctcttaaagacgaacaagatattagaaaaatgggaggaatatggcgaaagatgccttttacatggattgcaatgatcataggaaccctagctcttactgggttt

SEQ ID NO: 221285 - DNA, 926 bp, Unknown
  Bacterial polypeptide expressing nucleotide sequence isolated from the Sargasso Sea
gcacaatggtactgctggtgtttttttagtagttagatgctcaccaatttttgaatattctcaattagcattaaatattgtaacgattgtaggtattacaacagcattttatgctgcaactgttgctttggttcaaaatgatattaaaaaaattatagcctattctacttgtagtcagcttggatatatgttttttgctgcaggagttggtgcttacaatgttgctatgtttcatttatttactcacgctttttttaaagcacttttatttttaggatcaggatcagtaattcattcctttagtagtgagcaaaatataaataatatgggtggggtatggaaaaaactaccctacacttgggcactaatgattataggaactcttgcattaaccggctttcctcttttatctggtttttattcaaaagatgcaattatagagtttgcatatttaaaaggaactaatcttggttacctcgctgcaacttttggaatacttacagcctttttaacagcagtgtattcatggagattaatatttaaaacatttcatggaaaatttaataactcaaaattaaaaattgattccgtacatgagtctccactagtaatgttattgccgttaatagttctttctttcggtgctatattctcaggaattttatttaaaaatttatttataaatcaagaaattaacttttggaaagaatctattatgtttctaattccattaagtaccaatcatccaccgcaatggattattttaataaccccgatcatagttacaatatcgatacctatctcttattatttatttattaaaaataataatatctgtaactggttagcaaatgagaataagcctatatataaatttttagttaataaatggtattttgatgaattctatgactatatttttgtta

SEQ ID NO: 221286 - DNA, 901 bp, Unknown
  Bacterial polypeptide expressing nucleotide sequence isolated from the Sargasso Sea
ttatctttatatctttggtatgtttttgataaaaattcagtagactttcagtttgtagaaaatagagaatggttatcaggatttataaattataaagttggaatagatggcatttcaatattatttataatattaacaacttttataactccaatttgcattatttcagttaatgctacaattacaaatagacttaaggatttcttaattgccattttaataatggaaacatttatgataggagttttctgctcacttgatctagtagtgttttatttattttttgaggcaggtcttataccaatgtttttaataattggtatttggggtggagaaagaagagtctactcggcttttaaattttttctttacactttattaggatcagttcttatgttagttgctattattgcaatttattggataacaggaaccactgatgttgagaaactttatgaacttggtattcaggtagaatatcaaaatttattatggctagcattttttagttcttttgcagtaaaaactcctatgtggccggtacatacctggcttcctgatgctcatgtagaagctccaactgctggctctgtattactagcagcaatactcctcaaaatggctggatatggatttattagattttctcttgggttatttcctatagcttcggaaaattttacaatgttagtttatatcttaagtttaatagcaattatttatacatctcttgtagctttgatgcaggaagacatgaaaaaacttatagcatactcgtctgttgcgcatatggggtttgtaacattgggtattttcacaatgactcaacaaggtattgaaggaagcatttttcaaatgattagccatggacttgtttctgctgcacttttcttaagtgtgg

SEQ ID NO: 221287 - DNA, 793 bp, Unknown
  Bacterial polypeptide expressing nucleotide sequence isolated from the Sargasso Sea
ctggcaggaattgggctgtttatgggcgcgatgggtaagtcatctcagtttccattacacatatggctaccggatgctatggagggcccaactcctgtgtctgccttaatgcatgcggcaaccatggttgccgctggagtctatctttctataagaatattccccttgttaacagttgatgcgctgttagtagttgcctatatagggggattcactgccttttttgctgcgactatcgcagtaacccaaaatgatattaaaaaggttctggcgtactctactgtgagtcaacttggctatatgattttggcagttggaactggagtttacactgccgcgttttttcatcttttaacacatgcaatgtttaaggcaaatctgttttatggttctggttcagtaattcattctatgcatcatggtttgcatgaaataaatgatcatggaactgatgcacaagatatgaggaatatgggtgcattaaaagataagatgcccataacttattggtccatgttgattagtactttttcaatagctggtgttccttttttctcaggttttttatcaaaggatgcgattcttgctggtactctgtcgtttgccacttcgaatccaaaacatttaatgctggcagtatttggtttcggtgccgctgcaattactgcattttatatgtttagaatgatctttatgacttttcatggaaaagaaaaaataagtgggctcaaaaagcatatccatgagtcaccgaaagaaatgactggaccaaattgtattactgggcctactc

SEQ ID NO: 221288 - DNA, 970 bp, Unknown
  Bacterial polypeptide expressing nucleotide sequence isolated from the Sargasso Sea
aaaagaaaggaacaaaggggctatttacgtttctatatttacaagttttgtaaatttttttctcgtcctttttttatggtactcttttgacaaatcaatttatgagtttcagttcatagaagaatttttttggataagtggatttataaaatttaagttcggcatagatggaatttctattttatttatcctacttacagcatttataactccagttgctataatctcttgcataaacagtgttaaggcaagattaaaagagtttttaatcgcaatactagttttagaaacttttatgattggagttttttgctctctagatctggttattttttatcttttttttgaagcaggtctaataccaatgtttctaataataggaatctggggaggtcctaaaaaagtttattcggcttttaaattttttttatttacgctattagggtcagttttgatgcttattgcagtaatcgctatttactggattactggaacgactgatgttaacgaaatataccaaacaaaaattccagtagagtatcagaatttactttggctagctttttttagttcttttgccgttaagttacctatgtggcccgttcatacatggttgcccgatgcgcatgtggaagcacctactgcaggatcagttatattagctgcaattttattaaaaatgggaggttatggttttttaagattttcagtgggtatgtttccagtagcatcagagtattttacaccattaatttttgctttaagtgtggtagcaataatttacacatctttggtagctttgatgcaggaagatatgaaaaaattaatagcttattcatcgattgcacacatgggattcgttactttaggaatattcacttttaacaagcaaggtgttgaaggaagtattttgcaaatgattagccacggattgatttcggctgctctttttttaagtgtcggcgttcta

SEQ ID NO: 221289 - DNA, 482 bp, Unknown
  Bacterial polypeptide expressing nucleotide sequence isolated from the Sargasso Sea
aatggaactttcaatcatattccttccattaattgcatcaataatatctggcttctttggaaaatacatcggggatagaaattctgaaatagtcacaagtgcattggtttcaatttcagccttactatctatttttgttttatatcaagtaatagtaaatcagtatgaagaaaacatagtaattgcaacttggatcaactcaggatcattggatgtaaactggtctatgttaattgatcccttgtcagctgtaatgttggttgtggttacctctgtatcttctttggtacatatttattcaattggatatatgtctcacgatcctcataaaccaagatttatggcatatttatctctctttacatttgctatgttaatgcttgtaacctcggataattttgttcaattattttttggttgggagggagtaggtttatgttcgtatttcctaataggtttttggtttaaaaaagaaagcgcga

SEQ ID NO: 221290 - DNA, 955 bp, Unknown
  Bacterial polypeptide expressing nucleotide sequence isolated from the Sargasso Sea
aatgattgattggccaataatttctgctactatttttttacctcttattggatctttaataatttttttaattaaagaagatgaaacaacttcgaataatataaaatgggctgcgctttggacctctataggaacttttgttttaagttgtttgatttggtttcagtttgatcactcaacttctcaatatcaattagtagaaaagtataaatggtttaatgattttaatttttattatcacgtaggggtagatggaatttcattgttcatgattttattaagcacttttttaactcctttttgtattttagctagttgggaaaatattaagaaaagaattaaagaatatatgattgcttttcttttcttagagacagtcatgataggaatgttttgctctattgatattttattattttatgttttttttgaagcagttcttatacctatgtttttgattattggaatttggggtggtgaaagaagaatttatgcttcttttaaattttttctatatacccttttaggatcagtactaatgttaatagcgattatttttatctatcaaaaaactaattccatgaatattaattttttacaaggtaattatttttttagtaaaaaagttcaaatttatctttggctagctttttttgcttcttttgctgttaaaataccaatgtggccttttcatacttggctgcctgatgctcatgtagaggcaccaactgctggttcagttattttagcaggtgttttgttaaaaatgggaggatatggatttattagattttctctaggtatccttcctgaagcatcagatttctttatgccgttaattataatattaagctctattgccattgtatatacttcattagtagcattagcccaagaggatataaaaaaacttattgcttattcctctgtcgctcatatgggaatagttacgata

SEQ ID NO: 221291 - DNA, 775 bp, Unknown
  Bacterial polypeptide expressing nucleotide sequence isolated from the Sargasso Sea
tttaaacttatttctttcactttttctttggtattcatttgataatactacatctgattttcaatttgtcgaagaaagaaattggatcagcggttttgtaaattttaaattaggaatagatggtatttcaattttatttatattattaactacatttataacaccaatatgtattttttctgggatttctagtattaaatttaaaattaaagaatttctaatttcagttttggtaatggaaacattaatgttaggagttttttgttcactcgacttaattatattttatttattctttgagggcggcctaattccaatgtttctaattataggtatttggggtggtcctaagagggtttattctgcttttaaattttttttatttacattactaggatcagttttaatgcttgtagcaattatttctatttattggattacaggcaccactgacgtcactaaacttttagctttcagaataccccaagaataccaatatttgctttggttagcctttttcagttcatttgcagttaaaatgccaatgtggcctgtgcatacatggctgcccgatgctcacgttgaagctcccaccgctggttcagtaattttggctgctattcttttaaaaatggcagggtatgggtttatccgtttttcattaggtttattccctgtagcatcagattattttacgtatttaatttttttcttaagcgtcatcgcaataatctacacctcattagtagcgttaatgcaggatgatatgaaaaaa

SEQ ID NO: 221292 - DNA, 811 bp, Unknown
  Bacterial polypeptide expressing nucleotide sequence isolated from the Sargasso Sea
tttttagttaatagagtcggagactttggttttgcaataggtatttttctaatatttttcttttatggaactgtgaattattttgaagtttttcaattaactccacaattaacagaacaacaaataattttttttggtaatgaatttaatttgattacagtaatttgtcttatgctatttgttggttcgatggggaaatcagctcaaatttttttacatacttggcttcctgacgctatggaaggtccaacaccagtatctgcactaattcatgctgctacaatggtgacagcaggagtatttttggtagtaaggtgttctccattatttgagtattcagcatttgctctgaatgtagttgcaattattggaatgatgacagcattttttgcagccactgtagctttagtccaaaatgatattaaaaaaattgtggcttattcaacttgtagccagctaggttatatgttttttgctgcaggagtaggagcttatcacgttgcaatttttcatttattcacacatgctttttttaaggcacttttatttttgggttctggatgtgtaattcattcatttaacgatgagcaagatataagatatatgggtggtgtacgaaaaagaataccttacacttacggtttaatggttgtaggaactctggcactaacaggatttccttttttatcaggtttttattcaaaggatgcaattatagaatttgcttttttaaaaggaaccaatataggctatagtgctgctgtattaggtattttcactgcacttttgacagcaatatattcttggagat

SEQ ID NO: 221293 - DNA, 808 bp, Unknown
  Bacterial polypeptide expressing nucleotide sequence isolated from the Sargasso Sea
tttgacaccaatttgtattttagcaagttggaaaagtataacaaaaagagttaaggaatatatgttagcttttttgtttttagaaacagttatgattggaatgttttcttctattgacatactgctattctatgttttttttgaagctgttttaattcctatgtatttaattattggtatatggggtggacaaaacagaatctatgcttcctttaaattttttctttatactttactaggttcggttttaatgttgttagctataatagtaatttatagaattactggagtgatgaatatagaacagttacaaggaaatcattttaataaatctattcaaatttttctatggattgcattttttgcttcttttgcagtaaaaattcctatgtggccatttcatacatggttaccagatgctcacgtcgaagctccaactgcaggttcagttatattagctggggttttgttaaaaatgggtggctatggttttattagatttaacttaggtatgttgcctgaagctactgttttctttacacctttagtaatgattttaagtgttatcgcaatagtttacacttctttagtagcattggcacaaagtgatatgaaaaaattgatagcctattcttccgtcgcacatatgggcattgtaacaattggaatatttttagttaatcaacaaggtctagaaggagcaatgctacaaatgataagtcatggaattgtttcggcagctttatttttatcagtaggagtaatatatgatagaatgcatacaagagaaatatccttttatggaggt

SEQ ID NO: 221294 - DNA, 370 bp, Unknown
  Bacterial polypeptide expressing nucleotide sequence isolated from the Sargasso Sea
atgcttgcggattttttaaaagattatttttctataattatttttctaataattgccttaggattaagctttttatttattataattaattttgctttatcaccaaaaaaccctgatcctgaaaaactttcttcttatgaatgtggatttgaaccatttaatgattcaagaatggaatttgatgtaagattttatttagtagcaattttatttattatatttgatttagaaatagcatttctatttccttgggcaatttctttgggtaatattggatttttaggttttatctcaatgatgatatttctttttattttaacaataggcttcgtatatgaatggaaaaaaggcgcacttgattgggaataaa

SEQ ID NO: 221295 - DNA, 370 bp, Unknown
  Bacterial polypeptide expressing nucleotide sequence isolated from the Sargasso Sea
atgatttataattttttaacagattacttatcaataatattatttttatttattgctttattaataagcattggttttctattagctaactatttagcttctccaagcaaccccgatccagaaaaactttcagcttatgaatgtggttttgaagcttttgaggactcgagattagaatttgatgtaagattttatttggtagcgatactctttataatttttgatttagaaatagctttcctttttccttgggccatctcactcggtaatataggaacactaggtttttggtcaatgatgacttttttaggaatattaaccattgggtttatttatgaatggaaaaaaggagctttggaatgggaataaa

SEQ ID NO: 221296 - DNA, 877 bp, Unknown
  Bacterial polypeptide expressing nucleotide sequence isolated from the Sargasso Sea
ttttttttaatagttagatgctctccaatttatgaatattctccaattattttaaattttataacaattataggtatgcttactgcaatatttgcagccagtgtagctttagttcaaaatgatattaaaaaaataattgcatattccacatgcagtcagcttggttatatgttttttgcagcaggtgttggagcatataatgtagctatgtttcatttgtttacacatgctttctttaaagctttactatttttaggatctggttctgttattcatgcatttaaagatgagcaagacataaacaagatgggagattcatggaaaaaacttccatatacatattctttgatgattattggcacattagctttaacagggtttccatttctttcaggattttattctaaggatgcaattatagaatttgcttatttgaagggtgatactataggttatacagctgcatttattggaatactaactgcttttttgacttcaatatattcttggagacttatttttaaaacttttcatggcaattataataataaacaagtcaaaaaagagaatcttcatgagtcaccaatcgtgatgttgttacctttggttcttttagcgataggcgctatagcatcaggttatatttttaaaaatatttttattggttatgaaagctctattttattttggaaatcttcaatactatttttagaaccactaagcacggaccatccacctttatggtttttgttatctactccaactcttgtaattgtttcaattccattagcttattatttatttttgaaaaataaaaactttacaaatcaagtggttgaaggaaacaaacctttatatatttttttaaaaaataaaa

SEQ ID NO: 221297 - DNA, 370 bp, Unknown
  Bacterial polypeptide expressing nucleotide sequence isolated from the Sargasso Sea
aatgcttgcggattttttaaaagattatttaccaataatcctatttttaataatagcgatagggttaagtgtaatttttattgccataaattacttggccgcaccaaaaaaacctgaccctgaaaaattatctgcttacgaatgtggatttgagccatttaatgattcaagaatggaatttgatgtaaggttttatcttgttgctattttattcattatttttgatctagaaattgcattcttatttccttgggcaatttctttaggacaaattggtttatttggatttatttcaatgatgatttttttatttattttaactattggctttatatatgaatggaaaaagggtgcattagattgggagtaa

SEQ ID NO: 221298 - DNA, 709 bp, Unknown
  Bacterial polypeptide expressing nucleotide sequence isolated from the Sargasso Sea
gatgcaatggaaggcccaactcctgtatcagcattaatacatgctgctacaatggttactgcaggtgtttttttagtagttagatgttcaccaatatttgaatattctcaagttgcgcttaatgttgttgctattataggaatggtcacggcaatttttgcagcatctgtagccttagttcaaaatgatattaaaaaaattgttgcttactcaacttgtagtcagttaggctacatgttttttgcagcaggtattggtgcttatcatgttgcaatttttcatttatttacacatgccttttttaaagcacttttatttcttgcgtcaggttgcgtaatacattcctttaatgaagaacaagatatccgtttgatgggaggtgtttggaaaaaaataccttatacatatgcattgatgataataggaactcttgccttaacaggttttccttttttttcagggtattattcaaaagacgccattatcgaatttgcatatttgaagggtaacactattggttacttttctgcatcagtaggtattttaacagctttacttactgctatttattcttggagattaatatttaaaacattccatggaaaatataacaacaaaaagattaattttagttttataaatgaatcttcttttttaatgttaattccttcatgtttattggcagtaggagctataactgctggttttc

SEQ ID NO: 221299 - DNA, 1057 bp, Unknown
  Bacterial polypeptide expressing nucleotide sequence isolated from the Sargasso Sea
aaagttgcattatgggacttcagtgggtgttttccttttaagtatattaatatggttgcagtttgatagtagtaaaagtggataccaatttgaagaaaaatttagatggtttagcgactttaattttcattatcatattgggattgatggaatatcactttttatggttatcttaagcacttttctaacacctttgtgcattttagcaagttgggagagtgttaaaaaaagagttaaagaatacatgatagcttttttgtttctagaaacagtaatgataggaatgtttgcttcaattgatattttacttttttatattttctttgaagctgttttgatcccgatgtacttaattattggtatctggggaggtgagagaagaatttatgcatctttcaaattctttttatatacactacttggttcagttttgatgctaatagcaattattgttatttataaattagaggactcaatgagcattgcaggcttgcaaggcaaccattttgctaaaaatgttcagatttatctttggttagctttttttgcttcatttgcagttaaaattccaatgtggccttttcatacttggttgcctgacgcccatgttgaggcgccaacagcaggttcagtaatattggctggggtgcttttaaagatgggtgggtatggatttattagattctccctaggaatgttacctgaggcttcagattatttttcgcctctgataatgactttaagtatagttgctgtaatttacacttctctagttgctttagctcaaactgatattaaaaaattaattgcttattcatcagtagctcacatgggtctagtcactataggtatatttgtagtaaattctcaaggtctggaaggcgcgatgattcaaatgataagccatggcgtagtatcaggagctctatttttgtgcgtaggagtaatctacgatcgaatgcacacaagagatataaatttttatggaggtttagttaatagaatgccaatttatgcaacttgttttatgatatttatgtttgggggctgtaggact

SEQ ID NO: 221300 - DNA, 596 bp, Unknown
  Bacterial polypeptide expressing nucleotide sequence isolated from the Sargasso Sea
ttccaatatcctttttttaggtgcattacggtcagctgctcaaatggtatcttatgacgtttcaattggttttgtaataattactgttcttctttgtgtggggtcattaaatctaactaaaatagttgaagctcaacaaacagtttggtttgcaattcctttattacctatgttcataattttttttatttcagccttagctgaaacaaacagattaccttttgatttaccagaagacgaatctactttggtagcaggtttcttcactgagtattcatcagcatcatttgtgcttttctttttagcagaatatgcaagtatgattttaatgagtgctatgactgttatattatttttgggagggtggttacctctttttgatatatatcccttaaatataattcctggagtcatatggtttactttaaaaataatgtttgtattatttttatttatatgggtaaggggaacatttccgcgttatcgttatgatcaattaatgagattaggatggaaagtttttttacctttatcattattttgggtagttataactgcaggttttctagtaatttttgatattgtgccaaattaaa

SEQ ID NO: 221301 - DNA, 613 bp, Unknown
  Bacterial polypeptide expressing nucleotide sequence isolated from the Sargasso Sea
aatggaatatatattagtttttttacctttattaggtgcagtaatttcaggtctatttggacgttatgttggtgatagaaattcagaaatcatcacatgtctgctagtttctatttctgcaatattatcactaatcatttttaatgaagttataataaataactatgaaaataatcttgttatattcaattggttaaattcaggatcattagatgttaactggtcaataaaaatcgacacagtatcttctgtaatgttagttgttgtttgttttatatcgtcactagttcacatttattcaataggctacatgtctgatgatccgcataaaactagattcatgtcatttttgtctttatttacattcgcaatgttaattttagttacatctgacaactttttacaacttttttttggatgggaaggtgttggtctttgctcttattttttaattggtttttggtttaaaaaagagagtgcaaatgcagcagccatgaaagcttttttagtaaatcgagttggagattttggttttgcattaggaattttcttaatcttaaacacatttggaactttaaattatgatgaaatttttaatcaaataccttctgta

SEQ ID NO: 221302 - DNA, 929 bp, Unknown
  Bacterial polypeptide expressing nucleotide sequence isolated from the Sargasso Sea
tatggaatatttaattgtttttcttccattatttgcatcaataatatctggtttttttggtaaaataattggagataaaatatcttgtgtatttacaagtcttttaatttcaatttctgcgatcttatcaattttgattttttatgatgtattaatttatggatatgaaaataatcttttaatttttacttggattaattcaggtacattagaggtaaattggtcaattaaaatagatactctttcatctgtgatgttggtcgtagtgacttttgtgtcttcattagttcatatttactcaataggttatatggctcatgatcctcataaaccaaggtttatgagctacctatcattatttacttttgcaatgttgatgcttgtaacttcagataatttccttcaattattttttggttgggagggagttggactttgttcttatttactaattggtttttggtttaaaaaagaaagtgctaacgcagcagcaattaaagcttttgtagttaatagagttggtgattttggttttgccttaggcatttttttaatcttttatctttttggaacggtaaattacaatgaagtatttcaattaataccatcaatagaagaaaaaaagttaaatcttttaggttttgattttaacgcaataaacttaatttgttttttattatttattggtgcgatgggaaaatcagcacaaattttattacatacttggttacccgatgctatggaaggacctactcctgtttctgcattaatacatgcagccacaatggttacagctggtgtttttttagtagttagatgttcaccgatttatgaatattctgaaacaatcttaaattttattactataattggtatgacaactgctttttttgctgcaagtgtagcattagttcaggatgatataaaaa

SEQ ID NO: 221303 - DNA, 871 bp, Unknown
  Bacterial polypeptide expressing nucleotide sequence isolated from the Sargasso Sea
tgatattacacaaatacaagaaattaaaattccagaacaatatcaaaagttattatggctagctttttttagctcttttgctgtaaaaacacccatgtggccagtacatacatggttaccagacgctcatgtagaggctccgacagctggttctgttatcttagctgcaatacttttaaaaatggctggatatggatttttaagattttctatacctttgttcccatatgcttctgaatttttcacacctttagtttattctttaagtataatagcaataatttacacttctcttgtagctttgatgcaggatgatatgaagaaattaattgcttattcttcagttgctcacatgggttatgttactttagggatttttacattaacaaagcaaggtattgaaggaagtatttttcaaatgataagccatggtttaatatctgctgctttatttctttgtgtaggagttgtttatgacagacttcattcaagattaattaatacttacggagggttagtaaactatttaccgaaatattcttttctctttatagtttttgctctagctgcactaggacttcctggaacaacaggttttctcggagagtttttagttttgactggaagttttcaaaaaaattatcttgttgctatgctagcaacaattggcgtgattttaggagctgcttatatgctctggttaactaaaagggttatatttggaaaaattaagaatgaagatataaaaaagttaaaggatacaaacaaattagaaactttcgtattaacaacattagcttttttagtaatattttttggattttatccagagcctttatttgaaacagtaaatgtttcgatcgataattaa

SEQ ID NO: 221304 - DNA, 1150 bp, Unknown
  Bacterial polypeptide expressing nucleotide sequence isolated from the Sargasso Sea
gcgacatggattaactcaggatcacttgatgttaattggtcaatgttaatagatcctctatctgctataatgcttgttgttgttactttggtttcatccttagttcatatctattctattggttatatgtctcatgatccacataagccaagatttatggcttatctatcattatttacatttgcaatgttaatgcttgtaacatcagacaactttttacaattattttttggttgggaaggtgtaggtttatgttcttattttttaataggattttggtttaaaaaagaaagtgcaaatgctgcagcaattaaagcttttgtagttaatagagtaggagattttggttttgcactaggaatatttttaattttttatctttttggtactgtaaattattcagaggtctttcaacaaattccaagtgtagttgataaaaatttattttttttaggcttagaagttaaagcaatagacttaatttgtttacttttatttattggtgcaatgggaaaatctgcacaaattttactccatacctggctacccgatgcaatggaaggtcctacacctgtatctgccttaattcatgcagcaacaatggtgacagctggagtttttttagttgttagatgctcacctatttatgagtattccccattaatattaaatttaattactattgttggaatgaccacagcattttttgctgctacggttgctttagttcaaactgatattaaaaaaataattgcctactctacatgtagtcagcttggatatatgttttttgcagcaggagttggagcctacaatgttgcaatgtttcatttatttacacatgctttttttaaagctttactatttttgggatcaggttcggtaatacatgcttttaaagatgaacaaaatattaataacatgggaggggtatggaaaaaattaccttacacttattcattaatgattataggaactcttgctctaacaggatttccttttttgtcaggattttactctaaggacgcaattatagaatttgcttatctaaaaggaaatactacaggatatcttgcggctggaataggaatttttactgcatttttgacctcaatatattcttggagattaattttcaaaacttttcatg

SEQ ID NO: 221305 - DNA, 367 bp, Unknown
  Bacterial polypeptide expressing nucleotide sequence isolated from the Sargasso Sea
atgacatcttatttagttgaatatctcccaattttattttttgtatttattggtttgtctatggcaattggaatgacagcaattccttttgtaataggggactcaaagccagatcctgaaaaaatatcagcgtacgaatgcggttttgaagctttcgatgatgcaaggggtagatttgatgttcggttttatttagttgccttactatttattatttttgatttagaagtcgcctttctctttccttgggcaattactttaggcaagattggtttatttggatttttttcaatgatgatatttttattaattttaacaattggttttatttatgaatggaaaaaaggcgcactagaatgggagtaga

SEQ ID NO: 221306 - DNA, 1243 bp, Unknown
  Bacterial polypeptide expressing nucleotide sequence isolated from the Sargasso Sea
aaagataattcttctgctgctatgaaagcatttattacaaataagatagctgacgtaggtttgatgatcggaataattattttagctttaaacactggtacattgagaatttctgaaattctttatcaggcaacacatgaatatgaaaagctatcttcagttgcgtttatcgctgcaattttattatttattggtgccatgggcaagagtgctcaatttccattacatgtttggttgcctgatgctatggcaggtccaacaccagtctctgcacttatgcatgcagcaacaatggttaccgctggtgtttatttactagcaagaatgtttccattttataaatcaatggcacctgatgcattagatattgtgatgctttttggtgtgattactttattagcagcgggattaattgcagttgttcaagacgacctaaaaaaggttctcgcatactcaacagttagtcagctaggctatatggttgctgcaattggttcaggtgcatatactgccgcattatttcatttatggactcatgcattctttaaagctctgttgtttctgggagcagggtctgttatacatgctgtgcatagcaatagtatgttagaaatggggggattaagaaaagttatgccaaagacgtttgcaacattcataattggaacagttgctttggcaggactcccaccattcgcaggttttttctctaaagacgaaattcttgcgtcttttaatcatgaaggagaaataacgttcttttttatagcagttttaggagcgtttataacagcattttatatgacaagagcagtctctttaacatttcttggagagtatagaggccatggtcatcctcacgagtctcacaatcttatgacaacaccgcttttggcattgtctgtctttgcgatagcctcaggttgggtaaatattcctggtgtttatacaggattcacagactgggttacgacaaggaagaacaaaattgttgaataccatcctgaaagctttgacttatttgcactatcaagtggcttgttagcaggtttgcttggtatcgcacttggatattacttatatcaactgcaaggaagtgctgaaacaggtgatgataaaattaaaattcaaccaatctggtcagttcttgaaaacaagtattatctagatgacttttatttcaagtatgtaattgatccagtaaaaataaatatttctagagcagtagataaatttaacacaa

SEQ ID NO: 221307 - DNA, 525 bp, Unknown
  Bacterial polypeptide expressing nucleotide sequence isolated from the Sargasso Sea
aatggaaatttctattatagcgctacctttgatagcctcaataatatctggattcttcggaaagttaattggtgatagaaattctgaaataattacaagtttattagtaacaatatctgcaattttttcagctttaatcttgtaccaagttatattcaatgaatatcaagataatattataattgctacctggattagttctggaacattagatgttaattggtcaatgaaaattgaccctttgtcagctattatgttggttgttgtaacctctgtttcatctttagttcatatctattcaattggatatatgtctcatgatccgcacaaaccaaggtttatggcttatttatcattatttacttttgcgatgttaatgttggtaacttcagacaattttattcaattattttttggatgggaaggtgtcggactttgctcttattttttgattggtttttggtttaaaaaagaaacagctaatgctgccgcaattaaagcatttgtagtaaatagagtggagat

SEQ ID NO: 221308 - DNA, 370 bp, Unknown
  Bacterial polypeptide expressing nucleotide sequence isolated from the Sargasso Sea
atgctaattgattttttaaaagattatttgtctatcattattttcatttttatcgccctatctttaagcgtggggtttattgttttaaattatttattttcaccaaaaaatcctgatcctgaaaaactttcagcttatgaatgcggatttgaagcttttagcgattcaagaatggaatttgatgttagattttatctggttgcaatattatttattatttttgacttagaaatagcttttttgtttccttgggctgtaactttaggaaaaatagggacgttaggtttttggtctatgatgatttttttgtttattttaacaataggttttatttatgaatggaaaaagggtgcattggactgggactaat

SEQ ID NO: 221309 - DNA, 1180 bp, Unknown
  Bacterial polypeptide expressing nucleotide sequence isolated from the Sargasso Sea
gatttcccgatcctttccctgaccacgttcctgccgctggtgggtgcgcttgccattctgctgatccggggtgacgcggatacggttgcgcgtaatgcgcgggctaccgcgctttggacatcgctggcgacgtttattgtctcgatcttcctgtggatcgggttcgacaattcgacagccgatttccagtttgtcgaaaaagttgcctggattccttccttcggcctgaactatcacatgggtgtagatggtatttccgtcttcttcgtccttttgtcgaccttcctcaccccgctttgcatcctgtcgagctgggaagccatcaagcaccgggtcaaggaatacatgatcgcgttcctggtgctggaaaccctgatggtcggtatgttctgcgcgctggatttcgtgctgttttacgtcttctttgaagccgtgcttatcccgatgtttttgatcattggtgtctggggcggcggacggcgtgtctacgcggcgttcaagttcttcctttatacgctgaccggctcggttctgatgttgatcgcgatcctcgtgatttatttcgaggcggaaaccaccgatatccccacattgctgaaagcggcgctggatccgcggatgcagctatggctatggctcgccttcttcgccagcttcgccgtgaaggtgccgatgtggccggtccatacgtggctgccggatgcccatgtcgaagcgccgacagcgggctctgttatcctggccggcgttctgttgaaaatgggcgcatacgggttcctgcggttttcggtcccgatgctgccctttgcgactgaatacttcacgccgttgatctatacgctgtccatcatcgcgatcatctatacttcgctggttgcgctggcgcaggaagacatgaagaagctgatcgcctattcgtcggttgcacatatgggcttcgtgaccatcggcatctttaccctgacccatcagggcgtgcagggcgcggtggtgcagatgatcagtcatggcttcgtatcgggcgcattgttcctgtgcgtcggcgttatatacgaccgcattcacacccgggatatcgacagatacggcgggctggtcgaacggatgcccaaatatgcgctggtcttcatggtgttcatgctggcttcagttggtctgcccggcaccagcgggttgtagg

SEQ ID NO: 221310 - DNA, 1279 bp, Unknown
  Bacterial polypeptide expressing nucleotide sequence isolated from the Sargasso Sea
ttgttaattataaaagttggcatgatgggtatatcaattctatttattattttaacaactttcattacttcaatttgcataattttagttaattcaactattaaaaaaagattaaaagattttttgatagctatattaataatggaaacattcatgattggagttttttgttctcttgatctagttgtgttttatttattttttgaagcaggattaataccaatgtttttaattattggtatatggggaggagaaagaagagtttactcagcatttaaattttttctttatactttattgggatctgtattgatgctagttgcaatcatttcaatttattggatatctggaaccacagatgttgaaaagttgtacgaaataggtattgatgccaggtatcaaaatttattatggttagcattctttagctcatttgctgtaaaaacaccaatgtggccagtacacacttggctaccagatgctcatgttgaggcaccaaccgcaggttctgtattactagcagctatactacttaaaatggcagggtatggttttataagattttcacttggacttttccctcttgcctcagaatactttgttccattagtatattttttgagcttagtagcaataatttacacatcattagtggcattaatgcaagaagatatgaaaaaacttattgcctattcctctgtagcacacatgggatttgtcactttgggaatattcactatgacacaacagggtattgaaggaagtatattccaaatgattagtcatggacttgtttctgcagcattatttttaagtgttggagttgtttatgaaagacatcacacaagattgattaatagatatggtggtttagtacaagtaatgccaaagtattcaatagtatttatggtatttgccttgggatcattaggactacctggcacaagtggatttattggagaatttttaattttaatgggagctttcaaaaaaagttttttagtagctactatcgcaagtttaggtgttatcctaggcgctgcctatatgctgtggctttataaaagaataatatttggcgaaatagtagataatcaattaaagtcaatgacagatttaaaaagatttgaaattttaatacttttcagtttagttatacccataattttttttggtttttatcctgaaccattaattaattcaatggaaacatcagtcaataatcttttaaatgcttacaacacaagtattgaaactaatttagcgtataaaaaataat

SEQ ID NO: 221311 - DNA, 796 bp, Unknown
  Bacterial polypeptide expressing nucleotide sequence isolated from the Sargasso Sea
atgattgaatacgcagtaattttcctgcctctcgctggtgcgattttaagttattttggtaaaaatcttggaaatagtttttcccaaataatctcatctctatttgttttaatatcagcctttttatcattattaatattttataacggaattgtgcactctgtttataataaacatatattatttaaatggatctcctctggaaatttcttagtaaattgggctatagatatcaaccccttatcttctgtcatgcttgtagtggttacagtagtttccgcgctagttcacatttattcaatcggatatatgagcaaggatcctcacaaacctagatttatgtcttatctatcgctttttactttttctatgcttatgttggttgcgtcagacaattttttacaactattttttggttgggagggtgttggcttatgttcttatttattaattggattttggtataaaaaaaattcagcaaataatgctgcaataaaagcatttattgttaatagagttggagactttggtttagctgttggaatattcttaatattttatcatctaggaactgtaaattatgacgaagtattttccttaatcgaaagctctaagaacaaaaatattaactttttgtcttttgatgtaaatttgattacaacaatttgtatttttttatttattggcgccatgggcaagtctgctcaatttgttcttcacacatggttaccggatgcaatggaagggcctactccagtttcagcgttaattcacgcagccacaatggttacagcag

SEQ ID NO: 221312 - DNA, 1165 bp, Unknown
  Bacterial polypeptide expressing nucleotide sequence isolated from the Sargasso Sea
ataggtgttgatggaatatctttatttttaatattattaagtacattcttaactccattttgcattttagcaagttggaacaatattaagaaaagaattaaagaatacatgatagcttttctttttttagaaacagtgatgctaggtatgttttcatctgttgatatattattattttatattttttttgaagcagtacttattccaatgtttcttattattggaatttgggggggggaaagaaggatttatgcttcttttaaattttttctttacacatttttaggttctgttttaatgttaatagccatcatctttatatatcaattaacaaactccatgaatatttttgaattacaaggtaatttcttttcaaaaaaaattcaaatttatttatggttagctttttttgcttcatttgcagttaagattcctatgtggccttttcatacatggcttccagatgctcatgtagaagcaccaacagcaggttcagttattctagctggagtattattaaaaatgggaggttatggttttataagattttctataggtatgcttcctgaggcatccaagttttttatacctttaattatgattttaagtattgttgcgatcatttatacttctttagtagctttagctcaaaaagatatgaagaaattaatagcttactcctcagtcgcacatatgggtatggttactataggtatatttttagttaatcatcaaggacttgagggagcaatgattcaaatgattagccatggcattgtttctgcagccttatttttgtgtgttggagttatatatgacagaatgcatacacgtgatattaatttttatggaggcttagttaatataatgcctaaatattctgtagcattaatgatttttgtacttgcttcagttggcctaccaggtactagcgggtttataggtgagattttagtaattattggatcttttaaatatagtacaacattggctttttttgcaacaacaggaattatattatctgcagtgtatatgctttatttatataaaaatttaatatttggattattaaaaaatgaaaaactaaaagaaattttagatttggatgttagagaaaaaataatactttatcctttaatatttgtaataattataattggtatat

SEQ ID NO: 221313 - DNA, 1027 bp, Unknown
  Bacterial polypeptide expressing nucleotide sequence isolated from the Sargasso Sea
atgatttttttacagactacaatcaaagttatcgcaatcattgttcctgttttaattactgtagcttattttacttatgctgaacgtaaagtaattggttttattcaaggacgtattggaccaaaccgtgttggtttattcggtttccgtctttggggtttaggtcagcccattgctgatgcggttaaattgattgttaaagaaattgtgattccgttaaatgcaaatcgccagttgtttgttattgcccccattttatcacttgcaccagcactcgctgcttgggcagtgattcctttcgatgatactaaggttttagctgatataaatgccgggcttttatatgtattggcacttacctcattagcggtttatggtgtcattattgcaggttgggcatctaattctaagtatgcatttcttggtgcgatgcgttcagctgcgcaaattgtcgcttatgaaattgcaatgggatttgcattagtaggtgttttaattgcagccggaagtttgaatttaggtgaaattgtcagtgcacaatcaggcagtcttattcattggttttggttaccactacttccattatttgttatttatttcatttccggcgtagctgaaacaaatcgcgcgccatttgatgttgctgagggtgaatctgaaattgttgccggctttcatgttgaatacagcggtatggcattttctgttttttttatggctgaatatgcaaatatgattttaatcgctgttctttctgcgttattgttttttggaggttggttatctcctttccaagggattatttttttagaagatctctttagctgggttccaggaatgttttggttactagcaaaaacctctatttttatgtttttatttttatggtttcgagcaacatttccacgatatcggtatgatcaaattatgcgtcttggctggaaggtttttatccctataacgattgtttggttagttgttatttctgtattagtgattatgaatacaccaccttggtttaattagt

SEQ ID NO: 221314 - DNA, 1063 bp, Unknown
  Bacterial polypeptide expressing nucleotide sequence isolated from the Sargasso Sea
cttggtttaattccaatgtttttaattattgggatttggggtggccccagaagagtttactcagcctttaaattttttctttacactttatttggatcagtcttgatgcttgttgcgatcatcgccatttattggattgtaggaacgactgattttacagatatatatgaaatcggtatacctgctgaatatcaaaaaatactttggttagcttttttcagctcttttgcagtaaaaatgccaatgtggccagtccatacctggttacccgatgctcatgtagaggcaccaactgcaggatcggtcattctggctgctattttattgaaaatggcaggatacggttttttaagattttcgattggaatgtttccattagcttcagaatttttcacaccattggtattttctttaagcataattgcaattatttacacatccttggtggctcttatgcaagaggacatgaaaaaattgattgcatattcatctgtggggcatatgggatttgtcactcttggaatatttacattcactcaacaaggtgtggaaggtagcatatttcaaatgattagccacggattaatctcagctgctttatttttatgtgttggagtcttgtatgatagaatgaaatcaagaatgattaacacatatggtggggtggtaaattatctacctaagttttcattattatttataatatttgcattaggtgccttaggtttgccaggcaccacgggatttattggtgagtttctgattttagttggtacttttaaaaaaaactttttagtagcaattttagcaagtataggagttattttggcagcagcatatatgctctggttatcaaaaagagttatttttggagcaactaataatgaaacaattaaaaagataaaggatatcaattatttggagtctatgattttagttactcttgttttagtaacaataatttttggattttacccagatccattaattagcactacaagtgtatctgtagaaaatttaattaataattataacttaaaagttgctgggagcttagaatagg

SEQ ID NO: 221315 - DNA, 883 bp, Unknown
  Bacterial polypeptide expressing nucleotide sequence isolated from the Sargasso Sea
atggactttgaatatctaattatttttctgccattagtaggttctattatttccggattttttggaaaatttttaggttcaagaaattcagaaattttaactagcttattagtttcaatttcctcgattttttcttttttaattttttacaaggtttttaatgacggttactcaaacaatttagaaatatttacatggataaactcaggatcatttaatgttaattggtcaattaagatagatgcactttcatcagtaatgctagttgttgttacattagtttcatcaattgttcacatatattcagttggatatatgtcacatgatccacataaacaaagattcatgtcttacttatcattatttacattctctatgttaatgctagttacttcagataattttttacaacttttttttggatgggaaggtgtaggcctatgctcgtattttttaataggtttttggtttaaaaaagaaagcgctaatgcagctgctataaaggcatttgttgttaaccgtgtaggagattttggctttgcattaggaatatttttaatattttatttatttggaactgttaattatgcagaagtatttgaattagtaccccagtcattaaataaaaacttgaacttcttaggcttaaattttaatgcaattaacttaatttgtattcttttatttataggtgcaatgggtaaatctgcacaaatatttttacatacctggttgcccgatgcaatggaagggcctactcctgtgtccgcattgattcatgctgcaaccatggttacagccggtgtatttttagttgttagatgctcaccaatatatgaatactctccacttgcattaaatattattaccattgttggtatgt

SEQ ID NO: 221316 - DNA, 747 bp, Unknown
  Bacterial polypeptide expressing nucleotide sequence isolated from the Sargasso Sea
aatggaaaatattgaatacttaattttatttttaccactttttgcttcttttatttcaggtttttttggaaaatacattggtaatagaagttcagaaattttaacaagtctatttgtatctatatctgcaattttatcgattattattttttacaatgttttaattctagattatgagaacaatataattttggccaaatggataaatataggatcctttaatgtaaattggtcaattaaaatcgatgcattgtcatctgtcatgcttgtagtggttaatttaatttctgctttagtgcatatttattcaattggatatatggcaacagacccacacaaaccaagattcatggcttacttatcattatttacttttgctatgataactcttgtaacatctgataatttccttcaattattttttggatgggaaggtgttggactatgttcttattttttaattggtttttggtttaaaaaagaaagtgcaaacgctgcagcaataaaagcatttgtagtaaatagagtaggagattttggttttgcacttggaatatttttgattttttatttatttggtacggtaaattataatgaagtttttcaacaaataccaaactttgttaataacaaaatattatttattggcattcaattaaattctatagatttaatttgtatacttttattcattggagcaatgggaaagtcagcacaaatttttttacatacttggctcccagatgc

SEQ ID NO: 221317 - DNA, 1064 bp, Unknown
  Bacterial polypeptide expressing nucleotide sequence isolated from the Sargasso Sea
aatggaaatatcaattatagcgttaccattgatcgcttctattatatctggtttttttggcaaatatattggtgatagaaactcagaaatcctaactagctttttagtatcaatatctgcagttctttcattgatagtattttatgaagtaatcgtaaatcagtatgaggaaaatattgtaatcgcctcatggataaattctggatcattggatgttaattggtctatgaagatagactccttatcagcagttatgctggttgttgttacacttgtttctgctttggttcatatttattcaattggatacatgtcacacgatccacacaaaccaagatttatggcttttttatcactgtttactttcgcgatgctaatgttggtaacagctgataattttatccaattattttttgggtgggaaggtgttggtctgtgctcttattttttaattggattttggttcaaaaaagaaagtgcaaatgctgctgctataaaagcttttgttgtaaacagagtaggagactttggttttgctcttggaatatttttaatcttttatttgtttggtactgtaaattattcagaagtttttgaccaaataccaacaattgtagatcaaaaattaattttcctaggaatcggggttaattccatagatttaatttcattactattatttattggtgcaatgggtaaatcagcacaaattttacttcatacttggttacctgatgcgatggaaggtccaactcctgtttcagctttaattcacgcagctaccatggtcacagctggtgtttttttagttgttaggtgttccccaatttatgagtactctgaattagcattaaatattataactatagttggaatgagtactgctttttttgcagcaagtattgccttagtacaaactgatattaaaaaaataattgcttattctacatgtagtcaattaggttatatgttttttgctactggtgttggtgcatataatgttgcaatgtttcatctatttacacatgcattttttaaagcattactatttttagggtctgggt

SEQ ID NO: 221318 - DNA, 941 bp, Unknown
  Bacterial polypeptide expressing nucleotide sequence isolated from the Sargasso Sea
aatggaatacctaattttatttctacctctaataggatctgtaattagtggtttttttggaaagaaaataggagacagaaattctcaaattttgacaagttcgtttgtgagtatttctgcaatactctctttacttgttttgtataaagttattagttcagattattcaaacaatcttgttatagctacctggattaactctggaacattaaatgttaattggtcgataaaaattgattccttatcagcagttatgtttgttgtggtaaattttatttcagctttagttcatatttactcaattggttacatgtcacacgatcctcataaaacaagatttatggcatatttgtccttatttacttttgcaatgttaactttagtaagttcagataactttattcaactattttttggatgggaaggtgtaggcttatgctcatattttttaattggattttggtttaaaaaagagagtgcaaacaaggctgcaataaaagcctttgttgttaatagagttggtgactttggtttagctcttggaatttttctgattttttatatttttggtacagtcaattatgatgaggtttttgaacaaataccaaatgttttagataaaaaaattaattttattggtattaatttagaaattattgatttaatttgtttacttttattaattggggcaatgggtaaatcagctcaatttttactacatacatggttaccagatgctatggaaggcccaacgccagtttctgcattaattcatgctgcaactatggtaactgctggagtatttcttattgttagatgctcacctatatacgaatactctccgttagttctcacagttataaccataattggaatgactactgctttctttgcagcaactgttgcacttgttcaaaatgatataaaaaaaattattgctt

SEQ ID NO: 221319 - DNA, 968 bp, Unknown
  Bacterial polypeptide expressing nucleotide sequence isolated from the Sargasso Sea
aatggaatatttaattctttttttaccattgattgcttctattatttcaggtttttttggcaaatttattggtgacaggttttcagtaattttaactagtttatttgtctccatatctgcaattttatctttttttgtattttataaagtagtgaattatggatattctaacaatttaattatttcttcttggataaattctggaacattaaatgtaaactggtcaataaaaattgacgctctttcagctgtaatgttagtagttgtaaatttaatttcagctctagttcatatttattcaatagggtatatggctcacgatcctcacaaacctaggtttatggcatatttgtcattgtttacatttgctatgctaaccttagttacttcagataattttattcaattattttttggatgggaaggagtaggtttgtgttcatattttttaattggattctggtataaaaaagaaagcgcaaatgctgcagcaattaaagcttttttagttaatagagttggtgattttggttttgcgttaggtatttttttaattttttatatttttggtacagttaattatgatgaagtcttttttcaaatacctcaaatattagataaaaaattaatatttttgggaatacaatttaattcagtagatctaatttgtttattgctatttgttggggctatgggtaagtctgctcaatttttattacatacttggttacctgatgcaatggaagggccaactccagtttcagcattaattcatgccgcaacaatggtaactgcaggagtgtttttagtagtacgttgttctccaatatatgaatattcagaattagctttgtctattataacaatagtgggaatgattactgctttttttgcagcatccgtagcattagttcaaactgatataaaaaaaataattgcctattcaacatgcagtcaattaggttaca

SEQ ID NO: 221320 - DNA, 1486 bp, Unknown
  Bacterial polypeptide expressing nucleotide sequence isolated from the Sargasso Sea
aatgactgatatacctatattatcactaactattttcttacctttgttaggtgccatagttattcttctaattaaagatgatgaaaactctataaataatattaaaaaagttgcattattgacatcagttggtgtttttcttttaagcttgtttatatggttgcagtttgacaacagcaatcctggttatcaatttcaagaaaaatttagatggtttaatgactttaatttttactatcatattggcattgatggaatatctctctttatggttatcttaagtacttttttaacacctttatgcatcttagcaagttgggaaagtataaaaaaaagagttaaagaatatatgatcgcatttttatttcttgagacagtaatgataggaatgttttcatctgtagatattttgcttttttatatattttttgaagccgttttaattccaatgtatttaattattggtatctggggtggagatagaagaatttatgcatcttttaaattctttttatatacactacttggctcagtattaatgctaatagctataattgcaatttatagattaacaaactcaatgagtattgaagatttgcaaggtaactattttgcaaaaaatgttcagatgtatctttggttagctttctttgcttcatttgctgttaaaattccaatgtggccttttcatacgtggttacctgatgcccatgttgaagcccctacagctggttcagtaatattagctggggtacttttgaaaatgggaggatatggatttattagattttctctaggaatgttaccagaggcctcagaatatttctcacctttggtaatgactttaagtatagttgcggtagtttacacttcgctagttgctctagctcaaactgacataaaaaaattaattgcttactcatcagtagctcacatgggtttagttactataggtatatttatagtaaatgctcaagggttagaaggtgcgatgattcaaatgataagtcatggagtggtatcaggagctttatttttatgtgttggagttatttatgatcgaatgcatacacgagatattaatttttatggtggcctagttaatagaatgccaatttatgcaactgtttttatgatatttatgttaggatctgttggccttccaggcacaagtggttttattggggaatttttagttatcgtaggagcttttaaatattcaagtattgtagttattggttcagctactggcattgtactttcagcagtttacatgctttatttgtataaacggattatttttggcgagatgagtaatgaaaaattgattgagatattagacttgaataatagagaaaaaattattctgattcctctcgcaatagctgttatatttataggtattttcccaaatatttttattgaaccaatgagattgcccttagagtcaataatatttaactatgagtttgctaatgctaaatag

SEQ ID NO: 221321 - DNA, 1303 bp, Unknown
  Bacterial polypeptide expressing nucleotide sequence isolated from the Sargasso Sea
gaggaaaaagtttggattgaaaatttttttaagtacaagcttggaattgatggtatatccgtactttttatagtcttaacctcatttataactcaaatatgtgttatttcttgcatcaatagcattaagttaagaattaaagaatttttgatcgcattacttgttttggaaacatttatgctaggagtattttgttctctagatttattacttttttatttattttttgaagcaggacttataccaatgttcttaattattggtgtttggggtggagctagaagagtttactcggcttttaaatttttcttatacactctattaggttcagttttgatgttagtagctataataacaattttttggcttactggttcaacagatgttactgaaatttatcaaattaaaattccagagcaataccaaactattctatggttagctttctttagttcttttgcggtaaaactacctatgtggcctgttcatacatggttgccagatgcccacgttgaagcaccaaccgcaggttctgttattttagcagcaattttgcttaagatggcaggatatggttttctaagattttctataggaatgtttccattagcttctgaattttttgttcctttggtttatgtgttaagtttaattgcaataatttacacatcactcatagctttaatgcaggatgatatgaaaaagttgatagcatattcttctgtgggacatatgggatttgttactcttggagtttttacttttaccactcagggtattgaaggcggaatatatcaaatgattagccacgggttaatttctgctgctctatttttatgtgttggagtactttatgatagaatgaatagcaggatgattaatgattatggcggcgtagtaagtattttaccaaaattttctttattatttattatatttgttttaggaggattaggtttaccaggaacaagcggattcattggggaatttttagtattgttgggggcattcaaaaaaaactttttggtagcggtgatcgctagcatcggggtagttttagctgctgcctacatgctctggttagctaaaaaagttatatttggagaagttaaaaatgacaaagtcaaaatcttgaaagacgttaattattcagagggatttgttttatcaattttagtcattttgacattattttttggtttttatcctgaaccaatcttcaatacgattagtccctcagtaaataatttaatcgatgtgtatcaatttgagataaattcaaaaatatctaatattaattaaa

SEQ ID NO: 221322 - DNA, 1912 bp, Unknown
  Bacterial polypeptide expressing nucleotide sequence isolated from the Sargasso Sea
atggaactatcaattatatttcttccacttattgcatcaattatttcaggtttttttggaaaatacatcggtgatagaaattctgaaatagtaactagtttacttgtttcaatatctgctctcttatcaatttttgttctttatcaagtaatagtaaatcagtatgaagaaaatattgttatagctacctggataagttctgggtcacttgatgtaaattggtcgatgttaattgatccattatcagctgtgatgttagtagttgtaacttctgtatctgctttagttcatatctattcaattggttacatgtctcatgaccctcataaaccaagatttatggcttatttatcactgttcacatttgcaatgttgatgcttgtgacttcagataatttcatacaattattttttggttgggaaggtgttggcttatgttcttacttcttaattggtttttggttcaaaaaggaaagcgctaatgctgctgcaataaaagcatttgttgtaaacagagtaggtgattttggttttgctttaggaattttcttaatattttatttatttggaactgttaattactcagaagtttttcaacaaattccaacaattgtagataaaaatttatcatttttaagttttgaagttaaagcaatagatttaatttgtttacttttatttattggagcaatgggtaaatctgcacagatattgcttcatacttggctacctgatgctatggaaggtccaactccagtttctgcattaattcatgcagcaacgatggttacagctggagttttcctggtagtaagatgttctccaatttatgaatattcaccgttaatactaaattttataaccattgttggaatgactacagcattctttgcagcaacagtagctttagttcaaacagatattaaaaaaataattgcttattctacatgtagtcaacttggttatatgttttttgcagctggagtaggcgcatacaatgttgccatgtttcacttatttactcacgcatttttcaaagccttattatttttaggatctggttcagtaatccatgcatttaaagatgagcaaaatataaataacatgggaggtgtatggaaaaagttaccatatacttatgctttaatgattataggaacacttgccttaacaggttttccatttttatcaggattttattctaaagatgcaattatagaatttgcgtatttaaaaggtaacactactggttattatgcagctgggatcggaatagttacagcatttttaacatctatttattcatggagattaatctttaaaactttccatggagattataacaataaagaggtcaagatagaagaaacacatgagtctccattagtaatgcttgttcctctatttatcctctcaataggagcgatatttgctggttttctatttaaaggactatttattggtcatggtgataatttattctgggcagagtctattaagtttttagagcctttaagcacagaacatccacctttatggtttttacttttaacaccttgtttagttttagtatctattccaattgcttattacttatttgtaaaaaacaaagagttgcctaattcaatagtttctataaacaaacctttatataattttttagttaataaatggtatttcgacgagttgtacgacgtgttgtttattaaatcctcaaaaaaaataggtttatttttgtggaaattttgtgatggaactataatcgatggttttggtcctgatggaatttcttcttttataaaaaaatgttcaattaaagcaactaaatttcaaagtggttttatctatcaatatgcatttgtaatgttattaggtttctctgctttactaacttttttaatagttaaataat

SEQ ID NO: 221323 - DNA, 1165 bp, Unknown
  Bacterial polypeptide expressing nucleotide sequence isolated from the Sargasso Sea
atggatattccaatattaagtttactcatttgtttacccacgataggtgcattatttattctttttacaagctcaaattcaaaaaaatataatagttacaagtatatatctatttttattagcatagttaattttatcttatctgtttatctttggtatcaatttgataaatcaaatccaacttttcaatttgttgaaaatagagattggatttacggttttataaattataaagtgggggtagacggaatatcgattttatttattattcttacaacttttattactcctttatgtatcttatcggtaaatagcacaatcaaaaatcgtcttaaagattttttagttgccattttaattatggaaagcttgatgattggggtcttttgttcactagacttagtaattttttatttgttttttgagggtggattaattccaatgtttttaattattggaatatggggaggagatagacgtgtttattcagcttttaaattttttttatatacacttttaggatcagttttaatgctagtggcaataatttatatttattggattacaggtactacagatgtggaaaaactttaccaaattggcattgaggcaaaatatcaaaaaatcttatggttagctttttttagttcttttgctgtaaaaactccaatgtggcctgttcatacttggcttccagatgctcatgttgaagccccaactgccggatcagttttgttagctgccatacttcttaaaatggctggttatggttttattaggttttcaattggtcttttcccaattggttcagaatattttgttactttagtttatatcttaagtcttattgcgataatttacacttctttagttgcactaatgcaagaagatatgaaaaaactaatagcatattcatctgtggcacatatgggttttgttactcttggaattttcacaatgactcagcaaggtgtagagggaagtatttttcaaatgataagccacggaataatatctgcagcattatttttatgtgtaggagttatttatgagagaatgcatactaggcgaattaaaaattatggaggaatagtttcagtaatgccaagatattcaattctattgatgatatttacattgggagctcttggtttacctggcacta

SEQ ID NO: 221324 - DNA, 1492 bp, Unknown
  Bacterial polypeptide expressing nucleotide sequence isolated from the Sargasso Sea
aatgaattttcctatacttacctctcttattttactaccagcaataggttctttttttattttttttgtaaaatttaataaaaattatcagagtagtaaatatgttgctctatttatttctttggcaaattttgtacttgctctttacttatggtcaatatttgacaacagctcgagtgagtttcagttcatagaagaaaaaaaatggatacaaggttattttaattataaagttggaatagatggtatttcaattttgtttataatattaacaacttttataacaccattgtgcattatttcagttaattcaactgtaacaaaaagacttaaagactttctaattgcaatattactaatggaaacattgatgattggggttttttgttctttagatttaattttattttatcttttttttgaaggtggtttaatcccaatgtttcttattataggaatatggggcggagaaagaagagtttattctgcatttaaattctttttatatacacttcttggttcagttttgatgttggttgcaataattaccatttattggatgactggaacaacggatgtagaaaaactatatcaaataggaattgatcataattatcaaaaacttttatggcttgcattttttagttcatttgctgttaaaacaccaatgtggccttttcatacatggcttccagatgctcatgtcgaggcaccaactgctggatccgttttattggcagcgatacttttaaaaatggcaggttacggctttataagattttcattaggtttattccctctggcatctgaatattttacccctttagtatttgctctaagtttaattgcaattgtatacacttcacttgtagctttgatgcaagaagatatgaaaaaacttatagcatattcttctgttgcacacatgggctttgtaacattaggtatatttactttaacccaacatggtttggtaggaagtatttttcaaatgataagtcatgggcttatatctgctgcattatttttatgcgttggcgttgtgtacgaaagaatgcatacacgcctcataaataaatatggaggagtagtaagtgtaatgccaaaatatgcaattgtatttatgatttttactctgggtgcaataggtctacccggtacaaccggctttgttggtgaatttttaattttacttgctgcattcaaaaaaagttttttggttgcaattattgcaagtttgggagtaatttttggtgcagcatatatgctttggttatacagaagaataatattcggtgaaattaaaaatgcggatgtaaaaaaattatttgatttaaaaagacatgaaattgttattttgtggttaattgcggtgccctcaatattttttggtttttatcctcagccattaattgtaactgtagacgtatctgttatcaatctattagaaatgtataataataatttaaaaacttttttagtaaataaataa

SEQ ID NO: 221325 - DNA, 370 bp, Unknown
  Bacterial polypeptide expressing nucleotide sequence isolated from the Sargasso Sea
catgttatctgattttttaaaagattacttaccaataattatttttttagtattagctctcgggctaagctgtgcttttgtggttgtaaactttattttatcaccaaaaaaacctgatcctgaaaaactttcagcttatgagtgtggatttgaacctttccaggattcaaggatggaatttgatgttaggttttatttggttgcaattttatttatcatttttgatttagagatagcatttttatttccttgggcaatatctcttggaaatattggattattaggtttttcatcaatgatgatttttctgttcatattaacaattggttttatttatgaatggaaaaaaggtgctttagactgggaataa

SEQ ID NO: 221326 - DNA, 919 bp, Unknown
  Bacterial polypeptide expressing nucleotide sequence isolated from the Sargasso Sea
aatggagtacgcggttatttttttaccgttattaggaacaataattggatatttatctaaatactttggtgatttagcctcacaattgttgactactcttacggtttgtattgctgcaatattatcaatagtaattttttataatggtttagttcatgacaattatggaaattatattatttttgagtggataaggtcaggcaattttcagattaattgggcaataaatattgatccactgagctcaataatgttagttgtagttacatttgtctctgcattagttcatatttattcaataggttacatgagtcatgacccgtttaaacctcgatttatgtcttatctttcattatttacatttgccatgttagttttagttgtatcagataatttcatacaactattttttggatgggaaggggttggtctgtcatcttatcttttaattggtttttggtataaaaaagattctgctaacaaagccgcaattaaagcttttttggtaaatagaattggcgattttggactcgcaattggtatttttttaatatttttgtattttggaacgttaaattataatgaagttttccaacaagcttcaaatttttctcaaaataaaattaattttcttggtttagaggtaaatttaataactttaataagcttgttcctttttattggtgctatgggaaaatctgctcaatttttcttacatacttggttaccagatgctatggaaggccctacccctgtttctgctcttattcatgcagcaacaatggttacagctggagtttttttagttgtaagatgttctccaatttttgaatattctcagtttgcttttgaacattgtcacaattattggaatgaccacagcattctttgcagcaactgttgcaattgtacaaaatga

SEQ ID NO: 221327 - DNA, 1915 bp, Unknown
  Bacterial polypeptide expressing nucleotide sequence isolated from the Sargasso Sea
atggaatatctaattttatttctacctcttataggatctgtaattagtggtttttttggaaagaaaataggtgacagaaattcccaagttttaacaagttcatttgtgagtatttcagcaatactctctttagttgttttgtataaagttattagtttggactattcaaacaatcttgtagtagctacctggattaactctggaactttaaatgttaattggtcgataaaaattgactccttatcagcagttatgtttgttgtggtaaattttgtttcagctttagttcatatttactcaattggatacatgtcacatgatcctcacaaaactagattcatggcatatttatcattgtttacttttgcaatgttaactttagtaagttcagataactttattcaactattttttggatgggaaggtgtaggcttatgctcatattttttaattggattttggtttaaaaaagagagtgcgaacaaagctgcaataaaagcctttgttgttaacagagttggtgactttggtttagctcttggaatttttctgattttttatgtttttggtacagtcaattatgatgaggtttttgaacaaattccaaatgttttagataaagaaattaatttcattggcattaatatagaaattattgatttgatttgtttgcttctattaattggagcaatgggtaaatcagctcaatttttattacatacttggttgcctgatgctatggagggcccaacgccagtatcagcattaattcatgcagcaacaatggtaacagcaggggtattcctgattgtcagatgttcacctatatatgaatactctccattagctctcacagttataaccataattggaatgactactgctttctttgcggcaacagtcgcacttgttcaaaatgatattaaaaaaattattgcttattctacatgtagtcaattgggctatatgttttttgcagctggagtaggcgcttacaatgttgcaatgtttcatctatttacacatgccttttttaaagctttgctatttttaggagccggtgctgtaattcattcatttcatgaggaacaagatataaataaaatgggtggagttattaagaaactcccatacacatatgtattaatgcttatcggtactcttgctttaacaggttttccttttttatcgggtttttattctaaagatgcaataatagaatttgcttacttaagaggaaatgggataggaatacttgctgcttttgtgggtattgttacagctttattaacatcaatctactcttggagacttatttttaaaacatttcatggtaattttaataataaagaacttagtgttgataaaatacaagagtcatctatggttatgattgccccgttagtaatcttggcaataggagctatttttgcaggtatggcgtttaaaggtttatttatagggcatgaaatagcatatgaattttggggtcaatctataaaatttttagaaccactcagtacagatcatccaccaacatggtttttgtttttaacacctatactagttactgctgcaattccattttcttattatttgtatctaaaaaataaaaaaatagtttcaggattgaaagaaatgaatgaaccaatttaccaatttttagtaaaaaaatggtactttgatgaaatatacgattacctatttgttaatccttcaaaaagaattggaaagtttttatggaaaaaaattgacggatcaataattgataaatttggtcctgatgggatttcaagtgtaattaaaaatttatcaatcaaggcagtgaaatttcaatccggatttatatatcaatatgcattcattatgttgataggtttttctattttattaacaatactgattttaaattaat

SEQ ID NO: 221328 - DNA, 1486 bp, Unknown
  Bacterial polypeptide expressing nucleotide sequence isolated from the Sargasso Sea
aatgaatttcccaattctttcttcattaatacttttaccttccattggtgcactctttttattttttacaaaaagtaaaagtgaaaataagattactgcaaaatatgttgccttatttacatctctagtaaacttttttttatctatttatttatggtttttatttgaccaagcaacttctactttccaattcgttgaagatagaatttggatcaaaggtttaattaattacaaagtaggagttgatggaatatcaatactttttataattcttacaacatttattacacctctatgtataatttcagttaataattcagtcacgaaaagattaaatgaatttttaatagctatacttgttatggaaactttcatgataggtgttttttgttctctagatcttgttgttttttacttatttttcgaggctggattaatcccaatgtttttaattattggaatttggggtggagctagaagagtttattctgcttttaagttttttttatttactcttttgggatcagttctaatgttagtggcaattatttcaatttattggatcacaggtaccacagatgttgttcaactttacgaattaggtatagacacgaaatatcaaaatttattgtggttagctttttttagttcatttgcagtgaaaactccaatgtggccagtccatacatggcttccagatgcacacgttgaagctccaacagcaggatctgtgttgttagctgctattttacttaaaatggcaggttatggatttataagattttctttggggctatttccctccgcttcagaggtttttactcctttaatttatacattaagtgttatcgcaatcattttcacgtcgttaatagctctaatgcaagaggatatgaaaaaattaatagcttattcttctgtggcccatatggggtttgttactttaggaatatttacaatccaacagcaaggtattgaaggaagtataattcaaatgatcagtcacggtctagtatcagcagctttatttttgtgtgttggtgtcgtttatgatcgaatgcactctagattgatcgcaacctatggaggtattgttaccattatacccaaatatgctattttatttatggtatttactttagctgctttaggattaccaggaacaagtgggtttgttggtgaatttttaattttaatggctgcttttaaagataattttttagtagcagtattagctagtttaggagttatcattggagcagcatatatgctttggttgtacaaaagagttatttttggaaaactaataaactctgagttaaaaaaaatgattgatttaaataaatcagaggcgttcacgctcacctgtttagctataccaactttatatttcggtttttatccagaaccattaattaacactattgaagtttcaataagagatttaatagatacatataacttcagtgtggcaagcaaacaatga

SEQ ID NO: 221329 - DNA, 1912 bp, Unknown
  Bacterial polypeptide expressing nucleotide sequence isolated from the Sargasso Sea
atggaattatcgattatatttcttccacttattgcttcaattgtatccggtttttttggcagatatataggtgatagaaattctgaaatagtaacaagtgctctggtttcaatttctgcacttttatcaatttatgtcctttatcaagtaatcgtaaatcaatatgaagaaaatattgtcatagctacatggataagctcgggttcacttgatgtaaattggtcaatgttaattgatccattatcagcagtaatgttagtagttgtaacttccgtatctgctttagtgcatatttattcaattggttacatgtctcatgatcctcataagccaagattcatggcttacttatcattattcacttttgctatgttgatgcttgtaacatcagataattttattcaattattttttggctgggaaggtgttggtctttgttcttatttcttaataggtttttggtttaaaaaagaaagtgcaaatgctgcagcaataaaagcatttgttgtaaacagagtaggtgactttggctttgctttaggaatttttttaatattttatttatttggaactgttaattactctgaagtttttcaacaaattccaactgttgtagataaaaatttatcctttttaggttttgaagtaaaagcaatagatctaatttgtttacttttatttattggagcaatgggtaaatctgcgcagatattactgcatacttggttacctgatgctatggaaggtccaacacctgtttctgcattaattcatgcagcaacgatggtaacagctggggttttcttagttgtaagatgctctccaatctatgaatattcaccattgatactaaattttataactatcgttggaatgactacagcattctttgcagcaaccgtcgctttagttcaaacagatataaaaaaaattattgcttactctacatgtagccaacttggttatatgttttttgcagctggagtaggtgcatacaatgttgctatgtttcacttatttactcatgcatttttcaaagctttattatttttaggatctggttcagtaattcatgcatttaaagatgagcaaaatataaataacatgggtggtgtatggaaaaagttaccatatacatatactttaatgataataggaacacttgcattaacaggttttccatttttatcaggattttattctaaagacgcaattatagaatttgcatatttaaaaggtaataccactggttattatgcagctggaattggaataattacagcatttttaacatctatttattcatggagattgatatttaaaactttccatggagagtataataacaaagatatcaaaatagaggaaacacacgagtccccattggttatgctcgttccattatttattctctcaataggagctgtttttgctggttttctatttaaaggactatttattggtcatggtgagaacttattctgggcagagtcaattaagttcttagaacctttgagtgctgagcacccacctttatggtttttacttttaacaccatgtttagttttagtatctattccaattgcttattacttatttgtaaaaaacaaagagcttcctaattcaatagtttctataaacaaacctttgtataattttttagttaacaaatggtattttgatgagttgtatgatgtgttgtttattaaatcctcaaaaaaactaggtctatttttatggaaattttgtgacggcactataatagatggttttggtcctgatggaatttcttcttttataaaaaaatgttcaatcaaagcaactaaatttcaaagtggttttatctatcaatatgcatttgtaatgttattaggtttctctgctttactaacttttttaatagttaaataat

SEQ ID NO: 221330 - DNA, 913 bp, Unknown
  Bacterial polypeptide expressing nucleotide sequence isolated from the Sargasso Sea
ttgccaatagttggttctttatttttattttttactaaagataaagaaggaaataatttaactgctaaatatgttgctttatttacaactgtagtaaattttttaatttcgatttatttgtggatttcttttgaccaatcaacatctagttttcaatttgtagaagatagagtatggattgaaggatttattaattataaagttggagtagatggtatttcaattttatttattattttaactacatttataactcccatttgtattatatctgtaaataattcagtcaaaaatagattaagagattttttaattgcaattctaatcatggaaagtttcatgataggtgttttctgtgcacttgatttagttgtattctatttattttttgaagccggattgatcccaatgtttttaattattggtatttggggaggcgcaagaagagtttattcagcattcaaattctttttatatacactattgggatctgttttaatgttggttgcaataatttcaatttattggattacaggaacaactgacgtagttcaactatatgaaattggtattgatgttaaataccaaaatctattgtggttagcattttttagttcttttgctgttaaaacacccatgtggccagttcatacatggttacctgatgctcacgttgaggctcctaccgctggatctgttttgttagctgccatattattaaagatggctggatatggttttataaggttttctttaggtctattcccgattgcatctgaagtatttacaccattaatttacactctgagcgttatagcaatcatatttacatcactgatagctttaatgcaggaagatatgaaaaaagtaatttgcttattcatcagttgcgcatatgggttttgtaactttg

SEQ ID NO: 221331 - DNA, 1897 bp, Unknown
  Bacterial polypeptide expressing nucleotide sequence isolated from the Sargasso Sea
atggaattattcttaatagtatttttgccgttgattggctctataatttcaggtttttttggtaaaattcttgggttaaaattaagtcattttatctcttgtgtttttattttaacttcttcttttctttcagcttatttattttatttgacattaaacggtcatcaagctgaaaatctgtacttactagattggattaattctggatctattgaagcatcctggacattaagatttgatgctttgacttcagttatgcttgttgtcgttacatctgtttcagctttagttcatatttattctataggatatatgagtcatgacccttatcagtttagatttttttcatatttatccttttttactttcgccatgcttatgcttgttacttcagataatctattacaattattttttggatgggagggagtaggtctagcatcttatttattaattggtttttggtatgaaaaaccttctgcaaatgccgcagcaatgaaagcttttattgttaatagagttggtgattttggttttcttttaggaattgctgtactttatattgctacaggatctatcaatttcgatacaatttttctaaaaattaatgatattaaccaattcactctaaatattgcttgtcttttactttttatgggagcgatgggtaaatcagcacaactctttttacacacttggttacctgatgctatggagggaccaactccagtctcagcattaattcatgcggcaacgatggttactgctggaatttttcttgttgcaaggtgctctcctatttttgaaaattcagatcttgcattatcatttattataattattggcgcatcaactgcattttttgctgcaacagtcggccttgttcaaaatgatattaaaagaattattgcctattcaacttgctctcaactaggttatatgtttgttgctttaggtgtgggcgcataccaagtggctatatttcatctttttactcatgcttttttcaaagctcttctttttcttggatctggctcagtcattcatgctatgtctgatgaacaaaatatccagaaaatgggaggtttatataagattattccatttacatggataatgatgttagttggaactttggctttaactggagctcctttattatcaggttattattcaaaagatgctattattgagtcagcatacgcgagtcatgcttttggacatgagtatgcgttttatttgcttgtattttctgcgctattaacaagtttttattcgtggagacttatttttttaacttttcacggtaaaacaagatcatcgcaagatgttttggcaaaagcacatgaaagtccattatcgatgactttaccccttcttttattaagctttggtgcaatattttctggttttttgttttctgacttttttctatcacatgaaataaaaaacctttggggtaactctatttatgtgcgtcctgataatcatattcttgaagaaattcaccattctcctttttgggtaaaaaaaataccattagtaatgatgattattggttttagtatagctgttttattctatttgatatttaaaaatctgccttcatttctatcaagtaaaatgtcatttatttataattttttatacaataagtggtattttgatgaattttacgatcttatatttgtaaatcccttaaaaagaatcggtaaatttttatggttaatttttgataaaaaaattattgatggttttggtcctgacggtatttcttcgctagttattaatgtgtcaagaaatgtaagtaaaatccaaactggttttgtttatcattatgcattcgccatgcttattggcttgggtcttttgttgataagatttgtggtttattaat

SEQ ID NO: 221332 - DNA, 751 bp, Unknown
  Bacterial polypeptide expressing nucleotide sequence isolated from the Sargasso Sea
tatgtttattcaaaatcttttactcattttaatgggtttaccagttattggaggattttcacttcttttgttcccaaaaagagcggttagacaaatgaaactttttgctttaaatgtgagtttattaaatttcctagtctctttgaacctatggattttttttgataactcaacaccaaaatttcaatttgttcaacaaatggattgggttagcctgcttaatatgaacttctatattggggtagatgggatttcactattttttattcttttaacaacttttatggttccagtttgttttcttattagttggcagtcagtaaatcatcttgtcaaagaatttcttgtagcttttttgtttcttgaaagttttatgattgcagttttctgtatgttagatttacttttgttctacgttttttttgagagcgttcttattccaatgtttttaattattggcgtatggggatcacgtgaaagaaaaattcgagcggcttaccaattttttttgtatactttgattggatcattatttatgcttttagctattttattgatttattttcaagttggtacaacagatttacaagttcttaatacaattgaatttagtgagagaagacagctttttctttgggcagctttttttctttcatttgctgtaaaagttcctatggttcctttccatatttggttacctgaagctcatgttgaggctccaacatcaggctctgttattcttgcaggaatt

SEQ ID NO: 221333 - DNA, 367 bp, Unknown
  Bacterial polypeptide expressing nucleotide sequence isolated from the Sargasso Sea
tatggacatagcgatagctgattatttgccaatactaatttttatgtttgttgcgttagcaattagctgtctatttgttttggcaaatttcttagttgcagtaaataaccctgatcctgaaaagaattctgcctatgagtgcggatttgaacagtttggagactctagaatgaagtttgatgttcgtttttatttagtcacattactttttattatttttgacctcgaagtcgcgttcctatttccttgggccgttacatttggaaccttaggcttatttggttttgtttcaatgatggtttttctagctattcttacaattggtttcatatacgagtggaaaaaaggagcattggagtggcaataa

SEQ ID NO: 221334 - DNA, 783 bp, Unknown
  Bacterial polypeptide expressing nucleotide sequence isolated from the Sargasso Sea
aatgaccattattctttattgcctacttatttttgttcccttacttctaggtgttgtaatggcgttatatgcagatagaaaaatatgggcagcagttcaaaaaaggagaggcccaaatgtggttggcccgtatggtttgttccaagttcctgctgatggattaaaatttatttttaaagaaattattttacccgacggctctgataaaacagttttcctaattgctcccattattactcttgctctatcaattacagcctgggcagttgtaccagttcaggcgggtgtagtattggctaatataaatgtaggaatcttatacatttttgcaattagctctcttggtgtctatggaattcttatggcaggatggtcttcaaacagtaagtatcctttttttggcgctcttagatcagctgctcaaatggtttcttacgaagtttctataggttttgtaataataactgtcttgctatgtgtaggctcactcaatttgactgaaatagtaatggctcaaaagacaatgtggtttttcatacctttatttccaatgtttattgtcttttttatatccgcactagctgaaacgaacagacctccatttgatcttcctgaagcagagtctgagttagtagctggatatcaaacagaatattcaggaatgccattcgttttgtttatgtttggagaatacataaatattttattaatgtgcgcaatgaccactatcctattccttggaggatggttgccgccaattgatatttatccattaaatgctgt

SEQ ID NO: 221335 - DNA, 1924 bp, Unknown
  Bacterial polypeptide expressing nucleotide sequence isolated from the Sargasso Sea
aatggcgcatagtataattttattacccttgatcgggttcttgatttcttgttcgttatcattttttaaatctaataaatttattgaccgagcagcagagattatcacttcattatttattactattacagcaatattttcgttttatatttttattgataatattggggacccatcggtagtatcaatcaaactatttaactggatatcctctggttcattcaatgccgattggtcaatttatctagatacagctacaagagtaatgcttgtagtaattacaagcgtatcagcgttagttcatatttattcaattggttatatgtctcatgatgatagtaagcctcgttttatgggatacttatcattattcacatttgctatgttgatgcttgttacagcagataattttttgcaacttttctttggctgggagggtgttggacttgcctcttatttattaattgggttttggtataaaaaaccaactgcaaatgccgctgcaattaaagcatttatagtaaatcgcataggtgattttggattagctttaggtatttttacaatatttattgtttttggcagcatcgaataccagacagtatttagtaatgtctcatcttttaagaacgtaaattttaattttttaggtattgaactacatgctttgactttaatttgtattttcttatttattggcgctatgggcaagtcagctcaattatttcttcatacatggcttccagatgcaatggaaggcccaacaccagtatctgcattaatacatgcggcaacaatggttacagctggagtatttcttgttgtacgatgttcacctttatttgatttggctcctgttgctctggactttgtagttttgattggtgcaagtaccgcattctttgcagctaccgttgggctggttcaaaatgatattaagcgtgttattgcatattcaacttgtagccaattaggctacatgtttgttgcagctggacttggagcttacggtgcagccatgttccatttatttacacatgcattttttaaagcacttctatttttaggagctggatcagttattcatgccgttcatgaagaacaggatataaggaaaatgggaggtataagtaattttgttccaataactcaattaatgatgataattggaacaatttcacttatgggttttccattcacatctggctattactcaaaagatgcaatcatagaaacagcttatttatctaattccaatttcgcaaactatgcgtatatcttacttactgttggtgttgtgatgacatctttctattcatggaggcttatgtttcttgttttcaatggaaaaacaagaatggctgaagaagaccttagtaaagttcatgagtcttcctcagtaatgttaattcctctaataattttagcaattggagctttgttttttggatttttattcaaaagctattttatcggttattacagtgatgtattttggaatggctcaattatcgtccaccatgaagatcaccattcaattcctttgttaatatattatttgcctgcaattttaggcatagttggatttattatcgcttggttcatgtatattcggaaatcagatatggctaagaatatagccgagttaaataagccgctttacaattttctattaaataaatggtatttcgatgagttgtataattcaatttttgtaaaaccagttatggcaattggccagattttttggaagtttattgatggtttaattattgatggttacggacctaacggaatagctgctttagtgagcagaatatcaataaaagcaaagcaagttcaatctggatttatttaccattatgcttttgccattttaattggtctttcattcattattactttcataatttttaggttttaa

SEQ ID NO: 221336 - DNA, 1751 bp, Unknown
  Bacterial polypeptide expressing nucleotide sequence isolated from the Sargasso Sea
catggaactatcaattatatttcttccacttattgcttcaattatctcaggtttttttggaaaatatatcggtgatagaaactctgaaatagtaacaagtgctcttgtctcaatttcagcgctcttatcaatttatgttctttatcaagtaattgtaaatcaatacgaagaaaatattgttatagctacttggataagttccgggtcacttgatgtaaattggtcaatgttaatagatccattatcagccgtgatgctggttgttgtaacttctgtatctgctttagtacatatctattcaattggttatatgtcgcatgatcctcataaaccaagattcatggcttatttatcattgttcacatttgcgatgttgatgcttgtgacttcagataattttatacaattattttttggttgggaaggtgttggtttatgttcctactttttaattggtttttggtttaaaaaggaaagtgcaaatgctgcagcaataaaagcatttgttgtaaatagagtaggtgattttggttttgctttaggaattttcttaatattttatttatttggaactgttaattattcagaagtttttcaacaaattccaactgttgtagataaaaatttatcatttttaggttttgaagttaaagcaatagatttaatttgtttacttttatttattggtgcaatgggtaaatctgcacagatattgttacacacttggttacctgatgctatggagggtcccactccagtttctgcattaattcatgcagcaacaatggtaacagccggtgttttcttagtagtaaggtgttccccaatttatgaatattcaccgttaatacttaattttataactattgttggaatgactactgctttttttgcagcaactgtcgctctagttcaaacagatataaaaaaaatcgttgcttactctacatgtagtcaacttggttatatgttttttgcggctggagtaggcgcatacaatgttgctatgtttcatttatttactcatgcatttttcaaagctttattatttttaggatctggatcagtaatccacgcatttaaagatgagcaaaatataaataatatgggtggtgtattgagaaagttaccatacacctatgctttaatggttatcggaacacttgctttaacaggttttccatttttatcaggattttattctaaagatgcaattatagaatttgcgtatttaaaaggtaatactactggttattatgcagctgggattggaataattacagcgtttttaacatccatttattcatggagattgatatttaaaacttttcatggagagtacaataataaagagatcaagatagaggaaacacacgagtctcctttagtaatgcttgttcctttatttatcctctcaattggagcggtttttgctggttttctatttaaaggactttttattggtcatggtgataatttattctgggcagaatctattaaatttttacaacctttaagtaccgaacatccacctttatggtttttgcttttgacaccatgtttagttttattatctatcccaattgcttattacttatttgttaaaaacaaagatttgcctaattcaatagtctctatgaataaacctttgtataattttttagtgaacaaatggtactttgatgagttgtacgatgtattgtttattagatcctcaaaaaaactaggaatatttttatggaaatttttgc

SEQ ID NO: 221337 - DNA, 370 bp, Unknown
  Bacterial polypeptide expressing nucleotide sequence isolated from the Sargasso Sea
catgatttataactttttatcagactatctttcaataattttattcttagcaattgcactatttttgagcataggttttatatttgttaattatttagctgctccaaaaaatcctgatcctgagaaactttcagcgtatgaatgtggatttgaagcatttgacgactcaagaatggaatttgatgtaagattttatctagtagcaattttatttattatatttgacttagagatagcctttttatttccatgggcaatttcacttggaaatataggtatatttggtttttggtcaatgatgttttttttaggcattttaacaataggatttatatacgagtggaagaaaggggctttagagtgggattaa

SEQ ID NO: 221338 - DNA, 1921 bp, Unknown
  Bacterial polypeptide expressing nucleotide sequence isolated from the Sargasso Sea
atggatattgaatatttaatcatttttttaccactattgggatcaattatttcgggattatttggtaaatatataggatctaggaattctgaaataataactagtttatttgtttctgtatctgcatttttatcatttataattttctacaaagttttaaaccaagattatacaaacaatttaaatatttttacttggataaattctgggactttaaatgttagttggtctattgatatagatgctctttcttcagtaatgcttgttgtagtaactttagtttcatctttagttcatatttattcaataggatatatgtcagacgatcctcataaacaaagattcatgtcttatttatctttgtttactttttctatgttgatgcttgtaacctcagataattttttacaattgttttttggatgggaaggtgttggtttatgttcgtattttttaataggtttttggtttagaaaggaaagtgcaaatgccgcagcaatcaaagcattcgttgtaaatagagtaggtgattttggttttgcacttggtatttttttaatattttatctatttggtactgttaattatgacgaagtatttgagttggtgccaagtattctaaataaagatttatcatttctaggaattaacgtaaacgctattaatctaatttgtgttcttttatttataggagctatgggaaagtcggctcaaatttttttacatacttggttgccagatgcgatggaaggtccaacgcctgtatcagcattaattcatgctgcaacaatggttacagcaggagtttttttagttgtaagatgttcacctatctttgaatattctcctttagcattaaacttagtaacgataataggaatgtccacagctttttttgctgcaacaattgctttggtgcaagacgatataaaaaaaattattgcatattcaacttgcagtcaattaggttacatgttctttgcagcaggtgtaggtgcttataatgttgctatgtttcatttgtttactcatgcattttttaaagcattattatttttaggttcaggatctgtaattcattcttttaaaaacgaacaaaatattaatgcaatgggtggtgtatggaaaaaactaccttacacatgggccttgatggtaataggaactcttgcattgactggttttccatttttttcaggattttattcaaaggatgcaattattgagtttgcatatttaagcggcagtgcgactggctattttgcagctggaattggtatttttactgcctttcttacatcaatttattcttggagactcatgtttaaaacattccatggcaattataacaacaaaaatatagatagcagcagcatgcatgagtctccacttatcatgataattccattaattattttagctattggagcaatattttcaggttttttgtttaaagatttgtttattggagttgagtcatcaggaaatttttggaaagattctatattttttttagaacctttaagcactgatcatccaccattatggtttatagtttttactccaattttggtaattttatctataccaactgcttattactttttcattataaataaaaaatttactaacgaaattgttaaaggaaatttacctttatataattttttaaaaaataaatggtattttgatgaaatttatgaatatttatttgttaaaccttcaaaaaaaataggcttgtatttttggaaaaaaattgatttaagatttatagatagatttggacctgatggtgtttctagcttaataaaaataatttcttctatagcagttaaatttcaaaatggctttatttatcattatgcctttgtgatgctactaggtttttctgcattattaacttttttaatattaaaataat

SEQ ID NO: 221339 - DNA, 370 bp, Unknown
  Bacterial polypeptide expressing nucleotide sequence isolated from the Sargasso Sea
atgcttgcggattttttaaaagattatttaccaataatcctatttttaataatagcgatagggctaagtgtaatttttattgctataaattacttggcctcaccaaagaaacctgaccctgaaaaattatctgcttatgaatgtggatttgagccattcaatgattcaagaatggaatttgatgtaagattttatcttgttgctattttattcattatttttgatctagaaattgcatttttatttccttgggcaatttctttaggacaaattggtttatttggatttacttcaatgatgatttttttattcattttaactattggctttatatatgaatggaaaaagggagcattagattgggaataaa

SEQ ID NO: 221340 - DNA, 1027 bp, Unknown
  Bacterial polypeptide expressing nucleotide sequence isolated from the Sargasso Sea
catgaattatttttttattttattaaacatagtaattgaaataataattgttgttttacctctttttttaatagttgcttatacaacttattcggagagaaaaattattggcttcatgcaatccagattaggtcctacaagggtaggaccttttggttttctacaacctattgctgatgtaattaaattacttacgaaagaaataattataccatctaatgccaatcaaggtctttttttagcagctccagtcataatgttagtaccttccttattagtttggtctgtaatacctctgtcagaatattttgttatagcagacattaatgctggacttttatttatactggctttgacatctttaagtgtatacggtgttatattagctggatgggcatcaaattctaaatatgcatttctagggtccatgagatcagctgctcaaattatagcttatgagatagcaatgggttttgcattagtaggagttttaatggcggcaggaagtttaaatttgcaagaaataattatctctcaaagaggaggcatactaagttggtattggttgccactatttccattattcctcatctatttaattgctggtattgcagagaccaatagggctccatttgatgtgtcagagggggagtctgagattgttgcaggttttcatgtcgaatattctggagtggcttttgcaatgttcttccttgcagaatatatgaatttaatactcatcagcatacttgtttcaattatgttttttggcggatggctgtctccctttgaaggtatttttttaaatagttattttggctgggttccaggtttcatctggctgtcaataaaaactttattttttatttttctttttttatggttaagagcaacattgcctagatataggtatgatcaaattatgagattagggtggaaagtatttctcccaattacaattatttggattttctttgaaggcattatgatatattacaaagttgaaccatggtttatagcaaaatga

SEQ ID NO: 221341 - DNA, 1477 bp, Unknown
  Bacterial polypeptide expressing nucleotide sequence isolated from the Sargasso Sea
atgaattttcctattctttccactttaatttttttaccacttttaagttcactctttatatttttatcaagagataaaaaaaatcataattctatttatatatctttatttagtagtattgctactttcctactttctttgtttttatggtattctttagatataaacagtgcggaatttcagtttgttgaagaaaaatcctggataaacaattatattaaatttaaattaggggtagatggaatttcaattttatttatagttttaactaccttcatcacacctatatgcataatttcatgtataaatagtattaagacaagagttaaagagtttcttatcgcaatattaattttagaaacttttatgatcggtgtgttttgttcacttgatctcgttatattttatttattttttgaggcaggtttaattccaatgtttttgataattggggtatggggaggtcctagaagagtttattctgcatttaagttctttttatttactctacttggatcagttttaatgctagtagctataatagttatttattggttaactggtacaactgatataactgagatttataaaattaaaattccaaaagattatcaaaatatactttggttagcatttttaagttcttttgctgtaaaaatgccaatgtggccagttcatacttggcttccggacgcacatgtagaggcgccaactgctggatctgttatactggcagcgatactattaaaaatggctggatatggatttctgagattttcaattcctatgtttcctatcgcgtcagaatattttacaccacttatttattccttaagtataattgcaataatttatacatcattagttgcattaatgcaggacgatatgaaaaaattaatcgcctattcatcagttgctcatatgggctatgtgactttaggtatttttacacttacaaaacaaggtatagaaggaagtatatatcaaatgataagtcacggtcttatttctgcagcactatttttgtgtgtaggggttgtctatgacaggcttcattcgagaatgataagttcatatggaggtttagttagttatttacctaaatactcttttttatttatagtatttgctttggctgctcttggactacctggaacttcgggatttttgggcgaatttcttgtattaacaggggcttttcaaaaaagttacttggctgcaatgctagcaacgtttggagtagttcttggtgcagcatatatgttatggcttacaaaaagagtgatttttggaactataaataatgtagaaattaaaaatttaagcgatgttaacaaatctgaaattataatgttagcgacattagctttctttgtgatattttttggtttttacccacttccgttaatggaaacatttagtgtatcagttaatagcttaatcgataattatcaaatagcgctaatttcaaattaaa

SEQ ID NO: 221342 - DNA, 1081 bp, Unknown
  Bacterial polypeptide expressing nucleotide sequence isolated from the Sargasso Sea
atggagtacgcaattttatttttaccattactcggttcgataattggatatttaggtaagtcagtaacaaaatatttctcagaaataattacaagtttccttgttagcatttcagcagttttatcaattatagttttttggaacggtttccataatgacatttacgggaattataaaatttttgaatggataagttctggtgattttaccgctaattggtcaataaatattgatccattaagctcagtgatgttagttgtagtaactttcatatcagctctagtgcatatttattctatcggatatatgagccatgatccgcataagccaagatttatgtcctatttatcattgttcactttttcaatgttagccttagttgtttcggataattttttacagctcttttttggatgggaaggagttggtttgtgctcttatttattgataggtttttggtataaaaaagaaacagctaatgatgctgcaataaaagcatttatagtaaacagaattggtgattttggattagctattgcaatttttttaatttttttctttttcggtactattaacttcgatgaagtattcaaaatcacagaacagtttgctgaaaaaaaactaattttttttggatttgaattaaatttaattactttaatttgtgtatttctttttattggtgcaatgggaaaatctgcgcaatttttacttcatacttggttacctgacgctatggagggtcctacaccagtatcagctttaattcatgcagctactatggtaactgctggcgtctttctagtcgttaggtgttcacccatgtttgaatattctcaagtcgcactaaatttagttacgatagtcggaatgataactgcaatttttgctgcgtctgttgcactagttcaaaatgatataaaaaaaatagttgcctactcaacttgcagtcaattaggctacatgttttttgctgctggcgtcggtgcatatcatgttgctatgtttcatttatttacccacgcttttttcaaagcgcttctatttttaggggctggatctgttatacatgctttttagg

SEQ ID NO: 221343 - DNA, 979 bp, Unknown
  Bacterial polypeptide expressing nucleotide sequence isolated from the Sargasso Sea
gatggtatttcaatttttatttattatcctttcaactttgatagctcctttatgtattgtatcagttaataaaaccgtcactgttagattgaaagagtttttaatagctatattgttaatggaaagtttaatgataggtgtcttttgttcattagatttagtaatattttatttattctttgagggcggattaatacctatgtttttaataattggtatttggggtggaccaagaagggtttactccgcttttaaatttttcttatttactctgctcggctctgttttaatgttagtagctattatttctatttattggatacatgacacaacagacattgttgaattgtacaatttaggaattgaaacaaaatatcaaaacttgttgtggttagctttttttagttcattcgcagttaaaactccaatgtggccggtacatacttggctacccgacgcacatgttgaagctcctacagcaggttcagttttattagctgcaattttacttaagatggcaggatatggctttattagattttctataggactttttccactagcatctgagtattttgttccattaatttatgttctaagcttaatagcaataatttatacttcgtttgttgcactgatgcaggatgatatgaaaaagttaattgcatactcatccgtagctcatatgggttatgtaacacttggaatttttacaataacaaaacaaggtttagaaggaagtattatacaaatgattagtcacggattagtttcagcagcactattcctgtgcgttggagtcgtttatgacagaatacattcacgtttaatttcaacttatggaggtgttgtttctataatgcccaagtacgcagttttttttatgatattcgtacttgcagctataggcttacctggaacgagtggttttgtgggcgaatttttaattcttatgggtgcttttaaaaaaaagcttttt

SEQ ID NO: 221344 - DNA, 988 bp, Unknown
  Bacterial polypeptide expressing nucleotide sequence isolated from the Sargasso Sea
atgctttttttccttttaacgagtttaattaaaattttaacaattgcagttcctttacttgttgcagttgcttatctaacactggcagaaagaaaagtcatgggatctatgcaaagaaggaaaggtccaaacgttgtgggatttttcggaattttgcaacctttagctgatgggttaaaacttttagttaaagaaccggtgttaccgagtaattcaaatattcttttatttttaggtgcaccttttatgactttcttattggctttaatttcttgggctgttattccatttgatgagggagtagttctttcagatttaaatcttgggattccctacatttttgctatttcttctcttggagtttatggtgtaattattgctgggtggtcaagtaactctaagtatgcttttctaggagctttgagatccacagcacaaatggtttcgtatgaagtctcgctaggcctcattttaattactgtccttttatgtgttggatcattaaatttatcttcgattgttttagcacaaaagtatgtctggtttggtttacctttatttcctctacttgttctattttttatttcttgcttagccgaaacaaaccgtgctccctttgatttaccagaggctgaagctgagttagttgctgggtataacgttgaatattcatctatgggatttgctttatttttcttaggggaatacgcaaatatgattttcatgagtgttttatgtgctattttatttcttggtgggtggttaccgccagtaaatatttttctatttacgtggattcctggggctttttggcttggtctaaaaacaattttctttttgtttttatatatttggactcgagcagcttttccacgatatcgttatgaccaactaatgaaattagggtggaaagtatttttaccattatccctcgcatgggtaattttagttgcagggactttagtttcatttgatttgttaccttagt

SEQ ID NO: 221345 - DNA, 1015 bp, Unknown
  Bacterial polypeptide expressing nucleotide sequence isolated from the Sargasso Sea
ctgatatggtctctgtttcaaatcgcaattgtcactgtttgtttaatcttaaccgttgtttttttagtttattttgagaggaaggtaattggatatatgcatgccagagtggggccaaacagggttggaccaaagggtacgcttcaatcgatagccgatacaattaaactgttattaaaagaagtcatcatcccggataaagctgatcgattcttttttttactttcaccattgttgttactgataccagcacttgcagcttgggcagtggtgccatttagccccgaatttatcatcgctgacatcaatgctggattgctttatttattggcactaacgtcatttggtgtctacggtgtcatcttggctggttgggcttctaactccaagtatgcttttcttggttcaatgagagcagcggcgcagatggtcgcatatgaaattgcaatgggatttgctttagttggcgtactgatggctggcggcagcttaaaactcggtgaaattgttgctgcacaatctggtggtgtactcagctggttctggataccactatttcctctgttcatcgtttacttcatttccggcatagccgaaacaaatcgtcatccatttgatcttgcagagggtgaagcagagattgttgctggatttcatgttgagtattcaggaattggattcgcgatcttttttcttgctgaatacattaatatggctctaatctctgtattgacatcaatattgttcctaggcggatgggaaagcttctttgctggaatttcactcttagaatcatcaggattctcttttttaacagaaccgagcttgttctggttattaataaaaactgttttctttttgtttgtctttatttggttgagagcctcatttcctagatatagatatgatcagttgatgtcactgggatggaaagtgctcattccaatcacaatcctatggattggtgttgaatgcgttatgtatgtaatgcaaattggtccatggagcgtctgat

SEQ ID NO: 221346 - DNA, 1006 bp, Unknown
  Bacterial polypeptide expressing nucleotide sequence isolated from the Sargasso Sea
tttgattattacactgcaaatagtgtttatctcgatttgtgttattttggcggttgctttcacgacttattttgagagaaaagtcattggttacatgcaaggcaggcttggaccaaatagagtggggccgaaggggcttggtcagccttttgcggatgtgatcaaactcctaatcaaagaggttgtcgttccatctaaatcaaatcggtttctttttgttatcgcacctttactttcattggttcctgctcttgcaacatgggcagtaatccctctcactgacgggtttgtaatagcagatatcaatgcaggattgctttatgttcttgcattaacatcggttggcgtttacggagtgttgttggcaggttggtctaccaactcgaaatacgcttttttaggtgcgatgcgatcggcagctcaaatcgtggcatatgaaattgcaatggggttcgcactggtaggtgttctcatggcgggtggcagtcttaatcttggtgaaatcattgcctctcaatcgggaggattcagtaattggtttatcattccattgttcccgctttttgtcgtatattttgtttctggtgtcgcagaaacaaacagagcaccatttgatgtcgcagaaggtgagtcagaaatcgttgctggatttcacgttgaatattccggtgtcgcttttgctgtattttttcttgctgagtatgcaaatataattttgattgctgcgttgacttcaatttttttccttgctggatggtcatcgcctttcgagggttggacaatacttggttcagagagttttctcagagagccaagctttttctggttggcattaaaaatatgctttttcatttttgtattcttttggataagggcaacttttccaaggtacagatacgatcaaattatgcgtctgggttggaagatatttatacccgtgacaattgtgtggattgccgttgaaggtttgatggcatggatgaaagttggaccgtgggctatttag

SEQ ID NO: 221347 - DNA, 1300 bp, Unknown
  Bacterial polypeptide expressing nucleotide sequence isolated from the Sargasso Sea
catgaccatgatatgcattcttctcttcattggtgcgatgggcaagtctgcccaagcaccactgcacgtttggctgccagattcaatggaggggccgacacccatatcggctctgatccacgccgcgaccatggtaacagcaggaatattcatggttgctagaatgtcaccactttttgaattgtctgagatggcattggcattcgttttaataatcggttcagtaacagcattttttatggggctactgggaatcatacaaaatgacattaaacgtgtggtagcctactcaactttgtctcaacttggttacatgacggttgctctcggggtatcagcttacagtgcagcgatctttcatctcatgacgcatgctttctttaaagcgcttttgttcttagcagcaggctcagtgattattgcgatgcatcatgaacaagacataagaaaaatgggcggattaaaaaaatacatgccgatcacttacatcacgtctttgattggaacactcgcactggtcggttttcctggaagcgctggctttttctctaaagacgcattaattgagacagtaaaatactcgcattggctcggcgatggcatgatttattggatttcatatctgagtgtgctgcttggggtatttatcacgtcactttattcattccgcatgtttttcatggtgtttcatggcgaggaaagaatggacaaagaaacaaaatctcatttgcatgaaactccaaccgtggtcactatgcctcttgttttgctggccattccctctgtctttgctgggtggtttaccattaaaccgttattgttcggtgaatattttgatggcgcgatccaggttttacctcaacacgatgtgctagctcaactatctgagggttttcatggcagctgggatttcttactccattctttcactgcaagtttggctttttacatggcgtttcttggtttttcggtagcctggttgctctacatcaaattcccagaaatacccaataagatacgcatgaaaatgcgagccattgtggtggtgttggaggaaaaatatttcttcgacacgctttggatgaaagtttttccttcactaggaaagtcaatcggacgcattttatggaaacaaggcgatgaaaaaatgatcgatggcgcacttgtgaatggcacagcttatgggattcgttccatcgcatctgttataagaaacattcaaacggggtatttgtatcactacgccttcgcgatgattgttggtttggttatcattcttagttggttgctctggacatga

SEQ ID NO: 221348 - DNA, 1000 bp, Unknown
  Bacterial polypeptide expressing nucleotide sequence isolated from the Sargasso Sea
aatggaatacttaatattatttttacctttgataggttcaatcatatcgggtttctttggcaaaaccattggtgatagattatcgcaattaatcacgtgtattttggtttctatttcggcattattatctttgttcatattttttaaagttgtttcatcaggatatgagcataatgcaattatcgcaacttggataaattcaggatctttaaatgtaaattggtcaattaaagttgatgctctttctgcagtaatgttagttgtagttactctagtttcatccttagttcatatctattctgttggttacatgtctcatgacccacataaaccaagatttatgtcctatctatcattatttacattcgctatgttaaccttagtaacatcagataattttttgcaattatttttcggatgggaaggagttggtctttgctcgtactttttaattggtttttggtataaaaaagaaactgctaatgctgctgctattaaggcttttatagtaaatagagttggggactttggttttgcattgggaatttttttaatattttatatttttggcacagtaaattacgacgaagtttttcttaaaatacctgaaattatagatcaaaaaataaattttctatcttttgaatttaatacaatagacttaatttgtttaatgctttttgttggagcaatgggaaaatcagcacaatttttgcttcatacatggttaccagatgctatggaaggtccgacaccagtatctgcattaattcatgcagccacaatggtaacagcaggagtttttttagtagttagatgttctccaatttatgagtattctgaattagctttatctgtaatcacattagttggaatgacgacagcttttttcgcagctacagttgcattagtgcaaacagatataaaaaaaattatcgcttattcaacatgcagtcaactgggatacatgttttttgcagccaggtgtaggtgcgtataa

SEQ ID NO: 221349 - DNA, 1063 bp, Unknown
  Bacterial polypeptide expressing nucleotide sequence isolated from the Sargasso Sea
cttgttcgatacgatcaacgcgggcgggtcccagcttctcggcttcgcatggccgacggtgtgggcaatcgtgcgcatcctcgtcgtctccgtcgtcatcctgctgtgcgtcgcgtacctgattctgtgggaacgcaagctgatcggctggatgcacgtgcgtctcggtccgaaccgcgtcggccccggcggcctgctgcagccgatcgccgacgtgctgaagctgctgctgaaggaagtcattcagccgagcgccgccagccgctggctgtacctgatcgcgccggtgatgaccgtcgtgccggcgttcgccgtgtgggccgtgatcccgttccaggccgaagcggtcctcgcgaacgtgaacgcgggcctgctgtacgcgatggcgatctcgtcgatcggcgtgtacgcggtgattctcgcaggctgggcatcgaactcgaagtacgcgttcctcggtgcgatgcgcgccgcggcacagatggtgtcgtacgaaatctcgatgggcttcgcgctggtgctggtgctgatgacggccggcagcctgaacctgtcggaaatcgtcggttcgcagcagcacggcttcttcgcgggccacggcgtgaacttcctgtcgtggaactggctgccgctgctgccggcgttcgtcgtgtacttcatctcgggcattgccgaaacgaaccgccacccgttcgacgtggtggaaggggagtcggaaatcgttgccggccacatgatcgattactcgggtatggcgttcgcgctgttcttcctcgccgagtacatcaacatgatcgtgatctcggcgctgaccgcgacgctgttcctcggcggctgggatgcaccgttcgaattcctgtcgttcattccgggcatcttctggctggtgctgaagatattcgcgctgctgtcggtgttcatctgggttcgcgcgacgttcccgcgtttccgttacgaccagatcatgcgcctgggctggaaggtattcctgcccgtcacggtggtctgggtggtcgtggtcggcttctggatgatgtcgccgctcaacatctgggtgaagtaa

SEQ ID NO: 221350 - DNA, 1483 bp, Unknown
  Bacterial polypeptide expressing nucleotide sequence isolated from the Sargasso Sea
aatgaattttcctattctttcatctttaatattattaccaatagttggtgctttatttttattttttaccaaagataaagaaggaaataatttaactgctaaatatgttgctttgtttacaactgtagttaattttttaatttcgatttatctttggatttcttttgaccaatcaacgtctatttttcaatttgtagaagatagaacatggattgaaggatttattaattataaagttggagttgatggtatttcaattttatttataatattaacaacatttataactcccctttgtataatatccgtaaataattctgttaaaaatagattgagagattttttaattgcaattctaatcatggaaagtttcatgattggtgttttctgtgcacttgatttagttgtattctatttattttttgaagctggattaataccaatgtttttaattattggtatttggggaggtgcaagaagggtttattccgcattcaaattctttttatacacattgttaggttctgttttgatgttagttgcaataatttcaatttattggattacaggaacaactgacgtagttcaactatatgaaattggtgttgatgttaaatatcaaaacctattgtggttagcattttttagttcatttgcagttaaaacacctatgtggccagttcatacatggttacctgatgcgcacgttgaggctcctacagcaggatctgtattattagccgcaattttattaaagatggctggatatggttttataagattttctttaggtctttttccggttgcatcagaggtatttacaccattaatttacactttgagtgttatagcaatcatttttacttcactgatagctttaatgcaggaagatatgaaaaagttaattgcttattcttcagttgcgcatatgggctttgtaactttaggtatattcactttgcagcaacaaggaattgaaggaagtataattcaaatgataagccatggcttagtttcggcagcattatttttaactgttggtgtagtttatgacagaatgcattctagattgataagcacatatggtggactagtttctgtaattccaaaatattcaatactgtttatgttatttgctttagcatcacttggtttacctggaaccagtggttttattggtgagtttttaatattaatgggagctttcaaggataattttttagtagctgttattgcaagtataggagtaattttaggagctgcatacatgttgtggctctataaaagagtagtatttggaaaattgctcaatgaagatcttaaaaaaattttagatttaaatagatctgaatattttattttatcttgtttagctgcaccaatcttattttttggtttttaccccgatccattaatcaacactattgaagtttctgtcactgatttaattaatatgcataacacaaatatagctagcaaataa

SEQ ID NO: 221351 - DNA, 1259 bp, Unknown
  Bacterial polypeptide expressing nucleotide sequence isolated from the Sargasso Sea
aatggaatttgaatatctaattatttttctgccattagtaggtgctattatttcaggattttttggaaaatttctaggttcaagaaattcagaaattttaactagtttgtttgtttcaatttcctcaattttttcttttttaattttttacaaagtatttaatgatggttatacaaataatttagatatatttacttggataaattcaggaacatttaatgttaattggtccataaaaatagacgctctttcatctgtaatgttggttgttgtaacattagtttcttcaattgttcatgtatattcaattggatatatgtcacatgacccacacaaacaaagattcatgtcctatttgtctttatttacattctccatgttaatgcttgtaacctcagataattttttacaactgttttttggctgggaaggagttggtctatgttcatattttttaataggtttttggtttaaaaaagaaagcgctaatgctgctgcaataaaagcttttgttgttaatcgtgtaggagattttggatttgctttaggaatatttttaatattttatttatttggaacggttaattatactgaagtatttgaattaatacctcagtcattagacaaaaaattatcattcttaggaataaatattaatgcagttaacttaatttgtattcttttattcataggagcaatgggaaaatctgcacaattatttttacatacttggttacctgatgcaatggaaggtcctactcctgtatcagcgctgatacatgctgcaacaatggttacagctggtgtatttttagttgtaagatgttccccaatatatgaatactctccacttgtactaaatctcattactattgttggtatgtccacagcattctttgcagctacagtagctttagttcaagacgatattaaaaaaataatagcttattcaacttgtagccaactaggatacatgttctttgccattggagttggtgcttataatgttgctatgttccatttatttacacacgctttttttaaagctcttctttttttaggatctggttcagtaattcattcatttaaagatgagcaaaatatcaatttaatgggaggtgtttggaaaaaacttccatatacatggatattaatggttattggaactcttgcgctaactggatttccatttttatctggtttctactcaaaagatgcaattatagagtttgcttacttgaaaggtaattcagtaggtt

SEQ ID NO: 221352 - DNA, 1059 bp, Unknown
  Bacterial polypeptide expressing nucleotide sequence isolated from the Sargasso Sea
aatggaatacctaattttgtttctacctctaataggagctgtaattagtggtttttttggaaagaaaataggagacagaaattctcaaattttgacaagttcgtttgtgagtatctcagcaatactctctttacttgttttgtataaagttattagttcagattattcaaacaatcttgttatagctacttggattaactctggaacattaaatgttaattggtcaataaaaattgatgccttatcagcagttatgtttgttgtggtaaactttgtttcagctttagttcatatttactcaattggttacatgtcacacgatcctcataaaacaagatttatggcatatttgtccttatttacttttgcaatgttaactttagtaagttcagataactttattcaactattttttgggtgggaaggtgtaggcttatgctcatattttttaattggattttggtttaaaaaagagagtgcaaacaaggctgcaataaaagcttttgttgttaatagagttggtgattttggtttagcgcttggaatttttctgattttttatatttttggtacagtcaattatgatgaggtttttacacaaatcccaaatgttttagataaaaaaataaattttgttggaattaatatagaaattattgatttgatttgcttacttttattaattggtgcaatgggtaaatcagctcaatttttattacatacttggttgcctgatgcaatggaaggcccaacaccagtatctgcattaattcacgctgcaacaatggtaactgctggagtgtttctgattgtcagatgctcgcctatatatgaatactctcaattagctctcacagtaataaccataattggaatgactacggctttctttgcagcaacagttgcacttgttcaaaatgatataaaaaaaattattgcttattctacttgtagtcaattgggctatatgttttttgctgccggagtaggagcttacaatgtagcgatgtttcatctatttacgcatgctttttttaaggctttgctatttttaggagc

SEQ ID NO: 221353 - DNA, 1335 bp, Unknown
  Bacterial polypeptide expressing nucleotide sequence isolated from the Sargasso Sea
tacttattaataggtcactactgggagaaaaaagataattcttctgcggccatgaaagcttttattacaaacaaaatagctgatgtaggtttgatgattggaataattattttagctttaaacactggaacattgaggatttctgaaattctttatcagtcaacacataattatgaaaagttatcaactgttgcatttgttgctgcaattttattatttattggtgcgatgggcaagagtgctcaatttccattacatgtttggttgcctgatgctatggctggtccaacacctgtctctgcacttatgcatgcagcaacaatggtcacagcaggtgtctatttattagcaagaatgtttccattttataaagcaatggcaccagatgcattagatgttgtgatgcttttcggtgtaatcactttattagctgctggattaattgctgttgttcaagatgatctaaaaaaggtccttgcatactcaacagtgagtcagttgggatacatggttgctgcaattggttcaggtgcatataccgctgcattatttcatttatggacacatgcatttttcaaagccctattgtttttgggagcaggttctgttattcacgctgttcatagcaatagtatgttggaaatgggtggcctaagaaaagttatgccaaagacttttgctacattcataataggaacagttgctttggctggacttccaccatttgcaggtttcttctccaaagatgaaattcttgcttcatttaaccatgaaggtgaaacaactttcttttttatagcagttctaggtgcatttataacagcattttatatgactcgagcagtatctttaacgttccttggagagtatagaggccatggccatcctcacgaatctcacaacctcatgacaacaccacttctaactctgtctgtctttgcaatagcctcaggttgggtaaatattccaggagtgtacacaggatttacagactgggttacaactaggaagaataaaattgttgaataccatccggaaagctttgacttatttgcactatcaagtggcttactagctggtttgcttggcatcggacttggatattatttgtatcaactacaaggaagtgcggaaacaggtgatgataaaattaaaattcaacctatctggtcagttcttgaaaacaaatattatttagatcacttttatttcaagtttgtaatcgatccagtaaaaattaacatttccaaagcagtagataaattcaacacaaatgtaattgatagatttgtaaatggttttggacaagttgcttccttaatgggtggtgttgtg

SEQ ID NO: 221354 - DNA, 1486 bp, Unknown
  Bacterial polypeptide expressing nucleotide sequence isolated from the Sargasso Sea
atgattgactggccattagtatcagtaataatttttttacctttaattggtgctttaattattctttttattaaagaagatgaattaacatcaattaatattaaatgggctgctttactagcaacattaggaacatttattttaagtttaatactctggttacaatttgattattccaatccgtcttatcaatatgaagaaaaatttagatggtttgatgattttaatttcttctaccatgttggagttgacggtatctcactttttatgattttattaagtacatttttgaccccactttgtattttagctagttggaataatataaaaaaaagagtcaaggaatacatgctttcttttttatttttagagactgtaatgattggaatgtttgcttctatagacatacttttattttatattttttttgaagcagtattaataccaatgtatctaatcataggtatatggggaggtaatagaagaatctatgcttcttttaaattctttctctacactcttttggggtcagtactcatgttgattgctattattgtgatgtatagaaatacaagttcaatgagtattgaattcttacaaggtaattatttttcctataatactcaattgtttctatggctcgccttctttgcttcctttgcagttaaaattcctatgtggccgtttcatacatggttgcccgatgcccatgttgaagctccaacagctggatctgttattttagccggagtacttttaaaaatgggtggatatggttttatccgtttctctttaggcatgcttccagaagcaacagagttttttattcctttaattatgacattaagtatagttgccatagtatacacttccttagtagcactagcacaaactgatattaaaaaactaattgcatattcatctgttgctcatatgggaattgtaacaattggaattttcttagtgaatcaacaaggcttagaaggagcaatgatgcaaatgattagtcatggactagtttcagcagctttatttttatgtgttggtgttatttatgatcgaatgcatactagagaaattgaattttacggaggattagttcaaagaatgccactttatgcaacagtattcatgatttttatgctgggatcagttggattacctgggactagtggttttattggagaatttttagttattgttggcgcatttaaattttcaagttacgttgttattggcgcggcttttggaataatattatccgctgtttacatgctatacctttataaaagaattatttttggcaccataactaataataaacttgcagatattttagatataaacacaagagagaaaatcatattaattcctttagcaatttcagtaatattactaggtatatttccaaatctatttttagatcctatgagattatcacttgaactaattataacaaactatgaaatagccaatgctaaataat

SEQ ID NO: 221355 - DNA, 841 bp, Unknown
  Bacterial polypeptide expressing nucleotide sequence isolated from the Sargasso Sea
catggaactatcaattatatttcttccacttattgcttcaattatctctggtttttttggaagatatatcggtgatagaaattctgaaatagtaacaagtgctctagtttcaatttctgcactcttatcaatttatgttctttatcaagtaattgtaaatcaatatgaagaaaatattgttatagctacttggataagctctgggtcacttgatgtaaattggtcaatgttaatagatcctttatcagcagtgatgttagtggttgtaacttcagtatcttctttagtgcatatctattctattggttatatgtctcatgaccctcataagcaaagatttatggcttatttatcattgttcacgtttgcgatgttgatgcttgtaacctcagataattttattcaattattttttggttgggaaggtgttggattatgttcttactttttaattggtttttggtttaaaaaagagagtgcaaatgctgcagccataaaggcatttgttgtaaatagagtaggtgattttggttttgctttaggaattttcttaatattttatttatttggaactgttaattattcagaagtttttcaacaaattccaacggttatagataaaaatttatcttttttaggttttgaagttaaagcaatagatttagtttgtttacttttatttatcggagcaatgggtaaatctgcacaaatattacttcatacatggcttcctgatgctatggaaggtcctacacctgtttctgcattaattcatgcagcaacgatggtaacggctggtgttttcttagtggtaagatgttctccaatttatgaatattcc

SEQ ID NO: 221356 - DNA, 1354 bp, Unknown
  Bacterial polypeptide expressing nucleotide sequence isolated from the Sargasso Sea
tttcttttatcaatctacttgtggatacttttcgatcatacgacttcagagtttcaatttgtagaacaaagaacttggattgaggactttataaattataaagtgggtgttgacggaatttcaattttgtttattttactgacaacatttattactccactttgtatcttgtcagtaaataattctattaaagaaagattaagtgaatttttaattgcagtattaattatggagtctttcatgataggagtattttgttctttagatcttgtaattttttacttattttttgaggctggtctgataccaatgtttttaattattggaatatggggaggggctagaagagtttattctgcatttaaattttttctttacactttactcgggtcagtattaatgttggttgctataattactatatattggttaaccgggacaacagacgtaattgaactttatagtttaggcatcgaggctaaatatcaaaatttgttatggcttgctttttttagttctttcgcagtcaaaactccaatgtggccagtccacacttggttaccagatgctcatgttgaagctccaacagcaggatcagttttattagctgcaattttattaaaaatggcaggttatggatttataagattttcattaggactatttcctgttgcatcagaagtttttactccactgatttacacattgagcgttatcgcaattattttcacatcttttattgctttaatgcaagaggatatgaaaaaactaattgcgtattcttctgttgctcacatgggatatgttactttaggtatttttaccatccaacaacagggtattgagggaagtataattcaaatgataagtcatggattagtttctgctgcactatttttgtgtgttggtgttgtttatgatcggatgcattcaagacttattgatacttatggtggaattgtaagtatcattccaaagtattctgtcttattcatgttatttactttggcagctttaggtcttcctggcactagtgggtttgtaggtgaatttttaatattgatgggagcttttaaagataactttttagttgctgttattgccagcattggagtaattattggcgcagcctatatgctttggttatacaaaagagtgatatttggaaaattaattaataatgacttaaaaaaaatgatagatttgaatagatcggagtcaattatattaacttctttggctataccaactctgttttttggtttttatccagatcctttgattaatacaatagaggtatctatttcagatttgatagaaacatacaactttagattagcgagcaagatataat

SEQ ID NO: 221357 - DNA, 1686 bp, Unknown
  Bacterial polypeptide expressing nucleotide sequence isolated from the Sargasso Sea
aaatattgttatagccacctggataagctcaggttcacttgatgtaaattggtcgatgttaattgatcctttatcagcagtgatgctagtagttgtaacatccgtatctgccttagtacacatttattcaattggttacatgtctcatgatcctcataaaccaagatttatggcttatttatcgttattcacatttgcaatgttaatgcttgtaacatcagataattttattcaactattttttggctgggaaggtgttggtttatgttcttacttcttaattggtttttggtttaaaaaagaaagtgcaaatgctgcagcaataaaagcatttgtcgtaaatagagtaggtgactttggttttgctttaggaatttttttaatattttatttatttggaacagttaattactcagatgtttttcaacaaattccaacagttgtagataaaaatttatcctttttgggttttgaagttaatgcaatagatttaatttgtttacttttatttattggagcaatgggtaaatctgcgcaaatattacttcatacatggctgcctgatgctatggaaggtccaacacctgtttctgcattaattcatgcagcaacgatggtaacagctggtgttttcttagtagtaagatgttctccaatttatgaatattcgcctttaatactaaattttataactattgttggaatgaccacagcattctttgcagcaaccgtcgctctagttcaaacagatattaaaaaaataattgcttactctacatgtagccaacttggttatatgttttttgctgctggtgtaggtgcatacaatgttgccatgtttcacttatttactcatgcatttttcaaagctttattatttttaggatctggttcagtaattcatgcatttaaagatgagcaaaatataaataaaatgggaggtgtatggaaaaagttaccatatacctatgctttaatgataattggaacgctcgctttaacaggttttccatttttatcaggattttattctaaagacgcaattatagaatttgcgtatttaaaaggtaataccactggttattacgcagctgggattggaataattacagcatttttaacatctatttattcatggagattgatatttaaaactttccatggagagtacaataataaagtgatcaagatagaggaaacgcacgagtcacctttagtaatgcttgttccattatttattctttcaatcggagctgtgtttgctggttttctatttaaaggactatttattggttatggtgagaatttattctgggcagagtctattaagtttttagagcctttaagcaccgaacatccacctttatggtttttacttttaacaccttgtttagttttgttatctattcctattgcttattacttatttgtaaaaaataaagagttacctaattcaatagcttccatgaataaacctttgtataattttttagtcaacaaatggtattttgatgagttgtacgatgtgttgtttattaaatcctcaaaaaaactaggtctttttttatggaaattttgtgatggaactataatcgacggttttggtcctgatggaatttcttcttttataaaaaaatgttcaattaaagcaactaaatttcaaagtggttttatctatcaatatgc

SEQ ID NO: 221358 - DNA, 958 bp, Unknown
  Bacterial polypeptide expressing nucleotide sequence isolated from the Sargasso Sea
aattgcaataatctctatttattggataacaggcaccacagatgtaactgaaatatataaaatcaaaatacctgcagagtttcaaaacttattatggttagctttttttagttcatttgcagttaaaatgcctatgtggcctgtacacacatggttacctgatgctcacgttgaggccccaacagctggctcagtaattcttgcagccattcttctaaaaatggctggatatggttttcttagattttcagttggtatgtttccattagcttcagaatactttacaccactaattttcacattaagtgtgatagcaataatttatacttcactagtggcacttatgcaggatgatatgaaaaaattgatagcttactcatctgttgcacacatggggtatgtaacacttgggatctttaccttcaataaacaaggaattgaaggcggtattattcaaatgtttagtcatggtttgatctctgcagcactatttttatgcgtaggtgtactttatgatagagcacattcaagactaataaatagttatggtggagtggtaaatattttaccaaaatattcatttattttaatgatatttgttttagggactttaggtttacctggaacaagtggttttgttggcgagtttcttgttttagttggggcatttaaagttaattttttagtagcgattttagcaagtattggagtgatattagccgcagcatatattctttggttatataaaagagtcattttcggaaaactagaaaacaaccaaataaaagaaatgaaagatttaaataaatctgaaatgggagtgttagtatcaattggaatattagtaatattttttggtttttatcctgaaccgttatttaacacagtaaatgtatctgtagacaacttaattaataactacaatatggagataaacaaatttagtgttttaaaataa

SEQ ID NO: 221359 - DNA, 1060 bp, Unknown
  Bacterial polypeptide expressing nucleotide sequence isolated from the Sargasso Sea
tctgatatcctttctatcatttttagatcctcaatggattaatctcatatggtcgctgttgcaaattgcgatcgtcacaatttgcttgattctaaccgttgttttcttggtttactttgaaagaaaagtaatcggttacatgcatgccagagtcgggccaaatcgagtcggaccaaaaggaacgtttcaatcaattgcagatacgatcaaattactactaaaggaagtgattatccctgataaagctgatcggttcttctttttactgtcaccattactgcttttaataccagcacttgccgcttgggcagttataccgtttagtccagaattcatcatcgcagacatcaatgcaggattgctttacttattggcgctcacttcttttggtgtctatggggtaatacttgctggatgggcttctaattcaaaatatgcatttttgggatcaatgagagcagccgctcaaatggttgcatatgaaattgctatgggatttgcactggttggtgttctcatggctggtgggagtttgaaacttggagaaattgttgcagcacaatcaggcggtgtactcagttggttttggattcctctttttccattgttcatcgtttattttatttctggtatagctgaaacaaatcgacatccttttgatcttgcagaaggagaagccgagattgttgctggtttccatgttgagtattctgggattgggtttgcaatattttttcttgctgaatacatcaatatggctctcatatctgtactcacatccattatgttcctgggtggttgggagagtttctttgcaggcattccatttttagaatcatcggtattttcatttttaacagagccaagcatattttggttacttttaaaaacactattctttttgtttgtctttatttggttgagggcatcatttcctagataccgatacgatcagttgatgtctttgggatggaaagtgcttatacctataaccatcttatggattggcgttgaatgcatcatgtatgtcatgcagattggaccttggagtgtgacatga

SEQ ID NO: 221360 - DNA, 255 bp, Unknown
  Bacterial polypeptide expressing nucleotide sequence isolated from the Sargasso Sea
gatgttagcggaatttttaaaagattattttccaattattatttttttaataattgcactaggattaagctgtatttttattattcttaactttctactttcaccaaaaaaccctgttcctgaaaaactttctgcttacgaatgtggttttgacccttttaatgactctagaatggaatttgatgttagattttacttggtagcaattttatttattatttttgatttagaaattgcttttttatttccttgggc

SEQ ID NO: 221361 - DNA, 280 bp, Unknown
  Bacterial polypeptide expressing nucleotide sequence isolated from the Sargasso Sea
tttctttgttgctacgcaaaaacctgacccagaaaaaacgtcagcttacgaatgtgggtttgatccatttgaagatgcaagagcaaaatttgatattagattttacttagttgcaatcttatttattatttttgatttagaagttacatttttattcccatgggctgtttctttaagaaatatcgatttattcgggttctggacaatgatgatttttttaattattttaactattggatttgtctatgaatggcgcaaaggtgcattagaatgggaataa

SEQ ID NO: 221362 - DNA, 1812 bp, Unknown
  Bacterial polypeptide expressing nucleotide sequence isolated from the Sargasso Sea
aatggaatattttattttatttttacctttaattgcatcaataatttctggtttttttggaaaattatttggagttagaaattgtgagattctaaatagtttatttgtttctatctctgcaattttgtcattaattattttttacaaagttataaccgttggttacgaaaataatattgtaattacaacatggattaattcaggatcattaaatgttaattggtcaattaatatagacgctttatcttcagtaatgttggtggtagttacattagtttcttccttggttcatatttattcaattggatatatggcacatgatcctcatagaactagatttatgtcctatttatctttgtttacatttgcaatgttaactcttgtaacatcagataactttatacagttattttttggatgggaaggcgtaggattatgttcatattttttaattggattttggtttaaaaagccaagcgctaatgcagcagctattaaagcgttcttagtcaacagagtaggtgattttggttttgcattgggtatctttttaattttttatatatttggaactgtaaattatgatgaagtgtttcaaagaattccagaaattttagataaaaaattatcttttttaggaataaatatccatgctgttgatttaatttgtatacttttgttcataggagctatgggtaaatctgctcaaatctttcttcatacatggcttccagatgcaatggaaggtcctacgccagtttcagctttaattcatgcagcaacaatggtaacagctggagtttttttagtagtgagatgttcgcctatatatgaatattcagagctggctttatcaattattactataattggtatgagcacagcattttttgctgctagtgtagcgctagtccaaaacgatataaaaaaaataattgcctattcaacttgtagtcaactcggatatatgttttttgcagctggtgttggagcctataatgttgcaatgtttcatctatttactcatgctttctttaaagctttattatttttaggatcaggttcggtaattcactcttttaaagatgagcaggatataaataaaatgggtggtatctggaaaaaacttccttacacatacactttaatgattataggaactttagctttaacaggtttcccttttctttcaggtttttattcaaaagatgcaattatagaatttgcatttctaagaggaaataatcttggttattatgcatcaagtataggtatatttacagccttattaacttcaatttattcttggaggttaatatttaaaacatttcatggaacttataataattcaaaaataaaaattgaagtaatgcacgagtctcctatcataatgctattgccattgataatcttagcagtgggagcaatttttgcaggtttcttatttaaagatttgtttataggacatgaaacatcttatgaattttggtctaattcaattaaatttttgacaccattaagcacagaacaccctcctagttggtttttatttttaaccccaactttagttgttttatcaataccattatcattttatttgtttgttaaaaatctgaaaataaatgagtcaattgtaaattcaaataaatctatttatctctttttaaaaaataaatggtattttgatgaaatttatgactatatttttgtaaaacattcaaaacaaattggattttttttctggaaaaaaattgacctttcttttattgataaatttggtcctgatggtttatcacaattaataaaatattt

SEQ ID NO: 221363 - DNA, 1087 bp, Unknown
  Bacterial polypeptide expressing nucleotide sequence isolated from the Sargasso Sea
atatgaatactctccattagctctaacagttataacaataattggaatgactactgctttctttgcagcaacagttgcacttgttcaaaatgatattaaaaaaattattgcttattctacttgtagtcaattaggctatatgttttttgctgctggggtaggtgcttataatgttgcgatgtttcatctatttacacatgctttttttaaagctttactatttttaggagctggtgctgtaattcattcatttcatgacgaacaagatataaataaaatgggtggagttatcaaaaaacttccatacacatacgtattaatgctcataggaactcttgctttaacaggttttccttttttatcaggtttctattctaaagatgcaataatagaattcgcgtacctaagaggaaatggagttggaatgcttgcagcttttgtaggtattcttacagctttattaacatcaatttactcttggagacttatttttaaaacgttccatggtaattttaataataaagaacttagtgttgataaaatacatgagtctcctttggttatgattgccccgttagtaatcttggcaataggagctatttttgtaggtatggcctttaaaggtttgtttataggtcatgagatagcatatgaattttggggtaaatctataaaatttttagaaccactaagtacagatcatccaccaacatggtttttgtttttaacacctatacttgttactgctgcaattccattttcttattatttatatctaaaaaacacaaacatagtaaatggattgaaagaaatgaatgaaccaatttatcaatttttagttaagaaatggtactttgatgaaacatatgattacttatttgttaatccttcaaaaagaattggaaagttcttatggaaaaatgttgatggatcaataatagataaatttggtcccgatgggatttcaagtataattaaaaatttatcgattagagcagttaaatttcaatctggatttatttatcaatatgcatttgttatgttgattggattttcaattttactaacaatactgatattaaactga

SEQ ID NO: 221364 - DNA, 767 bp, Unknown
  Bacterial polypeptide expressing nucleotide sequence isolated from the Sargasso Sea
tgtttttttattagctcctataataactatggttttaagtttggcaggatgggctgtaattccattcgctccaggtctagttgtttcagacattaatgtaggtataatgtatttatttgctgtatcttctttaggtgtttatggcgttataatggctggttgggccagtaattcaaagtatccttttttaggagctctaagatcagctgctcaaatggtatcttatgaagtttcaattggttttgttataattacagttttattatgtgtaggatcattaaatttaagtaaaattgtagaagcccaagaaactgtttggtttgctattccattacttccaatgtttataatattttttatatctgcacttgcagaaacaaatagattaccatttgatttacctgaagatgagtctactttggtggctggtttttttactgagtattcatcctcgtcttttgtattattttttttagcagaatatgcaagcatgattttaatgagctcaatgactgtgattctgtttatgggaggttggttgcctccttttgatatatatcctcttaatgttgttcctggtattgtttggtttacaatgaaagttatttttattttatttctttttatttgggtcagagcaacatttccaagatatagatatgatcagttaatgagattaggctggaaagtttttttgcctttttctttattatgggttgttgtaacttctggttttttagtaatatttgataaacttccttcttaaa

SEQ ID NO: 221365 - DNA, 1030 bp, Unknown
  Bacterial polypeptide expressing nucleotide sequence isolated from the Sargasso Sea
tttgattcaaaatgatattaaacgggttgtcgcatattcaacgctctctcaactgggatatatggttgctgctgctggtgtttctgcatactctgccagtttatttcacttgatgactcatgctttttttaaagcgttactatttctagcagcaggatctgtcattgttgcattacaccatgagcaagacatcaggaaaatgggtggattgaagaacaaattaccaatcacttatgtgacatctctgatcggatcattggcattaatagggttccctggattttctggctttttctcaaaagatgcattgattgaagcgattggtcatgcagacattattggctcgggttttgcatacgcatcagttttaattggggttttcattacagcactgtatacgttcagactgtttttcaaagtatttcatggtgcattggatgaacatcaccatgatgtcaaagagtcaccgttatcaattacgcttcccttagtattgttggcaattccatcggttatcattgcctggcctacgtttggccctatggtctttggttcatattttacaactgctatttcgcagcctgatgcataccagatattcgcatatgaattcacgtctgcttatggcttcttgatccatgcattttcaagcccagtgatatacattgcattatttggggtcgctacagcgtatatcctatatatccaaaaaccgggtattctccatgatgaaacttataaatcatcattcatatatcgtctcctagataataaatattattttgatgatttatacgagaacgtttttgcaaaacaggctcgcaacatcggtgatcttttatggaaagtgggagatataaaaaccatcgataatttcattgttaatgggactgcttataggatcggaaatatagctaacaggattaaaggaattcaaacaggttatatatatcactatgcccttatgatgattcttggcctggcaattttcttggcatggacaatactagaccttggtggtacatcatga

SEQ ID NO: 221366 - DNA, 1066 bp, Unknown
  Bacterial polypeptide expressing nucleotide sequence isolated from the Sargasso Sea
aatgaattttccaatactatcaaccttaatttttttacctttaataagctctatttttattttattatctaaagacaaggtttcaaataatagcccaatttatatttcattgtttagcagtattgctacttttttactctcaatatttttgtggtattctttggatattaacacatctgattttcagtttgtggaagaaaaatcttggataaacaattttattaaattcaaattaggagtagatggtatttcaatactttttattgttttaacaacttttatcacaccaatttgtattatttcttgtgtaaatagtattcaagtaagagtaaaagaatttttaatagctattttaatattagaaacatttatgatcggtgtattttgctcacttgatcttgtaattttttatttattcttcgaagcaggtttaattcctatgtttttaataattggagtgtggggtgggccgcgtagagtttattctgcttttaaattctttttattcactttattgggatcagttttaatgcttgtggctataatagtcatttattggataaccggtacgactgatataactcagatctatgaaataaaaataccaaaggaatatcaaaatatactatggttggcctttttaagttcatttgcagtaaaaatgcctatgtggccagtccacacatggctaccagatgcacatgttgaggcaccaacggcaggttctgtgatcctagctgcgatcttactaaaaatggctggatatggttttttaagattctcaatacctatgtttccagtagcttcagaatattttacacctttaatattttcattaagtataattgcgatcatttacacttctttagtcgcgctaatgcaagacgatatgaagaagttaattgcttactcttcggtagctcatatgggatacgttactttaggaatttttacacttacaaaacaaggcattgaaggaagtatttatcaaatgattagtcacggtttaatatctgcagcgctattcttgtgtgttggggtagtctatgacagaatgcactccaag

SEQ ID NO: 221367 - DNA, 1789 bp, Unknown
  Bacterial polypeptide expressing nucleotide sequence isolated from the Sargasso Sea
attggaaatttcaattatagcattacccttaatagcttcaataatatctggtttttttggaaaatttattggtgatagaaattcagaaattgttactagttttttagtaactatttcagctattttatctgcaatagttttgtatgaagttattatcaatcaatatcaagataatatagtaatagctaaatggattagctctggatcgttagatgtaaattggtcgatgaagattgatcctttatctgctgtaatgttagtagttgtaacctcagtctcttctttagttcatatttattctattggttatatgtctcatgacccacataagccaagatttatggcttatttgtctttgtttacttttgcaatgttgatgttggtaacttctgataattttattcaattattctttggttgggaaggtgtaggtctatgttcatattttttaattggattttggttcaaaaaagatactgctaattcagctgctattaaagcctttttagttaatagggtaggagactttggttttgctttagggatttttttaattttttatttgtttggaactgtaaattatacagaagtttttgagttaatcccaactattgttgataagaatttattatttctaggcattaatattaatgctattgatttgatttgtttgcttctatttattggagcgatgggtaaatcagctcaaattttactacacacatggctaccagatgcaatggaaggtccaacgccagtctcagcacttattcatgccgcaactatggttactgcaggtgtttttttagttgtaagatgttcacctatttatgaatattcagagctagcattaaatgttattacaattgtaggtatgagcacagccttttttgcagcgacagttgcacttgtccaaacagatattaaaaaaataattgcttattcaacttgtagtcagcttggttatatgttttttgcagcaggtgtaggcgcatataatgttgcgatgtttcatttatttacacatgcattttttaaagctcttttatttttaggatccggttcagttattcacgcttttaaaaatgagcaaaatataaataaaatggggggagtttggaaaaaattaccttatacctatacattaatgataataggcactttagctttaactggctttccttttttatcaggattttattctaaagatgcaattatagaatttgcgtatttaagaggaaataccactggatattacgcagcggggattggtattattactgcatttcttacatcaatttattcatggagattaatttttaaaacttttcatggagattataataataaagatatcaagatcgaagaaactcacgagtcacctttggtgatgttaatacctttaatttttctttctataggcgctatatttgcaggttatacctttaaagaactatttctaggttatgggggaataaataatttttggcaagagtcaattttttttcttgaaccattaagtactgaccatccacctttttggtttttagtattaactcctattttagtaattttatcaataccagttgcttattacttatttgtaaaaaataaaaatttatctaatcaaattgccaatgttaataaacctttatatcaatttttaattaataaatggtattttgatgagctgtatgatgtcttatttgtaattccatcaaaaaaaataggattattcttatggaagttttttgatatcaaaataattgacggctttggtcctgacggt

SEQ ID NO: 221368 - DNA, 1915 bp, Unknown
  Bacterial polypeptide expressing nucleotide sequence isolated from the Sargasso Sea
tatggaatatttcatagtttttttaccattgcttggtgcatttattgctggtttttttggtaataaatttgaccaaaagtattcccaatttatgacaagtctttttgtcagtatttcttctatcctttcaataatagtatttttaaaagtattaaattatggatactcaaataatttattaatttctagttggataaactcaggtactttaaatgtaaattggtccataaaagtagatgcactatcctcactcatgatggttgtggtaacgcttgtttcagcgttggttcatatctactcaattggttatatgtctcacgatcctcacaaaccaaggttcatgtcttatttatctttatttacatttgcaatgttagtgctggttacttcagacaattttttacaattattctttgggtgggaaggagtaggtctctgttcgtattttttaattggtttttggtttaaaaaaaaagctgctaatgcggccgccattaaagctttcgtagttaatagagttggagattttggttttgctcttggtatttttttaattttttattattttggaacagttagttacgatgaagtatttagtcaaattcaaaccttgaatgcaaaaaacataaattttcttggttttgaatttaaatcaatagatctaatttgtatattgttatttataggcgcgatgggaaaatcagcccagatttttttacacacttggttacccgatgcaatggaaggaccaacacctgtatctgcattaatccatgctgcaacgatggttactgcaggtgtttttttagttgtaagatgttctcctatttatgaatattcagaattagcactcaatataattactgttattggaatgagtacagctttttttgctgctacaattgcattagttcaaaccgatataaaaaagataattgcttattcaacatgtagccagcttggatatatgttttttgcaactggcgtaggcgcatacaacgttgcaatgtttcatctatttactcatgctttctttaaggctttactttttttaggagctggttctgtaatacactctttcaaagatgaacaggatatcgaaaaaatgggtggggtttacaaaaagatcccttacacttatgccttaatgctggtaggcacattagctttgactggcttcccttttttatctggtttttattctaaagatgcaattattgaatttgcttatttaaggggaaatgtaactggtatttatgctgctggtattggaattgttacggctatgttaacagcaatttactcttggagattattttttaaaacttttcatggaaattataacaatcaagaagtcaaatacgaaaaagttcatgagtcaccagcggtaatggttttgccacttataattcttggtttaggctcaatttttgcaggtttcttttttaaagagctattaataggcaatcaaagtagtgttaatttttggggagagtctattaaatttttagagccattgagtgaagatcatcctccactgtggtttattttattgaccccaactatagtaactttaagcataccgatttcttactacttatttttgaaggacaaaagtgtattagaaaattttacaaaaactaattatccattaataaattttttaaaaaagaaatggtattttgatgagctttattcttatatttttgtagaaccttgtaaaaaattaggtctatttttttggaaaaagattgatggtttaacaatagatagatttggaccagatggtatttcaaatcttattaaaggcttgtcgataaaagcagtaaaatttcagaatggttttatttatcaatatgcatttataatgttgattggattttctttaatactaacttacttgattattaaatga

SEQ ID NO: 221369 - DNA, 1492 bp, Unknown
  Bacterial polypeptide expressing nucleotide sequence isolated from the Sargasso Sea
gatgaatttcccaattatttcttcactaatccttttgccttcaattggcgcactatttctttttttcattaattcaaaaaatattactggcatcaagtatgtttctttatttgtatcaatcattaattttttaatatctatttacttatggttaatttttgatcaatctagttatgaatttcagtttgtagaaagtagagtttggataaaagattttatcaattacaaagttggagtagatggaatttcaatattatttatcattttaactactttcataaccccactttgtattttgtcagttaactcatctataaagaatagacttaaagagtttttaatagcaatcttattaatggaaactctaatgattggagttttttgctctttagatttggtaattttctacttattttttgagggaggtttaataccaatgtttttaatcattggtatttggggaggtgaaagacgtgtgtattctgcattcaagttttttttatttactcttcttggttcagttttaatgttaatagcggtaatatctatttattggatagcaggcacgaccgatgtagaagaactttataagttaggcattgatccaaaatatcaaaacttactttggttagcattcttttcatcttttgcagtaaaaacaccaatgtggccagtacatacttggctgcccgacgcccatgttgaagcaccaactgcaggttcagttttattagcagcaatcttacttaaaatggcaggatatggatttataagattttcaattggactatttcctgttgcgtcagaatattttgttccgtttatttttgttataagtttaattgcaattatttatacttcgttagttgccttaatgcaggacgacatgaaaaaactaattgcgtactcgtctgtagctcacatgggttttgtaacattaggtttgtttactttcactcaacaaggtgttgagggaggaatatttcaaatgattagtcatggcattgtatctgccgcactctttttctcggtaggtgttgtttatgaccgaactcactcgagacgtatcaatgattatgggggcttggtaagtgtaatgccaaaatattctatattattaatggtctttgttttagggtctttaggcttaccaggaacaactggttttatcggtgaatttctaattttaatgggaacatttaaaaaaagttttttagtggcagcaatagcaagtttgggtgtaattttaggtgcagcatacatgctatggctttacaaaagagtagtatttggagaactaacaaatcaaaaattattaaaaataattgatttaaacaaagttgagttatctattcttacattattagcattgagtataatcttttttggtttctatcctgatccattttcaaatacatattctgtatcagttgagaactttttaaatgaatataatgataaactaaatagctataacttacaaaatcaatga

SEQ ID NO: 221370 - DNA, 373 bp, Unknown
  Bacterial polypeptide expressing nucleotide sequence isolated from the Sargasso Sea
atgagccccgaaatatttttagaggattatttttcaatagttttatttttattaatcgctttagttttaagctgcggttttatttttttaaattttatgctttctccaagtaggcctgatcctgaaaaattatctccttacgaatgtggctttgaaccatttaacgactcaagaatggaatttgacgttagattctatttagttgcaatcctttttataatatttgatttagaaatagcttttctttttccttgggcaatatctttaggaaaaattggcatatttggttttgtatcaatgatgatttttttagcgatacttacaattggttttatttacgagtggaaaaaaggagctcttgattgggagtaat

SEQ ID NO: 221371 - DNA, 1027 bp, Unknown
  Bacterial polypeptide expressing nucleotide sequence isolated from the Sargasso Sea
atgataattttaaatacaataattaatattttcatagaaattataattgtagtcataccattgtttttgattgttgcatatacaacatattctgagagaaagatcattggctatatgcaatcaagattggggcctaccagggttggcccaagcggtatttttcaacccattgcagatgttattaaattagcaacaaaagaaattattattccctcaaattctaataaaggactatttctaactgcgccaataataatgctagtaccatctctgatggtatggtcagtaattcctctttctgagtattttgttattgcaaatattaatgctggattacttttcgtattagctttgacttctctgagtgtctatggagtaattatagccggctgggcctctaattctaaatatgcttttctggggtcaatgaggtcagctgcacaaattattgcctatgaaattgcaatgggatttgcattagtgggagtattgatggtggcaggaagtctaaatttacaagaaatagtcttatctcagaaaggcggcatactacattggtattggcttcccttgtttcctctatttttaatttattttatatcaggagttgcagagacaaatagagctcctttcgatgtttctgaaggagagtcagaaattgtagctggtttccatgtagaatattctggaatggcattcgcaatgttttttttagctgagtatatgaatcttattttaataagtattctggcaagtatcatgttctttggaggttggttgtctcctttagagggaacttttttagattcttattttgactggattccgggttttatctggctatcaattaaaacaatattttttatttttatttttttatggcttagagctactttgccacggtacagatatgatcaaataatgagattgggttggaagatatttttaccaataactcttatttggattttctttgagggtattatgatatattacagtgttgaaccttggtttgttaaatcatgaa

SEQ ID NO: 221372 - DNA, 1462 bp, Unknown
  Bacterial polypeptide expressing nucleotide sequence isolated from the Sargasso Sea
aattggattttggtataaaaaaccttctgctaactcagcggctataaaagcatttattgtaaatagaataggagactttggtcttgcgttagcaatatttacaatatttataatatttggatcagttaattacgaaatagtttttgaaaatattgaaaaatacaaagatacaacatttaactttattggatatgacctaaattcaatcaatctgatttgttacttgctatttattggagccatgggtaaatctgctcaactttttcttcatacttggctaccagatgcgatggaaggtccaactccagtttctgcactaattcatgcggctacaatggttactgctggagtttttttagttgttagatgttcacctttatttgatgtttctccatcagctatggcatttgtaacattcattggtgcatcaacagctttttttgctgcaacagtgggcttggttcaaaatgatatcaaaagaattattgcttactcaacttgtagtcaattaggctatatgtttgttgcagctggactaggagcatatggcgttgcaatgtttcacttatttactcacgcctttttcaaagcattactatttttaggcgcaggttcagttattcatgcagttcatgaagaacaggatataagaaagatgggaggcatcgctagctttatacctatcactcacttaatgatgttaattggaacaatttcgatcatgggatttccgtttacttcaggtttttattcaaaagatgcaattattgaaactgcatatctttctaattcaagtttttcaacttatgcttatcttctaactacacttggagttgtaatgacttctttttattcatggagactaatctttcttgtttttaatggaaaaacaagaatggaagaagagaaattttctaaggttcatgagtcttctgaagtcatgaccgtccctcttatgatattggcattaggagctctatcatttggattcttatttaagggatattttataggagattacagcgaatctttttgggatctttccatagtgttacatcatgatgaacatcaccatattccattttatatatattatttgccagttcttttaggtttccttgggttatttgttgcatggtatatgtacattagaaacacttccttagcttcaaatatagctaatacaaataaaccattatacgattttcttttaaataaatggtacttcgacgagatttataattatcttttagtaaaacctgctatttcttttggaagagttctttggaagtttctagatgagtatattatcgatggctttggaccaaatggtatagcctcttcagttttaaatttatctattcgtgctaaaaaaattcaatctggatacatttatcattacgcatttgccattctaattggcctgtctttattagtaacatattttatttttaagttctga

SEQ ID NO: 221373 - DNA, 370 bp, Unknown
  Bacterial polypeptide expressing nucleotide sequence isolated from the Sargasso Sea
atgcttgcggattttttaaaagattatttgccaataattgtgtttttactagttgcacttgtattaagtgtagcatttgtagcggtcaattatttagcatctccaaaaaaccctgatccagaaaaattatcagcatatgagtgtggtttcgaaccattcaatgactcaagaatggaatttgatgttagattttatcttgtagcaatattatttattatatttgatttagaaattgcatttttatttccatgggcaatatctttgggaaaaattggaatatttggatttatatcaatgatgatcttcttatttattcttacaattgggtttatttatgaatggaaaaaaggagcattagactgggaataaa

SEQ ID NO: 221374 - DNA, 1483 bp, Unknown
  Bacterial polypeptide expressing nucleotide sequence isolated from the Sargasso Sea
aatgaatgaattgccaatcttaagtattttaattttacttccaatagttgggatatttttcatgactttgatcagaaataataatgatcaaagttcaaataatctaaaacatacagccttatggatatcttttttaaattttttaatttctctatacttactattttcatttaatcagcaagatgcagactttcagtttgaggaacgatatttttggattgaatatggaatatcttaccatttaggcgttgatggaatttcaatcctattcattgtcctcacaacaatgcttgttccaatttgcatcttagctagttatgacagtattaaattttctgtaaaagaatatttaattgcgtttttagctcttgaaactttcatgataggcgtcttttgttcccttgatcttgttttattctatttattctttgagggtggtttgatacccatgtttcttattattggcatttggggaggagaaagaagagtttactcaacattcaaatttttcttatacacacttgctggttcagtttttatgttactagctatcatatacatatttattacagccggtactacagatgtatcatacttattggattataattttacacgcaatgaacagattgtgttgtggcttgctttttttgcgtcatttatggttaaaatcccaatgtggccatttcacacttggctgccagatgcccacgttgaagctcctacagcgggctcagtgatattagctggagttttattaaaaatggcaggatatggctttatccgtttctcaattggctttttcccggaagcctcagagctttttgctccactcatctttacactcagtattgtagctataatcgttacgtcgttgatagcattggttcaggaggatatgaaaaagttaattgcttattcctctgttgcacacatgggatttgtaactttaggaatttttacttttactgttcaaggaattgaaggaagtatcattcaaatgataagtcatggtattgtttccgctgcattatttttatgtgttggtgtggtttatgatcgattacatactagggagatttctaggtatggtggattggtaagtaaaatgccaatctatgcatttacatttatgattttcattttggctagtcttgggttaccaggaacaagcggtttcgttggagaatttttagtattactctcaatatttagtataaatacttattttgctgtatttgctaccactggcgttgtattagcagcaacatattctctatggctatatcgaagaattatttttggtgccttgattaaagatgatttgtctgagatgttagatttaacacgaagagaaataattatattcgttccacttatcactctgacaatatttattggtatatatccaaaaccagttatagatataatcgagccgtcagcaaaaaaaattgtgagtcaagtaaatggtaaattaaattaa

SEQ ID NO: 221375 - DNA, 1207 bp, Unknown
  Bacterial polypeptide expressing nucleotide sequence isolated from the Sargasso Sea
tatgtatgccgcaattgtctttctgccgcttcttggggcggttgtagcggggttgtttggccgtattattggggatcgtgttgcccatttggtaacttgcggccttatggcggcttctatgttgcttggtgcaatatgcttttatgatgtagcgcttcaacaaaatgcccagactattcaacttttcacttggatagagtctgggactctaaaagcagtatgggcactgaagatagatactctaacagctgtaatgattttagttgttacatctgtttcaactatggttcatgtgtattcaattgggtatatgcaccatgatccgcacaacccgcgattctttgcatatttatcactttttacctttgcaatgcttatgctggtcacggctgataatttggttcagatgttttttggctgggagggcgttggtcttgcttcctatcttcttatagggttttggtatcacaagccggaggcgaatgcagctgccataaaagcttttttagtaaacagggttggagattttggtttcgctttaggcatttttggtacctatttgcttttcgacaccattgttttagatgagattttcagatcagtttctaggtttgaagggagtgaactaacttttttatggtttagtgctgatgctttaacggtactgacaatgctattattcataggggcaatggggaaatctgcccagttaggtttacacacctggctccctgatgcaatggagggacccacccctgtatctgctttgatacacgctgcaactatggttaccgcgggtgtttttatgttggctcgcctttcccccatgatggaatacgctccggacacgcttgctttagtgacatttataggcgcttcaacggcgatatttgccgccagtgttgggctatgtcagaacgatataaaacgcgtaattgcttattctacctgttcgcaacttggctatatgtttttcgcttgtggggtttcggcctattctgccggaatctatcacttactgacccatgcattcttcaaagcgttgttgtttttgggagcgggctcggtaattcacgcgatgtcagatgagcaagacatgaggaaaatgggaggactaagaaaacgcatcccattgacttactggttgatgattgttggtacactggcgcttaccgggtttccatttttatctgggttttactcttag

SEQ ID NO: 221376 - DNA, 1996 bp, Unknown
  Bacterial polypeptide expressing nucleotide sequence isolated from the Sargasso Sea
tttgcttgctgaaggaaaaatatcctatacagatggaggcatctttgctgaatttgcttgggttattgttgttttgccatttatagcagctttactaataacattttttggaaaaaatttaccattaaaaggtgcagagattgcattgggttcagtattttttatattcctttatagctgtattttattttatctcaacgttacacagggagtagcatcagaattttttattaatgtaggtagcatagggtcttttcagcttgaatttggatgggttgttgatggcctttcaataatgatgtattttgttgttggtacagtttcattactagtttttatatacgctacaaattatatggaaggggagataagatacactttcttctttacgtctctgacattatttgctggaagcatgttagttcttgtatcttcaccaacacttttacagctattaattggatgggaattggtgggagtttgttcatatttattaataggacattattgggaagaaaaagaaaattcttctgctgcaatgaaagcttttattacaaataaagttgctgatgtaggtttaatgattgggattattattcttgctttaacaactggaactttaaggatttcagaaatactttatcaagctactcatgactatgaagcaattaaatctgtggcttacattgctggaatcttgatatttattggagccatgggaaaaagcgcccaatttccactacatgtttggcttccagatgcaatggcaggtccgacaccggtatcagcgcttatgcatgctgcaactatggtgacagcaggtgtttatttattaggaaggttatttcctttttaccaaggaatcgctcatgaagcattagacattgttcttgtatttggagttataacattatttggtgcaggtcttatagcaattgtccaagatgatttgaaaaaagtattagcttactcaactgtcagtcagttgggatacatggtaactgcaatggggtcgggagcatacactgctggtttatttcatctttggacacatgcttttttcaaagcccttttattccttggagctggctccgtgatacatgctgttcatacaaataatatgtcagaaatgggaggactaagaaaagagatgcctagaacatttatgacctttattattgggacggttgctcttgctggactacctcctttggctggtttcttttcaaaagatgaaattttagcttctctgaatcatgaaggacatactttctttttctttgttgctgtagcaggagctttcattactgctttttatatgactagagcagttctactgactttttatggtgagtatagaggtcatggtcatccccacgaatcagattccatgatgacaactcctcttctcgtcttagcctttcttgcagttgtaggaggatgggtaaatattcctggaatatatacaggatttacaacttgggtcacaaccagaaaaaatggaattattgaatatcatcctgaatcatttgattattttgcattatttagtggcttgtctgctgggttgataggtattggacttgcttattatatttatcaagtaattagtgagccccaaaatggagataataggataaaaattcaaccagtatggagaattctggaaaacaaatattacttagatgatttttattttaaatttattattgatcctataaaaataacttttgctaaggctgttgataaatttaatacagaaatattggatagatttattaatagttttggaaatgctgcttcatacttaggtggagttgtttataacaggcttgaccaaggtggaatagataaagccttaaacttaacttcaaccggaacagacactttaggaagtaaagttaagttgatacaaacaggtaagactcagcaatatataatgtattttttaacaggggtaatagttattagtgcgttagttttgttagtgttatag

SEQ ID NO: 221377 - DNA, 1064 bp, Unknown
  Bacterial polypeptide expressing nucleotide sequence isolated from the Sargasso Sea
gatggaatatctaattttatttttacctttgatcgcatcatttatttcaggattttttggtaaattaattactgacaaatattgtcaaataataacaagtttatttgtatctgtttcagctttgctttctttagttgttttttacaaagttataacttccggttatgaaaataatttaataattgcaacttggattaattcaggatctttaaatgtaaattggtctatcaatatagatgctttatcatcagtaatgcttgttgtagttacggttatatcatcattagtgcacatttactcaattggatatatgtctcaagatcctcacaaggcaagatttatgtcttatttgtctttatttacttttgcaatgttaacgctagtaacttcagacaattttattcaattattctttgggtgggaaggtgttggattatgttcgtattttttaattggtttttggtttaagaaaccaagtgcgaacgcagctgcaataaaagcatttttggttaatagagtaggtgattttggatttgcgttaggtatttttttaattttttatatttttggaactgtaaattacaatgaagtttttcaagaaattccagagataataaatagagagttagtttttttaggtattaatgtaaatgctgttgatttaatatgtttacttttatttgtaggagctatgggaaaatctgcccagatttttcttcatacatggctcccagatgctatggagggacctacaccggtttcagctttaatccatgcagcaacaatggtcactgctggagtttttttagtggttagatgctcaccgatatacgaatattcagaattagcgctatcaataataactatagtaggaatggctacagcattttttgctgcaagcgtagctttagtgcaaacagatataaaaaaaattatagcatattcaacatgcagtcaacttggatatatgttttttgctgctggcgttggagcttatagtgttgctatgtttcatttatttacacatgctttttttaaggccattgttatttttaggatcaggt

SEQ ID NO: 221378 - DNA, 1068 bp, Unknown
  Bacterial polypeptide expressing nucleotide sequence isolated from the Sargasso Sea
aatggattttccaattttatcatcattaattttattaccttctgttggtgcgatttttatatttttttctaaaagtagagataataaaaacatatctagtaagtatattgcactgtttgtttcagtagtaaattttattttatcaatttatttgtggtactcttttgatatcaacacttttgattttcaatttattgaagaaagaagatggcttactggttttgttaattacaaagttggggttgatggtatatctatactgtttattattcttaccacgttcgttacttcgttatgtattatatcagttaataatacagtaaaatatagacttaaagatttccttattgctattcttttaatggaaactttcatgataggagttttctgttcacttgatttattagtattttatttattttttgagggaggcctcataccaatgtttttaattattgggatatggggaggagatagacgtgtttactcagcatttaaattctttttatacactttacttggatctgttttaatgttggttgcaataatatttatttattggcaaacaggtacaactgatataattcaattatacgcaataggtatagaccctaaatatcaaaatttactttggttagctttttttagttctttcgcggttaaaactccaatgtggcctgttcacacatggttaccagatgcgcatgttgaggcaccaactgctggttctgttttattagcagctattttacttaaaatggcaggatatggttttattagattttcaattggtttattccccttagcttctgattactttacaccatttatattttcattaagtttaattgcaatcatatacacatcattagtggctttaatgcaggaagatatgaaaaaattaattgcatattcatcagttgctcatatgggctatgttacattgggaatatttactctaacacaacagggtgttcaaggtagtttatatcaaatgattagtcatggaatggtatcagctgctttatttctttcagttggagtaatatacgaaagaatgcacacaag

SEQ ID NO: 221379 - DNA, 994 bp, Unknown
  Bacterial polypeptide expressing nucleotide sequence isolated from the Sargasso Sea
tatgcttttaccggtagctgccttattaggatttattacgatttatggatttggtgttatttactcagaaataaaagtttcatcatttattcaagataaaactggtccaatggggcaaggcccaggtttacatgctggaaaatggggacttttacagcctgtagcagatggaataaaactatttattaaagaggatatcattcccgcaagcgctgataagccattatttattttagctcctttcttaatatttattggtgcgcttactgcatttattgcagtacccttcggggagaagatcataattgttgatatgaatattggtattttttatatcattggggtaggtagtttggctgtgattgcattgatcttagcaggttggtcttcaaataataagtgggcgctatttggaggtatgagatcagccgcacagatcattagttatgagataccagctggtatttctttagtagttgttattatgttggcaagttcattgaatatgcaagagattatcgcatatcaggaaggtggattatttaattggatcatatttgataatccatttatgcctatcgtgtttgttattttttttataagtgctcttgccgaaacaaatagaacgccttttgatttaccagaatcggaatcagagttggtggctggttttgttactgagtattctgggactcgttatgccatctttttccttagtgagtacgcaaatatgtttgtgataagcgctgtcgctgctacagcatttcttgggggttggcagagtccttttgaaaattttcttaacacacctgcatggagcgttttttggatgattagcaaaacatttttcctgatttttgttatgatatgggtacgttggacagtgccaagattgcgggtagaccagcttatgcatctatgttggaaggtttttatacccataggtttatttaatgtttttgccgttgcaatatggatagtagttataggataa

SEQ ID NO: 221380 - DNA, 370 bp, Unknown
  Bacterial polypeptide expressing nucleotide sequence isolated from the Sargasso Sea
atgattacgaactttttgtcagaatacctgtctataataatatttttatttatctcattactattgagtataggttttatagtaataaattatattgcttctccaagtaaccctgatcctgaaaaattatcggcttatgaatgcggttttgaagcctttgacaatgccaggatagaatttgatgtaaggttctatttagttgcaatacttttcatcatatttgacttagaaattgcctttttatttccctgggcaatatcacttggaaatattggtttattaggcttttactcaatgatggcatttttatttattttaactattggatttatttacgagtggaaaaaaggagcgttagaatgggaatagg

SEQ ID NO: 221381 - DNA, 1483 bp, Unknown
  Bacterial polypeptide expressing nucleotide sequence isolated from the Sargasso Sea
atgaattttccaattttatcatcacttatattattaccaatagttggagcactttttctattttttactaaagataaagatggaaataatttaactgcaaaatatgttgctttatttaccacaattgtaaattttttaatttcaatttatttgtggttattatttgatccaacaacttcagcttttcaatttgttgaggagagaatatggataaaagattttattaattataaagtcggagtagatggaatttcaatcttatttattttattaacaacttttataacacctctttgtatagtttctgtaaataacactgttaaaaatagattaagagacttcttaattgcaattttaataatggaaagtttcatgataggtgttttctgcgctcttgatttgattgtcttctatttattctttgaggctggattaattccaatgtttttaataattggtatttggggtggtcccaaaagagtttactcagcattcaaattctttctatacactttactaggatcagttttgatgttggtggcaataatatctatatattggatatcaggaactacagatgtaattaagctttatgaattagggattgatgcaaaataccaaaaccttttatggttagcattttttagctcttttgctgttaaaaccccgatgtggcctgtgcatacatggcttccagatgctcacgttgaggcaccaacggcaggatcagtgcttctggctgcaatattactaaagatggcaggctacggttttattaggttttctttgggactttttccagttgcatcagaagttttcacacctttaatttatactttaagtgtaatagcaatcattttcacatccttcatagcgttgatgcaagaagatatgaaaaaacttattgcctattcttccgtcgcacacatgggttttgttactcttggaatttttacattacaacaacagggaattgagggcagtataatccaaatgataagtcacggattagtttctgcagctctatttttatgtgttggtgttgtatatgacagaatgcactcaagattgattaaatcatatggcggaatagttacgataatacctaaatactcaattttatttatgctatttaccttagcagccttaggtttaccgggtactagtggatttattggtgaattcttaattttaatgggtgcatttaaagataattttttggtagccgttattgcaagttttggagtaattctaggcgcagcttacatgttatggctttataagagagttgtgtttggaaaattagtcaatgaagatttaaaacaaatggtagatttaaatagatctgagtatttaatattaacatgtcttgcggtgccaacattattctttggattttatccagagccattatttaacacaattgaagtttcagtatcagatttaattaatatgcataacttaaatatagcgagcaagtaat

SEQ ID NO: 221382 - DNA, 1915 bp, Unknown
  Bacterial polypeptide expressing nucleotide sequence isolated from the Sargasso Sea
atggaactttcaattattttccttccattaattgcatcaattatatcaggcttctttggaaaatatattggggatagaaattcagaaatagttactagtgctttagtttcaatttctgctttattgtcaatttttgttttatatcaagtaatagttaatcaatacgaggaaaatattgtaattgctacatggatcaattcaggttcattgaacgtaaattggtcgatgttaatagatcccttatcagcagtcatgctagtagtggtaacttcagtttcttctttagttcatatttactcaattgggtatatgtcccacgatccacacaagccaagatttatggcttatttgtcactatttacatttgcaatgttaatgcttgtaacttcagataattttgttcagttattttttggatgggagggcgtaggtttatgttcatatttcttaataggtttttggtttaagaaagaaagtgctaatgctgcagcaataaaagcttttgtagtaaatagagtaggtgattttggttttgctttaggtatttttttaatcttttatttattcggtacagtaaattactctgaggtttttcaacaaataccaacagtagttgataaaaatttattatttttaggctttgaaataaaagctattgatctaatttgtttacttttattcattggtgccatgggtaagtcggcacaaattttacttcatacgtggttaccagatgcaatggaagggccgacacctgtttcagcattaatccatgcagctactatggtaacagctggtgtatttctagttgttagatgttcacctatttacgaatactcaccattgatcttaaatttaataactattgttggtatgactactgctttttttgcagcaactgtagctttggttcaaacagatataaaaaaaataattgcctattccacatgtagtcaattggggtatatgttttttgcagctggagttggtgcttataacgttgcaatgtttcatttgtttactcatgcattctttaaagcattgttatttttaggttctggctcagtcattcatgcctttaaagatgaacaagatataaataaaatgggaggtgtttggaaaaaattgccatacacctatgcattgatgatcattggaacgcttgcattaactggctttccatttttatctggtttttactcaaaagatgcaattattgagtttgcttatctaaagggtaatacaacaggctattacgcagccggtatagggatactaacagcgtttttaacttcaatatattcttggagattaatatttaaaactttccatggagagtataataataaagaaatcaaaatagaagaaacccacgagtctccattggtaatgctaataccattatttattctttctattggtgcaatttttgcaggggtcttatttaagggcctttttattggatacggaggcgaaaactatttttgggcagagtcaataaaatttttagaaccgcttagcactgaccatccacctacatggtttttacttctaacaccttgtttagtgcttatttcaattcctattgcctattatttgtttgtaaaaaacaaagcaattccagatgacattgtttcaatgaataagcctttatataaatttttagttaacaaatggtactttgatgaattgtatgaagttttatttattaaatcttctaaacgtttaggtttatttttgtggaaattttttgatggaactgtaattgatggttttggcccagatggaatctcttcttttataaaaaaatgttctattaaagcgaataaatttcaaagtggttttatttatcaatatgcatttgttatgttagttggtttttcagcttttttaacctttttaattgttagataat

SEQ ID NO: 221383 - DNA, 772 bp, Unknown
  Bacterial polypeptide expressing nucleotide sequence isolated from the Sargasso Sea
tatgttgagtaatattcctattttgtcttctataacatttttacctttgtttggcgctttaataatactgttaacgtgttcagatgatgaacagggtggaaaaaattcaaaatttgtagctttatggacaagtttgattacttttatactctctctttttgttctatttaattttgataacaatttaaataactttcaatttattgaaaaagcaagttggataccactgtcaaatgtttcttatcatatgggtgttgatggcatctctcttccttttgttatattatctacttttttaattcctatttgtatattagctagttttcaaagtattaaaaaacaggttccattatttatgtcgctcttcttaattttagaagtgctgatggttggtactttttgtgcaatggatattctagttttttacattttttttgaagccgtgcttattccaatgtttttaattattggtatttggggtggtgttagacgagtatattcagcctttaaattttttctttatacacttttaggctctgttttaatgttaattgcaattttctatattttttctaaaacaggtactacagaaattaatgagattgcaaaatttagttttccatatgaagttcaaattttattatttttagcattttttgcttccttttcagttaaacttccaatgtggccagtacacacatggttacctgatgcacatgttgaggctcccacagctggatctgtaattttggcaggagttttacttaaaatg

SEQ ID NO: 221384 - DNA, 1117 bp, Unknown
  Bacterial polypeptide expressing nucleotide sequence isolated from the Sargasso Sea
tttatgattggagttttttgttcattagatttagtcatattttatcttttttttgagggtggtttgatcccaatgtttttaataattggaatttggggtggaccaaaaagagtttatgcagcatttaaattctttttgtttactttacttggttcagttttaatgttggttgctataatctctatttattggatcagtggcactactgatgttgtagacctttatgatcttggaattgatcccaaatatcaaaatttattatggcttgcattttttagttcatttgcagtcaaaactcctatgtggcctttccatacctggttaccagatgcccatgttgaggctccaaccgctggttcagttttacttgcagcaattttgcttaaaatggcaggctatggatttataagattttcaataggattattccctttagcatctgataattttgtaccacttgtatatacgcttagtttaatagcaattatttacacctcattcgtagcacttatgcaggaggatatgaaaaagttaatagcttattcatcagtagctcatatgggctacgttactcttggtatctttacaatgaccaaacaaggtgttgaaggaagcattattcaaatgattagtcatggaatagtttctgccgcattatttttatgtgttggtgtgctctatgacagagtacattctagaatgataaatacatacggaggtgtagtaaacattatgccaaaatatgctgtaatgttaatgatatttacactttcatctattggattgccaggcaccagcggttttattggcgagttcctaatcttgttaggagctttcaaaaaaagttttttaattgcaactattgcaagcgtaggagttattctaggtgccgtttatatgctttggttatataaaagggtagtatttggaaaaattgttaataatgaactaatgaaaattagtgatttaaatagaccagaaattttcattttatcatgtcttgcactattaactatattttttggcttttatccagaaccattattaaaaactattgatccatctattagcaatcttattgaaacatacaattacaacattaatttatataaataat

SEQ ID NO: 221385 - DNA, 1003 bp, Unknown
  Bacterial polypeptide expressing nucleotide sequence isolated from the Sargasso Sea
atgaattatgatatattaattacagggctaataatcattgcccaaatacttgctgttgttgtgccagttttaatatctgtagcttttttagtttatgctgaaagaaaagttttagctctaattcaattaagaagaggtccaaatatagtagggccttttggtatattacaaagctttgctgatgcattaaaacttattactaaagaaaatattatacctagtggatcaaataaaattgtttttattttagcacccataataacaatggtacttagcttagcaggttgggcagtaataccttttgctccaggatgggtagtctctgatattaacgtaggtatcatgtatctgtttgcagtatcatctcttggagtatacggaataataatggctggatgggctagtaactctcaatatccttttctaggagcattaagatcagctgctcaaatggtttcatatgaagtatctattggatttgtaataattacagtattattatgtgtaggttctttaaatttatcaaagatagttttagctcagcagactgtatggtttgcaattccattattacctatgttcattattttttttatttctgcgttagctgaaacaaatagattaccttttgatcttcctgaagatgaatcaacacttgttgcaggattttttactgaatattcatctgcttcatttgtattattttttttaggtgaatacgcgagtatgattttaatgtcttctatgactgtcattctttttttaggcggatggcttcctccatttgatgtatacccattaaatgttgttcctggagtaatctggtttactgtgaaagtaatatttatattatttttatttatttgggttagaggaactttcccaagatatagatatgatcagttaatgagacttggatggaaagtttttctaccgttttctttgttttgggttgtggcaacttctggttttttagtatattttgacatgctgccaaattaat

SEQ ID NO: 221386 - DNA, 1912 bp, Unknown
  Bacterial polypeptide expressing nucleotide sequence isolated from the Sargasso Sea
atggaactatcaattatattccttccacttattgcttcaattatatcaggttttttcggtagatatatcggtgatagaaattctgaaatagtaacaagtgttctagtttcaatttctgcactcttatcaatttatgttctttatcaagtaatcgtaaaccaatacgaagaaaatattgttatagccacctggataagctcaggttcactcgatgtaaattggtcgatgttaattgatcctttatcagcagtgatgttagtagttgtaacatccgtatctgccttagtgcacatctattcaattggttacatgtctcatgatcctcataaaccaagatttatggcttatttatcattattcacatttgcaatgttgatgcttgtaacatcagataattttattcaactattttttggctgggaaggagttggtctttgttcatatttcctaattggtttttggtttaaaaaagaaagtgcaaatgctgcagccataaaagcatttgttgtaaatagagtaggtgattttggttttgctttaggaattttcttaatattttatttatttggaacagtaaattattcagaagtttttcaacaaattccaacagttgtagataaaagtttatcctttttaggttttgaagttaatgcaatagatttagtttgtttgcttttatttataggagcaatgggtaaatctgcacagatattactacatacttggctacctgatgctatggaaggtccaaccccagtttcagcattgattcacgcagcaacgatggtaacagctggtgtttttttagtagtaagatgctctccaatttacgaatattcaccattaatactaaattttataactatcgttggaatgactacagcattctttgcagcaacggttgctctggttcaaacagatataaaaaaaattattgcttactctacgtgtagccaacttggctatatgttttttgcagctggagtaggtgcatacaatgttgctatgtttcacttatttactcatgcatttttcaaagctttattatttttaggatctggttcagtaatccatgcatttaaagatgagcaaaatataaataatatgggaggtgtatggaaaaagttaccatatacttatgccttaatgataataggaacgcttgctttgacaggttttccatttttatcaggattttattctaaagacgcaattatagaatttgcgtatttaaaaggtaatactactggttattatgcagctggcattggaataattacagcatttttaacatctatttattcatggagattgatatttaaaactttccatggtgagtacaataacaaagagattaagatagaggaaacacacgagtctccattagttatgcttgttccattatttattctttcaataggagctgtttttgctggttttctatttaaaggactatttattggtcatggtgagaatttattctgggcagagtctattatgtttttaaagcctttgagtactgagcatccacctttatggtttttacttttaacaccgtgtttagttttattatctattccaattgcttattacttatttgttaagaataaagaactacctaattcaatagcttcaattaacaaacctttatataattttttagtaaataaatggtactttgatgagttatatgatgtgttgtttattaaatcttcaaaaaaactaggtttatttttatggaaattttgtgatggaactataatcgatggttttggtcctgacggaatttcctctttcataaaaaaatgttcaattaaagcaactaaatttcaaagtggttttatctatcaatatgcatttgtaatgttattaggtttctctgctttactaacctttttaatagtaaaataat

SEQ ID NO: 221387 - DNA, 1909 bp, Unknown
  Bacterial polypeptide expressing nucleotide sequence isolated from the Sargasso Sea
atggaatacgcaatattgtttttaccattaattggttctctaataggctatttgggcaggtccactactaaatattttgctgaaatctctacaagtttattcgtcagtatctcagcggtactttctattcttgtcttttggaatggaattcagaacgatagttacggaaattataaaatttttgaatggataagttccggtgggttcacagcaaactggtcaattaaaattgatccactaagttctataatgctagtagttgtcacttttgtatcagcattagttcatatttattctattggttatatgagtcatgatcctcacaaaccaagatttatgtcttatttatcattatttactttttcaatgttagctttagttgtatcagataacttcttacaacttttttttggatgggagggcgttggattgtgttcttatctattaattggtttttggtataaaaaagagactgcgaataatgcggctattaaagcatttatcgttaacagaataggagattttggtttagcaattgcaatatttttaatctttttcttctttggtactattaattttgaagaaacctttcaggccacaagtcagtttgctgaaaaaaaaataattttttttggctttgaagcaaacctaataacattaatatgtgtttttctttttattggagcgatgggaaaatctgcccaatttttacttcatacctggctaccagatgcaatggagggaccgacaccggtttcagctttaattcatgcagcaacaatggtaaccgctggtgtttttcttgtagttagatgttcgccgatatttgaatattctcaatatgctttaaatctggttacagttgtaggaatgataactgcgatatttgctgcatcagttgctcttgtacagaatgatattaaaaaaatagttgcttactcaacctgcagtcaattagggtatatgttttttgcagctggggtgggagcttaccatgttgcgatgttccatctatttacgcatgctttttttaaggcattattgtttttaggcgctggttcagtaatacacgcgtttaaggatgagcaggatattagaaacatgggcggtgtaagaaaaaaacttccatatacttacacttttatgttactaggaaccctagcattaacagggtttccttttttatcaggcttttactcaaaagatgcaattattgaatttgcatatcttaaaaattctactttaggaaattatgcagctacaattggtatctttacagctttcttaacctcaatttattcatggaggttatttttcaaagcatttcatggaccttacaataataaaaaaattcttatagacgaaactcacgagtcacctttagtaatgttgatccctttagtatttttaggtatcggggcgatattttctggctatctttttaaaaccacttttattggtcatcacagtaatgagttttggcaagaatcaatattttttttaaatgaaataaaacatgaatctataccattatggtttttactaattactccgatcttagttttaatatcgatacctatctctttttatttatatatttcaaaacctaaaattctggaggattttaaaaacacaaatatgcctttatacaactttttattaaataagtggtacgtagatgaattttatgaaaaagttttcgtaaatccagcaaagaaaataggctcatttttttggaaaaaaggagatgtgggtataatagataggtttggacctgatggtatttcaaaattagttaaaataatttctaataaaactgcacgccttcaaacaggatttatttatgattacgcctttgtaatgctactaggtttatcaattttgctaacttatttgatcttaaaataaa

SEQ ID NO: 221388 - DNA, 370 bp, Unknown
  Bacterial polypeptide expressing nucleotide sequence isolated from the Sargasso Sea
atggttgcggattttttaaaagattactttacaataattttattcctcattttagctttcgggctgagttgtggatttatagttattaattatttattttcaccaaaaaatcctgatcctgaaaaactatcagcttacgaatgtggttttgaaccatttaacaattcaagaatggagtttgatgttagattttatcttgtggcaattcttttcataatatttgatctagaaatagcatttttatttccttgggcaatctcattgggtcaaattggtttttttggatacatatcaatgatgatatttttatttattctgactattggctttatttatgaatggaaaaagggagctttagactgggaataat

SEQ ID NO: 221389 - DNA, 789 bp, Unknown
  Bacterial polypeptide expressing nucleotide sequence isolated from the Sargasso Sea
tatgcttcttccagttgctggcttacttggattcattaccgtctatggatttggagttatttactctgagataaaagtctcatcatttatccaagataaaactggccccatgggtcaaggtcccggactccatgctggtaaatggggacttttgcaacctgtagcagacggaataaaattatttattaaagaagatataattcctgctagcgcggataagccattatttattcttgctccgttccttatctttattggcgccctcacttcattcattgcagttccatttggagaaaaaataattattactgatatgaacattggtatcttctatataattggcgtagggagtttagccgtaatagcattgatcttagcaggttggtcatcaaataataaatgggcgctttttggaggtatgagatccgctgcgcagatcatcagttatgaaatacctgccggtatctccctagtggtcgttatcatgatagcgagctctctcaacatgcaggagattatcgcgtatcaagcaggtggactatttaattggataatttttgataatccatttatgccaattgtatttattattttctttattagcgttttagcggaaacaaatagaacccctttcgatcttcccgagtcagaatcagaattggtggcaggttttgtgactgaatattctggaactcgttatgctatcttttttctaagtgaatacgctaacatgtttgtcgttagtgctgtagctgccaccgcattccttggtggatggcaaagcccctt

SEQ ID NO: 221390 - DNA, 1369 bp, Unknown
  Bacterial polypeptide expressing nucleotide sequence isolated from the Sargasso Sea
tggctttctagtagggctaatggtcattttgaatactttcaatacattcgatttttacaccgttttaaaaagtgcttcagatgtaccagaaagtacggttactattatttcattatttttactacttggagcgtttggaaaatctgctcagtttcctctttttagttggttaccagatgcaatggaaggaccaactcctgcgagtgcattaatccatgcagcgacaatggtgaccgctggagtattcatgcttgttagaatttcaccaatactacagtattcaaaaattgcaggcatggtgatagtcttagttggacttttaacagctttactcgctgctttttcagcaattaaccagtatgacattaaaaaagttttagcctattcaactatttctcaacttggctttatgtttatcgcaattggtgctggggcgtacgtagcggcaatttttcatctcgtaacacatgcattttttaaagctcttttatttttaggcgcaggtgctgtaattcactctatgcaccatgaacaagatataagaaaaatgggcaaattgagaaagaaaatgcctgtaactgcctcaatgatgggtattgggactcttgcaatatctggcattcctccacttgctggtttttggtcgaaggatgaaatattagcttcagtgtttgcaaatggtggtatgtattacatattttgggcactcggattaagtgcagctttgctaacagcattttacatgggaagacattggttattaatatttgaaaaagataatggtttcgatcattctgatgtaattgaagctccaaaaaccatgactaggcctttaattgtccttggtctattttcaatttttataggatttattaacacacctttttttcacggagtggaaaaagttcttcactattctttggaaggagtaaatgtaactcatttacctgagggtccaactttaatcattcttgcaatcttatcaattggtgctggtttcacaggactactgatagcgtatttaatattttcttttgaaatttttaaaaaaattaattttaagagaattaatttagaatatccgattaatttagtaaaagatctatcgttaaacgttctatatctcaataattttggtaattcaatttttgtttctggtatgaaaacctttacaagaaaggtcgctgtaatagtcgatggtctcattattgacggttctgttaattttgtttcaaatgcatttggtaaaacttcaagtgttgcatcggctacacagacaggtctagtaagaagttatgttgtgtattttggattgtttctacttctgctgatcgggttatttattgtcactccgatggtgcaacaatga

SEQ ID NO: 221391 - DNA, 1111 bp, Unknown
  Bacterial polypeptide expressing nucleotide sequence isolated from the Sargasso Sea
tatgattggagtattttgttcattagatttagtagtattctatttattttttgaggctgggttaattccaatgtttttaattattgggatttggggtggaacaagaagagtttactctgcatttaagttctttttattcaccttattaggctctgtattgatgctaatagctataatctcaatatattggatatcagggactacagatgtagttcaactttatgaattaggaatcgatgccaaatatcaaaatcttttgtggctggcctttttcagttcatttgccgttaaaactcctatgtggcctgttcacacttggttaccagatgcgcatgtagaggccccgacagcaggatcagtattactagcagcaattttgcttaaaatggcaggttatggttttattagattttctctaggtttatttcctattgcatcagaaatttttacaccattaatttacactttaagcgttatcgcaattattttcacatccttaattgctttaatgcaagaggatatgaaaaaattaattgcatattcatctgtcgctcacatgggttttgttactttaggaatttttacaattcaacagcaaggccttgaaggcagtattttacaaatgataagtcatggtttggttgcagcggcactctttttgtgtgttggtgtggtttatgatcgaatgcattccagattaataaacacctatggtggtattgtgagtattattcctaaatactcggttttattcatgttatttacattagcagctttaggtctgccaggaacaagcgggtttgtaggtgaatttttaattttaatgggagcttttaaagacaattttttagtagctgtaattgcaagtttaggagtcataataggagcagcatatatgctttggttatataaaagggtagtttttggaaagctagttaattcagatttaaaacaaatggtagatttaaataaatctgaattatttattttatcatgtttagctgtaccaacgttattttttggattttatccagaacctttaataaataccattgaagtttctatcagcaacttaataaaagtatataacttcaatttaattagtaattaa

SEQ ID NO: 221392 - DNA, 844 bp, Unknown
  Bacterial polypeptide expressing nucleotide sequence isolated from the Sargasso Sea
atcgcattttttacttcattcatggtcaagatacctatgtggccttttcacacttaggctaccagatgcccacgtagaagcaccaacagctggatcagttatacttgcgggtgttctattaaaaatggctggatatggctttataagattttctattggcttttttccggatgcatcagaattttttgcgccatttatattttctcttagcgttatagcaataatagtgacttctctaatcgcattggtgcaagaagatatgaaaaaactaattgcttattcatcagttgctcatatgggatttgtaacattaggaatatttacatttactgtacaaggaatagaaggtggcataattcaaatgataagtcatggcattgtttctgcggcattatttttgtgtgttggcgtggtatatgatcgtcttcatacaagagaaattgcaagatatggaggcttagttagtaaaatgcctttttattcattttcatttatgatttttatattagccagccttggcttgcctggaacaagtggttttgttggcgagtttttagtactcctttctatatttacggtaaatacatattttgcgatatttgcgactacaggtgttgtattggcagcaacatattcattatggctttatagaagaataatatttggcgctttaattaaagatgatctatctgaaatgtttgacttaacaagaagagagataattatctttcttcccttaattatcctaacaatattcataggcttatatcctaaaccaatcataaatataattgaaccttcaacagaaaaaattgtaaatcaaattaaaatgaaattagattaa

SEQ ID NO: 221393 - DNA, 719 bp, Unknown
  Bacterial polypeptide expressing nucleotide sequence isolated from the Sargasso Sea
aatggaatatttaattttatttttacctctgttggcttctattatttctggtttttttggaaaattaattggagacaagatgtctcaaattataacaagtttatttgtatctgtttcagctttgctttctttagttgttttttacaaagttataacttccgcttatgaaaataatttaataattgcaacttggattaattcaggatctttaaatgtaaattggtctatcaatatagatgctttatcatcagtaatgcttgttgtagttacagttatatcatcattagtgcacatttactcaataggatatatgtctcacgatgctcacaaggcaagatttatgtcttatttatctttatttacttttgcaatgttaaccctagtaacttcagataattttattcaattattctttggatgggaaggtgttggattgtgttcatattttttaattggtttttggtttaaaaaaccaagtgcgaacgcagctgcaataaaagcatttctggttaatagagtaggtgattttggatttgcgttaggtatttttttaattttttatatttttggaactgtaaattacaatgaagtttttcaaaaaataccagagatcgtagataaagaattagtttttataggcattagtataaatgccgtagatttaatatgtttacttttatttgttggagctatgggaaaatctgctcagatttttcttc

SEQ ID NO: 221394 - DNA, 370 bp, Unknown
  Bacterial polypeptide expressing nucleotide sequence isolated from the Sargasso Sea
catgatttataattatttaacagattacttatctataataatttttttatttattgctttatttttaagcattggttttattgtggctaattttttggcctctccatctaatccagacccagaaaaattatctgcctatgaatgtggttttgaggcatttgatgactctagaatggaatttgatgtgaggttttatttagttgcaatcttatttataatttttgacttagaaatagcttttcttttcccatgggcaatatctttaggaagcttaggtgctttaggtttttggtctatgatggttttcttaggaattttaacaattggttttatttatgagtggaaaaaaggagctttagaatgggaataa

SEQ ID NO: 221395 - DNA, 882 bp, Unknown
  Bacterial polypeptide expressing nucleotide sequence isolated from the Sargasso Sea
gttgatcgcactaactcttatattattgctgtcaccactgattggaactctacttttattgttttgtcaaaactcatctaaagacttaactgtactcatttcaaacatttctattctgattgctttcttgttatcattatttctcctttatcttttttattcgtccaatccagggcctatatcagctaattttttaacatttgctgatacaaaactattttctttacactttggtatctacattgattccttagcattaattatgagcacggtggttacatcagtgtcgctattagttcattattattcaatctcgtatatgaaggacgatacatcatttaatagattttttatttatactaactttttcacattttccatgctcttgatagttttcgctaataattttttacagcttttcatcggttgggagctagtaggcttatcatcatacttactaataggtttttggataaaaaaagaatctgctattaaggcgaactataaagcctttctagtaaacagagtgggtgatattggattactgttaggcctatgtttaatactactctcatacaatacaacagattataatcaaatatttcaaattaaaaattcaattaacatggatagtgttagtatattcggatttacatttaatgcactgagcgcaatctgcttacttttatttattggagctatggcaaaatctgcacaagtgcctttacaattttggttacctgactcaatggaaggacctactccaatctcagcgttaattcatgcagcaactatggttactgctggaatttacatggtcgcccgtctctcgccttatatgagcttactgatggagttttcattttcatactttatgttggg

SEQ ID NO: 221396 - DNA, 370 bp, Unknown
  Bacterial polypeptide expressing nucleotide sequence isolated from the Sargasso Sea
atgctttcagaatttttaaaagattatttatctataataatttttttgtttattgctctcggtttgagcataagctttatagtgttaaattttattttctcaccaaagaaccccgatcctgaaaaactttctgcatatgaatgtggatttgaaccatttgatgattcaagaatggaatttgatgtaaggttttatttagttgcgattttatttatcatatttgatttagaaatagcttttttatttccatgggctatttctttaggaaatattggtttgttaggtttttgttcgatgatgatatttttatttattcttaccattggttttatttacgagtggaaaaaaggtgcattagactgggaataaa

SEQ ID NO: 221397 - DNA, 1060 bp, Unknown
  Bacterial polypeptide expressing nucleotide sequence isolated from the Sargasso Sea
atggaatacgcaataatttttctcccactactggggtctttaataggtttttttggaaaaaaacttacaaaatatttttcggaaataacaactagtatatttgtaattttttcagcaattttatctgtaattgtattttggcaaggtcttcaaaatgatgattatggcaactataaaatatttgagtgggtaagttcaggaaattttgtagcaaactggtcaattaatatagaccccttaagctcaataatgttggtggttgtaacttttgtttcagctttagttcatatttactcaattggatatatgagccacgatcctcataaaccaagatttatgtcttatctttcactttttacattctcaatgcttgcacttgttgtatctgataattttctacaattattttttggatgggaaggagtaggcttatgctcgtatttactgataggtttttggtataagagagaaacagcaaataacgcagcaattaaagcatttattgttaatcgagttggagactttggtttagctatcggaatatttcttatctttttttattttggcactatcaattttaaggaagtattcgaattagtacctcaatatttagaagataaatttctattttttggatttgaaacaagtcttgtgactttaatttgtgtatttttattcattggtgctatgggaaaatctgcacagtttttactacatacatggttgccagatgcgatggaaggcccaacgccagtttctgctttaattcacgcagctacaatggttactgcaggcgtttttttagttgtaagatgttcacctctatttgaatactctcaaacatctttaaatttagttgcaatagttggaatgattacagcaatatttgctgcatctgttgctttagtacaaaatgatataaagaagatcgttgcttattcaacatgtagtcaacttggttatatgttttttgctgctggaataggagcatatcatgttgccatgtttcatttatttactcacgctttttttaaagcacttttatttctaggtgcaggct

SEQ ID NO: 221398 - DNA, 1159 bp, Unknown
  Bacterial polypeptide expressing nucleotide sequence isolated from the Sargasso Sea
cctcctaatttgggtaaaatttgatccgtccacagccaactttcagatgacggaaagcctggaatggatagagggaacaaatattggttatcggatgggcgtggatgggatttctatattttttgtgctcttatccactctcttaacgcctatctgtatattagcaagctgggaggctatagaaaatagagtaagagagtatatgattgcattcctcattctggaaaccatgatggttggaatgttttgtgctctcgatatccttgttttttacatcttttttgaaggtgtgttaatccctatgttcatcattataggagtgtggggaggggcaagaagagtatacgcttcctttaaattttttctctataccctcttgggatcagttttaatgctcgtcgctattctcgttatgtactttatggcgggaacaaccgacgttgttgttcttagcaaattcacttttccgagtaatttccaaacctggttatggttggctttctttgcgtcgtttgcggtaaaagtgcctatgtggccagtacatacgtggcttcctgatgcgcatgtcgaggctccaaccgctggttcggtgatattggcgggcgtgttattgaaaatgggtggttatggatttttaaggttttctattcccatgtttccggaggcatcggaatttttctcaccattggttttcttattaagtgttatagcaattatatacacctcacttgttgcattggcgcaggatgacctgaaaaagcttatagcttattcgtcagttgcgcatatgggttttgtcacgatagggatttttactctcaattcgcaagggctagagggcgcaatctttcagatgcttagccatggtattgtttctggtgctctgtttttatgcgttggtgttatttacgatagaatgcatacccgggaaattgctgcttatggaggtttggtgaatagaatgcccaaatatgcattggtttttatggtgtttactatggcttcggtgggattacctgcaaccagtggtttcgttggtgaattcttagttctactaggcgccttttactataatacttggctggcggtttttgccacgaccaggtgttgtattaggcgcagcatatatgctttatgtctatcgaagaataatattgga

SEQ ID NO: 221399 - DNA, 535 bp, Unknown
  Bacterial polypeptide expressing nucleotide sequence isolated from the Sargasso Sea
aatggagtacgctgtaatttttttaccattagttggatctttattgggctttttaggaaaatctttaataaaatatttttctgaaattataactagtttatttgtaagtatttcagctgtgttttcaatagttctgttttggaatggaattcaaaataatacgtatggaaattttaaaatatttgaatggattagttcaggaaattttgttgctaattggtcaataaatattgaccctttaagttcagtgatgcttgtagtcgtgacatttgtttcagctttggtacatatttattctattggctacatgagccatgatccacacaaaccaagatttatgtcttacttatcattatttacattttcaatgttagttcttgttgtatcagataatttccttcaattattttttggatgggagggagtagggttatgttcgtatctattaatcggtttttggtataaaaaagaaagtgcaaataatgcagcgattaaagcctttattgtaaacagggtaggtgattttggtttagcg

SEQ ID NO: 221400 - DNA, 1366 bp, Unknown
  Bacterial polypeptide expressing nucleotide sequence isolated from the Sargasso Sea
atggaaaaaataattttatttctaccattagcttcagcattcatttctggattttttgggaaaataattggcaacaaattatctcagttagtaacatgtttgtttgtatgtttatctacagttttatcaattatggttttttatgaagttttatataatgattatacaaataatataataattgctaaatggatcaattcaggtgagctcaatgtaaactggtctatctatatagatccaatatcaagtgtaatgttggttgtggttacactaatttcttcattggtgcatatttattcaataggatatatggccgaagaccctcacaaaccaagattcatggcttatctttcattatttacttttgcaatgttaacacttgtaacatcagataattttttacaattattttttggttgggaaggtgtaggtctttgttcttattttttaattggtttttggtataaaaaaaatagcgcaaataacgctgcaattaaagcttttatagtaaatcgagttggcgattttggttttgcacttggaatttttttaattttttatttatgcggcactgtaaattattctgaagtattcaaattaattccaaatattgatgataaaaaattgttatttctaggtattaattttaatgcagtagatttaatttgcatcctactttttataggagccatgggtaagtcagcacaattttttcttcatacatggttaccagatgcaatggaaggaccaacacctgtttcagcattaattcatgctgccacaatggtaacagctggagtatttttagtagtcagatgctcttatatttatgaatattcagaatttgctttatctttaattacattaattggtatgattactgcactatttgctgctactgttgcgcttgttcaaaatgacattaaaaaaattatagcatattcaacttgtagtcagttaggctacatgttttttgcagctggcgtaggtgcttacaatgtagcgatgtttcatttatttactcatgctttttttaaagcattactatttttaggtgcaggttcagtaattcattcttttaaagaagagcaagatataaataaaatgggtggagtttggaaaaatttaccttacacatatattttaatgattattggaacactagcactaacaggttttccttttttatcaggatattattctaaagatgcaattattgagtttgcatatcttaaaaatacatcattaggatacaatgcggcatcagttggaatatttacagcaatattaacatcaatatattcttggagattgattttcaaaacttttcatggagattataataataaaataatatctaaaagta

SEQ ID NO: 221401 - DNA, 1915 bp, Unknown
  Bacterial polypeptide expressing nucleotide sequence isolated from the Sargasso Sea
atggaatacctaattttatttctgcctctaataggagctgtaattagtggtttttttggaaagaaaataggagacagaaattctcaaattttgacaagttcgtttgtgagtatttcagcaatactctctctatatgttttatataaagttattagttcagattactcaaacaatcttattatagctacttggatcaattctggatcgttaaatgttaactggtcaataaaaattgatgctttatcagcggttatgtttgttgtagtaaattttgtttcagctttggttcatatttattcaattggttacatgtcacacgatcctcataaaacaagattcatggcatatttgtctttatttacttttgcaatgttaactttagtaagttcagataattttattcaactattttttggttgggaaggtgtaggtttatgttcatattttttaattggtttttggtttaaaaaagaaagtgcaaacaaggctgcaataaaagcctttgttgttaatagagtaggtgactttggtttagcgcttggaatttttctgattttttatatttttggtacagtcaattatgacgaggtttttgaacaaatcccaaatgttttagataaaaaaataaatttcattggtattaatatagaaattattgatttgatttgtttacttttattaattggagcaatgggtaaatcggctcaatttttattacacacatggttgcctgatgctatggaaggcccaacgccagtatctgcattaattcacgctgcaacaatggtaactgctggagtatttctgatcgttagatgctcacctatatatgaatactctccattagctctaacagttataactataattggaatgactactgctttctttgcagcaacagttgcacttgttcaaaatgatattaaaaaaattattgcttattctacttgtagtcaattaggttatatgttttttgctgccggggtaggtgcttataatgttgcgatgtttcatctctttacacatgccttttttaaagctttgctatttttaggagctggtgctgtaattcattcatttcatgaggaacaagatataaataaaatgggtggagttataaagaaactcccatacacatatgtattaatgctaataggaactcttgctttaactggttttccttttttatcaggtttttattctaaagatgcaataatagaatttgcgtacttaagaggaaatggagttggaatacttgcagcttttgtaggtattgttacagctttattaacatcaatttactcttggagacttatttttaaaactttccatggtaattttaataataaagaaattagcgttgataagatacacgagtctccttttgttatgattgctcctttaattatcttagcaataggagctatttttgcaggtatggcctttaaaggtttgtttataggtcatgaaatagcatatgaattttggggtaaatctataaaatttttagaaccactcagtacagatcatccaccaacatggtttttgtttttaacacctatacttgttacctctgcaattccattttcttattatttatatctaaaaaacacaaacatagtaaatggattgaaagaaatgaatgaaccaatttatcaatttttagttaataaatggtactttgatgaaatttacgattatttatttgttaatccttcaaaaaaaattggaaagtttttatggaaaaaagttgatggatcaataatagataaatttggtcctgatgggatttcaagtgtaattaaaaatttatcaattaaagcagtcaaatttcaatctggatttatttatcaatatgcatttgttatgttgattggattttcagttttactaacaatactgatattaaactgat

SEQ ID NO: 221402 - DNA, 1270 bp, Unknown
  Bacterial polypeptide expressing nucleotide sequence isolated from the Sargasso Sea
gctcttggaatttttctgattttttatatttttggtacagtcaattataatgaagtttttgaacaaataccaaatgttttagataaaaaaattaactttgttggtattaatatagtaattattgatttgatttgtttacttttattaattggagcaatgggtaaatcagctcaatttttattgcacacatggttgcctgatgctatggaaggcccaacgccagtatctgctttaattcatgctgcaacaatggtaactgctggagtatttctgattgttagatgctcacctatatatgaatactctccattagctctcacagttataaccataattggaatgacaactgctttctttgcagcatcagttgcacttgttcaaaatgatataaaaaaaattattgcctattctacttgtagtcaattaggctatatgttttttgctgctggagtaggtgcttacaatgttgcgatgtttcatctatttacacatgctttttttaaagctttactatttttaggagctggtgctgtaattcattcatttcatgaggagcaagatataaataaaatgggtggagttataaagaaacttccatacacatatgtattaatgcttattgggactcttgccttaactggtttcccttttttatcaggtttttattctaaagatgcaataatagaatttgcgtacttaagaggaaatggagttggaatacttgcagcttttgtgggtattgttacggctttattaacatcaatttactcttggagacttatttttaaaactttccatggcaattttaataacagagaacttagtgttgataaaatacacgaatctcctttggttatgatcgtcccgctagtaatcttggcaataggtgctgtttttgcaggtatggcgtttaaaggtttatttatagggcatgaaataacatatgaattttggggtaaatctataaaatttttagaaccactcagcacagatcatccaccaacatggtttttatttttaacacctatacttgttaccgttgcaattccattttcttattatttatatctaaaaaatgaaaacgtagttataggattgaaagaaatgaatgaaccaatttataaatttttagttaagaaatggtactttgatgaaatatatgattacttatttgttaatccttcaaagagagctggaaagtttttatggaaaaaagttgatggatccataatagaaaaatttggccctgatggaatttcaagcgtaatta

SEQ ID NO: 221403 - DNA, 1912 bp, Unknown
  Bacterial polypeptide expressing nucleotide sequence isolated from the Sargasso Sea
atggaactatcaattatatttcttccacttattgcttcaattatctctggtttttttggaagatatatcggtgatagaaactcagaaatagtaacaagtgttttagtttctatttctgcatttttatcaatttatgttctttatcaagtaattgtaaatcaatacgaagaaaatattgttatagcaacctggataagctctgggtcacttgatgtaaattggtcaatgttaattgatcctttatcagcagtaatgttagtagttgtaacttctgtatctgctttagtacatatctactcaattggttatatgtctcatgaccctcataagccaagatttatggcttatttatcattgttcacatttgcgatgttgatgcttgtaacttcagataattttattcaattattttttggttgggaaggtgttggattatgttcttacttcctaattggtttctggtttaaaaaagaaagtgcaaatgctgcagccataaaagcatttgttgtaaacagagtaggtgactttggttttgctttaggaatttttttaatattttatttatttggaactgttaattactcagaagtttttcaacaaattccaacagttgtagataaaaatttatcctttttaggttttgaagttaatgcaatagatttagtttgtttacttttatttattggagcaatgggtaaatctgcacagatattacttcatacatggctacctgatgctatggaaggtccaacacctgtttctgcattaattcatgctgcaacgatggtaacagctggtgttttcttagtagtaagatgttctccaatttatgaatactcaccattaatactaaatttcataactattgttggaatgactacagcattctttgcagcaactgttgctctagttcaaacagatataaaaaaaattattgcttactctacatgcagccaacttggttatatgttttttgcagctggagtaggtgcatacaatgttgccatgtttcacttatttactcacgcatttttcaaagctttattatttttaggatctggttcagtaatccatgcatttaaagatgagcaaaatataaataatatgggtggtgtatggaaaaagttaccatatacctatgctttaatgattattggaacacttgctttaacaggttttccatttttatcaggattttattctaaagatgcaattatagaatttgcgtatttaaaaggtaatactactggttattatgctgctgggattggaataattacagcatttttaacatctatttattcatggagattaatctttaaaactttccatggagagtacaataacaaagaaatcaagatagaggaaacacatgagtctccattagtaatgcttgttcctttatttatcctctcaataggagcggtatttgcaggatttctatttaaaggactatttattggtcatggtgataatttattctgggcagagtctattaagtttttagagcctttaagcacaaaacatccacctttatggtttttacttttaacaccttgtttagttttagtatctattccaattgcttattacttatttgtaaaaaacaaagagttacctaattcaatagtttctatgaacaaacctttgtataattttttagttaataaatggtattttgacgagttgtacgatgtgctgtttattaaatcctcaaaaaaactaggtctatttttgtggaaattttgtgatggaactataatcgatggttttggtcctgatggaatttcttcttttataaaaaaatgttcaattaaagcaactaaatttcaaagtggttttatctatcaatatgcatttgtaatgttgttaggtttctctgctttactaacttttttaatagttaaataat

SEQ ID NO: 221404 - DNA, 733 bp, Unknown
  Bacterial polypeptide expressing nucleotide sequence isolated from the Sargasso Sea
atgaattttcctattctttcatttttaatattattaccaatagttggtgctttatttttattttttaccaaagataaagaaggaaataatttaactgctaaatatgttgctttgtttacaactgtagttaattttttaatttcgatttatctttggatttcttttgaccaatcaacgtctacttttcaatttgtagaagatagaacatggattaaaggatttattaattataaagttggagttgatggtatttcaattttatttataatattaacaacatttataactcccctttgtataatatctgtaaataattctgttaaaaatagattgagagattttttaattgcaattctaatcatggaaagtttcatgattggtgttttctgtgcacttgatttagttgtattctatttattttttgaagctggattaataccaatgtttttaatcattggtatttggggaggtgcaagaagggtttattctgcattcaaattctttttatacacattgttaggctctgttttaatgttagttgcaataatttcaatttattggattacaggaacaactgacgtagttcaactatatgaaattggtattgatgttaaatatcaaaacctattgtggttagcattttttagttcatttgcagttaaaacacctatgtggccaattcatacatggttacctgatgcgcatgttgaggctcctacagcaggatctgtat

SEQ ID NO: 221405 - DNA, 492 bp, Unknown
  Bacterial polypeptide expressing nucleotide sequence isolated from the Sargasso Sea
tttgaacattgtcacaattattggaatgaccacagcattctttgcagcaactgttgcaattgtacaaaatgatataaaaaaaataatagcttattcaacttgtagccaactaggttatatgttttttgcagctggtgtaggagcttataatgttgctatgtttcatttattcacacatgcattctttaaagcacttttatttctaggttctggttctgttattcattcaatgaacaatgaacaagatataagaaatatgggcgatctatggaaaaaaatgccttttacttggatagctatgatagttggtacgcttgcactaactggtttcccttttttatcaggattttattctaaagatgcaattattgaatatgcatatttaagccaaagtaacattggttatattgcaactgtagtaggaataatcacggcacttttaacagctatttattcatggagattaatatttaaaacttttcacggaagatt

SEQ ID NO: 221406 - DNA, 732 bp, Unknown
  Bacterial polypeptide expressing nucleotide sequence isolated from the Sargasso Sea
aatgaactttcctattctctcctctttgattttattaccatctattggagctttatttttattttttaccaagggtaataaaaaaaataattttactattaagtatgttgctttatttacttcggctgtaaatttttttttatcaatttatttatggatatcatttgattcatcaacttcggattttcaatttgttgaagagagaatttggattaaagattttataaattataaagttggcgttgatggtatttcgatattatttattttattaacaacatttataacgcctctttgtattatttctgtgaataactcaattaaagagagactgagtgaatttttaatagctgttcttataatggagtcttttatgataggtgtattctgctcattagaccttgtcattttttacttgttttttgaagcaggtttaattccgatgtttttaataattgggatatggggtggtgctagaagagtctattctgcatttaaattttttttgtatactttgcttggttcagtattaatgttagtagccataattacaatatattggttgaacggaacaacagatgtagtcgaactttataattctggaattgatattaaatatcaaaatcttttatggttagctttctttagctcttttgcggtaaaaacccctatgtggcctgttcacacttggttaccagatgctcatgttgaagcaccaactgctgggtctgt

SEQ ID NO: 221407 - DNA, 265 bp, Unknown
  Bacterial polypeptide expressing nucleotide sequence isolated from the Sargasso Sea
aataaccctgatcccgaaaaattatcggcttacgaatgtggatttgaagcttttgacaatgccagaatagaatttgatgtaaggttctatttagttgcaatacttttcataatatttgatctagaaattgcttttctatttccttgggcgatatcacttggaaatattggtttattagggttttactcgatgatggcatttttattcattttaactattggttttatttatgagtggaaaaaaggagcattagaatgggaatagg

SEQ ID NO: 221408 - DNA, 1321 bp, Unknown
  Bacterial polypeptide expressing nucleotide sequence isolated from the Sargasso Sea
atggagtatataattgtttttttaccaatcgttggagctattttatctggtttttttggaaaatttattgggcacagaacatcagaaatactcacaagtttatttgtttcaattagtgcaatactttcaatcattgtattttataatgtcataacttttgattatagtaataatatagaaatatttacttggataaattctggtcaattaaatgtaaattggtcaatacaagttgatgccctgtcagctgtaatgttggtagtggtaaatttaatttcttcaatagtgcatgtttattctattggatacatgtctaatgatcctcacaaaacaagattcatggcttatttatctctttttacatttgctatgcttactttggttacttcagataattttttacaacttttttttggttgggaaggtgttgggctttgctcatattttttaattggcttttggtataaaaaagagagtgcaaatgcagctgctataaaagcattcttagtaaatagagttggtgattttggatttgcattaggaatatttttaatattttatatgtatggtactcttaattaccaggaagtttttaatttagtaccaaatactttagatagagagattaattttctaggtataaatataaatagtataaacttaatctgtatacttttgttcattggtgctatgggtaaatccgcacaatttattttacacacatggttgccagatgctatggaaggtccaacaccagtatcagccttaattcatgccgctactatggttacagctggagtttttttggttgttaggtgttcacctatttatgagtattcaattttagctcaaaatttaattgtcattattggtatgactactgctttttttgcagcttcaatagcattagtccaaaatgatataaaaaaaattatagcctattcaacttgtagccaacttggatatatgttttttgctgctggagtaggtgcatataatgtagctatgtttcatttgtttactcatgctttttttaaggcacttctatttttagggtctggttcagttattcatgcttttaacgaagagcaagatattactaaaatgggaggtgtttggaaaaaattaccatatacatggatacttatgttaattggtacactggcactaactgggtttccatttttatcaggattttattcgaaagatgcaataattgaatttgcataccttagaggagatagtcttggatatattgcagctagtataggtgtttttactgcatttcttacatctatctactcttggcgtttaatgtttt

SEQ ID NO: 221409 - DNA, 1582 bp, Unknown
  Bacterial polypeptide expressing nucleotide sequence isolated from the Sargasso Sea
atgcttaaacttttagtatttttgccattacttggttcggttttgagtggtttatttccctctattcttggcaggaaaggatctatatggattcctactttattttgttttgtatcattaattttttctataattttactgatacaagccattggcggagagtcatatatagttcatttgggttattggataaaatcagagtcacttagtgtaagttgggctctgaagctagatatgttgagtgctattatgctttttgtagtcatgttagtttctagtttagtacatttatattcaataggctatatggagcatgatgagcataagcctagatttttttcatatttatcattatttacttttgcaatgcttatgttagttacgtccaataattttctacaattattttttggttgggaaggtgttggattatgttcttatttgctcataggtttttggtttaaaaaacaaagtgcaaatgctgctgctataaaagcatttctcgtaaaccgtgtgggcgacttaggccttattttgggtatttgcgttatatataaattaactggaagtttagattttaatatagtttttgctgatgtgtattcattaataaatactagtattatattttttaatataaatataccatacattgagttagcatgttttttattatttattggggctatgggtaaatctgctcaaataggtcttcatacttggttagcagatgctatggaaggtcctactccagtatcagctcttattcatgcagctactatggtgacagctggcgtatttcttttggctagatgttctccattatttgaatacgctcctatatcactaaatcttgtaatattggtgggtgctgcaacatcaattttcgctgcttgtattgctattactcaaaatgatataaaaaaaattattgcttattctacatgtagtcaattaggttatatgttctttgcttgtggagtttctgcgtattctgctggtatgtttcatctaatgacacatgcttttttcaaggctttattatttctaggagcaggttctgttattcatgccctatcagatgaacaagatataagaaaaatgggtgggcttgcaaagactctcccatatacttgcatagcaatgtggattggttcactcgcattagctggcctacctccatttgcaggctttttctcaaaggatattatattagaggctgcatgggcacataatagtggttttggatatattgcattttatttaggcttgattgcagcatttttgacagctttttattcatggaaaattttatttatggtttttcatggcaaagctagatcagatataagtaaagcacatgaatctcctttatatattctgattccactttttattttatctgttggagcaataatttctgggtggataggctatacaatggtagatactcatcacgatttttggttaggttcaattttaatattagataaccacaaagctttagccaatgcacattatgttcctttattggtaaaactatcgccaattattgttgctctattaggtatatactttgctt

SEQ ID NO: 221410 - DNA, 1477 bp, Unknown
  Bacterial polypeptide expressing nucleotide sequence isolated from the Sargasso Sea
atggaactttcaattattttccttccattaattgcatcaattatatcaggcttttttggcaaatatattggggatagaaattcagaaatagttactagtgctttagtttcaatttctgctttattgtcaatttttgttttatatcaagtaatagttaatcaatacgaggaaaatattgtaattgctacatggatcaattcaggttcattgaacgtaaattggtcgatgttaatagatcccttatcagcagtcatgctagtagtggtaacttcagtttcttctttagttcatatttactcaattgggtatatgtcccacgatccacacaagccaagatttatggcttatttatcattatttacatttgcaatgttaatgcttgtaacttcagataattttgttcaattatttttcggctgggagggggtaggtttatgctcatatttcctaataggtttttggtttaagaaagaaagtgctaatgctgcagcaataaaagctttcgtggtaaatagagtaggtgattttggttttgcattaggtatttttttaattttttatttatttggtacagtaaattactctgaggtttttcaacaaataccaacagtagttgataaaaatttattgtttttaggctttgaaataaaagctattgatctaatttgtttacttttattcattggtgctatgggcaaatctgcacaaattttacttcatacgtggttaccagatgcaatggaagggccgacacctgtttcagcattaatccatgcagctacaatggtaacagctggtgtatttctagttgttagatgttcacctatttacgaatactcaccattgatcttaaatttaataactattgttggtatgactactgcattttttgcagcaactgtagctttggttcaaacagatataaaaaaaataattgcctattctacatgtagtcaattggggtatatgttttttgcagcaggtgttggtgcttataacgttgcaatgtttcatttgtttactcatgcattctttaaagcattgttatttttaggttctggctcagtcattcatgcctttaaagatgaacaagatataaataaaatgggaggtgtttggaaaaaattgccatacacctatgcattgatgatcattggaacgcttgcattaactggctttccatttttatctggtttttactcaaaagatgcaattattgagtttgcttatctaaagggtaatacaacaggctattacgcagccggtatagggatactaacagcgtttttaacttcaatatattcttggagattaatatttaaaactttccatggagagtataataataaagaaatcaaaatagaagaaacccacgagtctccattggtaatgctaataccattatttattctttctattggtgcaatttttgcaggggtcttatttaagggactttttattggatacggaggcgaaa

SEQ ID NO: 221411 - DNA, 922 bp, Unknown
  Bacterial polypeptide expressing nucleotide sequence isolated from the Sargasso Sea
aatggaatatattttaatatttcttccacttttaggatcattactttcgggtttttttggaaaatatataggtgatcgaaattcagaaataattacatgcttgtttataagtatttcagcaattttatctttaataatttttaaggaagtaacttttaatggttacgaaaataacttaattatatttaaatggataaattctggttctttagaagttaattggtctattaaaatagatactgtatcgtctgtaatgttagttgtagtttgtctcatttcatctttggttcatatttattcaataggttatatgtcacacgacccacacaaaacaagatttatggcatatttgtctttgtttactttttcaatgttaatgcttgtaacttctgataattttttacaactttttttcggttgggaaggagtaggtctttgttcatattttttaataggtttttggtttaaaaaagaatctgctaatgcagcggcaataaaagcttttgtagttaaccgtgtgggcgattttggatttgctattggaattttcttaattttttatttatttggtaccgttaattacgatgaagtttttactaaaattcctcagttaattggtaatgaaatttcttttattggcttaaatgtaaaatcgatagatttaatttgtatacttcttttcattggtgctatgggaaagtccgcacagtttttacttcatacttggcttccagatgcaatggaaggaccaacacctgtttctgcattaatacatgcagctacaatggttacagctggcgtttttctagttgtgagatgttcgccaatttttgaatattcagaatttgctttaaacattatttgcattgtaggaatgaccactgcttttttcgcacgctactgttgctttagttcaaaatga

SEQ ID NO: 221412 - DNA, 1495 bp, Unknown
  Bacterial polypeptide expressing nucleotide sequence isolated from the Sargasso Sea
atgacaaatttaccattattaagcatacttacttttttacctttgattgggctaccatttattatcattggaaaattaattaactcagaaaattatgaaataatatctaaatatattgctctttttgtatcattaattgcttttataatttcactcatcattttgtataatttcgacataagtacctcaaattttcaatttaatgagcatattccaattatgaatggccttatgacatacagaatgggtattgatggtatatcaatattatttatattgctctctacatttcttacacctatatgcataatcgctagttggaatattataaatgaccgtgttgactattatatgtgttcatttttaatacttgaaacacttatgataggtactttttgtgcgttagatatagtgctcttttatttattttttgaaagcgttcttattccaatgtttgttattattggtgtatggggcggtgaaagaagagtttattccgcctttaagtttttcctttatacgcttttagggtctgttttgatgctagttgctataatttatatagttttaatatcaggaactactgaattgcctgtaatttatgaagttttcaatattgatcatggtgttatacaaaacttattatggctagctttctttgcttcttttgcaattaaaatgcctatgtggccatttcatacatggttaccagatgcccatgttgaagccccaactgctggatcagttatacttgcagcaattttgctaaagatgggtggatatggttttttaagattttcattgccattgctacctgacgctagtttttatttttctgatttcatttttgtactaagtgtcattgcaattatatacacttcaattgtggcctatgttcaggaagatataaaaaaactcatcgcttattcatctgttgctcatatgggttttgttactatggggatttttacatttaacattaatggggtccaaggggggatattccagatgttttcacacggacttatttctggagcgttatttttatccgttggcgtgatttataacagaatgcatactagacaaatcgtagattatggcggtgttgtttcagtaatgcctaaatttgctttatttttaatggttttcactcttgccaatattggattgccgggaacaagtgggtttgtaggtgaattcttaaccataatggcgattttttcatttaataagatttttgctttctttgcggcgagtggtgtaattctatctgcggtatacggattatggttatatcgaaaagtaatttttgaaaagataacaaatgaatctgtaaaatcattaaaagatttgactttgggtgaaaaagcaactctcatccctcttttaattttaattattctttttggtatttatcccgcaccggttcttgatcttatatctgcttcatcaattgctttagttgagtctgttaatttatccggaggaaattagt

SEQ ID NO: 221413 - DNA, 1024 bp, Unknown
  Bacterial polypeptide expressing nucleotide sequence isolated from the Sargasso Sea
tttttgctgcactgtggctgttgtacaaaacgatataaagaaaataatagcttactcaacatgtagccaacttggttatatgttttttgcagctggagtcggagcttataatgttgctatgtttcatttgtttacacatgcattttttaaagcgcttttatttttagggtcaggatctgtaattcattcccttaatgatgaacaagacataagaaatatgggtgatctatggaaaaaaatgcctttcacctggatagctatgattgttggtacacttgcattaactggtttccctcttttatcaggattttattctaaagatgcaataatcgaatacgcatatttaagtcaaagcaacattggttacatggcaactacggtaggaataataacggcacttttaacagcaatttattcgtggagattaatatttaaaacttttcacggaaaatttaataataaaaatatttctaaatcaaaaataaaggagtcgggtttatctattactattcctttagggtttctaattttaggatcaattttttctggatttattttcaaagatttattaattggaaaaactaatcaagaattttggggatcatctattctaatattaaaagattttgatcacagcctgataccgttgtggatcctttacattactccttttcttgtaatttctgctatacctttgtcatattatctatttttaaaaaatccaaaacatttagatcaagtaattttaaaaaataaaaaagtttataaatttttattaaataaatggtatttcgacgagttttacgatgctgtttttgttaaaccaattaaaaaattaggatcttttttttggaaatctggtgatcaaaaaactatagacagatatggccctgacggtatttcccaattaataaaaactatttcttacaaagcatcaaagtttcagactggttacttatttgattatgcttttgttatgttgattggcttttctttactattaacttttttaattattaaataa

SEQ ID NO: 221414 - DNA, 1040 bp, Unknown
  Bacterial polypeptide expressing nucleotide sequence isolated from the Sargasso Sea
catgtttccgattctttcatctttaataattttaccacttattggttctttatttttaatatttattagatcttcagaaaaaaatactagccttaaatatgttgctttatttattacttttgcaaattttttcttgtcactttatctttggaagatttttgatccatcaatatcgtcatttcagtttgtagaaaatagaatttggattgaaggatttataaattataaagttggtatagatggtatatctatcttatttataattcttacaacctttataactccgctttgtataatatcagtcaattctacaataacttacagattaaaggagtttttaatagcaattttaatcatggagacgttaatgattggagtattttgttcattagacttggtaattttttatttattctttgaaggcggtcttatcccaatgtttttaataattggaatatggggtggaaatagaagagtttattctgcatttaaatttttcctttttacattagttggatctgttttaatgttagtagcaattattgcgatttattggataagtggaacaactgatgttgaaaaattatatgaattagggattcaggaggaatatcaaaaattattatggttagcatttttttcttcttttgcagtgaaaactccaatgtggcctgtacacacatggttgcctgatgcacacgtagaggcacctactgctggttcagttttgcttgctgctatcttactaaaaatggctggttatggttttataaggttttcggtaggtttatttcctttagcatcaatttattttgtgccattagtctacacattaagtttaatagcaataatttacacctctttggttgccttaatgcaggaagatatgaaaaagcttattgcgtattcatctgttgcacatatgggttttgtaacgcttggtatttttacatttacgcaacaagggattgagggaagtatttttcagatgattagtcatggtttaatttcagctgctttgtttttatctgttggcgttg

SEQ ID NO: 221415 - DNA, 975 bp, Unknown
  Bacterial polypeptide expressing nucleotide sequence isolated from the Sargasso Sea
aatggaaaatagtttcatacttcattcattattgatcttatttctgcctcttttagcatttgttatccagatatttttcggaaaacgtttgccgcgcgaaggcgattgggtttcaataggagcaatatcgatcacattgatcttggcgatcacaatgtttgtaaaaatgctcctagttggtgatcccgagtttaaacatgaagcttcttttgtctggttagatatgggtgcttttaccattagtttggggttcctcgttgacaatatcactatcattatgttgcttattgttgcgcttatatcgacctgcactcatattttttctacagaatacctcaaaggagatatcaggtactcgcgttattttggttaccttggtctttttacattctcgatgaatggtatagttttagcgaataaccttatgtcaatgtatatgttttgggaattggtaggagtaagttcctatctactaatagggcattggtttgagaaagattccgctgcagatgccagtaaaaaagcttttcttacaaatagggtaggtgatataggtttttttatagggattatgctcatttatagtgctgtaggatcatttgcatttactgatgttttcgatggtgttgcttctggaatgatcgctggtacaacattgacttttgctggagttgggttatttatgggtgccatgggaaaatcatcacagtttcctcttcatatatggttgccagacgcaatggaagggccgactcctgtttctgcattaatgcacgctgctaccatggtagctgcaggagtctatctcactgtcagaatttttccaattcttactccagatgcattgctggtagttgcttatgtgggtgggtttacagccttatttgcggcctctattgcaatcacacagacagatatcaaaaaagtattagcatattcaaccgttagccagctgggttacatgattttggcggt

SEQ ID NO: 221416 - DNA, 1093 bp, Unknown
  Bacterial polypeptide expressing nucleotide sequence isolated from the Sargasso Sea
atggactttccaattttatcctcattaattttattaccagtattaggtgctatatttatatttttttctaaatctaataataatttaacaattaagtacttagcattatttgtttcttttgctaattttatattatcattatatctttggtacttatttgatactacaacttccgaatttcaatttttagaagaacgatcatggataaaaggttttataaattataaagttggtgttgatggtatttcaatattatttattatcttaacaacatttattacacctttgtgtgtagtttcagtaaacgatactattaaaaatagattaaaagatttccttgtcgcaattctaataatggaatctttaatgattggggtattttgttctttagatttagttgtgttttatcttttttttgaaggtggcttgataccaatgtttttaattattggaatttggggaggtgaaaaaagagtttattctgcttttaaattttttctttatactcttttaggttcagtattaatgcttgttgcgattatttcaatttattggatgacaggaactacagatgtaacttatttatacaatataggtatagatgctaaatatcaaaatttattatggttagctttttttagctcttttgcagtaaaaactcctatgtggcctgttcatacatggttacccgatgcacacgttgaagctcctacagcaggatcagttctattagcggcaatattgttaaagatggcaggctatggttttataagattttcacttggtttatttccaattgcatcagaatattttgttccattagtttattttttaagtttagttgcgataatttatacttcgctagttgcattaatgcaggaagatatgaagaaattaattgcatattcatcggtagctcatatgggatttgtaactcttggaatttttacaattacgcaacaaggtttagaaggaagcatatatcaaatgataagccatggattagtctcagcagcacttttcttatctgttggtgtcctttatgaacgtttgcatactaggttaattaataattatggtggattagtttcta

SEQ ID NO: 221417 - DNA, 370 bp, Unknown
  Bacterial polypeptide expressing nucleotide sequence isolated from the Sargasso Sea
aatgatttataactttttaacagattacctatcaataattatcttcttatttattgctttatttttgagtataggatttatatttgcaaattttttagcatccccctctaatcctgatccagaaaaattatctgcttatgaatgtggatttgatgcttttgatgactctagaatggagtttgacgtaagattttatctagtggcaatattgtttatcatttttgatttagaaatcgcatttctttttccttgggcaatatctcttggcagtctaggcgctcttggcttttggtctatgatgatctttttagcaattttaactattggttttatatatgagtggaaaaaaggagctttagaatgggagtaa

SEQ ID NO: 221418 - DNA, 1043 bp, Unknown
  Bacterial polypeptide expressing nucleotide sequence isolated from the Sargasso Sea
aatggaatacctaattttatttctacctctaataggagctgtgattagtggtttttttggaaagaaattaggagacaaaaattctcaaattttgacaagttcgtttgtgagtatttcagcaatactctctttacttgttttgtacaaagttattagttcagattattcaaacaatcttgttatagctacttggatcaattctggaacattaaatgttaactggtcaataaaaattgatgctttatcagcagttatgtttgttgtagtaaattttgtttcagctttggtgcatatttattcaattggttacatgtcacacgatcctcataaaacaagattcatggcatatttgtctttatttacttttgcaatgttaactttagtaagttcagataattttattcaactattttttggttgggaaggtgtaggcttatgctcatattttttaattggtttttggtttaaaaaagaaagtgcaaacagggcagcaataaaagcctttgttgttaatagagttggtgactttggtttggcgcttggaatttttctgattttttatatttttggtacagtcaattatgacgaggtttttgaacaaattccaaatgttttagataaaaaaataaatttcattggtattaatatagaaattattgatttgatttgtttgcttttattaattggagcaatgggtaaatcagctcaatttttattacatacttggttgcctgatgctatggagggcccaacaccagtatccgcattaattcatgcagcaacaatggtaacagcaggggtatttctgattgttagatgctcacctatatatgaatactctccattagctctcacagttataaccataattggaatgactactgctttctttgcagcaacagttgcacttgttcaaaatgatataaaaaaaattattgcttattctacttgtagtcaattgggctatatgttttttgcagctggagtaggtgcttacaatgttgcgatgtttcatctatttacacatgctttttttaaagctt

SEQ ID NO: 221419 - DNA, 1051 bp, Unknown
  Bacterial polypeptide expressing nucleotide sequence isolated from the Sargasso Sea
atgtttctaattattggtatttggggaggacaaaaaagagtttactcggcatttaaattttttctttatactttactaggatcagtattaatgttgatagctataatatcaatttactggatcactggaacaactgattttgttgaaatttataaccaaggaataaatcccaaataccaaaaattattatggttagctttttttagttcttttgctgttaaaactccaatgtggcctgttcatacatggttacctgatgctcatgtcgaagcacctacagctggttcagttattttagcagcaatacttttaaaaatggctggctatggttttataagattttctttaggactatttcccaatgcatcagaatattttgttccattagttttctttttaagtttagttgcaataatttacacttctctagtagctttaatgcaagaagatatgaaaaaattaattgcctattcatcggtggcacatatgggatttgtaacacttggaatatttacatttacacaacagggaatcgaaggaagtatttatcaaatgattagtcatggcctgatctcagcagctttatttttttgtgttggcgttttgtatgatcgaatgcacacaagattaataaagcaatacggtggtatcgtatcaataatgccaaaatatgctattgtgtttatgatttttacattaggagcagtgggcttaccaggaacaactggttttgtaggtgaatttttaatcttaattggtgtttttaaaaaaaattttttagttgctgttattgcaagtctagggatcattttagcagcagcttacatgctctggctttataaaagagtagtttttggagaaattcaaaatgaagacttaaaaaaaatgattgatttaaattattctgagatagctatattgtgggcgttagcaataccaacaattttttttggattttaccctgatcctttaataaatactgtggaagtttcagttaataatttaattgatgtttacaactttaatgttcttcaaatggataacaaatgat

SEQ ID NO: 221420 - DNA, 1912 bp, Unknown
  Bacterial polypeptide expressing nucleotide sequence isolated from the Sargasso Sea
atggaactatcaattatatttcttccacttattgcatcaattatatcaggtttttttggaaaatatattggtgatagaaattctgaaatagtaaccagcgttcttgtttcaatatctgctctcttgtcaatttttgttctttatcaagtgatcgtaaatcagtatgaagaaaatattgttatagctacttggataagctctgggtcacttgatgtaaattggtcgatgttaattgatcctttatcagctgtgatgttagtagttgtaacttctatatctgctttagtacatatctattcaattggttacatgtctcatgaccctcataaaccaagatttatggcttatttatcattgttcacatttgcgatgttaatgcttgtgacttcagataatttcatacaattattttttggttgggaaggtgttggcttatgttcttacttcttaattggtttttggttcaaaaaggaaagcgcaaatactgcagcaataaaagcatttgttgtaaatagagtaggtgattttggttttgctttaggaattttcttaatattttatttatttggaactgttaattactcagaagtttttcaacaaattccaacagttgtagataaaaatttatcatttttaggttttgaagttaaagcggtagatttaatttgtttacttttatttattggagcaatgggtaaatctgcacagatattacttcatacatggttgcctgatgctatggaaggtccaacaccagtttctgctttaattcacgcagcaacgatggtaacagctggagttttcctggtagtaagatgttctcctatttatgagtattcaccgttaatactgaattttataactattgttggaatgagtacagcattctttgcagcaacagtagcattagttcaaacagatataaaaaaaataattgcttattctacatgtagtcaacttggttatatgttttttgcagctggagtaggtgcatacaatgttgccatgtttcacttatttactcacgcatttttcaaagctctattatttttaggatctggttcagtaatccatgcatttaaagatgagcaaaatataaataacatgggaggtgtatggaaaaagttaccatatacttatgctttaatgattattggaacacttgccttaacaggttttccatttttatcaggattttattctaaagatgcaattatagaatttgcgtatttaaaaggtaacactactggttattatgcagctggaattggaataattacagcatttctaacatctatttattcttggagattgatatttaaaactttccatggagggtacaataataaagagatcaaaatagaggaaacacacgagtctcctttagttatgcttgttccattatttattctttcagtaggagctgtgttttctggttttctatttaaaggactatttattggttatggtgataatttattctgggcagagtctattaagtttttagagcctttgagcactgaacacccgcctttatggtttttacttttaacaccgtgtttagtcttgttatctattcctattgcttattacttatttgtaaaaaacaaaaagttacctaattcaatagtttctatgaataaacctttgtataattttttagtcaacaaatggtattttgatgagttatacgatgtgttgtttattaaatcttcaaaaaaactaggtctatttttatggaaattttgtgatggaacaataattgatggttttggtcctgatggaatttcctcatttataaaaaaatgttcaatcaaagcaactaaatttcaaagtggttttatttatcaatatgcatttgtaatgttgttaggtttctctgctttactaacttttttaataattaaataat

SEQ ID NO: 221421 - DNA, 370 bp, Unknown
  Bacterial polypeptide expressing nucleotide sequence isolated from the Sargasso Sea
atgttatctgattttttgcaagattacctttctataataattttcttagtcctagctttaggtttgagttgtgcttttgtggttgttaattttattctttcgccaaataaacctgaccctgaaaaactttctgcttatgagtgtggatttgaaccatttgaagactctagaatggagtttgatgtaagattttatctggttgcaattttatttattatttttgatttagaaattgctttcctttttccttgggcaatctctttaggcaatattggtttattaggtttttcttcaatgatgatttttttattcatacttacaattggttttatttatgagtggaaaaaaggtgctttagactgggaataaa

SEQ ID NO: 221422 - DNA, 1069 bp, Unknown
  Bacterial polypeptide expressing nucleotide sequence isolated from the Sargasso Sea
atgaaagaacttctaacatcatttttatcatttctagacccacaatggatcaacctgatatggtctttgtttcaaatcgcaattgtcactgtttgtttaatcttaaccgttgtttttttggtttattttgaaaggaaggtaattggatacatgcatgccagagttgggccaaatagggttggaccaaagggtacgcttcaatcgatagccgatacaattaaactgttattaaaagaagtcatcatcccagataaagctgatcgattcttttttttactttcgccattgttgttattgataccagcgctcgcggcttgggcagtggtgccatttagtcccgaatttatcatcgctgacatcaatgctggattgctttatttattggcactcacgtcatttggggtttacggtgtcatcttggctggctgggcgtctaactccaagtatgcttttcttgggtcaatgagggcagcggctcagatggtcgcatatgaaattgcaatgggatttgctttggttggcgtactcatggctggcggcagcttaaaactcggtgaaattgttgctgcacaatctggtggtgtacttagctggttctggataccactatttccactattcatcgtttacttcatttccggcatagcggagacaaatcgtcatccatttgatctcgcagagggtgaagcagagattgttgctggatttcatgttgagtattcaggaattgggtttgcgatcttttttcttgctgaatacatcaatatggctctgatatctgtattgacatcaatattgttcctaggcggatgggaaagcttctttgctggcatttcattcttagaaacatcaggattctcttttttaacagagcccagcttgttctggttattaataaaaactcttttctttttgtttatctttatttggttgagagcctcatttccaagatatagatacgatcagttgatgtcactgggttggaaagtgctcattccaatcacaatcctatggattggagttgaatgcgttatgtatgtcatgcaaattggtccatggagcgtctgat

SEQ ID NO: 221423 - DNA, 710 bp, Unknown
  Bacterial polypeptide expressing nucleotide sequence isolated from the Sargasso Sea
aatggaatacgcaatagtttttcttcccttaatcgcatcaatatttggttatttaggtagatcaataaataaatttttttcagaaatatttactagcttgctagttagtatttcagcgattttgtctgttattgttttctggaatggtatccagatcaacaattacaacaattataaaatcttcgaatggataagttctggtgatttcgtggcaaattggtcaattaatttagacccactaagttctgttatgttagtagttgttacttttgtatcagccttggtacatatctattcaataggatatatgagtcacgatccacataaacctaggtttatgtcttatttatcactttttactttttcaatgttagttctagtagtatctgacaactttttacaattattctttggttgggaaggggttggtttatgttcttatttgctaattggtttttggtacaaaaaagaaagtgcaaatgatgctgcaatcaaagcatttattgtaaatagaattggagattttggcctagcaataggaatttttttaatttttttcttttttggaagtatttcatttgaagaagtttttcaagccgtgcccgaatttgttggaacaaaattattattttttggatttgagctaaatttaattactttaatttgcttatttttatttattggagcgtatggggaaatctgctcaattt

SEQ ID NO: 221424 - DNA, 899 bp, Unknown
  Bacterial polypeptide expressing nucleotide sequence isolated from the Sargasso Sea
aatgactgaaatccctatattatcaataactattttcttacccttgttgggtgccctagttattcttttaattaaagatgatgaaaactctctaaacaatattaaaaaagttgcattatggacatcagttggtgtttttcttttaagcttgtttatatggctacagttcgacagcagtaattctagttatcaatttcaagaaaaatttagatggtttaatgactttaatttttactatcatattggcattgatggaatatctctctttatggtcatcctaagtacttttttaacacctttatgtatcttagcaagttgggaaagcataaaaaaaagagttaaagaatatatgatagcatttttatttcttgagacagtcatgataggaatgtttgcctctattgatattttgcttttttacattttttttgaagtcgttttaattccaatgtatttaataattggtatctggggtggtgaaaaaagaatttatgcatcttttaaattctttttatatacattacttggctcagtattaatgttaatagctataattgcaatttataaattaacaaactcaatgagtattgaagatttgcaaggaaactattttgcaaaaaatattcagatttatctttggttagccttctttgcttcttttgctgtcaaaattccaatgtggccttttcatacatggttgccagatgctcatgttgaagctcctacagctggttccgtaatattagctggagtgcttttaaaaatgggaggatacggatttattagattttctttaggaatgcttcctgaggcttcagaatatttctcacctttgataatgactttaagtatagttgctgtagtttacacttctctcgttgctttagctcaaactgaca

SEQ ID NO: 221425 - DNA, 370 bp, Unknown
  Bacterial polypeptide expressing nucleotide sequence isolated from the Sargasso Sea
catgattacgaactttttgtcagaatacctgtctataataatatttttatttatctcattactgttgagcataggttttattgtaataaattatattgcttctccaagcaatcctgatccagaaaaactatctgcttatgagtgtggttttgaagctttcgataatgccagaatagaatttgatgtaaggttctatttagttgcaatacttttcataatatttgatctagaaattgcctttctatttccttgggcaatatcacttggaaatatcggtttattaggtttttactcaatgatggcatttttgtttattttaactattggttttatttatgagtggaaaaaaggagcattagaatgggaatag

SEQ ID NO: 221426 - DNA, 1234 bp, Unknown
  Bacterial polypeptide expressing nucleotide sequence isolated from the Sargasso Sea
aatggaatatttaattttatttttacctttgttaggtgcaataatttctggtttttttggaaaattactgggagatagaagttgtgaaattattacaagtttatttgtttcaatatcgacattactttcattggttattttttatagagttataactgttggttacgaagataatattttaattacaacgtggattaattcaggatctctaaatgttaattggtcaattaatatagatgcattatcttcagtgatgttagttgtggttactttggtttcttctttagttcatatttattccattggctatatgtctcatgatcctcataaagctagattcatgtcttatttatctttgttcacctttgcaatgttaactcttgtaacttcagataattttattcagttattttttgggtgggaaggcgtagggttaagctcgtattttttaattggtttttggtttaaaaaaccaagtgcaaatgctgcagctatcaaagctttcctagttaatagagtgggtgattttggatttgcattgggaatttttttaattttttatatttttggaacagtaaactacaatgaagtttttcaaaaaatcccagagattttagaaattaaattatcttttctaggtataaacattgacgctgttgatttaatctgcatacttttatttataggagcaatgggtaaatctgctcaaatttttcttcacacttggcttcctgacgcaatggaaggtcctactccagtatcagccttaattcatgcagcaactatggtgactgctggtgtatttttagtagttaggtgttcacctatttacgaatattcagaattagctttatcaatcattactatagtaggtatgtccacagctttttttgctgcaagtgttgcgttagtacaaactgatataaaaaaaattattgcttattcaacttgtagtcagcttgggtatatgttttttgctgctggggttggggcttatagtgttgcaatgtttcatttatttacacatgcttttttcaaagctttgttattcctaggatcaggttcagtaatacattcatttaaagatgagcaggatattaataaaatgggaggtgtgtggaaaagactcccgtatacatatgttttaatgattataggaacattagctttaactggttttcctttattttcaggttattattccaaagatgcaattatcgagtttgcattttaa

SEQ ID NO: 221427 - DNA, 712 bp, Unknown
  Bacterial polypeptide expressing nucleotide sequence isolated from the Sargasso Sea
aatggaatatttaatattatttttacctttaataggttcaatcatatcaggtttctttggtaaaactattggtgataaattatctcaattaatcacatgtattttggtttctatttcggcattattatctttgttcatattttttaaagttgtttcatcaggatatgagcataatgcaattattgcaacttggataaattcaggatctttaaatgtaaattggtcaattaaagttgatgctctttctgcagtaatgttagttgtagttactctagtttcatccttagttcatatttattctgttggttacatgtctcacgacccacataaaccaagatttatgtcctatctatcattatttacatttgccatgttaacattggtgacatcagataattttttgcaattatttttcggatgggaaggagttggcctttgctcgtactttttaattggtttttggtataaaaaagaaactgctaatgctgctgctattaaggcttttatcgtaaatagagttggagactttggttttgcattgggaatttttttaatattttatatttttggcacagtaaattatgatgaagtttttcctaagatacctgaaataatagatcaaaaaataaattttctatcttttgaatttaatacaatagatttaatttgtttattgctttttattggagcaatggggaaaatctgcacaatt

SEQ ID NO: 221428 - DNA, 370 bp, Unknown
  Bacterial polypeptide expressing nucleotide sequence isolated from the Sargasso Sea
tatgtctttagaatttttaaataattatttaactatagtaatttttttagccattgctctcatactaagtttgggtttcgttgttctaaattttgctttttcaccaaaaaatcctgatccagaaaagttatctgcttatgaatgtggttttgaaccatttaacgactctagaatggaatttgatataagattttatctcgtagcaattttattcattatatttgatttagagatagcatttcttttcccttgggcaataactttaggcaatataggttattttggtttcttttctatgatgctatttttatttattttaactattggttttatttatgaatggaagaagggcgctttagattgggaataa

SEQ ID NO: 221429 - DNA, 967 bp, Unknown
  Bacterial polypeptide expressing nucleotide sequence isolated from the Sargasso Sea
atgactgaaatccctatattatcaataactattttcttaccctttttgggtgccctagttattcttttaattaaagatgatgaaaactctgtaaataatattaaaaaagttgcactatgtacatcagttggtgtttttcttttaagcttgtttatatggttgcagttcgacagcagtaattccggttatcaatttcaggaaaaatttagatggtttaatgagtttaatttttactatcatattggcattgatggaatatctctctttatggttatcctaagtacttttttaacgcctttatgcatcttagcaagttgggaaagcataaaaaaaagagttaaagaatacatgataacatttttatttcttgagacagttatgataggaatgtttgcttctattgatattttgcttttttacatattttttgaagtagttttaattccaatgtatttaataattggtatctggggcggagagaaaagaatttatgcatcttttaaattctttttatatacactacttggctcagtattaatgttaatagctataattgtaatttatagattaacaaactcaatgagtattgaatatttgcaaggtaatttttttgccaaaaatgttcagatttatatttggttagccttctttgcttcatttgctgtcaaaatcccaatgtggccttttcatacatggttgcctgatgcccatgttgaagctcctacagctggttctgtaatattagctggtgtacttttaaaaatgggaggatatggttttattagattttctttaggaatgcttcccgaggcttcagaatatttctcacctttaataatgactttaagtatagttgctgtagtttatacttctcttgttgctttagctcaaactgacataaaaaaattaattgcttactcatcagtagcccatatgggcttagttactattggtatatttatagtaa

SEQ ID NO: 221430 - DNA, 1912 bp, Unknown
  Bacterial polypeptide expressing nucleotide sequence isolated from the Sargasso Sea
aatggaatacacaattttatttttaccattaataggggccttactaggttatgcaattaaagtatttggagatatctactcagagatagtcacaactttatttgtctcggcagctgcaattttctcgataattttattttataatggaattgtttatgaggactacggtaattataaaatttatcagtggatagcatcaggaaaatttgtagttaacgcatcaattaatattgatcctctttcaagtataatgcttgtagttgtgtcacttgtttctgctttggttcatatttactcaattggatatatgtcccatgatcctgataaacctcggttcatgtgttatttgtctttgttcactttcgcgatgtttacattggtagtatcagataattttttacaattattttttggttgggaaggggtcggtttatgttcatatctgctaattggattttggcataaaaaaaattcagctaacaatgcagctattaaagcatttattgtaaatagaataggtgattttggttttgcaattggaatattcttaatatttatattttttggcactttaaattatgaggaagtttttacattagctccaaattttgcagatacagaaattaattttttagggttagaagttaatttaataactgttacctgtttatttctattcattggtgcgatgggtaaatcagctcaattttttttacacacatggctaccagacgcaatggaaggacctacaccagtatcagctttaattcacgctgcaacaatggttactgcaggtgtttttttagtagttagatgttcaccaatttttgaatactctcaagtagctttaaattttgtggctattgttggaatgatcacagcactttttgcagcatctgttgctatcgtgcaaaatgatattaaaaaaataattgcatattcaacttgcagtcagcttgggtatatgttttttgctgcaggtgttggtgcatatcacgttgcaatttttcatttgtttacccatgctttttttaaagccttgttgttcttaggatcggggtctgtaattcattcattaaatgatgagcaagatgttagaaatatgggcgacctttggaaaaaaatgccagttacttggtttgctatggttgttggaacactagccttaactggtttcccttttctctctggtttttattcaaaagatgcaattatagaatttgcttttttaaaaggaactaatgttggatattttgcagctggaattggaattatgacagctgttttaaccgctctatattcgtggagattaattttcaaaacttttcacggaaaatataacaataaaaacttatcaaaatcagagattcatgagtcaggaatgactattaccattcctcttttactactagtagttggttcaattttttcaggttttttatttaaagaatttttaatagggcatgactataataatttttggagagattctattctaattctagagaaatttgatcattcaggtattcctctttggcttttagtaataactcctttatttgttacaattcttattcctgtttccttttatttatatatcaaaaaaacaaacattttggatggaattgtcttaaaatataaatctttgtataactttcttttaaacaaatggtattttgatgaattatataatcagattataataaagcctacaaaatttattggatcttttttttgggaaaagggcgatatcaaaataatcgacagattgggtcctgacggtatatcaaaaataattaaaattatatctaacaaatcaagcaaatttcaaagtggttatatttatgattatgcattcataatgttaattggactttctttgcttttaacttttttcatattttataaatga

SEQ ID NO: 221431 - DNA, 1501 bp, Unknown
  Bacterial polypeptide expressing nucleotide sequence isolated from the Sargasso Sea
aatgaactttccaattttatcagctataacttttattcctctaataggtgcattatttgtttttttaacaagaagtgaaagagatgaaaaaaattctggtgcaatatatatttcaatatttactagcattgttaatttctttataattttatttgtttggtactctattgacaaaacaacttctgactttcaatttattgaagaatacaattggataagtggttttataaagtttaaatttggtatagatgggatatcaattttatttattttactaactgcttttataatccctatttgtattttttcatgtattaacagcgttaaaactcgtcttaaggaatttttaatagcacttcttgttttagaaacttttattataggtgttttctgttctttagatctggttattttttatctattttttgaagcaggtttaataccaatgtttttaattattggtatttggggaggaccaagaaaggtttattcagcatttaaatttttcttatttacactattagggtcagttttaatgttggtggcaataattgcaatttactggatctctggcacaaccgatataaccgaaatttatcaaacagggataccctcagagtaccaatatttgttatggctagcattttttagttcatttgcagttaaattaccaatgtggccagtccacacctggttaccagatgctcatgttgaagcaccaacagcagggtcagttgtattggctgcaattttactaaaaatgggcgggtatggtttcattagattttcagtgggcatgtttccagtagcctctgaatattttactcctctaattttttccttaagtacaatagctgtaatttacacttctcttatagccttaatgcaaaaagatatgaaaaaattgatagcatattcatctgttgcacatatgggatatgtaacaatcggaatttttacttttaataaacaaggtattgaaggaagcattgtgcaaatgtttagtcacggtttaatttctgctgctctcttcctaagtgttggagttctatatgacagaacacattcaagattaataaaaacttatggcggtattgtaaatttaatgcccaaatattcttttctttttatgatctttgttttaggaacactaggtttacccggtacaagcggttttgttggagagtttctagttttagtaggagtttttaaagtaaattatttagtcgcaatccttgcaagtatcggagttatattggctgcagcatatattttatggctttataaaagagtagtttttggaaaaatggagaatattcaattaaaaaagataaaagatgtaaatttatcagaagcagtaattttaggagtattaagtgccgctgttttattttttggattttatccagacccgctatttcaaactgtaaatgtatcagtagacaacttaattaataactacaatacagatattcaacaaaacataacattaaaaaaataa

SEQ ID NO: 221432 - DNA, 370 bp, Unknown
  Bacterial polypeptide expressing nucleotide sequence isolated from the Sargasso Sea
atgcttgcggaatttttaaaagattatttgccaataattgtatttttactagttgcacttgtattaagtgtagcatttgtggcggttaattatttagcatctccaaaaaatcctgatccggaaaaactatcagcatatgaatgtggatttgaaccatttgatgactctaggatggaatttgatgttagattttatcttgttgcaatattatttattatttttgatttagaaatcgcttttctatttccctgggcaatatctctaggcaaaatcggaatattcggttttacatcaatgatgatcttcctatttattctcactatcgggttcatttatgaatggaaaaaaggagcattagactgggaataaa

SEQ ID NO: 221433 - DNA, 370 bp, Unknown
  Bacterial polypeptide expressing nucleotide sequence isolated from the Sargasso Sea
atgttatctgattttttaaaagattacttaccaataataatatttttagttttagctcttggggtaagttgtgcatttgtagtggtaaattttattctttcaccaaaaaaacctgatccagaaaaactttcagcttacgaatgtggttttgaaccatttcaagactcaagaatggaatttgatgtgagattttatttagtcgcaattttatttataatttttgatttagagatagcatttttatttccatgggcaatatctcttggaaatataggattactaggtttttcatcaatgatgatttttttgttcatacttacaataggttttatttatgaatggaaaaaaggtgctttagactgggaataaa

SEQ ID NO: 221434 - DNA, 1423 bp, Unknown
  Bacterial polypeptide expressing nucleotide sequence isolated from the Sargasso Sea
atgaattttccaattttatcttcattaatattactgcctttagttggttcattgtttatactatttgtgaaaagtgattcatcaaataactatcaaagtagtaagtatgtcgctttatttacatcttttgtaaatttctttatttcaatttatctttggtatttatttgacaatactatttctgaatttcaatttgttgaagataaagaatggttaaggggatttgtaaattacaaggttggaattgatggcatttctatattatttattttgctaactacatttattgctcctttatctataatttcaataaataattccatttcacatagattaaaagaatttttaatagcaattttagttatggaaagtttaatgattggggttttttgttcattagatttgataatattttatttattttttgaaggaggtttaataccaatgtttttaattattggtatttggggaggaacaagaagaatctattcagcatttaagtttttcttatttactttgttgggttcagttttaatgctagttgcaataattactatatattggattacaggtacaactgatgttgttcagctttatgaattaggaattgattggaaatatcaaaatttattatggttagctttttttagttcttttgctgttaaaactccaatgtggcctgttcatacttggcttccagatgctcacgttgaagctccaacagctggttctgtttttttagcggcaatattgcttaaactagcaggatatggcttcataagattttctctaggattatttcctatagcttctgatttttttacaccattaatttactctttaagtttaattgcaattgtatttatatcgcttgtcgctttagtccaggatgatatgaaaaaattaattgcatactcttcagttgcccatatgggttttgttaccttgggcattttcactttaactcaacaaggtattgaaggaagtataatccaaatgattagccatggtctggtttctgctgctttatttttgtgtgttggtgtgctttatgacaggacacattcacggcttattagtagttacggaggcattgtttctattatgccaaaatacgctgtagttcttatgatttttactcttgcagcaattggattgcctggcacaagtggctttataggagaatttttaattttacttggtgcttttcaaaagagctttattacagcagctattgcaagtttaggagttatttttgcagcagcttatatgctttggttatataaaagagttgtctttggaaatttaatcaacaaagaattatttaaaattccagacttaaataaatcagaaatatttattttgtggagtttggctataccaacattattttttggtttttaccccagagcccacttataaa

SEQ ID NO: 221435 - DNA, 1024 bp, Unknown
  Bacterial polypeptide expressing nucleotide sequence isolated from the Sargasso Sea
atgaatattttcattacacttattaatatcttattagatataatattagtcgctgttccactatttttaattgttgcttatacaacatattctgaaagaaaaataattggttttatgcaatctaggatgggtccaaatagagttggaccatcagggttcttgcagcctattgccgatgtaattaaattacttactaaagaaattattattccatctaacgcaaatagaggtttgtttttaaccgcaccaataatcatgctagtaccttcatttttagtatggtctgttatacctctatcagaatattttgtcattgcaaatattaatgcaggtttattatttattttagctttaacatcattgagtgtgtatggtgttattcttgcggggtggtcttctaattctaaatatgcttttctaggctcaatgagatctgctgcacaaattattgcttatgaaattgctatggggtttgctttggttggcgtactaatggcagcaggtagcctaaaccttcagtcaataattgaatctcaaagaggtggattatttaattggtactggctgcctttatttccattatttttaatatatctaatatcaggtatagcggagacaaatcgtgcaccatttgatgtttcagaaggagaatctgaaattgtagcaggatttcatgttgaatattcaggtgttgcatttgcaatgttttttttggcagagtatatgaatcttatcctaattagtatcctcacaagcataatgttttttggtggatggttgtctccttttgaaggcacctttataaatagtttctttgagtggattcctggctttgtttggctagctatcaaaacactattctttatatttatttttttatggttaagagctacattaccaagatatagatatgatcagataatgagattaggttggaaaatattcttgcctattacaattatatggattttcttagaaggtattatgatatattacaaagttggtccatggtttatagtatgaa

SEQ ID NO: 221436 - DNA, 937 bp, Unknown
  Bacterial polypeptide expressing nucleotide sequence isolated from the Sargasso Sea
atggtagttaattacactttagattttcttgctgaaggaaagacatcttatacagatggaggaatctttgctgaattcgcttggcttattgttgttttgccattcattgcagctttgttgataacattttttggaaaaaatttaccgttaaaaggtgcagagattgcgttaggttcagtattttttatattcctatacagctgtattttattttatatgaatgttacacagggagtagcatcagaattttttattaatgtaggaagcataggatcttttcagctcgaatttggatgggttgttgatgggctttcaataatgatgtattttgttgttggtacagtttcattactagtttttatatacgctacaaattatatggaaggagaagtaagatacactttcttctttacatctctgacattatttgctggaagtatgttagttcttgtatcttcaccaacacttttacagttattaattggatgggaattagtgggagtttgttcatatttattaataggacattattgggaagaaaaagaaaattcatctgcagcaatgaaagcttttattacaaataaagttgctgatgtaggtttaatgattgggattattgttcttgctttaacaactggaactttaaggatttcagaaatactttatcaagctactcacgattatgaagcaattaaatctgttgcttatattgctggaatcttaattttcattggagcgatggggaaaagtgcacaatttccacttcatgtttggctgccggacgcaatggcaggtccgacaccggtatcagctctaatgcatgctgcaactatggtgacagcaggtgtttatttattaggaagattatttcctttttaccaaggaatagctcatgaagcattagacatcgttcttatatttggggttataacattgt

SEQ ID NO: 221437 - DNA, 994 bp, Unknown
  Bacterial polypeptide expressing nucleotide sequence isolated from the Sargasso Sea
atggactatatcctttcaattttatttatatttcttcaatcttttttagttatttttgctgtattaatgatggcttatcttggtatttatggtgaaagaaagttgtgggccgctgtccaattacgtagaggtccaaatattgtaggcccatttggcttgctccaacctgttgctgattttcttaaattacttttaaaagaaccgataattcctgaaaaagcaaataaagcaatatttgttatggctcctcttgtaacatgctttgttgctttgtcagcttgggcagttgttccatttgcagaaaattgggtagttgccgatataaatgttggtattttgtatatttttgcaatttcctctttaggggtttatgggattattcttggtggatgggcttcaaattctaaatatccttttatgggggctatgagatctgctgcgcaaatggtttcttatgaagtatctattgggtttgttattattacagttcttttatgcgtaggttcgctaaatcttactgatatagttcttgctcaaaagaaggtgtggttttttatacctcttttcccaatgtttataattttctttgtatctgctttagctgaaacgaaccgccctccatttgatttacctgaagccgaagctgagttagttgcaggatatcaagtagaatattcttcgtctttttttctcttatattttcttggagagttagcagcaacttttttgatgtgcgcaatgattacaatcttatttttaggtggatggcttcctccttttgatatctatccccttaatgtaattcctggaatagtttggtttatgttaaaagtagcctttattttctttatgtttgggatggtaaaagctcttgttccaagatatagatatgatcaattaatgagattaggttggaaagtttttcttccaatttcacttttttgggttgttttgactgcttcgtttctttttgtgtttgatctagccccttagg

SEQ ID NO: 221438 - DNA, 370 bp, Unknown
  Bacterial polypeptide expressing nucleotide sequence isolated from the Sargasso Sea
catgttatctgattttttaaaagattatctatctattataatttttttattcatcgctttagggttgagctgtgcttttgttgtagttaattatattctttctcctaaaaagcctgacccagaaaaactttcagcatacgaatgtggatttgagcctttccaagattcaaggatggaatttgatgttagattttacctagttgcaattttatttatcatatttgatttagaaattgcatttttatttccttgggcaatttcgcttggaaaaattggacttttaggttttttatctatgatgatttttttattcatacttacaattggttttatttatgaatggaaaaaaggtgctttagattgggaataa

SEQ ID NO: 221439 - DNA, 1918 bp, Unknown
  Bacterial polypeptide expressing nucleotide sequence isolated from the Sargasso Sea
aatgttaagttataaattacttttttttcttcctctaatttcaaccatttttacatatccttttggagtgttattaggtgaaaaaactgcacaatatttctcttctactttaatatctatagcagctattttaagttggttcttatttatcagtttttctagttcttcttcgtcagaaattataattcctgtcctagagtggttttttgtttctggtcagttctttaattggggaatttctgtaaattctcttactcttttgatgttaacacttgttctcacagtttctgcattggttcatatttattcaattgagtacatgtctcatgataactcaaaagtaaggttcatgacctatttgagtctatttaccttttgtatggttgcattagttgtaagtgataatttaattcaattattttttggatgggagggtgttggtctagcctcttatttattgataggtttctggcatcataagaagtctgcaaattttgctgctatgaaagcttttttagtaaacagagttgcagattttggatttctcatcggtattgcaactctctatatatttttagacacattatctattaatgaaataattgaaggtaaagagaaattatttagctatcaaattaattttttaggatttgaaattaatgctttaattttttcttgttttttcctttttataggtgctatgggaaaatctgctcagtttggctttcatacatggttacctgatgctatggagggacccacacctgtctcagcattaattcatgcagcaacaatggtaacagctggtgttttcctgactgtaagattttcagaattaatggtcatgtctgacttcataatgacttttgttttaataataggtctcttaacagcattcttcgctgcatcagttggcttttttcaaaaagatataaaaaaggtaatagcttattcaacttgtagtcagttgggtttcatgtttgtggcttgcggtttaggcgcatttaatatcgcaatttttcatttaataacacatggttattttaaggcattactctttttatcttcagggtctgttattcatggtgttcacgatgagcaagatatggataaaatgggaaatcttttttcaaagatgaaaatcaccgcagtaatgatgtggataggtacactagctattataggttttccatattcatcaggttacttttcaaaagatctaattttaagttcatcatttaacttaattagtttaggcccattagtttatgtaattttagctatagtctctgccatgaccgcattttactctttcaggctcctatttaaggtgtttcatggaaattataatggatcttatgattatgaaaaaattcatgaatctggtccttttatgttagttccattattattcctttctgtaggagcaattctagcaggcttcttcctaaacgatttgttagcgggatataattcaaaaaatttctggaacggaataatattttttagtcaagataagcaatattactcgtcattttatccaattttatcaaaatctttggtagcttttggtgtagggctggcagtttattattatggttataatttaaataaacttgctgacttaaaaaaacgttttcactcaatctataattttattttgaacaaatggtattttgatgaaatttataacaaaatttttgttttaccactttacaatttaggaaagtttttatggactaaaatagaccaaggtataatcgataagtatttaccaaatggaagtgcatcaatagtttctacaatttcaaaagcatttaaaaggatacaaacagggtatatttttgattacacttttataataatttcaggtttcacactctttataactatcattttttatgtatctataacctaa

SEQ ID NO: 221440 - DNA, 1075 bp, Unknown
  Bacterial polypeptide expressing nucleotide sequence isolated from the Sargasso Sea
attctatttattttttgaagctggattaataccaatgtttttaattatcggtatttggggaggtgcaagaagagtttattctgcattcaaattctttttatacacattgttaggttctgttttgatgttagttgcaataatttcaatttattggattacaggaacaactgacgtggttcaactatatgaaattggaattgatgttaaatatcaaaatctattgtggttagcattttttagttcgtttgctgttaaaacacctatgtggccagttcatacatggttaccagatgcccacgttgaagctcctacagcaggatctgtattactagctgcaattttgttaaagatggctggatatggttttataagattttctttaggtcttttcccagttgcatctgaggtatttacacctttaatttacaccttgagtgttatagcaatcatatttacttcactgatagctttaatgcaggaagatatgaaaaagttgattgcttattcatcagtagcgcatatgggctttgtaactttaggtatattcactttgcaacaacaaggaattgaaggaagtataattcaaatgataagccatggcttagtttcagcagcattatttttaactgttggtgtagtttatgacagaatgcattctagattgataagcacttatggtggattagtttctgtaattccaaaatattcaatattgttcatgttatttgctttagcgtctcttggtttacctgggacaagtggatttattggtgagtttttaattttaatgggagctttcaaagataattttttagtagctgtcattgctagtattggggtgattttaggagctgcatacattttatggttatataaaagagtagtatttggaaaattaattaatgaagatcttaaaaaaatgttagatttaaatagatctgaatattttattttatcttgtttagctgtaccaatcttattttttggtttttatcccgatccattaataaacactattgaagtttctgtcactgatttaattaatacacacaacacaaatatagctagtaaataa

SEQ ID NO: 221441 - DNA, 334 bp, Unknown
  Bacterial polypeptide expressing nucleotide sequence isolated from the Sargasso Sea
catgactgcggaatttttaaaggattatttacctataatattgttcttaattattgcattaggattgagttgtgcatttatagtaatcaattttattctatctccaaaaaatccagatccagaaaagttatcagcttatgaatgtggatttgaaccatttcaggactctagaatggaatttgatgttcgtttttatttggttgctatactttttataatttttgaccttgaaatagcatttttatttccgtgggcaatttctttaggaaatattggaattttaggttttacctcaatgatgatttttttattcatacttactatcggatttatt

SEQ ID NO: 221442 - DNA, 1495 bp, Unknown
  Bacterial polypeptide expressing nucleotide sequence isolated from the Sargasso Sea
atgattgatctaccattattaagtatacttacttttttgcccttgattggtcttccatttataattgttggaaagattattaatgcagaaaattatcaaaatatttctaaatatatagctctatttgtatctttaataacttttctaatatcactattaattttgtataatttcaatattaatacttctgattttcaatataatgagcgtattcccattatgaatggccttatgacctatagaatgggtatagatggtatatcaatattatttattcttctttctacttttctaacacctatttgtataatcgctagttggaatattataagtgatcgtgttgattactatatgtgttcatttttagtgcttgaaacgctaatgattggtactttttgtgcattagatatagtgcttttctatttgttttttgaaagtgttcttattccaatgtttgtaattattggtgtttggggtggcgaaagaagagtttattcagcgtttaagtttttcttatatactcttttaggatctgttttgatgttagttgcaattatatatattgttttagcatcaggaaccactgaactacccataatttatgatgtttttaatattaatcatggcattatacagaatctattatggcttgccttctttgcctcttttgcagttaagatgcctatgtggccattccatacatggttaccagatgcccatgttgaagctccaacagctggatcagttatacttgcggccattttattaaaaatgggtggttatggctttttaagattttctttaccattgttacccgattccagtttttatttttctgattttatttttatcctaagtgttattgctattatttatacatctatagtcgcgtatgttcaggaagatataaaaaaacttatagcttattcttctgttgctcatatgggttttgttactatgggaatctttacatttaacattaatggaatccaaggaggtatatttcagatgttttcacatggccttatatcaggggcattgttcttatccgtaggtgtgatttataatagaatgcatacaagaaaaatcgcagattatgggggtgtcgtctcagtaatgccaaaatttgctttatttttaatggtttttactcttgctaatattggtttaccagggacaagcggctttgttggagagtttttaaccattatggcgattttctcatttaataaaattttcgctttctttgcagccagtggagtaattctctctgcggtatatggattatggttatacagaaaagtaatttttgaaaaaataacaaatgatgctgtaaaatctttaaaggatcttacattaggtgagaaagtaactctaattccattattaatattaattattctttttggaatttatcccgcacctattcttgatcttatttctgtttcatcgattggattagtagaatctattaatttatctggaggtaattaat

SEQ ID NO: 221443 - DNA, 1897 bp, Unknown
  Bacterial polypeptide expressing nucleotide sequence isolated from the Sargasso Sea
atggaattatttttaatagttttcttacctttgattggttctataattacaggtttttttggtaaaatacttggattaagacttagtcattttatttcttgttctttaattttagcttcttctattctttcagcatatttattttatatgacactaaacggctatcaaactagcaatcaatttttattcgactggattaattctggggcaatagatgcatcttggtccttaaaatttgatactttaacttctgtaatgcttgttgttgttacttctgtttcagcattagttcatatttactctattggttatatgagtcatgacccttatcaatacaggtttttctcatatttatcattttttacatttgctatgcttatgcttgttacatcagataacttattacagttattttttggatgggagggcgtaggtttagcatcatacctattgattggtttttggtatgaaaaaccatctgctaatgctgctgcaatgaaggcttttgtagttaatagggttggagattttggttttcttttaggtattgcggtaatttatatcgcaacaggatcaataagctttgatgttatttttcaaaaaattaataatgttaatcaatctactataaatatagcatgtttattgctttttatgggagcaatgggaaagtctgctcaactctttttacatacatggttgcccgatgcaatggagggtcctacaccagtttcagctttaattcacgcggcaactatggttacagctggaatatttcttgtggcaagatgctcaccaatttttgaaaattctgatcttgcgttatcatttatcataattactggagcatctactgcgttttttgcagcaacagttggacttgtacaaaatgacattaaaagaattattgcttattcaacttgttcccaattaggctatatgtttgttgctttgggtgttggggcgtatcaagtagctatctttcatctttttactcatgcttttttcaaagctcttcttttccttgggtctgggtcagttatccacgctatgtctgatgaacaagatattcaaaaaatggggggtttatacaaaattattccatttacatggataatgatgttaattggaactttagcgctaactggagcccctttattatctggttattattcaaaggatgctataattgaatcagctttcgcaagtcatgcttttgggcatgaatatgccttttatcttcttgttttttctgcccttttaactagtttttattcatggaggcttatctttttgactttccacggtaaaacgagagcatcacaagatgttttgtcaaaggcacatgaaagcccactatcgatgactataccgcttcttttattaagttttggggcattgttttccggatatttattttctgacttttttctatcttatgaattaaaggaactttggggtaactctatctatactcatcccgataatcatattctcgaagaaattcatcattctcctttttgggtaaaaaaaattccgctagttatgatgattattggttttattgtagctacagtattttatttgcttttaaaaaatcttccatcttttttatcaagtaaattgccatttatttataattttttatacaacaagtggtattttgatgaattatataattttatattcgtaaatcctttaaaaagaattggtaattttttatggttattttttgataaaaaaattattgatggttttggtcctgatggtatttcttcccttgtaattagtatttctagaaatgtaagtaaaattcaaactggttatgtctatcattatgcatttgcaatgcttatcggtctgggatttttattaattaggtttgtggtttactaat

SEQ ID NO: 221444 - DNA, 994 bp, Unknown
  Bacterial polypeptide expressing nucleotide sequence isolated from the Sargasso Sea
atggaatatatactttcaattttatttatatttcttcaatcttttttggtaatttttgctgttttaatgatggcttatcttggaatttatggtgaaagaaagctatgggcggctgtacaattacgaagaggacctaacattgttggaccatttggcttacttcagcctgtagctgattttcttaaattacttttaaaagagccaataattcccgataaagctaataaaataatatttataatggctcctcttgttacttgctttgttgctttgtcagcttgggcagttgttccgtttgcagaaaattgggtggtagcagatataaatgttggaattttatatatttttgcaatttcatctcttggagtttatggaatcattcttggtggctgggcttcaaattctaaatatccttttatgggagctatgagatctgcagctcaaatggtttcttatgaggtctctataggatttgtaattattacagttcttctttgtgtgggttcacttaatctcacagatatagttcttgcccaaaagaagatttggttttttattcccctttttcctatgttcataatattctttgtgtctgctcttgctgaaacaaatcgccctccatttgatctgcctgaggctgaagccgaattagtagctggatatcaagtagaatattcttcatctttctttctcttatattttcttggcgagttagcggcaacttttttaatgtgtgcaatgattacgattctgtttttaggaggttggttacctccttttgatatttaccctttaaatgttattcctggcgtagtctggtttatgctaaaagtggccttcattttctttatgtttggaatggtaaaagctcttgtaccaagatatagatatgatcaattaatgagattaggttggaaagtttttcttccgatatcacttttttgggttgttttaactgcttcagtcctttttatatttgatttagcgccatagg

SEQ ID NO: 221445 - DNA, 1624 bp, Unknown
  Bacterial polypeptide expressing nucleotide sequence isolated from the Sargasso Sea
tatatattcattggttacatgtctcatgatccacataaatcacgtttcatgtcttatttatcattattcacatttgcaatgttaactcttgttacatctgataattttatacaattgttttttggctgggaaggcgttggattatgttcatactttttaattgggttttggtttaagaaagaaagtgcaaataaagcagcgattaaggcatttattgtaaaccgggttggtgattttggatttgctttaggtatttttttaattttttatttatttgggacagtaaactacgatgaagtttttcaacaaattccaaatatattagataagaaattaaattttcttagttttaacattaattctgtagacttaatttgtttacttttattcgttggtgcaatgggtaaatctgcacaatttttactacatacatggttaccagatgcaatggaaggccctacgcccgtatcagcacttattcatgctgcaacaatggtaacagctggagtatttttggtcgtaagatgttcaccaatttatgaatattctgaattagctttatctgttgtagctattattggaatggtaacagcaatttttgctgcgagtgttgctttagttcagacagatattaaaaaaattattgcatattcaacctgcagccaactagggtatatgttttttgcggcaggtgttggggcatataatgttgcaatgtttcatttatttactcatgctttttttaaagcacttttatttttaggctctggttctgtaattcattcgtttaaagatgagcaaaatattaatttaatgggaggtgtctggaaaaaattaccttacacatatagtttaatgataattggaaccctcgcgctcactggatttccttttttatcaggattttactcaaaagatgctatcattgagtttgcatatttaagtggaaacaatgttggaacgtatgcagcctacattggaattttcacagcttttttaacatcaatatattcatggagactaatttttaaaacatttcatggcacttataataattcagaaataaatattgatagtatgcatgagtcaccaccaacaatgcttataccacttattgttcttgcaattggtgcaatttttgctggtatgctatttaaagatctatttattgggaaagaattatcttatgcattttggaatagttcaattaaatttcttgagccattaagtacagatcatccacctaattggtttttatttttaacaccatctctagttgtcatatcaataccattatcattttatctatttgtaaaaaatttgtctgtcgtagatgaaattgttaaaataaataaaccactttatatttttttacaaaagaaatggtatttcgatgaactttatgattttatttttataaatccttcaaaaagaattggaaaatttttatggaaacaaattgatggatcagtcattgatagatttggacctgacggaatatccaaactaataaaaaatttttcagctagagctgttaaacttcaaagtggatatatctaccaatatgcatttataatgcttcttggtttctcagttttattaactttattaattttagtataat

SEQ ID NO: 221446 - DNA, 2053 bp, Unknown
  Bacterial polypeptide expressing nucleotide sequence isolated from the Sargasso Sea
gatgacgggtagctatattaccaacgcttgcctactaattttatttcttccgttaatcgctttcattataaatatcttttttggaaaacgacttcctaggcaaggcgattgggtttctgtgggcgcaattcttataactctgttattatccctatctctctttattggaatgctttctaattgggattacaaattttcccatgaggtgtatttctcctggatagacctgggtgcttttaaaattgatctagggttttggattgataatataactatagttatgttattggttgtgtctttgatttcaagcatgacgcacatcttttctttagaatatatgaagggtgatatacgctataatcgctattatgcgtacctcgggctttttacattctcaatgaacggtattgtattagcaaacaatttgatgtctctctatattttttgggaattggttggggtgagctcctatttattgattggacattggtttgaaaaacattctgctgctgatgcaagtaaaaaagctttcttaacaaatcgggtgggtgatattggtttttttattggcatcatgattatgtttacagctattggctctttcaattttcagcagctttttactggcgtatctaatgaattaatttctggatctctgctaacctttgccggtctaggtttgtttatgggcgcagtgggtaaatcatcgcagtttcctctacatatttggcttcccgatgcgatggaaggaccaactccggtatcagctttaatgcatgcagctacaatggttgctgctggggtttatcttacggtaaggcttttcccgctatttaccgttgaggcattaacaataattgcttacgttggtggatttactgcgatttttgctgccacaatagcaattacacaaaatgatataaaaaaggtattggcatattcaacagttagtcaattaggctatatgatactagctgttggcgtgggaaactatgttgcagcgttttttcatctattaacccatgcgatgttcaaagcatgtttgttttatggttcaggatcggttattcatgcaatgcaccattctctgcatgaacttcatgatcatgataccgacccacaggatatgagaaacatgggtgggtttagatcaaagatgccaattactagcttaacaatgtcaatagcaactcttgcaatagctggtgttccattattttcaggttttttatcaaaagatgcgatacttgctggaaccctttcctatgtccagcaccacccagagcattgggttttagccttttttggatttggcgcagcagctatcactgctttttatatgtttagacttatttttctaactttctatggtgagcctaaaatgccaaaagtttttgaaggtatacatgaatcaccaaaagtaatgacctatccattaattgttcttgcagcattaagtctctttattttttacacacttccatacattaatccattttcagattacggctggtttacaaagcttattaaagctacaaattctgccgtaccagggaatcctaccgctaaggagatttacgatggtgttcatcacgcccattatacagctatggctttgtcgttgcttgttgcagctgttggtattgggctttcatttaccatgtactataaacaaaaattatctgcagaaaattgggctaaaagatttggaccgctttacaagctttcattgaacaagtattattttgatgagaattataatagatttttatatcaaccatttctaaagctctgcaatgctgttgcctatatcgattgggatttatacgataaatattttattaatggttttggatatgttacaaaaattttgtctcgaattacaggacgacttgattttgatgggcttgatcaaacattagttgatggtattggtagaacagctcatggcgctggtaaaaatttaaaaacactacaaacaggtcgattgcaaaactacatgttatttgctttaattggtgttatcataattttggttattcaaacaacctag

SEQ ID NO: 221447 - DNA, 370 bp, Unknown
  Bacterial polypeptide expressing nucleotide sequence isolated from the Sargasso Sea
atgttatctgattttttaaaagattacctaccaataataatatttttagtattagctctagggttgagttgcgcttttgtggttgtaaactttattctatcaccaaaaaaacctgatcctgaaaaactttcagcttatgagtgtggttttgaacctttcgaggactcaagaatggaatttgatgtgagattttatttagttgcaattctatttattatttttgatttagagatagcatttttatttccatgggcaatatctcttggaaatattggattattaggtttttcatcaatgatgatttttttgttcatacttacaataggttttatttatgaatggaaaaaaggtgctttagactgggaataaa

SEQ ID NO: 221448 - DNA, 1183 bp, Unknown
  Bacterial polypeptide expressing nucleotide sequence isolated from the Sargasso Sea
ccagatgctatggaaggcccaacaccagtttcggcattaatacatgcagctactatggtgaccgcaggtgtatttcttgttgtaagatgttctcctttatttgaatattctcaagttgctctaaacactgtagcagtagttggtatgataactgctttatttgcagcttcagttgcgttagttcagaatgacataaagaaaattgtagcttattcaacatgtagtcaattagggtatatgttttttgcagcaggcgtaggagcttatcacgtagcaatatttcatttatttactcatgctttttttaaagcattattatttttgggctcaggttctgtaattcatgcttttaaagatgaacaagatattagaaacatgggaggagtttggaaaaaattgccttatacgtatttttttatgttaatcggaaccttggcgcttactgggtttccttttttatcaggattttattctaaagatgcaataattgaattttcctatcttaaagactcttcaattggctactgtgcaatggtagtaggaatttttacagcttttttaacttcaatatattcttggagattattttttaagacgtttcatggttcctataataataaaactataaatataaacgacgctcaggagtccccactatctatgttaatacctcttgtttttttaggactgggctcaatttttgccggacttttctttaaagagatgtttattggttataatagtgataatttttggaaacaatctattttctttttaagtgaagtacgacacaatcatataccattatggttactatttataacacctatattagtagttatagcaattcctatttcattttactattttgtaacaaataaggaaattttagaaaattataaattaaaaactttacctttatataattttttattgaataaatggtatattgatgaattgtatgagcatgtatttataaatcccataaaaaaaattggcttatttttttggaagtctggcgatcaaggttttatagatagatttggtccggatggcatttcaaagattattaaaaatttatcaaataaagcaagccgttttcagactggatatatttatgattatgcctttgtaatgcttatcggtttatcaattttattaacttatctaattttaaaataag

SEQ ID NO: 221449 - DNA, 214 bp, Unknown
  Bacterial polypeptide expressing nucleotide sequence isolated from the Sargasso Sea
tttagtgattcaaggataaaatttgacgttagattttatttggttgctattttgtttataatatttgacttagaaatagcttttctttttccatgggcaatatctttgggtagtattggattattgggtttttactcgatgatgatttttttattcatcttaacaattgggtttatttatgaatggaagaaaggtgcgttagaatgggaataaa

SEQ ID NO: 221450 - DNA, 2020 bp, Unknown
  Bacterial polypeptide expressing nucleotide sequence isolated from the Sargasso Sea
atggtaaatcagaattttataaatttactcgctgaaggtaagccagaatatacgaacggtggtgtactcgctgagtttacttggttgatcgttgtacttccttttttagctgcaattttgattactttttttggaaaatatctcccattacaaggtgcagagctagctttaggaacagttctattcatattttcatatagcgcggctttactttatgagcatgcgacaaaaggaatcgccaatgaattttttatcaatgtaggaagtattggttcttatgatcttgagtttggctgggtcgtagatggattgtctattatgatgtacttcgtagttggtactgtttcatctttagtttttatatatgcaacaaattatatgcaaggtgaaataagatatactttctttttcacatcactcacattatttgctgggagtatgttagttttagtctcttctccaacacttttgcaattgttgattggttgggaattagttggagtttgttcttatctactaattggtcattactgggaaaaaaaggaaaattcttccgcagcgatgaaagcatttataactaataaaattgctgatgttgggttaatgattggaatcattgttcttgctttatcaacaaaaaccttgagaatttctgagatattgtatcaatcaactcatgattatgcagatatcaaaactgtagcatatttgggtggagtacttctttttataggtgcaatgggaaagagtgcccaatttccacttcatgtatggttacctgacgcaatggcaggaccaacaccagtatctgctttaatgcatgcagcaaccatggtaaccgcgggtgtctatcttcttggccggatgtttcctttctaccaaggaatggcttcacaagccctcgatatagttcttttatttggagtaataacacttcttggagcaggattagttgctgtagttcaggatgatctcaaaaaagttcttgcatattcaacagtaagtcaacttggttacatggttacagcaatgggttcaggtgcatacactgcaggtctttttcacctatggactcacgcattttttaaagctttattatttttaggtgctgggtcggtaattcatgcagtgcacacaaataacatgtctgaaatgggtggactaaggaaagaaatgcccagaacattttcaaccttcattattggaactgtagcccttgctggacttcctccattagctggatttttctcaaaagatgaaatactcgcatcactcaatcacgaagggcataatttatattttattatttcagttcttggagcctttatcactgcgttttatatgacaagagcagttcttttaacattttttggtgactatcggggtgatggacaccctcacgaatctgacaaaatgatgacaattcctttgataatattatcaggctttgccattgttgcaggatgggcaaacatacctggtgtttatacaggatttacaaaatgggttacaaccaggaaaaattacattgtagaatatcatcctgaatcatttgatttggttgctatgttcagtggtcttacatccggacttttgggtattggacttgcctactacgtctatcatatgtcaggaaatgcaactgacggcgatgaaaaaattaaaataaaaccaatatggaatttattggaaaataaatactacttagattttttctacttcaaattcataattgatcctgtaaaaataacttttgctaaatttgttgactcatttaattcaaatgtccttgatcggtttgttaatggtgttgggacaactgcttcaaaagcaggaggaattgtatatacaaatcttgatcaaggaggtattgacaaggtacttaatttatcctcaacaggtacagacactattggtagtaaagtcaaattaattcaaactggtaaaactcaacaatacttaatgtattttttaataggagtgatagttattagcttaataattttgttagtgttatgag

SEQ ID NO: 221451 - DNA, 1282 bp, Unknown
  Bacterial polypeptide expressing nucleotide sequence isolated from the Sargasso Sea
tttggtattaatattaattctataaatttaatatgcattttgttgtttataggggctatgggtaaatctgctcaaatttttttacatacctggttacccgatgctatggaaggaccaactcctgtttccgcgcttattcatgcagcaacaatggtaactgccggagtttttttagtagttagatgttctcctatttttgaatattcagaattagctttaaatatagtcactatagttggtatgagtactgctttttttgcagctactgttgctctagtacaaaatgatataaaaaaaataatagcctactcaacatgtagccaattaggttatatgttttttgcagctggcgtaggcgcttataatgttgcaatgtttcatttgtttactcatgctttttttaaagccttactttttttaggatcgggttctgtaattcattcctttaaagatgaacaaaatgtaactgaaatgggaggaatttggaaaaaattaccttacacgtggattttaatgatcattggtacacttgcattgactggttttccattactgtcaggcttttattcaaaagatgctattattgagtttgcttatttaagaggaaacactacaggttattatgctgcaattattggtatttttacagccttgctaacagcaatttattcttggagattaatttttaaaacatttcatggctcatacaataataaaaaattgaatattgatgaaatgcacgagtctccattagtaatgattattcctcttattatattatctgtaggagcagtattttcaggctttttctttaaagaattatttatagggtataacagtgctgagaatttttggttgaattctataaaatttttagaacctttaagtaaagatcatcctcctttatggataatttattctactcctgttttggtcgttttagcaattccattttcttactacttatttatttataataaaaatattactgattggctggtaaatgaaaataaacctttatacaattttttactaaacaaatggtattttgatgaattttacaattatttatttgtgaaaaaatttaaaaaaattggaattttcttttggaaaaatgttgatgtaagaattatcgataaatatggcccagatggaatttctaatttaataaaagttttatcaaacaaggcagttaaatttcaatctggttacatttatcaatatgcattaattatgctcttaggtttttccgtaatacttacttatttaattttaacatgat

SEQ ID NO: 221452 - DNA, 1231 bp, Unknown
  Bacterial polypeptide expressing nucleotide sequence isolated from the Sargasso Sea
aaagaaaattcatctgcagctatgaaagcttttattacaaataaaatcgcagacataggtttaatgattggaattattgttcttgcgttatccacaaaaacactaaggatttctgaaattttatatcaatcaactcatgactacgaagacataaagacggtagcttatttaggaggggtacttctttttattggagcaatgggtaagagtgctcaattcccactccatgtctggcttcctgacgctatggctggtccaactcctgtttctgcattgatgcacgcagcaacaatggttacggctggggtctatcttcttggaagaatgtttcctttttatcaaggcatggcttcagaagcattagatgtggttcttttatttggagttattacacttttaggagcaggtttggtagcagttgtacaagatgacttgaaaaaagtcttggcatattcaactgttagtcaacttggttacatggtgacagccatgggctctggagcatatactgctggactttttcatctttggactcatgcattttttaaagctttattatttttaggtgctggttcagtaattcatgcagtccatacaaacaacatgtcggaaatgggagggctgagaaaagaaatgccaagaacattttcaacttttatcattgggactattgcacttgcaggacttccaccattagctggttttttctcaaaagatgaaatacttgcatcactcaatcacgaggggcataacatttattttattatttctattttaggtgcttttataactgctttttatatgacgcgggcagttcttttaactttttttggggagtaccgaggagacggacacccacatgaatcagacaaaatgatgacgatacctcttatagtattgtcaggctttgcgattgtttcaggatgggtaaatattccaggagtttacacaggttttacaacatgggttacaactaggaaaaatgctattgtagaatatcatccagaatcattcgatctagttgcaatgtttagtggtttctcagcaggaatctttggtatagggcttgcatattatgtttatcaattatctggaaaagctgtagatggagatcaaaaaatcaaaataaaacctatttggaaattattagaaaataaatactatttagattttttctacttcaaattcattattgatccagtaaaaattaaccttgcaaaatttattgatt

SEQ ID NO: 221453 - DNA, 1084 bp, Unknown
  Bacterial polypeptide expressing nucleotide sequence isolated from the Sargasso Sea
aaatttttttttatcaatctatctatggatattatttgatccaacaacttctgagtttcaatttgttgaggaaagaatttggattaaagatttaataaattacaaggtaggtgttgatggtatttcaattttgtttattttactcacaacatttattacacccctttgtatcgtatcggtaaataattcaatcaaagagagactaagtgaatttttgatagctgtacttatcatggagtcttttatgatcggtgtattctgctctttagaccttgttattttttatttattttttgaggcaggtttaattcctatgtttttaattattggtatctggggtggtgccagaagagtttattcagcatttaaattttttttgtataccctgcttggttcagttttaatgttagtagctataattacaatttattggctgaatggaactacagatgtagttgaactttataattccggaattgatataaagtatcaaaatcttttatggttagctttttttagctcttttgcagtaaaaactcctatgtggccagttcatacatggttaccagatgctcatgttgaagcaccaacagcaggatctgttttattagcagctatattattaaaaatggcaggttatggttttataagattttctcttggattatttccggcagcatcagaaatcttcaccccattgatttacacactcagtgtaattgcgattatttttacttctttcatagctttaatgcaggaagatatgaaaaagctaattgcttattcatcagtagcacatatgggttatgttactttaggaatttttactattcagcaacaaggtattgagggaagtattattcagatgatcagtcatggactagtttctgcagcactttttttatgcgtaggtgttgtttatgacagaatgcattcaagacttataaatacctatggtggaatcgtgagtattattccaaaatattctattttgtttatgttgtttactttagcagctctaggcctacctggaacaagtggttttgttggggagtttttaattttgatgggcgcatttaaggat

SEQ ID NO: 221454 - DNA, 1528 bp, Unknown
  Bacterial polypeptide expressing nucleotide sequence isolated from the Sargasso Sea
tcagacaactttattcaactattttttgggtgggaaggtgtaggcttatgctcatattttctaattggattttggtttaaaaaggagagtgcaaacaaggctgcaattaaagcctttgttgtaaatagagttggtgactttggtttagctcttggaatttttctgattttttatatttttggtacggtcaattatgatgaggtttttgagcaaatcccaaatgttttagataaaaaaataaatttcattggtattaacatagagattattgatttaatttgtttacttttattaattggagcaatggggaaatcagctcaatttttattacacacatggttacctgatgcaatggaaggcccaacgccagtatctgcattaattcacgctgcaactatggtaaccgctggagtatttctgattgttagatgttcccctatatatgaatactctccattagctctaacagttataaccatagttggaatgacaactgctttctttgctgcaacagttgcacttgttcaaaatgatataaaaaaaattattgcttattctacttgtagtcaattgggctatatgttttttgctgctggagtaggcgcctataatgttgcgatgtttcatctttttacacatgccttttttaaagctttgctatttttaggagctggtgctgtaattcattcgtttcatgaggaacaagatataaataaaatgggtggagttataaagaaactcccatacacatatgtattaatgcttatagggactcttgctttaacaggtttcccttttttatcaggtttttattctaaagatgcaataatagagtttgcatacctaagaggaaatggagttggaatactcgcagcttttgtaggtattgttacagctttattaacatcaatttactcttggagacttatttttaaaactttccatggtaattttaataataaagaacttagtgttgataaaatacacgaatctcctttggttatgattgccccattagtaatcttggcaataggagctatttttgcaggtatggcgtttaaaggtttgtttatagggcatgaaatagcatatgaattttggggtaaatctataaaatttttagaaccactcagcacagatcatccacctacatggtttttgtttttaacacctatacttgttacttctgcaattccattttcttattatttatatctaaaaaataaaaacatagttataggattgaaagaaatgaatgaaccaatttatcaatttttagttaagaaatggtactttgatgaaatatatgattacatatttgtcaatccttcaaaaagagttggaaaatttttatggaaaaaagttgatggatccataatagataaatttggccctgatgggatttcaagtgtaattaaaaatttgtcaacaaaagcagtcaaatttcaatctggatttatttatcaatatgcatttgttatgttgattggattttcagttttactaacaatactgatattaaactaat

SEQ ID NO: 221455 - DNA, 1117 bp, Unknown
  Bacterial polypeptide expressing nucleotide sequence isolated from the Sargasso Sea
agtattttgcgctttagatcttgtagtattttattttttttttgaagcctgtcttattcctatgttccttattattggtgtttggggtggagctaggcgtgtctatgcaacatttaaatttttcttatatacattaagtgggtctgtcttaatgttaattgcaattatttatatatatatagtcactggtacaacggacgtcacaattctaagtgggtatgattttaattattcaatccaaaactggctctggttagctttttttatttcgtttgctgttaaaatgccaatgtttccagtgcatacttggcttccagatgcacatgttgaagctccaactgcagggtctgtaatcttagcaggtgttttactaaaaatggggggttatggtatattgagattttctatcccactatttccaattggatcatttgtttttactgaccttgtttttgttctctctgtgatagcaattatatatacttcctttatcgcaattgcgcaggaagatattaaaaaacttattgcatattcttctgttgcgcatatgggttttgtgacaatgggaatattcacattcactgatcaaggaattcaaggtggtgtatttcaaatgattagccatggacttatctcagcagctttatttttatcagttggtgttatttatgacagattacacacaagagagattgcggtatatggtggtgttgtaaagaagatgccaatttatgcagcctttttcctagtattcacaatggcaaatattggtctaccgggaacgagcggatttgtcggtgaattcttaacattacttggcgcatttaaagtgaatttgtatgttgcattttttgcaaccaccggtgtcatactatctgcagcctatgctctttggttatacaaaagagttatttttggtgtgattacaaacgatgaagttgaaaagttattagacctaaatctacgagagtatataatcttattaccattcgtgttgctgataatcttattcggtgtttaccctaatatggtaattgatttgactgctgcaagcacaacgaatttaatagacaattataattatgcaattgaacagtaccaatcccatttggttagc

SEQ ID NO: 221456 - DNA, 1456 bp, Unknown
  Bacterial polypeptide expressing nucleotide sequence isolated from the Sargasso Sea
aattggagctttatttattttttttgttagatcgtctaattctcaatatcaaagtagcaaatatgttgccctttttataactttagctaattttttcttgtctttatatttatggattgtttttgataaatctatagttgactttcagtttgttgaagaaagagaatggatttcaggatttgttaattacaaagttggagtagacgggatatcaattttatttattttacttacaacattcattactccaatttgtgtaataactgtaaatgcaactatcaaaaatagattaaaagattttttaatagcaatcttgatacttgaaacatttatgattggtgtcttttgctcgttggacttagttgtattttatttattttttgaggctggtcttattccaatgtttttaattattggtatatggggtggagaaagaagagtttattcagcatttaaattctttttatatactttgctaggttcagttttaatgctggttgctattatatcaatatattggataactggtacaacagatgtcattaagttatacgaattgggtatcgacgctaagtaccaaaatttattatggctagcattttttagttcctttgctgttaaaacaccaatgtggccagtgcatacatggttaccagatgctcatgtagaggcaccaactgctggttcagttttactagctgcaatacttttaaaaatggctggatatggatttataaggttttctctaggtttgtttccagatgcttcattatattttgttcctttagtttacacacttagtttgatagcgattatttatacatcactagtagccttaatgcaggaagatatgaaaaaactaatagcttattcgtccgtagctcatatgggatttgtaacactaggtattttcacaatgacacagcaaggaatagaaggaagtattttccaaatgataagtcatggtttggtatctgcagcactatttttatgtgttggagttgtttacgatagacttcatacaagacttataaatagatatggaggcttagtttctataatgccaaagtacgcaatagtttttatggtttttactttaggagctcttggattacctggaacaagtggttttattggtgaatttttagttttaatgggtgcatttaaaaagaatatactagtagcaacgattgcaagtctaggagtgatcttgggggcggcatatatgctttggttatataagagaattatctttggaaaattaattaatgaagatgtaaaaaaaatggttgatttaaaaagatttgaaattgttacattatggcttttagtattaccgattatattttttggtttttatccagaacctttgattaactctatagaggtatcagttgcaaatatgatagatatgaatgatttagacaagattaataaattagcattaggcgaataa

SEQ ID NO: 221457 - DNA, 770 bp, Unknown
  Bacterial polypeptide expressing nucleotide sequence isolated from the Sargasso Sea
aatgattaacttagctcaaacgtactttatcgaagtaatgactattattctttattgcctacttatttttgttcccttacttctgggtgttgtaatggcgttatatgcagatagaaaaatatgggcagcagttcaaaaaagaagaggtccaaatgtagttggcccgtatggtttgttccaagttcctgccgatggattaaaatttatttttaaagaaattattttacctgacggctctgacaaaacagttttcctaattgctcccattattactcttgctctatcaattgcagcctgggcagttgtaccagttcaggcgggtgtagtattggctaatataaatgttggaatcttatacatttttgcaattagctctcttggagtctatggaattctgatggcaggatggtcttcaaacagtaagtatcctttttttggcgcacttagatcagcagctcaaatggtttcttacgaagtttccataggttttgtaataataactgttttgttatgtgtaggctcactcaacttgactgaaatagtaatggctcaaaagacaatgtggtttttcatacctttatttccaatgtttattgttttttttatatccgcactagcagaaacgaacagacctccatttgatcttcctgaagcagagtctgagttagtagctggatatcaaacagagtattcaggaatgccattcgttttgtttatgtttggagaatacataaatatattattaatgtgcgcaatgacaactatcctat

SEQ ID NO: 221458 - DNA, 442 bp, Unknown
  Bacterial polypeptide expressing nucleotide sequence isolated from the Sargasso Sea
tatgtttttttttattaaaaaatgtgacgtatcagcgcttcacgaacaattaaaaaatgatatacagacctcaatgttatctgattttttgcaagattacctttctataataattttcttagtcctagctttaggtttgagttgcgcttttgtggttgttaattttgttctttcgccaaaaaaacctgaccctgaaaaactttctgcttatgagtgtggatttgaaccatttgaagactctagaatggagtttgatgtaagattttatctggttgcaattttatttattatttttgatttagaaattgctttcctttttccttgggcaatctctttaggcaatattggtttattaggtttttcttcaatgatgatttttttattcatacttacaattggttttatttatgagtggaaaaaaggtgctttagattgggaataa

SEQ ID NO: 221459 - DNA, 715 bp, Unknown
  Bacterial polypeptide expressing nucleotide sequence isolated from the Sargasso Sea
atggatagaaaactttttacaccaatatcaatcagaaatttaaccttatctaataggatagtagtcgcacctatgtgccaatattcagcagtgaatggttccgcaactgattggcatttgatgcatcttggccaattatcaatctcaggatcttctcttatttttgttgaagctactgcagtagaagaaaaaggtagaattactcctggatgcttgggtttatattctgatgaaaatcaaaaagcattatcaaagataattgaatttgtgaaaagatatgggaatacaaaaattggtatacaactagcccacgcaggtcgaaaagcttcaactcaagtaccttggaaaggtggtacacctcttaatcaagataattcagacagttggcaaacagttgcaccgtcgtcagaaagttataattcaaattggccattgccaatagaattaaatgaagaaggcttggaatatatcaaaaaatgttttgtaaaatcagctaagagagctgtagagataggttttgatattattgaattacatatggctcatggatatttaattcatcaatttctttccccaataagtaataaaagaaaagataaatatggttcatgttttgaaaatagaataagatatcccctagagattttcaaagcaataagagaggaaatatctacggattaccctttaggagtaaggttttcagctacagactgag

SEQ ID NO: 221460 - DNA, 912 bp, Unknown
  Bacterial polypeptide expressing nucleotide sequence isolated from the Sargasso Sea
cccgtggacgaatcacccccggatgcgttggtctgcataacgacgaacaggaagcatcccagaaaagggtgctcgaattctgtagaaaatatgggcaggcgaaaatgggtatccaattggcccatgccggaagaaaagcttccactgtacctccatgggagggaggtaaaccacttcctccggaaaatggagcctgggagacggtggggccttccccagttccgtttgcagaaggctggcatgtcccagtagaaatgaccctgcaggatcttgagaccgtgaaaaatgcttttgtggattctacaagaagggccgagaggcttggttatgacgtcatcgaaatccatggagcccatggctatctactaagtgcgtttctttcaccactggcaaatcagcgtgaagatgaatatggaggttctctggaaaaccggatgcgataccctctggagattttcgaagcagttcgttgcgtctggccttcagaaaaacctttgggaatgaggatttccgcttcggattgggacgatgccggatggactattgatgattcagtgattttcgcccggaaactcaagcaactaggatgcgattttgtagattgttcctcgggtggaaacagtcccaatcgccctccggtcggtcccggttttcctggatatcagcttcctttttcagaacaggtccgtaacgggtcagatattcccacggtcgctgttgggatgttgagagattacaacttggtagaagaagctgtttccaatggaaaggcagatttgatcgctcttggccgaggcatgctctatgaaccacgctgggcatggcatgcggcccatgagttgggaggaaaagcttcttaccccaatcaatatgcccgtagtgagcctgaaaaatggcccaaagcgttttagg

SEQ ID NO: 221461 - DNA, 364 bp, Unknown
  Bacterial polypeptide expressing nucleotide sequence isolated from the Sargasso Sea
aaattcttcaatagagttttctaaaaaattaatagattctggagttgatatgatagattgttcatctggtggaaattattcagatcaaaagattgagcttaaacctggatatcaagtacctttatccaaaagtatcaaagaaaatgtagaaattctcacaggagcagtaggattaattactgaaaaagatcaagctgaggaagttctggataatcacgaagctgatgtaatattcttaggtagagaattattaagaaatccttactggactttatatgcttcgggtgaaatagatgaatggcctttgcagtatcaaagatcttttgaaggatcaaaaaaaatcaactatatcagagaagattag

SEQ ID NO: 221462 - DNA, 725 bp, Unknown
  Bacterial polypeptide expressing nucleotide sequence isolated from the Sargasso Sea
agggtggcaatctgttgctcctagttcggtatcatttggtgaaggatttgcagtccctagcgaactttctcttgaagatatatctggaatcattatggattttgcatctgccgctaaaagatctgttgaagctggatttaaagttatagagctacattttgctcacgggtatttagcttctacatttatgtcacctctttcaaatactagaaaagataagtatggtggctcattggaaaatagatgtcgatttgctattgatattgcttctgcagtaaggaatgttataccggaatctatgccattgtttgcacgcatttcagcatctgaatatatgcctggaggctgggacattgatgatgcaatagaattgtctggatggcttaaagatcaaggtgttgatctcattgattgttcttcaggaggcatttctcaaggtcaacagattgatacatttcctggttatcaagttccttttgcttcaaagataagatcagaagtagatgtgttgactggagcggttggacttattagggatgcagctcaagcggaacaaactttgcgtaatggtgatgcagacgctatattgcttggaagggaattattaagaaatccctattgggctttgtatgcacgtgaagagttagatagaactaatgatttatggcctgcccagtatttcaaatcatatactgatacatattctggagtcccacctaggtagg

SEQ ID NO: 221463 - DNA, 788 bp, Unknown
  Bacterial polypeptide expressing nucleotide sequence isolated from the Sargasso Sea
tacaaattttataaaagaaatgaatgcaattcccgcaattcagatagcccattctggaagaaaaggctctacccataaaccttgggaggaaggatattctgtgccggataataaaggtggttggcagccagtaggtccttcatcaatcccttttgataataaatctgttacaccaaaagaactttcaattcaggaaattaaagatctagaaaataaattcgcaaactcagctgtacgggctgaaaaagctggatttaaatgcatagagcttcatatggcgcacggctatttagtccatgaatttttatcaccaatttccaataaaagagaagacgattatgggggtaattttgagaatagaatgaaatttgcattaaatattgtaaagaaagtgagaggcgcaatttcagaaaatacgatacttttagctaggatttctgcaactgattatgccgataatggctgggatgaatatcagtcagttgagctttctaagaaatttaagggacttggagttgatttaattgattgttcttcgggaggaaattactctaagcaagaaataattgctgaaccaaattatcaagtaaagttttcaaaaaaaattaaaaaagaagctggcattatgacaggcgctgtaggtttaataacagaacctgatcaagcagaaaaaatcctaaaagataatgaagctgatgttatttttatggggagagagttactaagaaatccatattggcccttgagttctatgaaaaaattggatggaaataattttcctctctaat

SEQ ID NO: 221464 - DNA, 910 bp, Unknown
  Bacterial polypeptide expressing nucleotide sequence isolated from the Sargasso Sea
ttttgttgaagcaaccggagtcgaatcccgtggacgcatcactcccggttgtgtaggtctgcataacgacgaacaggaagcatcccagaaaagggtgctcgaattctgtagaaaacatgggcaggcgaaaatgggaatccaattggcccatgccggaagaaaagcttccactatgcccccatgggagggaggtaaaccactccctccagaaattggcgcctgggagacggtggggccttccccggttccgtttgcagaaggctggcatgtcccagtagaaatgaccctgcaggatcttgagatcgtgaaaaatgcttttgtggattctacaagaagggccgagaggcttggttatgatgttatcgaaatccacggggcccatggatatctactcagtgcgtttctttcaccactcgcaaatcagcgtgaagatgaatacggaggttctctggaaaaccggatgcgatatcctctggagattttcgaagcagttcgtcgtgcatggccttcagaaaatcctttgggaatgaggatttcagcttcggattgggacgatgccggatggactattgatgattcagtgattttcgcccgggaactcaagcaacgtggatgcgattttgtagattgttcatcgggtggaaacagtcccaatcgtcctccagtcggacccggttttcctggttatcagcttcctttttcagaacaggttcgtaacgaatcagatattcccaccatcgcagttggaatgctgaaagattataacttagcagaagaagccatttccaatggaaaggcagatctgatcgctctgggccggggcatgctctacgactcacgttgggcatggcatgcggcccatgagttgggaggaaaagcttcataccccaatcaatatgcccgtagtgag

SEQ ID NO: 221465 - DNA, 698 bp, Unknown
  Bacterial polypeptide expressing nucleotide sequence isolated from the Sargasso Sea
agaaggagggtgggatatagtggcgcctagttctattccttttgatgatacttgtggaatccccgttggtttggaagttactgatatcaatgagattattgctaaatttgtctactctgctgaattatcagttgaatctggtataaaagtaattgaattacattttgcccatgggtatttaataaattcttttatgtctaaaacttctaacacgagggaagatagttatggtggaagctttgaaaataggatcagattaccattagaaattattagtaaagtacgaacagttattcctgaaagtatgcctttattcgttagaatttcatgttctgaacatcttagggatggctgggatatcgacgattcaatacagtttgcccattttgctaaacaagaaggtgtggatttaatagattgttcttcgggagggaacagctacaatcaagaaatgaaagtcttcccgggatatcaagttcaatatgctgaggcaataaaaaagaatgttgatattttgactggtgcagttggattaataactcaaccagaacaggctgaggaaatcttagcgaatggtcgagcagatgttgtgttgctaggtagagagttgttacgtaatccttactggcccatacatgctcagaaaacgctagatggcgaggctgcaatcgcagaccagtatcttagggcattgtaat

SEQ ID NO: 221466 - DNA, 1114 bp, Unknown
  Bacterial polypeptide expressing nucleotide sequence isolated from the Sargasso Sea
catgactgcgctgttttccccgttcacgctgcgcggcgtgacccttccgaaccggatcgtgatctccccgatgtgccagtattcggccgaacgcggcgaggcgaccgactggcacatgattcacctcggccatctcgcgctgtcgggcgcggggctgctctgcatcgaggcgaccgcggtggaacccgacgggcgcatcacgcatggcgacctcggcctctgggacgacgcgaccgaagccgcgttgaagccggtgctggccgcgatccgcaagcattcgccggtccgcgtcgcgatgcagctgtcgcatgcggggcgcaaggcgtcgagcaacgtgccatggcagggcggccagctcgtgtccgtcgccgacggcggctggttgccgcatgcgccgtcggccgtgccgcacaaggacggcgagacgccgccgctcgcactcgatgctgccggcctcaagcggatccgcgacgcgttcgcggccgcggcgaagcgggccgcacggctcggcatcgacgcgatcgaagtgcacgcggcgcatggctacctgctgcatcagttcctgtcgccgcttgcgaaccagcgcaccgacgaatacggcggctcgctcgaaaaccgcatgcgctttccgctcgagatcttcgagatcgtgcgcgcggcgtttccggaggaccggccggtcggcgtgcgcgtgtccgcgaccgactgggtggaaggcggctgggagctcgacgatacgatcgcgttcgcgcacgaactgaagcgccgcggctgcgactggatcgacgtgtcgtccggcggcgtgtcgccgctgcagaagattccgctgtcgcccggctaccaggtgccgttcgcgcaggccgtgaagcgtgcggtcggcatgccgacgatcgccgtcggcctgatcaacgagcccgcacacgcgaaccggctcatcgaggccggcgatgccgatttcgtcgcgatggcgcgtgcgatgctgtacgacccgcgctggccgtggcacgcggcggccgagctcggcgcgcaggtgacggcgccgccgcaatactggcgctcgcagccgcgcgagcacaaggcgttgttcggcgacatcgcattcggccagcgttga

SEQ ID NO: 221467 - DNA, 566 bp, Unknown
  Bacterial polypeptide expressing nucleotide sequence isolated from the Sargasso Sea
aatgcttaaattaaaagtaaatgaaattgaagttgaagttgaagaaggtttaactgttcttcaagcttgtgaaaaagctggagtagaaattccaagattttgttaccatgaaaaattatcaatagcaggaaattgcagaatgtgtttagttgaaatggaaaaatctcctaaaccaattgcctcatgtgctatgccagctgctgaaggtatgaatattaaaacaaatactgctttagtagaaaaagctcgtaagggagtgatggaatttttattagcaaaccatcccttagattgtccagtgtgtgatcaaggtggagaatgcgatcttcaagaccaatcaatgtactatggagtagacaaatcaagatttaaagaaaacaaaagagctgttcctgaaaaaaatatgggaccattgattaaaactcaaatgacaagatgtattcactgtacaagatgtgtgagatttgcaacagaagttgcgggagttccagagcttggcgctattggaagaggtgaagatatgcaaattacaacttatctagagcaatcaatgcaatctgaattgt

SEQ ID NO: 221468 - DNA, 298 bp, Unknown
  Bacterial polypeptide expressing nucleotide sequence isolated from the Sargasso Sea
gctgtggtcatgtacaccttgtagagaaggctctggttggatgtggagaatgcttgagagaatggcaaaaggagatgcaaccaaggatgaggtggatatgctaggagatgttacaagtcaaatagcaggacatactatttgcgcatttggggaaggttcatcctggccggttcaaggattacttagacattttaaaaaagaaattgaaaaaagaaataatttggatcctattgttcaaaagaaaaacaatattccgtatttagtagatcaacatttattggataaaaaaaatgcttaa

SEQ ID NO: 221469 - DNA, 337 bp, Unknown
  Bacterial polypeptide expressing nucleotide sequence isolated from the Sargasso Sea
aatggagaaaatcatgcttaaaccagagaacaaaatatttaaaaatctttacaatgagcatggttgggaaattgaaaacgcaattactagagatgattggaaagatactaaaaatataatctctaaaggaagagaatggataataaacgagattaaaacttctgaactaagaggaagaggaggtgcaggtttttccactggtcttaaatggtcttttgctccaaaagaagttggttctagaccacactatctcgtaattaacgcagatgagtctgagccgggaacttgcaaagatagagatatactaagatttgaaccccagaaattgatagaaggt

SEQ ID NO: 221470 - DNA, 401 bp, Unknown
  Bacterial polypeptide expressing nucleotide sequence isolated from the Sargasso Sea
tatgcttaagaaagaagataagatatttaaaaatctctataatgaacttggttgggacattgaaagttcacttaaaagagatgactggaaaaatacaaaagatttaatttcaaaagggcgcgaatggattataaacgaggttaaaacttcagaactaagagggagaggtggagcaggtttttctacaggattaaaatggtcatttgctccaaaagaagttggatcaagaccacattatttagttataaacgccgatgaatccgaaccgggcacttgtaaagatagagatattcttagatttgagcctcaaaaattaattgaaggatgtttaattgctggtttcgctgttaatgcacatgtttgctatatttacataagaggtgaatatttaaacgaaggag

SEQ ID NO: 221471 - DNA, 322 bp, Unknown
  Bacterial polypeptide expressing nucleotide sequence isolated from the Sargasso Sea
atgcttaaagacgaagacagaatttttaaaaatttatataatgatcttgggtgggatatatcctcagcaatgaatagaggtgattggtcaaatacaggggaaattatttcaaaaggtaaagagtggattattaacgaggtaaaaaaatccgaactaagaggaagaggtggagctggttttccaactggcatgaaattgtcttttgcgcctaaacaagtaggatcaagacctcactatctagtaataaatgctgacgaatctgaaccaggaacttgcaaagatagggatatattaaggtttgagcctcaaaaaattaattgaa

SEQ ID NO: 221472 - DNA, 439 bp, Unknown
  Bacterial polypeptide expressing nucleotide sequence isolated from the Sargasso Sea
aatgcttaaagacgaagatagaatatttaaaaacctgtataatgatttaggagctgacttaaactcttcaaaaaaaagaggtgattggacaaatactaaagatttatgtgaaaaaggtagagactggataattgatgagattaaaaaatcagaattaagagggagaggtggcgcaggtttccctactgggttaaaatggtcatttgcacctaaggaagttggatcaaggcctcactacctcgtaattaatgcagatgagtctgaacctggaacttgcaaggatagagatattctaagatttgaacctcataaacttttagaaggttgtttgatagcagcttatgctgttaattctcataaatgttatatttacttaagaggagagtactacaacgagggtatagaattgcaaaaggcaattgatgaggcttataaagat

SEQ ID NO: 221473 - DNA, 316 bp, Unknown
  Bacterial polypeptide expressing nucleotide sequence isolated from the Sargasso Sea
aatgcttaaagaagaagataaaatatttaaaaatttatataacaatctcggatctagtattgaagattctattaagcgagatgattggttaaatactaaagatataatctccaaaggtagtgagtggataataaatgaaattaaaatttctgaattaagaggaagaggtggtgccggttttccaaccggagttaaatggtcttttgcacctaaaaaaattggatcaagacctcattatttagttataaacgcagatgagtcagaaccaggaacttgcaaagatagagacataatgaggtttgaacacaaaagttaa

SEQ ID NO: 221474 - DNA, 500 bp, Unknown
  Bacterial polypeptide expressing nucleotide sequence isolated from the Sargasso Sea
aatgcttaaagacgaagatagaatttttcaaaacttatataatgatggaggcgcagatattaattcagctttatcaagaggtgattggagtaatacaaaagagatttgtgaaagaggaagagattggataattaatgaaattaaatcttctgaattgaggggaagaggtggagcaggttttcctacaggattgaaatggtcttttgcgcccaaagaagttggatcaaggcctcattatttagtaataaatgctgatgagtcggagccaggaacatgcaaagatcgagatctattaagatttgaacctcataaattaattgaaggatgtttaattgcttcttatgcagttaatgcacataaatgctacatatatattagaggtgaatattttaatgaaggtcaaaaattacaaaaagcaatagacgaagcttatgagcaaaaattaataggcaaagattcttcaggcaccgggtgggatttagatatttatattcattatg

SEQ ID NO: 221475 - DNA, 541 bp, Unknown
  Bacterial polypeptide expressing nucleotide sequence isolated from the Sargasso Sea
aatgcctaaaattacaataaatggaaaagaaatagaatttgagaaaggaatgacggtattacaagcttgtgagctcgctaatgttgaaataccaagattttgttatcatgaaaaactatctatagctggaaattgtaggatgtgcttggttgagatggaaaaatctcctaagcccatagcatcttgtgcgatgccagcagcagaaggaatgaatatcaaaaccaatacttctttagttgaaaaggctagaaaaggtgtgatggagtttttgcttgcaaaccatcctttagattgtcctgtttgtgatcaaggtggagaatgcgatctacaagatcaatctttatattatggagtagataaatctagatttgtagaaaataaaagagacgtaaaagaaaaatacatgggccctttaataaaaacacaaatgactagatgtattcattgcacaagatgtgtaagatttgcaacggaagtagccggtgtacctgaaattggcgcaattggccgaggtgaaaacatgcaaataacaacatacctt

SEQ ID NO: 221476 - DNA, 481 bp, Unknown
  Bacterial polypeptide expressing nucleotide sequence isolated from the Sargasso Sea
atgcttaaaccagaagataaaatattcaaaaatctttataaccaattaggttgggaaattgataatgcaattaaaagagatgattggaaagataccaaaaacttaatttctaaaggacgagaatggattatcaatgaggttaaaaattctgagcttagaggaagaggtggagcaggttttccaacaggtcttaaatggtcttttactccaaaagaggttggttctagaccacattatttagtaattaatgctgacgagtcagaacctggaacttgtaaagatagagatattttaaggtttgaacctcaaaaattaatagaaggttgtttgattgctggatacgcagtaaatgctcatgtttgttatatctatattcgaggtgaatactttaatgaaggaaaaagattacaagaagcaatcgatcaagcataccaaaaaaaatatttaggaaaaaatgcttgtgattctggatgggatttga

SEQ ID NO: 221477 - DNA, 782 bp, Unknown
  Bacterial polypeptide expressing nucleotide sequence isolated from the Sargasso Sea
gaaaaatctcctaaaccaatagcttcatgcgctatgccagctgcagatggcatggtaatcaaaacaaatacaccaaatatagaaaaatctagaaaaggtgtgatggaatttttattagctaaccatcctttggattgtcctgtttgtgatcaaggtggagaatgtgatttacaagatcaatctatgttctatggaattgataaatcaagatttaaagaaaataaaagagcagttccagataagaatatgggtcctttaataaaaactcaaatgacgagatgtattcattgcacaagatgcataagatttgcaactgaaattgcaggtgttcctgaattaggtgcaattggaagaggtgaggacatgcaaattaccacttatttagaaaaatcaatacagtcagagctttctggaaatgttattgatctttgtcctgtaggagcattaacctcaaagccttacgtatttgaggcaagaccttgggaattaaaaaaaacagaaactattgatgtaatggatgcggttggatcaaatataagagttgatacttatgattgggaggtgaaaagagttttgccagttattaatgaggaaattaatgaagaatggatttcagataaaacaagatatgcatgcgatggtttacttaatcaaagacttgatacaccttatatcaaatataataataaatttgaaaaagccacttgggatgaggtttataaaattattaaatctaaaattcaaaatacaaaaaaagaaaatatatgtggttttgtcggaga

SEQ ID NO: 221478 - DNA, 501 bp, Unknown
  Bacterial polypeptide expressing nucleotide sequence isolated from the Sargasso Sea
aatgccaaaaatgattattgataatcaagagattaattttgaaaatggtatgacagttatgcaggcttgtgagatagcaaatgttgaaattccacgtttctgttatcatgataaattatcaatagctggaaattgcagaatgtgtcttgttgagatggaaaaatcaccaaaacctattgcttcatgcgccatgccagcaggtgaaggcatggttataaaaactaatactgatctagtaaaaaaagctagaaaaggagtaatggaatttttactaataaatcatcctttggattgtccaatttgtgatcagggaggtgagtgtgatttacaagatcaagcactctactatggttttgataaatcaagatatatagaaaataaaagagcagttaaaaataaacatatgggacctcttgttagtacaataatgactaggtgtatacattgtactagatgtgtgcgcttttcaactgaagtggctggagttgatgatttaggttt

SEQ ID NO: 221479 - DNA, 427 bp, Unknown
  Bacterial polypeptide expressing nucleotide sequence isolated from the Sargasso Sea
atgttaagagaagaagacagaatttttaaaaatttatatggttttgatgattggcatcttgaaggagctttaaagaggagtatttggtcaaataccaaagaattaatatctaaaggtagtgattatattatagatcaaattaaaaaaagtgatttaagaggcagaggtggagctggttttcctgcaggcttgaaatggtcttttatgccaaaaaattctggaaaatctcattatttagttgttaatgctgacgagtcagagcctggtacttgtaaagatagagaaatattaagaaatgatccacatttattactagagggttgtttgctagctagttttgctatgcatgcccatacatgctacatatatattcgaggagagtattatagcgaatattcaaatttacaaaaggccattgatgaagctt

SEQ ID NO: 221480 - DNA, 478 bp, Unknown
  Bacterial polypeptide expressing nucleotide sequence isolated from the Sargasso Sea
aatgctgaaaataaaagttaataatattgatttagaagttgaagaaggtctaactgttttacaagcttgcgagcaagcaggagtagaaataccaagattttgctatcatgaaaaattatcaatagcaggtaattgcaggatgtgtttggtcgaaatagaaaaatcacctaagccagtagcatcatgtgcaatgccagcttctgaaggtatgaatattaaaacaaatactccttttattgagaaatcaagaaagggtgtaatggagtttcttttggcaaatcatcctttagactgtcctgtttgtgatcaaggaggcgaatgtgatcttcaagatcaatcaatgttttatggaatagacaagtctagatataaggaaaataaaagatttgtaccagaaaaaaatatggggcctttaattaaaacacaaatgacaaggtgtattcattgtacaagatgcattagatttgcaactgaggtt

SEQ ID NO: 221481 - DNA, 385 bp, Unknown
  Bacterial polypeptide expressing nucleotide sequence isolated from the Sargasso Sea
atgcttaaggatcaagatagaatttttgtaaatttatataatgatttaggacctgatataaattcagcaattaaaaggggagattggactaaaacaaaagaaattatatccaaaggcaaggagtggattataaatgaaataaaaacctctgaattgagaggaagaggtggtgcaggattcccgaccggtttaaaatggtcttttgcgcctaaagaagttggttcaagacctcattatcttataataaatgcagacgagtcagaacctggaacttgcaaagatagagacattttaaggtttgaaccacataaacttatcgagggttgtttaatatcagcttatgcagttagtgctcacatatgttatatttatgttcgtggtgaat

SEQ ID NO: 221482 - DNA, 341 bp, Unknown
  Bacterial polypeptide expressing nucleotide sequence isolated from the Sargasso Sea
aatgttacaaaataaggataaaatatttaataatatttttggttttcaaagcaataaactatctcatgctttaaaaagaggagattgggataaaacaaagaaaattttatctttggatcatgatgtgataattgaaaaaattaaaaactctggtctacgtggaagaggtggtgctgggttttcgacaggtctaaaatggtcatttatgccaaaaactcttggagagcgtccacattacttggtagtaaatgcagacgaatctgaacctgggacatgtaaagatagagatattattaggcatgaaccgcacaagttaatagagggatgtttaatagcatctt

SEQ ID NO: 221483 - DNA, 745 bp, Unknown
  Bacterial polypeptide expressing nucleotide sequence isolated from the Sargasso Sea
ctaaaaaaagctctgcaacgaactccagaagaagtccacagcgaagttcgcgacgcgacacttctaggtcgtgggggagcgggattcccggctggagtcaaatggggattttgtcccccagaagtgtggccacggtacttggtggttaacggtgatgaatccgagcctgggacatataaagaccgtctgttgatggaattggatcctcaccaactcatagaaggatgcttaattgcttgttatgcagttgggttaagccaatgcttcctctacatccggggagaaatggcagtagcgcaggaacgagtcgcccaggcgctcaacgatgcctacgcagctggctacgtgggtaaaaatatcctggggactgaattttcagttgacatagttcttcactggggtgcgggagcctacgttgtgggtgaagagacagcgctaattgaaagtcttgaaggtaaccgcgggatgccgcgactgaagcctccctactttccagcgtcgatcgggttgtatgggcaaccaacgatcgtcaacaatgttgaaactctgtcaaatctcccatggatactcgagcatggagctcaggcttttaccgcaattggcacagagacatcgccgggcacgcgcatggtggcggttagtgggcacgttaaacgtccaggggtttatgaaatcgtcaacggcaccacaacattccgtgacttgctctacggaatcgacatgtgtggcggcattcgtgatgaca

SEQ ID NO: 221484 - DNA, 658 bp, Unknown
  Bacterial polypeptide expressing nucleotide sequence isolated from the Sargasso Sea
tctgccggctgttgtcggtatagcggcagcagcggttattgcattatcgcttcttgtattcactgcacgcagccgaggacatgcagagacacctcgtcctattgatatggtgaccacactctggcaatgggcaactgttgaggatgcgtatgcccctgctcatgactcacacgctgcagttccagggacggctgttggtgaagatgcttatagtgctcgcccattttcaatttcgattgccatgcgacttgatccgcttacagcaacaatgcttgtaattattacgagtgttggacttctggttgccatctactcaataggttatatgcatgacgatcctgggtacccacgattcttcgcgctcgtagccatgtttgttttttcaatgtcaatgctcgtggcagcaagtaatttcctcttggtctatgttttctgggaggccgtcggcgcgtgtagctacctactcattggcttctggtttcaaaaaccggaggcggcaaaggctgctaaaaaagcttttcttgtgaatcggataggagacttcggtcttgccgtaggtgtcttcctgctctggcttacctacggaaccctcgattttcatgacactttttctcctgacggaacgattctgcctggcattcttgggcagactcggctt

SEQ ID NO: 221485 - DNA, 809 bp, Unknown
  Bacterial polypeptide expressing nucleotide sequence isolated from the Sargasso Sea
ttggtgaaaaaagctagacaaggtgtaatggaatttttgttagcaaatcatcctttagattgtccagtatgtgatcaaggaggagaatgtgatttacaagatcaatctatgttttatggagtagataaatcaagatataaggaaaataaacgcgaagttccagaaaagtatatggggccattaataaaaactcaaatgacgagatgtatacattgcacaagatgcatacgttttgctactgaggttgctggtattccagagcttggtgctataggacgtggagaaaatatgcagattacaacttatttagaaaaatcactggagtctgagctttctgctaatgttatagacctatgtcctgtaggcgccttaacatcaaaaccttatgtttatgaagctaggccatgggaattaaaaaaaacagaaacaattgatgtaatggatgcagttggttcgaatattagagtcgatacatatgggtgggaagttaaaagaattttaccaagagttaatgaagatataaatgaagaatggatttcggataaaaccagatatgcatgcgatggaattaaaaatcaaagattagatacaccttacatgaaaaaaggggaaaagcatgaaaaaacatcttggaatactgccttaaattatatcgtaaaaaatatcaacaatactcaatctgaaaaaatagctggtctaactggcgatttagtaaatatggaaaccttgttcattattaaagaattttttcaaaaaactattaagtcaaaaaatttggaatctcgtgcagatgagtattacgttaatgt

SEQ ID NO: 221486 - DNA, 400 bp, Unknown
  Bacterial polypeptide expressing nucleotide sequence isolated from the Sargasso Sea
gatgcttaaggaaaaagataaaatttttaaaaatttatacggttttgaagactggaaattagaaggtgctaaaaaaagaggtatttggtcaaatactaaagaactaattaaaattggtagtgaaaaaattgttgaggaaattaaaaatagtcaattaagaggaaggggaggagcaggtttccctgcaggtctaaagtggtcatttatgccaaaagactctggaaaagatcattacctagttgttaatgcagatgagtcagagccaggcacatgtaaagatcgagaaattatgagaaacgacccacatcttcttttagaaggttgtttagttgcgggctttgcaatgcatgcgcatacttgctatatttacataaggggtgaatattattctgaatcttct

SEQ ID NO: 221487 - DNA, 338 bp, Unknown
  Bacterial polypeptide expressing nucleotide sequence isolated from the Sargasso Sea
aatgcttaaagaccaagacagaatttttaaaaatttgtataatgatatgggagcggatgttaaatctgctcagacaagaggtgattgggtaaatacttcagaattgatagcaaaaggaagagattggatcataaatgaggtaaaggaatcgcagcttagaggaagaggaggtgccggatttcctacaggtttaaaatggtcttttgctcctaaagaagtcggatctagacctcattatttagttattaatgcagacgagtcagaaccaggtacctgtaaagatagggatattctgagatttgagcctcaaaaattaatcgaaggatgtctaatagcct

SEQ ID NO: 221488 - DNA, 535 bp, Unknown
  Bacterial polypeptide expressing nucleotide sequence isolated from the Sargasso Sea
atgagtgatcaaattaacataaatgttaatggttcagaaatcgtaacagattctgatcagctaatcattgaagcttgtgaagattctggcattcatattccaagattttgctggcacaaacgcatggatccagttggcatgtgtcgcatgtgcttagttgaaattgaaaccccgcgtggaaaagctctagtcccctcatgcactactaaagtttcagaagatttagttgtagatactgaatcagaagttgtaaaaaaagctcaagaaggtgttttagaatttttattaataaaccatcctttggattgtcctgtatgcgataaggctggagagtgccctttgcaagaccaaactatggcttatggacctggtgagtctcgatttgttgaagataaaagacattttgaaaaacctataccaatttcagaaataattctccttgatagagaaagatgtattttgtgtgcacgttgtaccagattttctgatgaaatatctggtgatccgttaattgaatttattcaaaagaggtaac

SEQ ID NO: 221489 - DNA, 312 bp, Unknown
  Bacterial polypeptide expressing nucleotide sequence isolated from the Sargasso Sea
aatgcttaaagacgaagatagaatttttcaaaacttatataatgatggaggtgcagatataaattcggctttagcaagaggtgattggagcaatacaaaagaaatttgtgaaagaggaagagattggataattaatgaaattaaatcttctgaattaagaggaagaggtggagcaggttttcccacagggttgaaatggtcatttgcgcctaaggaagttggatcaaggccacattatttagtaataaatgcagatgaatctgagccaggaacatgtaaggatcgagatctattaagatttgaacctcataa

SEQ ID NO: 221490 - DNA, 540 bp, Unknown
  Bacterial polypeptide expressing nucleotide sequence isolated from the Sargasso Sea
tatgcctaaaattataattaatgataaagaaatagaatttgaagaaggcatgactgtattacaagcatgcgaactatcaggagcagaaattccaagattttgttaccacgaaagactttcaattgcaggaaactgtagaatgtgtttagttgaaatggaaaaatctcccaaaccaattgcatcttgcgccatgcctgcaactgaaggaatgaatattaaaaccaatactcctttagttgataaagcaagaaaaggagtaatggaatttttattagcaaatcatccactggattgtccagtttgtgaccaaggtggagaatgtgatttacaagaccaatcattattttatggatttgatcattcaagatatcttgaaaataaaagacaagtaaaagagaaatacatgggtcctctaattaaaactcaaatgacaagatgtattcactgcactaggtgtatacgtttcgcgactgaggtagcaggtatttcagaacttggagcaataggaagaggtgaagatatggaaattactacttattt

SEQ ID NO: 221491 - DNA, 517 bp, Unknown
  Bacterial polypeptide expressing nucleotide sequence isolated from the Sargasso Sea
aatgcctaaaattactatcaatggaaaagaaatagaatttgagaaagggatgacagttcttcaagcctgcgaacttgctgacgtagaaattccaagattttgctaccacgaaaaattatctatagctggaaattgcagaatgtgtttagttgaaatggaaaaatctgcaaaacctatagcatcatgtgcaatgccagcagccgagggcatgaatattaaaacaaacactccttttgttgaaaaagctagaaaaggtgtaatggaatttttattagctaatcatcctttggactgtccggtttgcgaccaaggcggtgaatgtgatcttcaagatcaatcaatgtactacggagttgataaatcaagatttttagaaaataaaagacaagtcaaagaaaaatatatgggacctttaattaagacacagatgactagatgtattcactgtacaaggtgtgtaagatttgcaactgaagtcgcaggagttccagaaattggagccataggtaggggagaa

SEQ ID NO: 221492 - DNA, 151 bp, Unknown
  Bacterial polypeptide expressing nucleotide sequence isolated from the Sargasso Sea
aatggcaaaagaaaaaaaaacactaaatttaaattttggaccacaacatcctgcggcacatggagttttaagattaatactccaattagatggagaagttgttgaaaaagctgatcctcatataggattattgcaccgaggtactgaaaag

SEQ ID NO: 221493 - DNA, 795 bp, Unknown
  Bacterial polypeptide expressing nucleotide sequence isolated from the Sargasso Sea
gcctggttgtgtaaccactgttatggacgggcaggtggtgcacacacagtcggatcaggcgcttaagaaccgacgtggggtccttgagttttacttggtgaatcacccactcgactgtccaatttgtgatatgtcgggcgaatgcaacctgcaggattatgtccacgcagaggggcgagaacagggcaggggtatcgaaccaaagcgagtgtttggtcgagatgatttcggaggtgatgtacttttttacggcgatcgatgcgtgatgtgcacgcgctgcgtgcgcttcatgagtgaagtagagcaggaccatcgattgacggttgtagagcgtggtaatcgttctgtaatagacacattcttcgaggaagggctcgacggaacagattggcacggcaacatagtggacatctgccccgtcggtgcgctcgtgtctaaagactttctccacaaggctcgtgcttgggacctctcgcatacagagtcgatctgcacgagttgctcgcagggctgcaacatcgatctccacactagagacaacctagtccaacggatcaagccacgtgagaaccttgatgtaaacgcctggtggatgtgtgactacggtcgtcacaattatgagtggatgaatcgtggtgatcgaattgaagtgcccttagatagatcgaacggcggctcaaaggttcttgggtggaaagatgcgcttcaatcgatcctcaaggccgctgaggtgagcgaaggctcggtcaaagccgtagcatctcccagcgcgtcaaatgaagacctcgcatcgtt

SEQ ID NO: 221494 - DNA, 873 bp, Unknown
  Bacterial polypeptide expressing nucleotide sequence isolated from the Sargasso Sea
aatggaatttttactagcaaatcatccacttgattgtccagtatgtgaccaaggtggggaatgtgatttacaagatcaatctatgtattatggaattgataaatcaagatttaaagaaaataaaagatatgtacctgaaaaatatatgggtcctcttataaaaactcaaatgacaagatgcattcattgtacaagatgtattagatttgcaaccgaagttgctggagttcctgaacttggagcaattggtagaggtgagaatatgcaaattactacttatttagaaaaagcaatggaatctgaactttcagctaatgttattgatttatgtcctgtcggagcacttacatcaaaaccttatgtcttcgaagcaagaccttgggaactaaaaaaaactgagacaattgatgtgatggacgctgttggatcaaatataagagtagatacatatggatgggaggttaaaagagttcttccaagaattaatgaggaaataaatgaggaatggatatctgataaaactagatatgcatgtgacggcttaaaaaatcaaagattagatactccctatgtaaagattaataataaattaaagtcatcaagttgggacgaagcttttaaagctgtatctgaaagagttgcaaaaacaaagtctgaaaaaattgctggctttataggtgatatgacaaatatggaaacaacatatgcagcaaaagatttttttgaaaaaacgattaaatctgaaaatttggaatctagatatgaaaaattatacattaatacaaatgtaagaagtaattatctattcaacagtaccattgaaggaatagaaaaaagtgatttaataattctaataggtacaaatccaagatt

SEQ ID NO: 221495 - DNA, 466 bp, Unknown
  Bacterial polypeptide expressing nucleotide sequence isolated from the Sargasso Sea
aatgcttaatgaaaaagataaagtttttcaaaaccttcatggttttcaagaacccttcttagagggagctttaaaaagaggttcctggtcaaacacaaaagaaattttgtctaaagatcaaaatgatattatcgaattagttaaatccagtcaattaagaggaagaggtggagctggattttctactggtcttaaatggtcattcatgccaaagaatactggtaaacagcattatttggttgtaaatgctgatgagtctgaacccggtacttgcaaagatagagaaattattagaaatgacccacatactcttgtagaaggttgcttgattgcttcatacgcaattcaagccactaaatgttacatatacataaggggcgaataccattacgaatatgtccaattagaaaaggcaattgaagaggcatatgaacgaggcttttatcggaaaaaatgcttgtggtag

SEQ ID NO: 221496 - DNA, 502 bp, Unknown
  Bacterial polypeptide expressing nucleotide sequence isolated from the Sargasso Sea
atgcttaaggtaaaagttaacgaaaaagaaattgaaattgaagaaggattaactgtcctgcaagcttgtgaaattgccggctatgaaatcccaagattttgttaccatgagaaattatctatagcaggtaattgtagaatgtgcttggttgaaatagaaaaatctcctaagcctgtagcatcatgtgctatgcctgtagcacaaggaatgaatattaaaacaaatacaagtatggttgaaaaagcaagaaaaggtgtaatggaatttttactagtaaatcatccattagattgtccagtatgcgatcagggcggtgaatgtgatcttcaagatcaatcaatgttttatggaatagataaatcaagatttaaagaaaacaaaagatatgttcctgaaaaatacatgggtccactaattaaaactcaaatgacaagatgtatccattgcacaagatgtatacgatttgcaaatgaagtagcaggtgtgcctgaattaggcgcca

SEQ ID NO: 221497 - DNA, 409 bp, Unknown
  Bacterial polypeptide expressing nucleotide sequence isolated from the Sargasso Sea
atgcttaaagacgaagatagaatatttaaaaatttatataatgatctcggttgggatattgaagcagcaataactcgaggcgattggtcgaaaacaaaagaattaatttcaaaaggaaaagattctatcattaaagaagttaaagaatcagaattacggggcagaggtggtgcaggatttccgacaggacttaaattatcttttgccccaaaagaaattggatcaaggccacattatttagttattaatgctgatgaatctgaaccaggaacatgcaaagatagagatattttaagatttgagcctcaaaaacttatcgagggatgcttaatcactggttattcaattagtgctcatatctgttatatatacattagaggtgaatactttagagaaggccaaagataaa

SEQ ID NO: 221498 - DNA, 343 bp, Unknown
  Bacterial polypeptide expressing nucleotide sequence isolated from the Sargasso Sea
atgcttaaagacgaagacagaatatttcaaaatttatacaacgactttggagcagaattggactctgctaaaaaacgtggagactggctagaaactaaggaaatttttaataaaggtcgaagttggataattgaagaaattaaaacctctcaattgcgtggtcgtggtggagcaggttttccaacaggtttgaaatggtcttttgcccccaaagaagtaggttcgaaacctcattatttggttataaatgctgacgagtctgaaccaggaacgtgcaaagatagagatattttaagatttgaaccccataaattaatagagggatgtctaatagcttcatacg

SEQ ID NO: 221499 - DNA, 493 bp, Unknown
  Bacterial polypeptide expressing nucleotide sequence isolated from the Sargasso Sea
atgcttaaattaaaaattaatggctcggaaatagaagttgaagaaggtcttacagttctacaagcatgtgaacaggctggagtagaaataccgaggttttgttatcatgaaaaattatcaatagcaggtaattgcagaatgtgtttagttgaaatggaaaaatcacctaaaccaatagcctcatgtgctatgcctgtttttgagggaatgaatatcaaaacaaatactacaatggtagaaaaagcaagaaagggagtaatggagttcttgttaactaatcatcctttagattgtccagtatgtgatcaaggaggagaatgtgatttacaagatcagtctatgttttatggagtggataaatcaagatttaaagaaaacaaaagaaatgttcctgaaaaatatatgggaccattaattaaaacacaaatgaccagatgcattcattgtacaagatgtattaggtttgcaacagaagttgcaggtgtgacagagt

SEQ ID NO: 221500 - DNA, 844 bp, Unknown
  Bacterial polypeptide expressing nucleotide sequence isolated from the Sargasso Sea
aatgtgtttagttgaaatggaaaaatctgcaaaacctatagcatcatgcgcaatgccagcagctgagggcatgaatattaaaacaaacactccttttgttgaaaaagctagaaagggtgtgatggaatttttattagctaatcatcctttagattgtccggtttgcgaccaaggcggtgaatgtgatcttcaagatcaatcaatgtactacggagttgataaatcaagatttgtagaaaataaaagacaagtcaaagaaaaatacatgggcccactaataaaaactcaaatgacgagatgtatacattgtacaaggtgtgtgagatttgcgacagaagtcgcgggcgttcctgaaataggggcaataggaagaggtgagaatatggaaataacaacatatttagaaaaagccatggagtcagaactttctgcaaatgttatagatttatgtccagtaggagctcttacttccaaaccgtacgcttttgaggctcgaccttgggaacttaaaaaaactgaaagcgtagacgtgatggatgcagtcggctcaaatataagagtcgatacttataattgggaagttaaaagaatattaccaagacttaataacgatattaacgaagaatggatttcagataaaacaagatattcatgtgatggcttattaaaacaaaggttagatgtgccatacataaaaaaaaataataaatttcataaatctacttgggacgaagccatttcattattagtagaaaaaattaaaacattaaacccagatgaaataggcggtcatatcggtgatatggttaatttagaaaacgctctaagctttaaaaatttttct

SEQ ID NO: 221501 - DNA, 714 bp, Unknown
  Bacterial polypeptide expressing nucleotide sequence isolated from the Sargasso Sea
gatgagtgcagtgcttctaccgataatgccaccgctgatcgcggccatggcgttgctggtcctgcgccggggctccacggcgctggttctcggcggggcgacgttgagtctgggcggcagtctatggttactgacccgggtcgccggcgggcaggccgaaaccctgcttctgccggggctgccagacatgccgcttcgaatggttgccggacctctggaagcgctgttgacggtggcggtggccaccgtaggcacgttcgtgctgatttatgcagttggttatatgaagcgggagtccggcctgtgccgcttctacgccgtaatgtccctgttcctggctgccatgcaggcgctggtgctgtccggcgactgggttctgttgctggcggcctgggaattgatcggtttgtgcagttacctgctgattggcttctggttccagcgacccgaggccgcggatgccgccggtcgcgctttcctctacactcgtagcgccgatctgggtttgtacgtggcggtatttatgctgattgggtcggccggtaccggcgagattgccgcctccctggaggccggcggcagtgcctcgaccgccgcggggctttttgtgctactggccgccatgggtaagtcggcccaggtccccttgcaggactggcttatgcgtggcatgggcggggcccgacaccgggtctcggcgctgctgcactcggc

SEQ ID NO: 221502 - DNA, 370 bp, Unknown
  Bacterial polypeptide expressing nucleotide sequence isolated from the Sargasso Sea
aatgcttaaagtaaaagtaaatgatattgaggtagaagttgaagaaggattaactgtccttcaagcttgtgaaaaagctggagcagaaattccaagattttgttatcatgaaaaattatctatagcaggtaattgtagaatgtgtttagttgaaatggaaaaatctcctaaacctattgcttcatgtgctatgccagctgctgacgggatgaatataaaaacgaatactgctctagttaaaaaagctcgaactggagtaatggaatttttattagctaatcatcctttagattgtccagtgtgtgatcaaggtggtgaatgtgatctccaagatcaatctatgtattatggaatagataaatcgagattc

SEQ ID NO: 221503 - DNA, 442 bp, Unknown
  Bacterial polypeptide expressing nucleotide sequence isolated from the Sargasso Sea
atgcttaaattaaaagttaatgatactgaagtagaagttgaagagggactaacagttcttcaggcttgcgaaaaagcaggtgtagaaataccaagattttgctatcatgaaaaattatcaatagctggaaattgtagaatgtgtttagttgaaatggaaaaatctcctaaaccaatagcttcatgcgccatgccagctgcagatggcatgataattaaaacaaatacaccaaacatagaaaaatctagaaaaggtgtgatggaatttttattagctaaccatcccttggattgtccagtttgtgatcaaggtggagagtgtgatttacaagatcaatctatgttctatggaattgataaatcgagatttaaagaaaataaaagagcagttccagataagaatatgggtcctttaataaaaactcaaatgacaagatgtattc

SEQ ID NO: 221504 - DNA, 415 bp, Unknown
  Bacterial polypeptide expressing nucleotide sequence isolated from the Sargasso Sea
atgcctaaattgaaagtaaatgaaattgatattgaagttgaagatggtctaactgtacttcaagcttgtgaacaagctggtgtagagataccaaggttttgttatcacgaaaaactctctatagctgggaattgtcgtatgtgcttggttgaaatggataagtcgccaaagccaatagcatcatgtgcaatgccggcagctgaaggaatgattataaaaacaaatacagaaaaagttgaaaaagcaagaaaaggtgtaatggagtttttgctagctaaccatccattagattgtcctgtatgcgaccaaggtggggagtgtgatttacaagatcaatcaatgttttatggaattgataaatcgagatttaaagagaataagagatttgtgcagaaaagcatatggcccattaata

SEQ ID NO: 221505 - DNA, 649 bp, Unknown
  Bacterial polypeptide expressing nucleotide sequence isolated from the Sargasso Sea
attgccgaaaaaggtttattttggaaaacccactttaaatcataatattgaaactttattttggattccagacattttatcaaaaggggctgattggtttgcaaatttaggttttaataaaaatcacaagggtttacgttcttatagtgtttctggaagggtttcaaaccctggtgtcaaagtagcaccttcaggcatacctgtaaaaaaacttatagatgagtactgtggtggaatgttacctgggcataagttaaaagcattttttcctggaggtgcttcaggaggtatttttcctgctaaaatgtgtgatatgggtttggattttggtgtatttgaaccatttgggggatttgtaggttctcatgctgttgtcattttatctgatcaagatagtattttagatgctgtaattaatacaattaaattttttaaacatgaaagttgtggacaatgtactccatgtagaaatgggacagaaaaattaatatcattactatcaaaaagcaataaagaagttgaactttatgaagacttaatgatagtaatgcgcgatagttcaatttgtggtttagggcaagctgctacaaattgtttgaaccatttgttaaagtattttccagaggaattaaatggcactagacgataa

SEQ ID NO: 221506 - DNA, 561 bp, Unknown
  Bacterial polypeptide expressing nucleotide sequence isolated from the Sargasso Sea
aatgcttaaagatcaagatagaatatttaaaaacttatacaatgatatggggtcagatgtcattgcctctcagaaaagaggagattgggttaatactaaagaaataacggataaaggaagagattggattataaatgagataaaagaatctcaactgagaggtagaggaggagctgggtttccaacaggattaaaatggtcatttgcaccaaaagaaataggttcaagaccacattatttggtaataaacggcgatgaatcagaaccgggtacttgtaaggatagagatattttaagatttgagccacataagttaatagagggttgtttaattgcatcattcgcagttcaagcacatgtttgttatatctatattagaggtgaatattttgttgacggtcaaaaacttcaagcagctatagatgaagcttatgaaaaaaaattaataggtaaaaatgctgcaggaactgggtgggacttagatatttatattcattacggtgctggcgcatacatatgtggagaagaaacagctttattggaaagtatagaaggtaagaa

SEQ ID NO: 221507 - DNA, 721 bp, Unknown
  Bacterial polypeptide expressing nucleotide sequence isolated from the Sargasso Sea
tctgtttggtgtagagtcagtggatgctgcattcctaatagtgctggcaccgttcatagcattccctatcatcctagtgacaggtcaaatctacaacggtaataaaacctggaagaacactctgaaggagggaggggtgattggcctctctgcactcctcgtctcactttcgacagccgtctgggttctagtggattacctcagaggggctcgagagatatcaaaggaggcaggaggtaggcaagcctccacgtggattgattggatctctttcgatgtcctgcaatccgactacaccatgacgacagagagaatcatcggcgtgggagtctggatcgactcaatcacgctgatgcttctattcgtcgccaccttcctatgcttcctaatttgctggttcagccttggctacatgaacactgatcccataaatgaggacagaaaccaccggttctacgccgaattcgtcctcttcgcaatggggatgttcggaatggtactcgctgacaacttcctatggctcttcatattctgggagatcatgggactctgctcgtacctcctgataggattctacttctggaaggagagtgctgcctatgccgcaaagaaggccttcttgacaaccagggtaggcgacgtcttcctaatggtaggcctactcatactctacgacatttacggatctctcgagttctcagtgatattctcccgaccctca

SEQ ID NO: 221508 - DNA, 877 bp, Unknown
  Bacterial polypeptide expressing nucleotide sequence isolated from the Sargasso Sea
gaattagaaaaggcaccaaaacctattgcttcatgtgcaatgccagcggctgaaggtatgaaaattaaaactaataccgcttttgttgaaaaagcacgaaaaggtgtaatggaatttttacttgctaaccatcccttagactgtccagtttgcgatcagggaggtgagtgtgatttacaagaccagtctatgtactatggagttgataaatcaagatttgttgaaaacaaaagacaggttaaggaaaaatatatgggacctttaataaaaactcaaatgacaaggtgtattcattgtacaaggtgcgtgagatttgcaactgaggttgcaggtgttccagagataggagcgattggtcgaggagagaacatggaaatcacaacttatttagaaaaagcaatggagtcggagctttcggcgaatgttattgatttatgtccagtcggcgcgcttacatctaaaccatacgcatttgaagctagaccatgggaactcaaaaagacagaaagcatagatgtcatggatgctgtaggctcgaatataagagtcgacacttataattgggaggtgaaaagaattttaccaagacttaacaacgatattaatgaagaatggatatctgataaaactagatattcatgcgacgggttgcttaaacaaagattggatgtaccctatataaaaaaaaacaataaacttcaaaaatcttcttgggatgaagctatttcgactttaattgaaaaacttaaaacaactccaccaaatgaaatcggcggacatattggagatatggtaaacttagaaaatgccttaggttttaagaaattattctctctatttaaaagtgataacttagaatttagagagaaaaaatttt

SEQ ID NO: 221509 - DNA, 516 bp, Unknown
  Bacterial polypeptide expressing nucleotide sequence isolated from the Sargasso Sea
aatgttaaaagttaaagttaatgatattgatatcgaagtagaagaaggtctaacagttttacaagcttgtgaaattgcaggtgctgaaataccaaggttttgttatcacgaaaaattatcaattgccggaaactgcagaatgtgtttagtagaaattgagaaatcaaaaaaaccagttgcctcatgtgctatgccagttacagagggaatgaatattaaaacaaatacaaaacttgtagaaaaagccagaaaaggagtaatggaatttcttttagctaatcaccccttagattgtccagtttgcgatcaaggtggagaatgtgatttgcaagatcaatcaatgttttatgggattgataaatcaagatttaaagaaaataaaaggtttgtacctgaaaaatatatgggtccattgataaaaactcaaatgacaagatgtatacattgtacacgctgcgtaagatttggcactgaagtaggaggggttcagagattggtgctattggtagaggtgag

SEQ ID NO: 221510 - DNA, 466 bp, Unknown
  Bacterial polypeptide expressing nucleotide sequence isolated from the Sargasso Sea
aatgcttaaagatcaagatagaatttttaaaaacctgtataatgatttaggaactgacatagcatcagttcaaaaaagaggtgattggttaaataccaaagatcttactgataagggaagagattggataattaacgaaataaaagattcacagctcagaggtagaggtggtgctggatttccaacaggattaaaatggtcttttgcgccaaaagaaattgggtcaagaccacattacttagttattaatgcagatgagtctgaacctggtacttgtaaagatagagatatattaaggtttgagcctcataaactaatcgagggttgtttaattgcttcatatgcagttcaagcacatgtttgttatatttatattaggggtgaatattttattgagggacaaaagcttcaggctgcaattgacgaggcttacgaaaaaaaattaattggtaaaaacgctgcagga

SEQ ID NO: 221511 - DNA, 442 bp, Unknown
  Bacterial polypeptide expressing nucleotide sequence isolated from the Sargasso Sea
atgcctaaactaaaagtaaatgacattgatattgaagttgaagacggtttaaccgtacttcaagcttgtgagcaggcaggagaagaaataccaagattttgttatcacgaaaaactttctatagctggaaattgtcgtatgtgtttggttgaaatggaaaaatctccaaaaccaatagcatcatgcgcaatgcccgcagccgagggaatgattatcaaaacaaatacagaaaaggttgagaaagcaagaaaaggtgtaatggaatttttactagctaaccatccactagattgtccagtatgtgatcaaggtggtgagtgtgatttacaagatcaatcaatgttttatggaattgataaatcaagatttaaggagaataaaagatacgtaccagaaaaatatatgggaccactaattaaaactcaaatgacaagatgtattc

SEQ ID NO: 221512 - DNA, 910 bp, Unknown
  Bacterial polypeptide expressing nucleotide sequence isolated from the Sargasso Sea
aaaataaaaactaatactaaaatggttgagaaagcaagaaagggtgtgatggaatttttacttgtgaatcatcctctagattgcccagtttgtgatcaaggaggagaatgtgatttgcaagaccaatcactttattatggttttgatggttcaagatttaaagaaaacaaaagattagtaaaagacaaatacatgggtcctctaatcaagactcaaatgacaagatgtattcattgtactcgatgcattagatttgcgacagaagtagctggagttcctgaacttggtgccattgggcgcggtgaagatatggaaataacaacatatttagaaaaatctatggagtcagaactttctggaaacgtaatagatctatgtccagttggcgctctaacttcaaaaccatatgcgtttgaagcaagaccatgggaattaaaaaagacagaaagtatagatgttatggatgctgtcggttcaaatataagagttgacagttatggttgggaagtaaaaagaattttaccaagactaaacaacatgatcaatgaagaatggatttctgacaaaacacgttacgtttgtgacggattattaaaacaaagattagacaaaccttatattagacgtgatggacaattagccgaatccaattgggatgatgtaatagagttaatttgttcaaaaataaattcaacagaccctaaacgtatcgccggacatgttggcggaatgtgtagcatggaaacaataaattcttttaaaaaatttctgatttcactgggaactactaattttgagtttagggaaaaacctttttacataaatccagatcagaaaataaattacctatttaattcttctattcagggaatcgaaaattctgatcttttgcttttgataggtgctaatc

SEQ ID NO: 221513 - DNA, 325 bp, Unknown
  Bacterial polypeptide expressing nucleotide sequence isolated from the Sargasso Sea
gatggatatttatattaataataataaataccaggcattagatgatgagactatcatacaagttgctgaccgtcatgatattcatatcccaagattttgctatcataaaagattaagtgttgtagcaagttgtaggatgtgtcttgttgaagttgaaggcgctaaataccctcaaccggcatgctctacaatcgtaagagatggtatgaaagttaacactgtaggatcggttacagaagatgctcaaaaaagcactatggaattcttgctaattaatcatccgctcgattgtccagtttgcgaccaatctggcgaatgtgaactt

SEQ ID NO: 221514 - DNA, 755 bp, Unknown
  Bacterial polypeptide expressing nucleotide sequence isolated from the Sargasso Sea
cggagcgggatttccgaccgggttaaagtgttgtttcatggccaaaaatacaggcaaaccgagttacctcatttgtaatgcggatgaatccgaacccggaacctgtaaagaccgtgagttaatgcttaaggatcctcatcagtttcttgaggggatgatgattggttgctatgcgatcaactgtaaacacggatacatttatgttcgaggagagtatttcccttcgatcaaaagtttgaatgaagccatcgatgaactttatgcggcgggtcttttgggcgaaaatgctcttggtaaagggaaacgcctcgacctcacagttcataccggtgcaggggcgtacatctgtggtgaagaatctgcactgctcgattcattggagggcaaacgcggtcatcccagggtgaaacctccctttcctgcagtctcaggtttcaatgcatgtccgacaaccgttaataatgtcgagacccttacctgcctgcctttcatcgtcaatgaaggggcggacgccttcaaggatttcggtcctgagaataatgcagggactcatcttgtcagcctcagcggacacgtagaaaaacccggggtttacgaagtaaggatggatgtcagcctgaaacagatcatctacgatctgggcggaggaatccggggagggaaagctctcaaaggagttattccgggaggtgcgtcatcgccggttttgaccgcaaaagagattgatgtcgaatacagttttgatgctctcggaa

SEQ ID NO: 221515 - DNA, 355 bp, Unknown
  Bacterial polypeptide expressing nucleotide sequence isolated from the Sargasso Sea
gaccaagatattattaagtgtatgcaaagaatagctagattttataagcatgaaagttgtggacagtgtacaccttgcaggaaaggatctggatggatgtggagaatgttggagagaatggcagcaggcgaggcaacttcagatgaagtggatatgctttttgatgtaacaaaacaaatagaaggtcatactatttgcgcatttggtgagggttcctcttggccagttcaaggattaatcagacattttaaagatgaaatacttgaaagaaataaatttgatccaatagttaaaaaacaaaaaaatattccatacttagttgatcaacatttattagaaaaggacaatgcctaaa

SEQ ID NO: 221516 - DNA, 436 bp, Unknown
  Bacterial polypeptide expressing nucleotide sequence isolated from the Sargasso Sea
atgcttgaggataaagatagaatttttaaaaatttatataatgatttaggtgctgacataggctcggcaaaaaatagaggagattggtcaaatacaaaagaaatttgctctaaaggacgagactggataatagaagaagtaaaaaaatcagagttaaggggtagaggtggcgcgggttttccaactggtttaaaatggtcttttgccccaaaaaaagtgggaaccaaacctcattacttagttattaatgcggacgagtctgaacctggcacatgcaaagatagagatattttaagatttgaacctcataaacttattgagggttgtttaattgcgtcatacgcagttaatgctcataaatgttacatttatttgagaggagaatattacaatgaggggttaaaacttcaaaatgcaattgatgaggcttataaag

SEQ ID NO: 221517 - DNA, 379 bp, Unknown
  Bacterial polypeptide expressing nucleotide sequence isolated from the Sargasso Sea
atgcttaaagacgaagatagaatatttaaaaatttatataatgataaccaaatagatattgatacatctataaagaatggagactggcaagatgttaaatcaattttttcaaaaggaagagaatggattatcaatgaggtaaaatcttcagaattacgtggaagaggcggagcaggttttcctacaggtttaaaatggtctttcgcacctaaagaagtgggttcaagaccacattatttagttattaatgctgatgagtctgaaccaggaacatgcaaggatagagatatattaagatttgaaccacaaaaattaattgaaggttgtttatatgcttcttacgcagtgaacgcaaagagagtgctatatatatattaga

SEQ ID NO: 221518 - DNA, 514 bp, Unknown
  Bacterial polypeptide expressing nucleotide sequence isolated from the Sargasso Sea
aatgcttaaacttaaagtaaatgatattgatgtagaggtagaagaaggaactacagtgttgcaagcttgtgaacaagctggagcagagataccaaggttctgttatcacgaaaaattatcaatagctggaaattgtagaatgtgtttagttgaaatggaaaaatctcctaagccaatagcatcttgtgctatgcctgctgcagaggggatggtacttaaaactaatactgaaaaagtgaaaaaagcaagaaaaggtgtaatggaatttttactagcaaaccatccactagattgtccagtatgtgatcaaggtggggaatgtgatttacaagatcaatctatgtattacggaattgataaatcaagatttaaagaaaataaaagatatgtacccgaaaaatatatgggtccactaattaaaactcaaatgacaagatgtattcattgtacaaggtgtattagatttgcaaccgaagttgctggagttcctgagcttggagcaattggtagaggt

SEQ ID NO: 221519 - DNA, 601 bp, Unknown
  Bacterial polypeptide expressing nucleotide sequence isolated from the Sargasso Sea
tgctatcaaaagcatggtggttataaaaccatgaaaaaggctttcaagcttaaggctaagaaaaccaaagatggagtaaaaactcctcaagagataattcgaaatgaagttcttgtttcagggctaagaggtcgagggggtgctggcttttctgctggtatgaaatggagctttgtagatcgtaaatcagggaagccaatttatttaatatgcaacgccgatgaatctgagccaggcacatttaaagaccgtcaaattatatacaaggaccctcaccaacttatcgaaggtatggtaatttcctgttacgctaatgatgttaatctggcttatatttatattagaggggagtttcctgaaggtgcaaaaatattaaatcgagctatagcagaggcccgtaaagctggctatttaggtaaaggaatttgtggtactaattttaatttagatattcatgttcaccgtggagcgggagcttatatttgtggagaggaaaccgggctgattgagtctttggaaggaaaacgtccataccctcgaataaagcctccttactttccggctgtgctaggtctttatatgtgcccgaccatcgttaaca

SEQ ID NO: 221520 - DNA, 337 bp, Unknown
  Bacterial polypeptide expressing nucleotide sequence isolated from the Sargasso Sea
aatgcctaagataacaatcaatggaaaagaaatagaatttgagaaaggcatgacagttcttcaagcttgtgaacttgcagatgtagaaatccctagattctgttaccacgaaaaattgtcaatagccggaaattgccgaatgtgtttggttgaactggaaaagtcagccaagccaatagcatcatgcgctatgcctgcggcagagggaatgaatataaaaactaatacagcgtttgtagaaaaagctagaaaaggggtaatggaatttctacttgctaatcatcctttggactgcccagtatgcgaccaaggaggtgaatgtgatttacaagatcaa

SEQ ID NO: 221521 - DNA, 520 bp, Unknown
  Bacterial polypeptide expressing nucleotide sequence isolated from the Sargasso Sea
atgcttaaattaaaaataaatgaaaaggaaattgaagtagaggagggtttaactgtcctacaagcatgtgagcaggctggagttgaaattcccagattttgctatcatgagagactttcaattgctggtaactgtagaatgtgcttagtagaaatggaaaaatcccctaaacctatagcctcatgtgcaatgccagctgcaaacggaatgaatataaaaactaatacctcacttgtagagaaagcaagaaaaggtgttatggagtttttattggtaaatcatccattagattgtcccgtatgtgatcaaggtggtgagtgtgatttacaagaccaatccatgtattatggagttgataagtctaggtttaaagaaaataaaaggtacgtgcctgaaaaatatatgggaccactaatcaagacacaaatgacaagatgcattcattgcacaagatgtgtgagatttgcaacagaggttgccggtgttcctgagttgggtgctattgaagagggaagacatg

SEQ ID NO: 221522 - DNA, 568 bp, Unknown
  Bacterial polypeptide expressing nucleotide sequence isolated from the Sargasso Sea
tatgactttttgcaagttcaaaattaatgtcttaaataacgagattagcatatttgttcaagataaagatatactaaaaacattgatgttttttaaggataacccttcttttaatatgcatacactaattgacttaactgccgttgattatccaagtgaagagaaaagatttttaatcatttacaatcttttaagtgtttcaaaaaattttagaattaaggttaaaacctgggtttcaaccgataaccctattagctctgtgactgaaatttttccttgcgctaactggtatgaaagagaggcatgggatttatttggaattaggtttgttggacatccagatctgagaagaatcttgactgattacgattttgttggtcatcccctcagaaaagattttcctttaactggctttacacaagtaaaatttgacgatgaattaggtaaagttattagtgagccagttaaacttgagcaagaatatagaaactttgataatttaagcccttgggaaggaatgtcaaaatatcttcctggtgatgaaaaatctgagaaactcgatgactaa

SEQ ID NO: 221523 - DNA, 355 bp, Unknown
  Bacterial polypeptide expressing nucleotide sequence isolated from the Sargasso Sea
aatgcttaaagacgaagatagaatttttataaacttatataacgacttaggtcctgatctttcatccgctcaaaaaagaggagattggaaagaaactaaagagctaatcactaaagggagagaatggataataaatgaagtgaaattgtcggagctgagaggcaggggtggagcaggctttccgactggtcttaaatggtcatttgctcctaaagaagtaggctcgagaccacattatttagtaattaatgcagacgaatctgaaccaggaacttgtaaagatagagatattttaagaaacgaaccgcaaaaattaattgaaggttgtttattaacatcttatgcagttaatgca

SEQ ID NO: 221524 - DNA, 829 bp, Unknown
  Bacterial polypeptide expressing nucleotide sequence isolated from the Sargasso Sea
aaaacctgttgcgtcttgtgctatgcctgttgttgatggcatgaatattaaaacaaacactgaatttgttgaaaaagcaagaaaaggggttatggaatttttgttagcaaatcaccctctcgactgtccagtttgtgatcaaggaggtgaatgtgatttgcaagatcaatcaatgttttatggaattgataaatcaagatttaaagaaaataaaagatttgttcctgaaaagtacatgggtcctcttatcaaaactcaaatgacaagatgtattcattgtacaaggtgcataagatttgcaactgagattgctggtgtttcagagattggtgcaattggcagaggggaagatactcaaataactacatatttggaaaaatctatggagtcagagctttcagggaatgtcattgatttgtgtccagttggtgcgttaacatcgaagccatatgtttttgaagctagaccatgggaattaaaaaaaacagaaacgatcgatgttatggacgcagttggttcaaatataagagtagatacatatggctgggaagtaaaacgtatactcccaaaaattaacgaaaacattaatgaggagtggatatcagataaaactcgttatgcatgcgatggtttaaaatatcaaagacttgatactccttttatcagatctaatgatggttttaaaaaaatttcatgggaagatgcttatggatccttaactgataaaatcaaaaacacaaaccctgataagattggatgtataacaggtgatcttacgaatatggaaactctattttctgttaaagagttttttaataaagtcctgaac

SEQ ID NO: 221525 - DNA, 322 bp, Unknown
  Bacterial polypeptide expressing nucleotide sequence isolated from the Sargasso Sea
gcatcaggtgatcgagggaatggcgctggccgggtacgccatcggcgccaccgtcggattcaattacattcgcggtgaatactatgagccctggcagcgctttgaagctgctctggtcgaggcacggcgagcaggtcttctcggcgaagatctaaagggatctgggatcgcgtttgagctgcacagtcagcggggtgccggtgcgtatatctgcggcgaggagactgcactgctggagtcgctggagggcaaaaaaggactgccgcgtttcaagccgccgtttccggcccaggtcggcacctttggaaaacccaccaccata

SEQ ID NO: 221526 - DNA, 334 bp, Unknown
  Bacterial polypeptide expressing nucleotide sequence isolated from the Sargasso Sea
catgcttaagaaagaagataaaatttttaaaaatctttacaacgaatttggctgggaaatagatagtgctttaaaaagagatgattggaaaaatacaaaaaatattatttcaaaaggaagggattggataattaacgagataaaaatttcagagcttagaggaagaggtggagcaggtttttccacgggtcttaaatggtcttttgctccaaaagaagttggttcaagaccacattatctggtaattaatgcagatgagtctgaaccaggaacctgcaaagatagagatatattaagatttgaacctcaaaaattaattgagggatgtctaata

SEQ ID NO: 221527 - DNA, 418 bp, Unknown
  Bacterial polypeptide expressing nucleotide sequence isolated from the Sargasso Sea
aatgcctaaaattactattaatggaaaagaaatagaatttgagaaaggcatgacagttcttcaagcctgcgaacttgctgacgtagaaattccaagattttgctaccatgaaaaattatctatagccggaaattgcagaatgtgtttagttgaaatggaaaaatctgcaaaacctatagcatcatgtgcaatgccagcagctgagggcatgaaaattaaaacaaacactccttttgttgagaaagctagaaagggtgtgatggaatttttattagctaatcatcctttagactgtccggtttgcgaccaaggtggtgaatgtgatcttcaagatcaatcaatgtactacggagttgataaatcaagatttgtagaaaataagagacaagtcaaagaaaaatatatgggacctttaata

SEQ ID NO: 221528 - DNA, 499 bp, Unknown
  Bacterial polypeptide expressing nucleotide sequence isolated from the Sargasso Sea
atgcttaaggacgaagatagaatattcaaaaatttatataatgatttaggatgggaaatcgattttgctattgaaagaggtgattggtctcagacaaaagatataattagtaaaggaaaagattatattattaatgaaataaaagaatcccaacttcgtggaagaggaggggcgggatttccatcaggactaaagctttcatttgcaccaaaagaagtaggaagtagaccacactatctagttataaacgcagatgaatcagaaccgggcacatgcaaggatagagatattttaagatttgaaccccaaaaacttttagaaggatgtttactagcaagttatgcgattagcgcacatacttgttatatttatataagaggagagtattttagagaaggtcaaagattacaaaatgcaattaatcaggcttataaaaaaaattttataggaaaaaatgcatgtgatactggttgggatttagatatttatgttcactatg

SEQ ID NO: 221529 - DNA, 745 bp, Unknown
  Bacterial polypeptide expressing nucleotide sequence isolated from the Sargasso Sea
tagaagaggggccggggcgtatatatgtggcgaggagtcagctatgattgagtctattgaaggtaaaagaggaatgccaagactcagacctccatttgttgcacaagtaggattatttggacgaccaacactagcgcataatatggaaacgctttactgggtgagagatattttacaaaaaggtgccgattggttcacgtctcacggcagaaacggaaggaaaggattgagatccttctcggtcagcggacgagttaaaaatcctggtgtctatcttgctccagcgggaataacagttagcgaattgattgatgaatatgctggaggaatgttggagggtcacgaattttatggatattttcctggtggtgcatctggtggaatattgccagcctcgttatcaaaaatacctctagattttgacactctacatgattacggttgttttataggttcggcagcaattattatattgtcagacaaagatactgctgtttctgctgcctcaaatactatgaaatttttccttcatgaatcatgtggaaaatgtactccatgcagagttggtacatcaaaagctgtatcattgatgagtgagaaaaaatggaatgtgccattgcttcatgatttatcacaagttatgtcagatgcgtctatttgtggcttaggtcaagctgcatccaatccactcaaatgtgtgttaaaatactttcctgaggaagtgaatgatgattgcaaaacctga

SEQ ID NO: 221530 - DNA, 337 bp, Unknown
  Bacterial polypeptide expressing nucleotide sequence isolated from the Sargasso Sea
atgcttaaagacgaagatagaatttttacaaatttatataatgaccttggaccagatattttatctgctcaaaagagaggtgattgggtaaacactaatgaaattattaagaaaggtaaagaatggataattaatgaaataaaatcttctgaacttaggggtagaggaggagcgggtttcccgacaggacttaaatggtcattcgctccaaaggaagttggctcaaggcctcattatcttgttattaatgctgatgaatctgagcctggaacttgtaaagatagagacattttaagatttgaacctcataaattaatagaaaggttgtttactagct

SEQ ID NO: 221531 - DNA, 406 bp, Unknown
  Bacterial polypeptide expressing nucleotide sequence isolated from the Sargasso Sea
aatgcttaaattaaaagtaaatgaaatcgaggttgaagttgaagagggtttaactgttcttcaagcttgtgaaaaagctggagtggaaattccaagattttgttaccatgaaaaattatcgatagcaggtaattgtagaatgtgtttagttgaaatggaaaaatcccctaaaccaattgcttcatgtgctatgccagctgctgagggtatgaatattaaaacaaatactgctttagtagaaaaagctcgtaagggagtaatggaatttttgttagctaaccatcctttagattgtcctgtttgcgatcaaggtggtgaatgcgatcttcaagatcaatcaatgtattacggagtggataaatcaagatttaaagaaaacaaaagagcagttcccgaaaaaatatgg

SEQ ID NO: 221532 - DNA, 403 bp, Unknown
  Bacterial polypeptide expressing nucleotide sequence isolated from the Sargasso Sea
atgcttaaagacgaagatagaatttttactaacttatataatgacctcgggccagatattttatctgcccaaaaaagaggtgattggcaaaaaactaatgaaattataaaaaaaggtaaagaatggataattaatgaaataaaatcctcagaacttagaggaagaggaggcgcaggttttccaaccggtcttaaatggtcatttactccaaaagaagttggatcaagacctcactatcttgttattaatgctgatgaatcagaacctggaacttgtaaagatagggatattttaagatttgaaccacataaattaattgagggctgtttgttagctgcatatgcagttaatgctaacaaatgttatatttatataagaggagaatattttaacgagaggtaat

SEQ ID NO: 221533 - DNA, 477 bp, Unknown
  Bacterial polypeptide expressing nucleotide sequence isolated from the Sargasso Sea
gatgcctaaaattaagattaacaataaagaaatagaatttgaaaatggtatgacagttttacaggcatgtgaaattgctggtgctgaaataccacgtttctgttaccacgagcgtctttctattgctggaaattgtagaatgtgtttagtcgaaatggaaaaatcaccgaaaccaatagcatcgtgtgccatgcctgctgcagaaggaatgaatattaaaaccaatagcaaaatggtggaaaaagcaagaaaaggtgtaatggaatttcttcttgctaaccatcctcttgattgtcccgtttgtgatcaaggcggtgaatgtgatctacaagatcaatctttatattacggttttgataaatccagatttacagaaaataaaagaaatgttgaagataaatatatgggtcccttaataaaaacacagatgacaagatgtattcattgcacaagatgtatacgtttcgctaccgaaat

SEQ ID NO: 221534 - DNA, 504 bp, Unknown
  Bacterial polypeptide expressing nucleotide sequence isolated from the Sargasso Sea
aatgcttaaattaagagttaatgatattgacgtagaagttgaagaaggtctaacagttttacaagcttgtgaaaaagctggttttgaaataccaaggttttgctatcacgaaaaactatcaatagcaggtaattgcagaatgtgtttagttgaaatggaaaaatctcctaaaccaatagcttcttgtgcaatgcctgcatcagatggaatggtaattaaaactaatacaccaaaaattgaaaagtcaagaaaaggtgtaatggaatttttattagccaatcatcccttagattgcccagtctgcgatcaaggaggagaatgtgatctccaggatcagtcaatgttttatggaatagataaatctagatttaaagagaataaaagagctgtcccagataaaaatatgggtcctttaataaaaactcaaatgacaagatgtattcattgtactagatgtatacgatttgcaactgagatagcaggtgttccagagttaggcgctat

SEQ ID NO: 221535 - DNA, 301 bp, Unknown
  Bacterial polypeptide expressing nucleotide sequence isolated from the Sargasso Sea
atgcttaaattaaaagtaaatgatatagatatagaagttgaagaaggtttaacagttcttcaagcttgtgaaaaagctggagtcgaaattccaagattttgttatcatgaaaaactttctatagctggaaattgtagaatgtgtttagtagaaatggaaaaatctcctaaaccgattgcttcatgcgctatgcctgcagcagaaggcatgaatattaaaacaaatactccatttgtagaaaaggctagaaaaggagtaatggaatttttattagcaaatcatccacttgattgtccagttt

SEQ ID NO: 221536 - DNA, 817 bp, Unknown
  Bacterial polypeptide expressing nucleotide sequence isolated from the Sargasso Sea
aaccaatactgaatttgttgaaaaagctcgaaaaggtgtaatggaatttttattagctaatcatcctctggattgtccagtatgcgatcagggtggtgaatgtgatcttcaagatcaatcaatgtactatggaattgataaatcaagatttaaggaaaacaaaagaatggttgctgaaaaaaatatgggaccattaattaaaacacagatgacaagatgtattcattgcacaagatgtgtacggtttgcaacagaaatagcaggtgttcctgagctaggagctattggtagaggagaagatatgcaaattaccacttatttagagcagtctatgcaatctgagttatctgcaaatgtagtggatctttgtccagttggagcacttacatcaaaaccatatgtatttgaagctagaccttgggaactaaaaaaaactgaaactatagatgttatggatgctgttggttcaaatataagagtagatacttatgattgggaagttaaaagagttcttccaataattaatgaaaatattaatgaggaatggatatctgataaaacaaggtacgcatgtgatggcttgctgcagcaacgattagacactccatttattaaatataataaaaaatttgaaaaagcttcatggaatgaagtttataaaattattaaatcaaaatttgagcatacgcaaaaagaaaaaatttgtggatttgttggtgatctaacaaatatggagacaagttttatttttaaagaattttttgacaggatacttgatataaataattatgaatctagatctgataaccgattttta

SEQ ID NO: 221537 - DNA, 583 bp, Unknown
  Bacterial polypeptide expressing nucleotide sequence isolated from the Sargasso Sea
atgccaaaaataactattaacaataaagaaattgaatttgaaaatggaatgacagttcttcaagcttgtgagttagcgggtgtagagataccaagattttgttatcatgaacgtttatcaatagctggaaattgcaggatgtgtttagtccaattagaaaaatccgcaaaaccaattgcatcttgtgcaatgcccgcatctgaaggcatgaatataaaaacaaatacagaaatggttgaaaaagcaagaaaaggcgtaatggaatttttattggctaatcatccattagattgtcctgtttgtgatcagggaggagaatgtgatttacaagatcaatcactttattatggttttgacaaatcaagattcaaagaaaacaaaagaggtgtcaaggataagtatatgggtccattaattaaaacgataatgactcgatgtattcattgcactagatgcgtaagatttgcaacagaagtaggaggtgtaaccgaaataggcgcaattggaagaggtgaaaatatggagatcacaacatatttggaaaaggcgatgcagtcggaattgtcagcaaacgtgattgatc

SEQ ID NO: 221538 - DNA, 657 bp, Unknown
  Bacterial polypeptide expressing nucleotide sequence isolated from the Sargasso Sea
gatggcaggaactccaatccctcatgccccaggctttattgcgaacacaacgcctcgaatagtgacatcgcgctttgactacgaagactcctacacacttgcgcgatatgaagccacaggcggttatcaaggactaaagaaagccctccaacaaacaccagaagaagttcacaacgaagtccgtgacgcaacactcttaggccgaggaggagcgggattcccagccggagtcaaatggggattttgccctccagaagtgtggccccgatacctggtggttaatggtgacgaatccgagcctggaacatacaaagaccggctgctaatggaattggacccgcaccaactcatcgaaggatgtttaattgcctgctacgcagttggattaagccaatgcttcctctatatccgaggagaaatggcggtagcgcaagaacgtgtcgcccaagcgcttaacgacgcctatgcagcgggctatgtgggtaaaaatattcaggacagccagttctcagttgacatagttctgcactggggtgcgggagcctacgtagtaggcgaagagacagcactaattgaaagtctcgaaggcaaccgcgggatgcctcggctaaagcccccttattttccggcatcaatcggtttgtacgggcagccaac

SEQ ID NO: 221539 - DNA, 325 bp, Unknown
  Bacterial polypeptide expressing nucleotide sequence isolated from the Sargasso Sea
agattctcagcttctcctaggcaagcagacttaatgattgtagctggtactgttacttggaagatggcgcctgcaataagaactatgtatgatcagatgtctgatccaaaatgggtaattagtatgggtgtatgtgcaactagtggtggcccctactatgattcctattctgtggttcctggtgtcaataaaattgtacctgttgatgtatatgttcctggttgtccaccaagacccgacgctctgttgtatggattaatgcaattacatgaaaaaattaaaagatactcattaaaaggaaagtcagcaggaaataatgactaag

SEQ ID NO: 221540 - DNA, 490 bp, Unknown
  Bacterial polypeptide expressing nucleotide sequence isolated from the Sargasso Sea
atgccaaaaataattataaataataaagaaatagactttgaaaatgggatgactgttttacaggcatgtgagttagcgggtgctgaaattcctaggttttgttaccacgaacgtttatcaatagctggaaattgtcgaatgtgtttagttgaaatggagaaatcttctaaaccaatagcatcgtgcgcaatgcctgcagcagagggtatgaaaataaatactaatactgaatttgtagaaaaagccagaaaaggagtcatggaatttttattagcaaaccatcctttagactgtcctgtttgcgaccagggcggagaatgtgacttgcaagatcagtctctttattatggatttgataaatcaagattcaaagaaaataaaagagaagtaaaagataaatacatgggtccactaatcaaaacacaaatgaccagatgtattcattgtacaagatgtataagatttgctacggaggttgcgggagttactg

SEQ ID NO: 221541 - DNA, 301 bp, Unknown
  Bacterial polypeptide expressing nucleotide sequence isolated from the Sargasso Sea
atgcttaaagtaaaagtaaatgatttagatcttgaagtagaagagggactaacggtattacaagcctgtgaacaagctggagctgaaatcccaaggttttgttatcatgaaaaattgtcaatagcaggtaattgtagaatgtgtcttgttgagatagaaaaatctccaaaacctgtagcttcgtgtgcgatgccagttacaaatggaatgaatataaaaactaatacaaagtttgtagaaaaggctagaaaaggtgtaatggaatttttacttgcaaatcatccattagattgtccagttt

SEQ ID NO: 221542 - DNA, 314 bp, Unknown
  Bacterial polypeptide expressing nucleotide sequence isolated from the Sargasso Sea
aatgcttaaattaaaagtaaacgatatagatgttgaagttgaagaaggtttgacagtcttacaagcttgtgaaaaagctggatttgaaatacctagattctgttatcatgaaaaattatctatagctggcaattgtagaatgtgcctagttgaaatggaaaaatctccaaaaccaattgcatcttgcgctatgccagctgcagatggaatggttataaaaacaaatactcaaaagattgaaaaatccaggaagggtgttatggaatttttgctggcaaaccatccattagattgcccagtttgtgatcaaggag

SEQ ID NO: 221543 - DNA, 341 bp, Unknown
  Bacterial polypeptide expressing nucleotide sequence isolated from the Sargasso Sea
aatgcttaaagatcaagatagaattttcaaaaacttatataacgacttgggatctgatatcgcctcatctcaaaaaagaggtgattgggtcaatacaaaagacctgacaaataaaggaagagattggatcattaatgagattaaagactcacaacttagaggaaggggtggagcaggttttccaactggattaaaatggtcttttgcacctaaagaagttgggtctagacctcattacttggtcattaatgccgatgagtcagaaccaggaacttgtaaagatagagatttattaagatttgaacctcataaacttatagagggttgcttaatagcctcat

SEQ ID NO: 221544 - DNA, 538 bp, Unknown
  Bacterial polypeptide expressing nucleotide sequence isolated from the Sargasso Sea
tttgaataatgaaataagtatttttattcaagataaagatatacttaaaacattaatgtttttcaaagataacccttcctttagtatgcatacacttatcgatttcaccgcagttgactaccctaacgaggaaaaaagatttctattaatttacaatcttctgagcatttccaaaaactttagaataaaaattaaaacttgggtttcagcggataaacccgtaagttctgtaacagaaatttttccttgcgctaattggtatgagagggaagcatgggatttatttggaattaggtttgttgggcatccagatttgaggagaatcttaacagactacgattttattggtcaccctcttagaaaagattttcctttaactggttttactcaagtaaaatttgatgatgaattaggaaaggtaattagtgagccagtgaagcttgaacaagaatatagaacctttgataatttaagtccgtgggaaggaatgtctaaaattctccctggtgatgaaaaatctgggaaacttgatgactaa

SEQ ID NO: 221545 - DNA, 433 bp, Unknown
  Bacterial polypeptide expressing nucleotide sequence isolated from the Sargasso Sea
atgctgcaggaaaaagataaaatatttacaaatctatttggcgatgaatcctattctctaaagtcggctttgaagagaggcgactgggataaaactaaaaaccttatcgcaaatggcagggaatggattattgacgaaatgaaaaaatcagagattcgtggccgaggtggtgctggatttcctacgggattaaagtggtcattcatgccaaaagatccagatttgactaactaccttgtggttaatgcagatgaatctgaaccaggcacttgtaaggacagagatatgattagaaacgaacctcataaactaatagaaggttgcctacttgcatcattcgcaatgaatgcgcatacttgctatatctatatacgaggtgagtattttaatgagtcagtggttctgcagaaagctattgatgaggcttacgaag

SEQ ID NO: 221546 - DNA, 511 bp, Unknown
  Bacterial polypeptide expressing nucleotide sequence isolated from the Sargasso Sea
gggacgacaatcagggagatattagaggtacatgcaggtggaatgttacctggctataattttcgaggacttctgccaggaggaggttctactgattttctcgtcgaagaacatttagatcttgcaatggattatgcaacgattagcaaagcaggaagccgaatgggcacgggaaccatgattattcttgatgataaaacttgtccagtcggcatggtaaaaaatttgatagatttttttgctcacgagtcctgcgggttctgcacaccctgccgggatggactgccccaaactgctcacatacttcaagcaatggcttcaggacaaggtgaagccggtgacattgaagccctagagagactagtgaaatttatcggggccattggtaatacacactgtgcacttgcacccggcgcaatggagccgctgcagagtgccatgaaatattttccagaagatttcgagcgatatgccaaaagaaatcaaatggaatcttgtgacgctgactgaa

SEQ ID NO: 221547 - DNA, 812 bp, Unknown
  Bacterial polypeptide expressing nucleotide sequence isolated from the Sargasso Sea
tatgtgtttggttgaaatggaaaaatcgccaaaacctatagcatcatgtgcaatgcctgcagctgaagggatggtaattaaaacaaatacgaaaaaagttgaaaaagcaagaaaaggtgtaatggagtttttactggctaaccatcctttggattgccctgtttgtgatcaaggtggtgagtgtgatttgcaggatcaatctatgttttatggaattgataaatcaagatttaaagagaataaaagatatgtacctgaaaaatacatgggaccattaataaaaacccaaatgacaagatgtattcattgtactagatgtataagatttgccacagaggtagcgggtgtaccagagttaggtgcaattggccgaggagaaaacatggaaatcacaacttatttggagaaatcaatggagtctgagatgtcggcaaatgtaatagacttgtgtcctgtaggcgccttaacttctaaaccttatgtttttgaggctagaccatgggagctaaaaaaaacagaaactattgatgtaatggatgctgttgggtcaaacattagagtggatacttatgattgggaagtaaaaagagttttaccaagaattaatgaggaaattaatgaggagtggatttctgataaaacaaggtatgcatgcgatggtttaaaaaatcaaagattagacacaccatttataaaaaataatggaaactttgaagaaataagttggcaagatgcatacaaaaaaattaaagaaaaaatttcaacaacatcaccagacaaaatagttggtttaactggtgacatgacaaata

SEQ ID NO: 221548 - DNA, 964 bp, Unknown
  Bacterial polypeptide expressing nucleotide sequence isolated from the Sargasso Sea
gatgtgtctgtgggaaatggaaaaatctccaaaaccaattgcttcctgtgcaatgcctgcaacagagggtatgaatattaaaactaacactgactcagtgaaaaaagccagaaaaggcgtaatggaatttttgtggctaaatcatcctttagattgtcctgtttgtgatcaaggaggagaatgtgatttgcaagatcaatcaatgtattacggtgtcgataaatcaagatttgttgaaaataaaagacaagttaaagaaaaatacatgggtccattgattaaaactcaaatgacacgttgcattcattgtacgagatgtgtgagatttgcaactgaggttgctggagttccagaaataggagccattggaagaggagaaaacatggaaatcacaacatatcttgaaaaagcaatggagtcagaactttcagcaaatgtaatagatttatgtccagtaggcgctctcacttctaaaccatatgcttttgaggcaagaccatgggaactaaaaaagactgaaagtgtagatgtaatggacgctgttggatcaaatataagggttgatacctataattgggaggtaaaaagaatattacctagattaaacaacgacataaatgaagagtggatttcagacaaaactcgatactcatgtgatggcttactcaaacaaaggttagatgttccatatataaaaataaacaacaaattacaaaaatctacctgggatgaagctatttcacttttagtagataagattaattcgacaaatccagatgaaataggcggacatattggtgatatggttaatttagagaatgcacttagttttaaaaaactcttttcagtttttaaaagtgaaaatttagaatttagagaaaaaagtttttatataaactcttctgaaaaaagtaattatatttttaattcctctataaaaggaatagaagagtctgacttcata

SEQ ID NO: 221549 - DNA, 698 bp, Unknown
  Bacterial polypeptide expressing nucleotide sequence isolated from the Sargasso Sea
aatgaccggaaccccgatagcccatgcccccggattcatcgctaacgaaactccgcggattgtgacagctcgcttcgaccatgcagattcacacacacttgaaagatacgaagcaaccgacggctaccaagctctaagaaaagccctacagctaaccccagaagaagttcacagcgaagttacagccgcgacattgcttggccgaggcggtgccggcttccccgctggagtcaaatggggattctgccctcctggagtctggcctcgatacctagttgttaatggcgacgaatctgaaccaggaacctataaagaccgtcttttaatggagttagaccctcatcaactgatcgaaggctgcctaattgcttgttacgcagtcggcctcagccaatgcttcctctatatacgaggcgaaatggcagtagcacaagaacgtgtggctatggccctaaacgacgcttacgatgctggttatatcgggaaaagcattttaggaaccgaattttccgtcgacattgtcttgcactggggggcaggagcatacgtagttggggaagaaacagctctaatcgaaagccttgaaggaaatagggggatgccgagattaaaacccccatatttccccgcctcaataggcctctatggacaaccaacaatcgtcaacaatgtcgagactttggccaaccttccctgga

SEQ ID NO: 221550 - DNA, 308 bp, Unknown
  Bacterial polypeptide expressing nucleotide sequence isolated from the Sargasso Sea
aatgcttcaagataaagatagaatatttacaaacttatataatgattttggttcagatatagattcatctattttaagaggagattggtctaacacaaaagatatatgtttaaaaggtaaagaatggattattaatgaaattaaaacctctgaattaagagggagaggtggagccggttttcctacaggtctaaaatggtcatttgctccaaaagagataggttcaagaccacattatttagtaattaacgcagacgaatctgaacctggcacatgtaaagatagagatattcttagatttgaaccac

SEQ ID NO: 221551 - DNA, 461 bp, Unknown
  Bacterial polypeptide expressing nucleotide sequence isolated from the Sargasso Sea
catgcttaaggcagaagataagatttttaaaaatttatataacaattttggatgggaaatagatagcgccattaaaagagatgactggaaagaaacaaaaaatctgattttgaaagggagagaatggattattaatgaagtaaaaacatctgagttaagaggtagaggcggggctggattttctactggtttgaagtggtcattcgctccaaaagaagttggatctaggcctcattatttagtaattaatgctgatgaatctgaacctggaacatgtaaagacagagatattttaagatttgagccccagaaattaattgaaggttgccttatcgctggcttcgcagttaatgctcatatttgctacatttacataaggggtgagtatttaaatgaaggaaaaagattacaagaggctattgaccaagcttataaaaaaaaatttttaggaaaaaatgcat

SEQ ID NO: 221552 - DNA, 646 bp, Unknown
  Bacterial polypeptide expressing nucleotide sequence isolated from the Sargasso Sea
tgctgaggtaggactgtttggcttgcctacactaaaccataatgttgaaaccttaagctggattcctgatattttagatcacggtgcgccatggtttgcaaaaaaaggaaagaacgggcattgtggattacgctctttctcagtttctgggcgagtaaaaattcccggcgtaaaagtagtcccggctggcacgacgatagacgaactaatttctgaacattgcgggggtatgatcgacggccacgtcctcaaagggttccttcctgggggagcttcaggagggatttttcctgctgaaatgtccaaattgcctcttgatttcggaaccttcgaagagcacggcggttttataggaagtcacgcgataattattttgtcccaaaaagattcggtaaaagacgttgccactaatttaatcaagttctttaggcacgaaagttgtggacaatgcactccctgcagatctgggactgaaaaattggttgggttgcttgagaaaaagaaacttgataccgtgttaatcggggagttggctgaggtgatgcaggattcctcaatttgtggattaggtcaggcggctgcaaatccggttaaacttatgataaaacattttccagcagattttttgcgacttaaaaatgaataa

SEQ ID NO: 221553 - DNA, 521 bp, Unknown
  Bacterial polypeptide expressing nucleotide sequence isolated from the Sargasso Sea
attgaataaaatatatcaaaatgagtataaaaaaagacacatagaaatacaaaaaattttatcaagtaggattggtggaaggggaatacagactaaatttgataatgaagagttaacagttattgttagtaaatcccttttgttaaaggtattaaattttttaaaggacgataagctttttcagttcaagcaattaattgatatatgtgcagtagactatcctaatcgcattgataggtttgagatagtgtatcatttattaagtataagtttaaatcagagaattagagtaaaattgtctgtaaatgacggtgatacagttccatcgattgtatctatttttgatgcagctaattggtatgaaagagaagtatgggatctatttggtgtaatatttacagatcacccagatttaagacgtattcttactgattatggttttgagggacatcccttaagaaaggattttcctttgtctggttttgtccaagttaaatatgatgactctgaaaaaaaggttg

SEQ ID NO: 221554 - DNA, 892 bp, Unknown
  Bacterial polypeptide expressing nucleotide sequence isolated from the Sargasso Sea
aaagttgaaaaagcaagaaaaggagttatggagtttttgcttgcgaaccatcctttagattgccctgtatgtgatcaaggaggagaatgtgatttacaagatcaatcgatgttttatggtatagataaatctagattcaaagaaaataaaagagaggtcccagaaaaatatatgggccctttaatcaaaacacaaatgacacgatgcatacattgtacaaggtgcgttagatttgctactgaagttgcaggaattccagagcttggagcaataggtagaggtgaagatatgcaaataactacttacttagaaaaatcaatggaatcagaactttcagcaaacgttattgatttatgtcctgtaggtgcattaacatcaaaaccatatgtttttgaagctagaccttgggaattaaaaaaaactgaaactgtggatgtgatggatgcagtaggatcaaacataagagttgatacttatgggtgggaagtaaaaagaattcttccaagaattaatgaagatataaatgaagaatggatttcggataaaacaagatatgcatgtgatggaataaaaaatcaaagattagacactccttatttaaaaacaaaaaaaggttacgaaaaaatatcttgggaagaagcaaataaaataattgtaaaaaagataaatgaaacagcatcagacaaaattgctggttttacaggggatctttcgaatatggaaactttatatattgcaaaagaatttttttcaaaaactataaaatcaaaatatttggaatctagaattaataattcatatgtaaatattagcaataaagaaaactatatatttaactcaactatcaacggaattgaagaatctgatttagtaattttaatggaacaaaccc

SEQ ID NO: 221555 - DNA, 466 bp, Unknown
  Bacterial polypeptide expressing nucleotide sequence isolated from the Sargasso Sea
aatgcctaaaataaatatcaatggtaaagaagttgaattcgagtcaggtatgaccattcttcaagcatgtgagttagctggtgcagaaataccaagattttgttatcacgaaagactctcaatcgctggtaactgtagaatgtgtcttgtagaaatggataaatcacgaaaaccaattgcgtcatgcgctatgccggcagcagaaggtatgaatataaaaactaatactgagatggttgaaaaagcaagaaagggtgtaatggaatttcttttagctaatcatccattagattgtccggtatgtgatcaaggtggtgagtgcgatcttcaagatcaatcgctttactatggagtagacaagtcaagattttctgagaacaaaagatatgttagtgaaaaatatatgggtcctttaataaaaacacaaatgaccagatgtattcattgtaccagatgtgtgagattg

SEQ ID NO: 221556 - DNA, 298 bp, Unknown
  Bacterial polypeptide expressing nucleotide sequence isolated from the Sargasso Sea
atgcttaaaccggaaaataagattttcaaaaatctctacaataattttggctgggaaatagatagcgcaattaaaagagatgattggaaagatactaagaatattatctctaaaggtagagagtggataattaatgaagtaaaaacatctgaattaagagggagaggaggagctggattttctacagggctcaaatggtctttcgctccaaaagaggttggttcgagaccacattatttagtaaataatgctgacgagtccgagcctggaacttgtaaagatagggatatattaaggt

SEQ ID NO: 221557 - DNA, 907 bp, Unknown
  Bacterial polypeptide expressing nucleotide sequence isolated from the Sargasso Sea
acctatagcttcctgtgccatgccagcagcagaaggaatgaatataaaaacaaatactgaatttgttgaaaaagcacgaaaaggagtgatggaatttttgttagctaatcatcctttagactgtccagtatgtgatcaagggggtgaatgtgacttacaagatcaatcaatgtattacggtgtagataagtcaagatttaaagaaaacaaaagattagttcctgaaaaaaatatgggaccattaattaaaacccagatgacaagatgtatacattgcacaagatgtgtaagatttgcaactgaggttgcaggtgtaccagagctaggagctattggtaggggcgaggatatgcaaattactacatacttagagcaatctatgcaatcagaactatcagctaatgtagtagatctttgtccagtaggagctttaacctctaaaccttatgtatttgaggcaagaccctgggaattaaaaaaaactgagacaattgatgtcatggatgcagttgggtctaatattagggttgatacttatgattgggaagtaaagagagttttaccaatcattaatgaagatataaatgaagagtggatttctgataaaaccagatatgcatgtgatggactccttcatcaaagattagatagtccatttattaaatataacaaaaaatttgagaaagcttcttgggaagaggtgtataaaataataaaatctaaatttgaaaatacaacaaaagaaaaaatttgtggatttgttggagacttaaccaacatggaaacaagttatattttaaaagagttttttgacagaactcttgatagcaataattatgagtcaagagttgataatagatatataaatacttctaaaagagaaaattatatttttaatgcatctata

SEQ ID NO: 221558 - DNA, 385 bp, Unknown
  Bacterial polypeptide expressing nucleotide sequence isolated from the Sargasso Sea
aatgcttaaagacgaagatagaatatttaaaaacctgtataacgatttaggtgcagatttaatatcctcaaaaaaaagaggagattggaacaatacaaaagaaatatgtgaaagaggtcgtgaatggattattaatgaggtaaaaacttcagaattacgcggaagaggaggagcaggatttccaactggtttaaagtggtcatttgcaccaaaagaagttggatctagacctcattatctagtaattaatgctgacgagtctgaacctggaacttgtaaagatcgagatatattaagatttgaacctcaaaaactaatcgaaggttgtttgataacttcttttgcagttaatgctcatgcttgttatatttatataagaggagaa

SEQ ID NO: 221559 - DNA, 760 bp, Unknown
  Bacterial polypeptide expressing nucleotide sequence isolated from the Sargasso Sea
ataccaccactagttgaaaaagcacgaaaaggtgtaatggaattcttattagctaatcatccactagattgtcctgtttgcgatcaaggtggtgaatgtgatttgcaagatcaatcaatgttttatggaattgataaatctagatttaaagaaaataaaagatatgtccctgaaaaatatatgggacctttaattaaaacacaaatgacaagatgcattcattgcacaaggtgcataagatttgcaactgaaattgctggagttcctgagttgggagccataggaagaggtgaagatatgcaaattacaacttatttagaaaaatcaatggactctgaattgtcagcaaatgtaatagatttatgtcccgttggagccttaacttcaaagccttatgtttttgaagcaagaccttgggaattaaaaaaaactgaaaccattgatgttatggatgccatcggatcaaacatacgagttgactcatatggttgggaggtgaaaagagttttaccaagaataaatgaagatattaatgaagaatggatatctgataaaaccagatattcgtgtgacgggctaaaaaatcaaagattggacacaccttattttaaaaagggagataggttctcaaaaattgaatggaacttagcttataaaattttatcagaaaaaattaaagaaacagcaccaaacaagatagctggtataactggtgatctaagtaatatggagaccctatatattgttaaagaatttttta

SEQ ID NO: 221560 - DNA, 427 bp, Unknown
  Bacterial polypeptide expressing nucleotide sequence isolated from the Sargasso Sea
aatgcttgaagataaagataggatttttcaaaatttatacaatgattttggtgctgatttaacatctgcaaaaaagagaggagattggaaggatacaaaagaaatttgtggcaaaggaagagaatggataattaatgaaattaaaacttcagaacttagaggaagaggtggtgctggatttcctacaggattgaaatggtcctttgctccaaaagaagttggatcaagaccacattatttagtaattaacgccgatgagtctgagccaggcacatgtaaagatagagatattctaagatttgaaccgcataaattaatagaaggctgtttaattgcctcttacgcagttaatgcacacaagtgctatatttatataagaggggaatattttaatgaaggacaaaaacttcaaacagctatcgatgaa

SEQ ID NO: 221561 - DNA, 956 bp, Unknown
  Bacterial polypeptide expressing nucleotide sequence isolated from the Sargasso Sea
aacggaatccgacgtagttattaaagctcaagaaggtattttagaatttttattgattaatcatcctcttgattgtcctgtttgcgacaaagcaggtgagtgtccccttcaagaccaaacaatggcatatggtccaggcgaatcaagatttgttgaagaaaagagacactttgagaagccaatcccaatttccgaaataattcttctcgacagggagagatgcattctatgtgcaagatgcacaaggttttcagatgaaatttcaggagacccattaattgaatttattcaacgcggtaacaaaaccgaagttaatacttttcctgacgaaccttttagatcttatttctcaggaaatactgtccaaatttgtcctgtaggtgcattaacttcaacatcatatagatttaaagctagaccatgggatttgaaaaaagtttcttcaacatgcaattgttgttctgtaggttgttctattgaattaaatacttcacaaaataaaatgctaagaatattaggtgaagataatgaatttacaaaccagggatggctttcagataaaggtagatacaattttgattatcttcattctgaaaatagggtattaaatattctaagcaaggacggagactcttttagtgaaatatctatctctgaagctacaagaatgattaaaaataaaattgctgagttaggtaatccaaatgttaaattcatactaggttctaatagcaccaatgaagaatattttgtaattaatgaaatagctaactatttaaataaagataaatttttaagcaaggatagttccaatatttatttcggtgatgatcttttatttgagggttattttggagaccaatactctcaagcaaaactggaggacctagatagctcagaaacaatagttgtttgggctgaagacattaaagacaatttacctattctttattaag

SEQ ID NO: 221562 - DNA, 457 bp, Unknown
  Bacterial polypeptide expressing nucleotide sequence isolated from the Sargasso Sea
atgcttaaacaagaagataaaatatttaaaaatttatataataatttgggttggtctttaaatgactctttaaagagagatgattggttagatactaaagaaataatttctaaaggcagagagtggattattaatgaaatcaaatcttctgagttaaggggacgagggggtgcaggctttccaacaggacttaaatggtctttctcaccaaaaaaagttggttcaagaccgcattacttagtaataaatgcagacgagtctgaacccggaacttgcaaggatagggatattttaaggtttgaaccacaaaaattaattgaaggttgtttgatttcttccttcgctgttaatgcgcatgtttgttatatttatataagaggtgaatattataatgaaggtctaagactccaggaatctattaatcaagcatatgaaaaaggattgataggtaaaaacg

SEQ ID NO: 221563 - DNA, 352 bp, Unknown
  Bacterial polypeptide expressing nucleotide sequence isolated from the Sargasso Sea
tatgagattgggcgtcattcctttgccagcatctccaagacaagctgacttaatgatagtagctggaacagttacagataaaatggctccagcagtaaaaaggctctatgaccaaatgcctgaacctaaatatgtaatttctatgggatcatgttcaaatagtggaggtccgtattgggattcctattctgttacaaaaggtgttgatcaattaattccggttgatgtctatgttccaggttgtcctccaagaccggaagcattacaagaaggaataattttactccaacaaaaaattaagggtgaagacataaaggctaaatggaacgaggagcaaattgaaccagtctga

SEQ ID NO: 221564 - DNA, 319 bp, Unknown
  Bacterial polypeptide expressing nucleotide sequence isolated from the Sargasso Sea
atgaaaagggaaaatgttgaacaaatccctgtagatgacctaagtagtaatgatgaattaaaaaaatcagcctttgtcacttctgtagattttttacttaattgggctagaaaatcttctattttccccgctcaatttggtcttgcttgttgtgcttttgaaatgatagcatcagcagcctcaagatttgatttagctagatttggtgctgagagattttctgcatcccctagacaagcagatttaatgatagtggcaggcaccgttacatggaagatggcaccggcaattcgtaccatgtatgaccaaaatgtctgat

SEQ ID NO: 221565 - DNA, 612 bp, Unknown
  Bacterial polypeptide expressing nucleotide sequence isolated from the Sargasso Sea
tatgatacttgaatatagtcttattgcactcttatcaccactatttggtggaatcatggctgcattccttggtaaatcatttggtaagaattttgttaaccttgtcaccataataggtgtcagtatctcttttgttttatcttgcatcatcgcccttgagatccttgaaacatccgctgtcatcaatcaaaatatttatacatggctgaatattggagatcagtcatttcatataggacttctcattgataatctaacggccagcatgatggtggttgtaacctttgtctcattgatggttcatgtttatacaataggttatatgcatgatgatcctggatatcatcggtttttctcatacatcagtctatttaccttctcaatgttgagcctagtgatgtcaaataacttcctgcaattattctttggttgggaagctgttggtgtgatgtcgtatctgctcatcggtttttggtacaccaaagaatctgcaatcaaggcaaatttaaaagcatttattgtgaatagagtaggggatttatctctcatcctgggtattgggattatcttttcgatcactggttcacttgattattatgctgtttttttaaa

SEQ ID NO: 221566 - DNA, 690 bp, Unknown
  Bacterial polypeptide expressing nucleotide sequence isolated from the Sargasso Sea
gcgtgaacaacgtcgagaccctgtgcaacgtgccggcgatcatcgccgacggcgtggactggtacaaatccctggcccgcgaaggcagcgaagacatgggcaccaagctcatgggcttctccggcaaggtcaagaaccctggcctgtgggaactgccattcggcgtgaccgcacgcgagctgttcgaggactacgccggcggtatgcgcgacggctacaccttgaaagcctggcagccaggcggcgccggcaccggtttcctgctgcccgagcacctcgatgcacaaatgtatgccggcggtatcggcaaggtgggcacccggatgggtaccggcctggcgatggcggtcgacaacaccgtgaacatggtctcgttgctgcgcaacatggagcagttttttgcccgcgaatcctgcggcttctgcaccccatgccgcgacggcctgccttggagcgtcaagctgctgatggccctggaaaatggcgaaggccgcgagggcgacatcgaaaccctgctgggtctggtcggtttcctcggcccaggcaagactttctgtgctcacgcaccgggcgccgtggagccattgggcagcgcaatcaaatacttccgctcggagttcgaagccggcatcgcgcccaccagcgccgccgtcccgcctctggcaaagccgatcgtagtcggcgcgtaac

SEQ ID NO: 221567 - DNA, 793 bp, Unknown
  Bacterial polypeptide expressing nucleotide sequence isolated from the Sargasso Sea
tataaaaacaaataccccaaaagttgaaaaagcacgtaaaggtgtaatggaattcttgcttgctaatcatcctttagactgtcctgtttgtgatcaaggaggtgaatgtgatttgcaggaccagtcaatgttttatggtttagataaatcgaggtataatgaaaacaaaagagcggttcctgaaaaatatatgggtccacttataaaaacacaaatgacaagatgtattcattgtacaagatgtattaggtttgcaactgaagttgctggagtacctgagctaggagcaataggaagaggtgaggatatgcaaataacaacatatttagaacaatctatgcaatctgaattatcagcaaacgtaatcgatctttgtccggtaggagcattaacatcaaaaccttatgtttttgaagcaagaccatgggaattaaaaaaaactgaaagtatagatgtaatggatgcagtaggatctaatataagagtcgatacatatggatgggaagttaaaagagtattacctagaataaatgaaaatataaatgaagaatggatatcagataaaacaagatattcatgtgatggtcttaaaaatcaaagaatagatagtccatatttaaaaattgaaaataaatttttaaaaacgtcatgggaagaagcatataaaaagataactgataaaataaaaaacacatcatctgataaaattgcaggtttaacgggagatttaactaatatggaaactgcatttatcgttaaagaattttttaacaaaataattaaatcaaattat

SEQ ID NO: 221568 - DNA, 313 bp, Unknown
  Bacterial polypeptide expressing nucleotide sequence isolated from the Sargasso Sea
atgcttaaaaaagaaaataaaattttcaaaaatctttataatgaatttggctgggagattgaaaaagcgattgaaagagatgactggaaaaatacaaaagatttaatttcaaaaggtcgtgattggataatcaatgaagtaaaaacatctcaattaagaggcagaggaggagctggtttttctactggtctaaaatggtcatttgctccaaaagaattaggttcgagacctcattatttagtaattaatgcagatgaatctgagcctggaacttgtaaagatagagatattctaagattgaacctcaaaaata

SEQ ID NO: 221569 - DNA, 886 bp, Unknown
  Bacterial polypeptide expressing nucleotide sequence isolated from the Sargasso Sea
aatggaatttttattagcaaatcatcctttggattgtccagtatgtgatcagggtggtgaatgtgatctacaagatcaatcaatgtattatggagttgataaatcaagatttaaggaaaataaaagaatggtacctgaaaaaaatatgggaccattaattaaaacacagatgacaagatgtattcattgtacaagatgtgtaagatttgcaacagaaatagcaggtgttccagagcttggtgctattggtagaggagaagacatgcaaattaccacttatttagaacaatctatgcaatctgagttatctgcaaatgtagtggatctttgtccagtaggagcacttacatcaaaaccgtatgtatttgaagctagaccttgggaactaaaaaaaactgaaactatagatgttatggatggtgttggttcaaatataagggtagatacttatgattgggaagttaaaagagttcttccaataattaatgaaaatattaatgaggaatggatatctgacaaaacaaggtacgcatgcgatggcttgctgcaacaaagattagacactccatttattaaatataatagaaaatttgaaaaagcttcatggaatgaagtgtataaaattattaagtcaaaatttgagcatacgcaaaaagaaaaaatttgtggatttgttggtgacctaacaaatatggagacaggtttcatttttaaagaattttttgacagaacactagatattaataattatgaatctagatctgataatcgatttttagacgataataaaagagagaattatttatttaattctacaataaatggtatcgaagaatccgatcttatttttttagttggtacaaatccaagatatgaagcaactata

SEQ ID NO: 221570 - DNA, 354 bp, Unknown
  Bacterial polypeptide expressing nucleotide sequence isolated from the Sargasso Sea
aatgcctaaaattactatcaatggtaaagaaatagaatttgagaaaggtatgacagttcttcaagcctgcgagcttgctgacgtagaaattccaagattttgctaccatgaaaaattatctatagctggaaactgcagaatgtgtttagttgaaatggaaaaatctgcaaaacctatagcatcatgtgcaatgccagcagccgagggtatgaatattaaaacaaacactccttttgttgaaaaagctagaaagggtgtgatggaatttttattagctaatcatcctttagactgcccggtttgcgaccaaggtggtgaatgtgatcttcaagatcaatcaatgtactacggagt

SEQ ID NO: 221571 - DNA, 745 bp, Unknown
  Bacterial polypeptide expressing nucleotide sequence isolated from the Sargasso Sea
gaatttttacttgccaatcatccattagattgtccagtatgtgatcaaggtggagaatgtgatttgcaagatcaatcaatgttttatggtgtagataaatctagatacaaagaaaacaaaagatctgtgcctgaaaaatatatgggtccattaataaaaactcaaatgacaagatgtatacattgtactagatgcataagatttgccacagaagtagccggagtaccagaattgggagctattggaagaggtgaagacatgcaaattacaacatacctggaaaagtcaatggagtcagaactctcagcaaatgtaattgatttgtgtccagttggtgcccttacatcaaaaccctatgtatttgaagcaagaccttgggagttaaaaaaaactgaaagtatagatgtaatggatgctgttgggtctaatatacgtgtagatacatatggatgggaggtgaaaagagttctgccaagggtgaacgaagatataaatggcgaatggatttcagataaaacaagatattcatgtgatggactaaaaaaccaaaggttagatacaccttatataaaagaagataataaatttaaaaaatcatcttgggatgaagcttatgataaaattgtagaaaagataaaaaatactagtccggataagatagccggttttattggtgatttaacaaatatggagacctcttatacggccaaggaattttttaatcaaataatcaaatcaaataatt

SEQ ID NO: 221572 - DNA, 559 bp, Unknown
  Bacterial polypeptide expressing nucleotide sequence isolated from the Sargasso Sea
atgcttaaattaaaagtaaacgatattgaagttgaggttgaggatggtttcactgttcttcaagcttgtgaaaaagctggggctgaaattccgagattttgttatcatgaaaaattatcaatagcgggaaattgtagaatgtgtttagttgaaatggaaaagtctcctaaaccagtagcctcatgtgcaatgccagcagctgatggaatggtgataagaacaaatacaccaaaaatagaaaaatctagaaaaggtgtaatggaattcttattagcaaatcaccctttagattgtcctgtttgtgaccaaggtggagaatgtgaccttcaagatcaatcaatgttttatggtattgataaatcgagatttaaagagaacaaaagagcagttccggacaagaatatgggtccattaataaagactcaaatgacaagatgtatccattgcacgagatgtgtaagattcgcaacagagatagcaggtgttccagaattaggtgctattggaagaggagaagatatgcagataactacatattggaacagtctgtcaatcagag

SEQ ID NO: 221573 - DNA, 384 bp, Unknown
  Bacterial polypeptide expressing nucleotide sequence isolated from the Sargasso Sea
aatgggactagagtcctcgctgggtgacaacgtcctgacgacaacgctggacaagatgatcaactgggctcggaagagttcgctctggccgatgcctttcggaactgcgtgctgtgcgattgagatgatggccacgctgtcaggccggttcgacatggccagattcggtgctgaggccgtccgcttctcgcccagacaatcagatctgctgatcgtctccgggcgcatatcgataaagatgatgcctgttctaaagaagatctacgatcagatgcctgacccgaaatgggtgatctcaatgggtgcctgcgcatcttcgggcggtgtcttcaatacctatacacttgtcccaggtgtggatcagtttatccccgttgacgtata

SEQ ID NO: 221574 - DNA, 769 bp, Unknown
  Bacterial polypeptide expressing nucleotide sequence isolated from the Sargasso Sea
actgataccgcttttaccaatgttagctttccctgtaatcctgtttttgggtaggattttcaacgcaactccaggctgggtaaagaatgctaaggaaggcggaatgattgctttagtgaccatgggtgcaagtcttttgctaactctattactgattaaagaccatcttcatcatgtaggtactgccaatattttcacatggtttgaatcctcatggtggaatccagaaacgggtgctatcaccaccaaggtatttggtgtcggtattcacattgaccacctcacagtaatgctattatttgtagcagcattcctctgtttcttaatcaacatcttctcgataggttacatgaatacagacccaattaatgataatagaaatcacagattctatgcagagttcgttctattctgttcaggaatgttgggaatggttctagcagactcattcctttggttattcattttctgggaacttatgggactttgttcctatcttctgattggattttattatgagcgaccaagcgctgcttatgccgcaaagaaagcattcttgacaacacgtattggcgatgtattcctaattataggattagcaatgctatggaatttgtttgatgggcatctagattacgcttatgtcttcaatgaagcaaatatccaagcggtagatgctggtgaattacaactcgccttagggatgatgtttattggagcagttgggaaatctgcgcaatttccattacatgtttggcttcctgatgca

SEQ ID NO: 221575 - DNA, 547 bp, Unknown
  Bacterial polypeptide expressing nucleotide sequence isolated from the Sargasso Sea
aatgattaaattaaaagtcaatgatatagacgttgaagttgaggatggacttacaattctacaagcgtgcgaaatagccggagctgagataccaagattttgttatcacgaaaaactttctattgcaggaaattgtagaatgtgtcttgtcgaaatggataaatctccaaaaccagtggcatcttgtgcaatgcccgttgctgaaggaatggtaattaaaactaatacagacaaagtagaaaaagcaagaaaaggagtaatggaatttttattagcaaatcatccattagattgcccagtctgtgatcaaggcggtgaatgcgatttacaggatcaatctatgttttatggcatagataagtcaagatacaaagaaaacaaaagacatgtgccagaaaaatatatgggtccactaataaaaactcaaatgacaagatgtattcattgtactagatgcattagatttgcaactgaggttgctggagtaccagaattaggagcaattggtagaggtgaggacatgcagataacaacttatctagagaaa

SEQ ID NO: 221576 - DNA, 613 bp, Unknown
  Bacterial polypeptide expressing nucleotide sequence isolated from the Sargasso Sea
atgttaaaagttaaagtaaacgatacagagatagaagttgaagatggcttaacagttctgcaagcatgtgaacaagctggagcagaaataccaagattttgttatcacgaaaaattatctatagctggaaattgtcgaatgtgtttagtagaaatggaaaaatctccaaaaccaatagcatcatgcgccatgcctgtaacaaacggaatgaatattaaaacaaatacacctttagtagaaaaagcaagaaaaggtgtgatggaatttttattagctaaccacccactagactgtccagtttgtgatcaaggtggagaatgtgacctgcaagatcaatcaatgttctatggaattgataaatctaggtacaaagaaaacaaacgttatgttccagaaaaatatatgggacctttaattaaaactcaaatgacaagatgtatacattgcacaagatgcattaggtttgctgaggaaattgctggaatagaagaacttggagcaattggaagaggagaagacatgcaaataactacttatttagaaaaatctatgcagtccgaactttctgcaaatgtaattgatttatgcctcagtaggggcactcacatctaaa

SEQ ID NO: 221577 - DNA, 866 bp, Unknown
  Bacterial polypeptide expressing nucleotide sequence isolated from the Sargasso Sea
tttgttaatcaatcacccattagattgcccagtttgtgatcaaggcggtgagtgtgatctacaggatcaaactattgcttttggtcctgaaaattcaaggtttgaagagaataaaagggcagttgaagaaaagcatatgggcccattgattaaaacttacatgactcgttgtattcattgtacgagatgtatcagattcgcagatgaagtggcgggagtaaatcaattaggggcagtaaatcgcggagaaaatatggaaattacaacttatttagaaaagtcattagactccgaactatcggctaatattgttgatttatgtccggtaggcgcacttacatcgaaaccatatcaatttgaagccagaccttgggaattaaaaaagacagaaaccattgatgtaatggatgcggtaggatcaaatattagagttgatacttacggatggaaagtaaaaagagtactgcctgtacttaatgaagatattaatgaagagtggatatcagataaaacaaggtacgcatgcgatggacttttaaatcaacgtctagacacaccttatataaaaaagaataacaaattagagcaagtttcatgggaagaaactttttctcatttaaataaacttattaaggacttaggcccagatgaaattgcttttttagttggtgattttattgatttggaaactagttacttaataaaaaaattatctgaagatctaaatatcaaggcagttgatggaagacaggaaggatgtaaagttccattcaatcatcgatctcaatttttatttaattccaaaataaaaggaattgatgaaacagattgcattttaatgattggaacgaacacgcgtgaagaag

SEQ ID NO: 221578 - DNA, 811 bp, Unknown
  Bacterial polypeptide expressing nucleotide sequence isolated from the Sargasso Sea
ataaaaactaatacgccaaagattgaaaaatcaagaaaaggtgtaatggaatttttgttagctaaccatccattagattgtccagtatgtgatcaaggtggagaatgtgatcttcaggatcaatctatgttttatggaattgataagtcaagatataaagaaaataaaagagctgttccagataaaaatatgggtcctctaataaaaactcagatgacaagatgtattcactgcactagatgcataagatttgccactgaagtagcaggcgtacctgaattaggagcaataggaagaggtgaggacatgcaaataactacttatttagaacaatcaattcaatctgaattatcaggcaatgttattgatttatgtccggtgggagctttaacttctaaaccttatgtttttgaagcaagaccatgggaactaaaaaaaacagaaactatagatgttatggacgctgtaggctctaacataagagttgatacttatgactgggaggtaaaaagagtattgcctatagttaatgaagatatcaacgaggagtggctatcagataaatcaagatatgcatgtgatggacttttaaatcaaagacttgatacgccttacattaaatataacaataaatttgaaaaagcctcatggaatgaagtatataaaatcattaaatctaaaatagataatacgtcaaaagataaaatttgtggacttgttggtgatttgaccaatatggagacaagttatatttttaaagagttttttgatagaactttagactcgaaaagatatgattttagatcatcta

SEQ ID NO: 221579 - DNA, 861 bp, Unknown
  Bacterial polypeptide expressing nucleotide sequence isolated from the Sargasso Sea
gaaggtgtcatggagtttcttttaattaatcatcctcttgattgtccgatttgtgaccaaggcggagagtgcgacttgcaagatcaagctgtagaatacggtgtggatttttcgcgataccatgagagcaaaaggtctgttgaaaacattaatattggacccctgataaaaacacatatgacccgttgtatatcctgcactcgatgtgtgcgttttatgacagaagtagctggggccagtgaattggggcaaacaggaaggggagaagatagtgaaatagttagctatttgggacaaagtcttctttctgaacttcaaggcaatctaattgatttatgtccagtaggggcacttacgtcaaaaccatatgcttttacagctagaccttgggagcttgataagactgaaagtatcgatgttatggacgcaataggttcaaatattcgcgtggattctaaaggtaataaaataatgcgaattttacctgttaataatgacgaaataaatgaagagtggatatcagataagacaaggtttatttgggatggtttgggaaggcaaagattagacgttccctacatgaggataaatgggaagcttcagaaagccacttgggatgatgttttcgaatttgtaaagcaaaatattgatggaaaaaagataggtgcaatctgtggggaactacagccaattgagagcatttattcattaagaaagctaattcaaagtcttggtggtgaaacagaatgcagagtagatggagcagattttttagtggaaaatcgcgtagattatattggcaatggcgtaatctctgatatagatacttcagataacatcataattattggatgcgatccc

SEQ ID NO: 221580 - DNA, 901 bp, Unknown
  Bacterial polypeptide expressing nucleotide sequence isolated from the Sargasso Sea
gatgtgtttagttgaaattgaaaaatcgcccaaacctgtagcgtcatgtgctatgcaaattttagaaggaatgaatattaaaacaaatactgaaaaagttgagaaagcaagaaaaggtgtaatggaattcttgttagcaaatcatcctttagattgtccagtttgcgatcaaggaggagagtgtgacttgcaagatcagtctatgttttatggaattgataagtctaggtataaagaaaacaaaagagaagttcctgaaaaatatatggggcctttaattaaaacgcaaatgacaagatgtattcattgtacaagatgcatcagatttgcaaccgaagtagctggtatctctgaacttggagcaataggccgaggtgaagatatgcaaattacgacatatttagaaaaatctatggagtctgagctttcagcaaatgtaattgatttatgtcctgtaggagcattaacatcaaaaccatatgtatttgaagctagaccttgggaattaaaaaaaacagaaacaattgacgtcatggatgcaattggttccaatataagagttgattcttatggttgggaagtaaaaagagttttacctagaattaacgaggatataaatgaagaatggatatctgacaaaaccagatatgcatgtgatggattaaaaaatcaaagattagacactccatataaaaaagtaaataaatcatttgaaaaaatatcttgggatacagcaaataatataattgtagaaaaaataaaagaaacatcaccagatgaaattgctggatttactggagatctaactaatatggaaacatcatttgttttaaaagaattttttaataaaacaataaaatcaaaatatttagagagcagaagtgaaaacttttatgttaat

SEQ ID NO: 221581 - DNA, 310 bp, Unknown
  Bacterial polypeptide expressing nucleotide sequence isolated from the Sargasso Sea
atgattaaagaagaagataaaatattcaaaaatttgcataataattacggatggaatcttcaagactctctaaaacgtgatgattggtctaatacaaaagagataatttccaaaggaagagattggattattaacgaaatcaaaacatctgaattaagaggcagaggaggtgcggggtttcctactggtgttaaatggtcattttctccaaaaaaagttggatcaagacctcattacttaatcataaatgccgatgagtcagaacctggtacatgtaaagatagagatatcatgagatttgaaccacaaa

SEQ ID NO: 221582 - DNA, 411 bp, Unknown
  Bacterial polypeptide expressing nucleotide sequence isolated from the Sargasso Sea
gatgcctaaaataaaaataaataataaagaaattgaatttgaaaatggaatgacagttttacaagcatgtgaaattgctggagctgaaattcctagattttgttatcacgaacgcctttctattgctggtaattgtagaatgtgtttagttgagatggaaaaatcctcaaaacctattgcttcatgtgctatgccagcgaccgagggaatgaatataaaaactaataccaaaatggtagagaaagctagaaaaggagttatggaatttcttttagcaaaccatcctcttgattgtcctgtttgtgatcaaggtggcgaatgtgatttgcaggatcaatctctttattatggttttgataaatctagatttaaagagaacaagagagaggttgaagataaatatatgggtcc

SEQ ID NO: 221583 - DNA, 400 bp, Unknown
  Bacterial polypeptide expressing nucleotide sequence isolated from the Sargasso Sea
aatgcttaaacttaaagtaaatgatattgatgttgaggttgaagaaggtacaactgttctgcaagcatgcgaacaagcgggagcagagataccaaggttctgttatcacgaaaaattgtctatagctggaaattgtagaatgtgtttagttgaaatggaaaaatctcctaagccaatagcttcttgcgcgatgcctgctgcagagggaatggtgcttagaactaacaccgaaaaagtgaaaaaagcaagaaaaggtgtaatggaatttttactagcaaaccatccactagattgtccagtatgtgatcaaggcggcgaatgtgatttacaagatcaatcaatgtattatggaattgataaatcaagatttaaagaaaataaaagatattacctgaaaaat

SEQ ID NO: 221584 - DNA, 396 bp, Unknown
  Bacterial polypeptide expressing nucleotide sequence isolated from the Sargasso Sea
aatgggattattagagaataaatttaatgacagtgttattgttgagaaactagacaaattacttagctggtcaagatcaacctcaccctggttttttcaatttggaacagcctgttgtgccattgaaatgatggctgctgctgcgagcagacatgatcttatgcgaataggcattatccctcggtcatcaccaaggcaggcagatgtaatgattgtcgcaggaacagtgacaatgaaaatggcactgcgtgtaaaaaaactatacgaacaaatggcagatccaaaatatgttgtggcaatggggtcctgcgctacaagtggaggaccatattggcagcatgggtatcacgtgctaaaaggtgtagatatcgtaattcccgtagatgtatatgtacc

SEQ ID NO: 221585 - DNA, 811 bp, Unknown
  Bacterial polypeptide expressing nucleotide sequence isolated from the Sargasso Sea
gatgtgtttagttgaaatggaaaaagctccaaagcctattgcttcatgtgcaatgccagcagctgatggaatggttataaaaaccaatacccaaatagtgcaaaaagcccgaaaaggagttatggaatttttacttattaatcatcctttagattgcccaatttgtgatcaaggaggggaatgtgatttacaggatcaagctatgtattatggttttgataaaacaaggtatgaggaaaataaaagagcagttcaaaataaaaatatgggacctcttgttaaaactataatgacaagatgcattcattgtacaagatgtgttagattttcaactgaggtggcaggagtggatgatataggtttgcttggtagaggtgagaatgcagaaattactacctatcttgaaaaaactattgagtctgagttatcaggaaatgttatagatttatgccctgtaggagctctaactagcaagccttacgcatttaaatctagaccttgggaacttactaaaacagaaacttatgatgtatttgatggtgtaggttcaagcattagaatagataccaggggaaaaaaagttttaagggttttaccaagaataaatgaagaaactaatgaagaatggatcagtgataaaactagatttgctattgacggcctttcaagtcaaagacttgataatgtttattctaaaatagatggcaaacttaaaaaatcctcttggaatgatgcatttactatagttaaagatcaaattattaatagaggcagtgaaaatactgtatttttatctggaaaattcacagat

SEQ ID NO: 221586 - DNA, 680 bp, Unknown
  Bacterial polypeptide expressing nucleotide sequence isolated from the Sargasso Sea
gatgataagcttcctatcactatttatcgtattttcacctctgctaggtgctttatttctacttttttatcctaataaaagtgattttatatcatctatcattgcaaatatttctgtaggaatatcttttttattttcgctatttcttttgattaaatatttttttgataatgataatcaaactctagttcatctttttacatggttaaatcttaataattttatatttgaatttgcttttatgattgatagtttaactgtaattatgtcattcatcgttacatttatatcattctttgttcatatattttctattggttatatgaaaggcgattctagctttaatagatttttgatatatacaaacttttttacattttcaatgttgttaattgtttttgcagataactttcttcaactatttattggatgggaactagtgggtttatcctcgtacctacttattggattctggtataaaaaagaatctgcgattaaggcaaatcttaaggcttttattgtgaataggattggagacataggtttgttattaggcgttattatgatttttgttttcagtaacactcttaattataatgaattttttctcacattacccaatctaagtaatattgatatttcaatttttggattttctctagatttattaccattaatag

SEQ ID NO: 221587 - DNA, 380 bp, Unknown
  Bacterial polypeptide expressing nucleotide sequence isolated from the Sargasso Sea
tatgatcgaagaaactcttgtccttttcaaaaacataagaaatcctgattataacaaaacacttgagggttacaaaaaagtcggaggctataaaactttaaagaaagtctttggtatgaagcctgaagaagttattcagacagtgaaggattccggtattcgcggaagaggtggtgcagggttccctacaggtttgaagtggagtttcatgcaaaaaggatctgctaagcctagttatcttattgcgaatgcagatgaatctgaacctggaacatgcaaagacagggagctaatgctcaaggatcctcatctttttctggaaggcatgatgatcggttgtttcgctgtagggtgtcatcatggttatatctatatacgag

SEQ ID NO: 221588 - DNA, 541 bp, Unknown
  Bacterial polypeptide expressing nucleotide sequence isolated from the Sargasso Sea
atgataaaattaaaagtaaacgatttagatcttgaagttgaagaaggtttgactgtgcttcaagcatgcgaaagagcaggggtagaaattcccagattctgctatcatgaaaaactttctatagcaggtaattgcagaatgtgtttagtagaaattgaaaaatctcctaaacctgtagcttcatgtgcaatgcctatctccgaagggatgaatattaaaacaaatacagaaaaggttgagaaagcaagaaaaggtgtcatggagtttttgttagcaaatcatcctttagactgtcctgtttgtgatcaaggtggagaatgtgacttacaagatcaatcaatgttctatggaatagataaatctagatataaggaaaataaaagagctgttaaagacaaatatatgggacctttaatcaaaactcatatgacgagatgcattcattgtacaagatgtattagatttgcttctgaagttgctggagtttcagaacttggagcaatcggtagaggtgaagatatgcaaattacaacatattaga

SEQ ID NO: 221589 - DNA, 811 bp, Unknown
  Bacterial polypeptide expressing nucleotide sequence isolated from the Sargasso Sea
tgaagtaaccgatgaaatggttgtagatactgagtctgaagtagtaaaaaaagctcaagaaggagttttagaatttttgttaatcaatcatcctcttgattgtcctatatgtgataaagctggtgagtgtcctttacaagatcagactatggcttatgggcctggggaaagcagatttgtcgaagaaaaaagacactttgaaaaaccaatttctatttctgaaattattcttttagacagagaaagatgtattttatgtgctcgatgtacaaggttttctgatgaaatttctggagatccattaattgaatttattcaaagaggcaataaaacagaagttaatacttttcctaatgaaccttttaagtcttacttctctggcaacacagtacaaatctgtccagtaggtgcattaacgtcaacttcatacaggtttaaagcaagaccttgggatctaaaatcagttagatcaacttgtaatggctgtccagtaggttgttcaacagaattaaactcatctcaaaacaaaatgcttagaattctaggagttgataacgatagtgtaaatcaaggttggctttgtgataaaggtaggtacaattttgaatacttgaattcagaatttaggttaaaaactccattaaaaaaaatagaaaatgaatttaaagaaacatctgttaaagaaatctacacagaattaagtgaattaattagcgatagaaatacaaatataaattttttaataggcactaatagtaccaatgaagattatgttgcttttaatgagtttgctaaaaacttcctacaacaa

SEQ ID NO: 221590 - DNA, 499 bp, Unknown
  Bacterial polypeptide expressing nucleotide sequence isolated from the Sargasso Sea
atgcttaaattaaaagtaaatgaaattgatatagaggtagaagaaggattaacagtactacaagcatgtgagcaagcaggtgctgagattcctagattttgctatcatgaaaaactttccattgcaggaaactgtagaatgtgccttgttgagatggaaaaatcacccaaaccaatagcatcatgtgcaatgccagctgctgaaggaatggttattaaaacaaatactgaaaaagttgaaaaatctagaaaaggcgtgatggaatttctcttagccaaccatccacttgattgtccagtttgtgatcaaggtggagaatgtgatcttcaagatcaatctatgttttatggaattgacaaaagtagatttaaagaaaacaaaagatatgtacctgaaaaatatatgggtccattaattaagactcaaatgacaagatgtattcactgtaccagatgtataagatttgcaactgaagtagctggtgtacctgaattgggtg

SEQ ID NO: 221591 - DNA, 487 bp, Unknown
  Bacterial polypeptide expressing nucleotide sequence isolated from the Sargasso Sea
atgcttaaggaccaagatagaatttttaaaaatttgtacaatgattatggagaagatttgttatcagcaaaaaaaagagatgactggtccaacactaaagaattatgtttaaaaggaaaagaatggattattaatgaaattaaatcatctgaattaagaggtagaggcggagcaggttttcctacaggcttaaaatggtcttttgcacccaaagaagttggttcacgacctcattatcttgtaataaacgctgatgagtcagaaccaggaacttgtaaagatagagatattttaagatttgagccgcataaattaatagaaggttgtttaataacatcttatgcggtaaatgcccacaaatgctatatttacataagaggagaatattttaatgaaggtcaaaaacttcaaaaagcaataaatgaagcgtacgaagaaaacttaattggaaaaaattcatgcggcacaggatggagtttagatatag

SEQ ID NO: 221592 - DNA, 397 bp, Unknown
  Bacterial polypeptide expressing nucleotide sequence isolated from the Sargasso Sea
atgcaagatggacacaaattaatggcattttttccaggaggagcttcaggaggtatttttcctgctaaaatggcaaaaaatccaatggactttggcgtctgggagaaagatggaggttttataggttcacatgcggttgttattttatctgataaagacaatattttaaatgctgtaaaaaatacaattgatttttttgaacatgagagttgtggtcaatgtactccttgcagggttggattaaacaaaatttcaaatttattgaaacaaaattcatttgatgaaaagttatatgaagatttaaactatgttatgagagatagttcaatttgtggtttaggacaatctgcaggcaactgtattaatcatttttttaaattttttaataagaattaaa

SEQ ID NO: 221593 - DNA, 537 bp, Unknown
  Bacterial polypeptide expressing nucleotide sequence isolated from the Sargasso Sea
aatgcttaaattaaaagtaaacgatattgatgtagaagttgaagaaggattaactgtattgcaggcttgtgaacaagccggtgtagagattcctagattttgttaccatgaaaaactttctattgctggaaattgtagaatgtgtcttgttgaaatggaaaaatcacctaaacctatagcatcatgtgcaatgccagcagctgaaggcatggttataaaaacaaatacagataaagttgaaaaatctagaaaaggtgtgatggagtttcttcttgctaatcatccacttgattgtcctgtttgtgatcaaggtggtgaatgtgatcttcaggatcaatctatgttttatggtattgataaaagcagattcaaagaaaacaagagatatgtgccagaaaaatatatgggcccattaataaagactcaaatgacaaggtgtattcattgtactcgctgtataagatttgcgaccgaagtcgctggtgtacctgaattaggcgcaataggaagaggtgaagatatgcaaattacaactta

SEQ ID NO: 221594 - DNA, 373 bp, Unknown
  Bacterial polypeptide expressing nucleotide sequence isolated from the Sargasso Sea
atgggattattagagaatagatttaatgatagtgttgttgttgagaaactagacaaattacttagctggtcaagatcaacttcaccttggttttttcaatttggaacagcctgttgtgccattgaaatgatggcggctgctgcgagcagacatgatcttatgcgaataggcatcatccctcggtcatcgccaaggcaggcagatgtaatgattgttgcaggaactgtgacaatgaaaatggcactgcgtgtaaagaaactatacgaacaaatggcagatccaaaatatgttgtggcaatggggtcctgtgctacaagcggaggaccatattggcagcatgggtatcacgtgttaaaaggtgtggatattgtaa

SEQ ID NO: 221595 - DNA, 868 bp, Unknown
  Bacterial polypeptide expressing nucleotide sequence isolated from the Sargasso Sea
agaatgtgtttagtagaaattgaaaaatcaagaaaaccagttgcctcatgtgctatgccagttacagaaggaatgaatattaaaacaaatacagaacttgtagaaaaagctagaaaaggagtaatggaatttcttttagctaatcaccccttagattgtccagtttgtgatcaaggcggagagtgtgatttacaagatcaatcaatgttttatgggattgataaatctaggtttaaagaaaacaagaggtttgtacctgaaaaatatatgggtccactaataaaaactcagatgacaagatgcatacattgtacacgttgtgtaagatttgcaactgaggtagcgggtgttccagaaattggtgctattggcagaggtgaagatatgcaaattacaacttatttagagaaagctatggagtctgaactatctgcaaatgttatagatttgtgtccagttggagctcttacctcaaaaccatatgtatttgaagccagaccctgggaacttaaaaaaactgaaacagttgatgttatggatgccgttggctcaaacatacgtgttgatacttacggatgggaagtaaaaaggattttgccaaaaataaacgaggaaatcaacgaggaatggatttcggataaaactagatacgcatgtgatggtttaaaataccaaagattagatatcccctacgtcaaaaaagagaatagttttaaaaagattagctggccagaagcatttcaaatattaaaaaataaaattaactcaacaaatcccgaaaaaatagctggtttaactggcgatcttacaaatatggaaacattattcgcttgtaaagaattgttcaaaaagtttaaaatcaaaagat

SEQ ID NO: 221596 - DNA, 559 bp, Unknown
  Bacterial polypeptide expressing nucleotide sequence isolated from the Sargasso Sea
cggcactaaaattttctcggtcagtgggcatgtcaataaccctgggaattttgaaatccctttgggcactcctttctccgagcttctcgaactagctggaggagttgcgggagggcgaaggctgaaggcagtgatacctggaggctcatcagttcccgttatcaaaggggaggcgatgatgtccgtagatatggactatgactctattagcaaagctggttctatgttgggttcaggcgcggttattgtgatggatgagaccgccgatatggttaaagtgctccaaaggatctctagattttattacgccgaatcgtgtggtcagtgcacaccatgcagggagggaaccgggtggctttatcggatgctcaccaggatagtagaaggcaacggccacatcgacgaccttagaaggttagacgatgtagcgtcaaagataggagggactacgatctgtgctttaggagatgctgctgtcatgcccgtgcaaagtttcttacaacattttcgtgatgaattcgtcgcctacattgaaaaaaaacaggaaaaagtagcgtga

SEQ ID NO: 221597 - DNA, 341 bp, Unknown
  Bacterial polypeptide expressing nucleotide sequence isolated from the Sargasso Sea
aatgaataaagaaagtgaagtagcaatagaagtcgacggtgaggagttaatggcccctgcaggttcaatgataatacaggctactgatatagcagatatttacataccgagattctgctatcacaaggagctaagcattgcagcaaattgcaggatgtgtctagtcgaggtggagggtgcccctaaaccgttgccagcatgcgccacgccggtctctgagggaatgaaggtttttactaaatctgagaaggccatcaacgcgcaacaaggtacaatggaatttctgttgataaatcatccattagactgccccatttgtgaccagggaggggagtgcgagt

SEQ ID NO: 221598 - DNA, 325 bp, Unknown
  Bacterial polypeptide expressing nucleotide sequence isolated from the Sargasso Sea
aatgcttaaattaaaagtaaatgaaattgaagtagaagtcgaagatggattaacagtgcttcaagcttgtgaaaaagcaggtgttgaaataccaagattttgctatcatgaaaaattatcaatagcaggtaattgccgaatgtgtttagttgaaatagaaaaatctcctaaaccaattgcatcttgtgcaatgccagctgctgagggtatgaatattaaaacaaatactgctttagttgaaaaggctcgtaaaggtgtaatggaatttttattagctaatcatcccttagattgtccagtgtgtgatcaaggtggtgaatgtgat

SEQ ID NO: 221599 - DNA, 430 bp, Unknown
  Bacterial polypeptide expressing nucleotide sequence isolated from the Sargasso Sea
atgcttaaacttaaagttaatgatattgatgtagaagtagaagatggattaacagttcttcaagcttgtgaaaaagcaggagtcgagattccaagattttgttatcatgaaaaattatctatagcaggtaattgtagaatgtgtttagtagaaatggaaaaatctcctaaacctatagcttcatgtgctatgccagcagctgaaggcatggtaattaaaaccaatactgcatttgttgaaaaagctcgaaaaggtgtaatggaatttttattagcaaatcatcctttggattgtccagtatgtgatcagggtggtgaatgtgatctacaagatcaatcaatgtattacggaattgataaatcaagatttaaggaaaataaaagaatggtacctgaaaaaaatatgggaccattaattaaaacacagagac

SEQ ID NO: 221600 - DNA, 604 bp, Unknown
  Bacterial polypeptide expressing nucleotide sequence isolated from the Sargasso Sea
atgtctgacgaattgttcaaactgaacattgatggccaagagattgaggtcccgcgccattacacgctgatgcaagcttgcgaagaggcgggcgctgaaatcccgcgcttctgctatcatgagcgcctgtctgtcgccggcaattgtcgcatgtgtctggtgcaatggcacggtgcgccgaagccgatcgcatcttgtgcgcagacggtgggcgatatgcggatgaacccagacggcacgccgcccaatatttcgacgtcgggcgactatgtcgaaaaggcgcggtccggcgtcatggaattcctcctcatcaaccacccgctcgattgtccgatttgcgaccaaggcggcgagtgcgacctgcaagaccaggccgtcgcttatggtcgctccggctcgcgctatgagctgaataagcgcgcagtcgaagataagaatatgggcccgctggtcaaaacgatcatgacgcgctgcatccagtgcacgcgctgtgtccgcttcgcggcagaagtcgccggtgtcgaagagctgggtatgatttcgcgcggtgaaagcgctgaaatcacgacctattggaagaaagctttcatcagagctctccggc

SEQ ID NO: 221601 - DNA, 433 bp, Unknown
  Bacterial polypeptide expressing nucleotide sequence isolated from the Sargasso Sea
atgcttaaattaaaaataaacgatattgatattgaggtagaagacggattgacagtacttcaggcttgtgaaaaagcaggatttgaaattccaagattctgctaccatgaaaaactttcaatagctggaaactgcagaatgtgtttagttgaaatagaaaaatctcctaagccaattgcttcttgcgctatgcctgctgctgaaggaatgaatataaaaactaatactgcatttgtggaaaaatcaagaaaaggtgtaatggaatttctattagctaatcatcctctggactgtccagtatgtgatcaaggtggagaatgtgatttacaagatcagtctatgttttatggcatagataaatctagatataaagaaaacaaaagatatgtaccagataaatacatgggaccactaatcaaaactcaaatgacaa

SEQ ID NO: 221602 - DNA, 757 bp, Unknown
  Bacterial polypeptide expressing nucleotide sequence isolated from the Sargasso Sea
tatgactccgtcttttcttcttatacttgttccattactgccccttctcgcagctcttgccaccgttattggtggacgaagactaggtccccgatcgcatctacctgctgttgtcggcatagccgcagcagcggttgttgcattatcgcttcttgtagtcactgcccgcagccgaggaagtgcagtaagacctcgtcctgttgatatggtgaccacactatgggaatgggcaaccgttgatgatgcatatgccccagctcatgactcacacgcggcagttccagggacggctgttggcgaggatgcttacatcgctcgcccattttcgatttcgattgccatgcgactcgatccgcttacagcgacaatgcttgtaattattacgagtgttggacttctagtcgccatctactcgataggatatatgcatgacgaccctgggtacccgcgattcttcgcgctcgtggccatgttcgttttctcaatgtcaatgctcgtagcagcgagtaacttcctcttggtctatgttttctgggaggcagtcggcgcctgtagctacttactcattggcttctggtttcaaaaaccggaagcagcaaaggcagctaaaaaagcatttcttgtgaaccggataggagactttggtcttgccgtaagtgtttttctgctctggctcacctatggaaccctcgattttcatgacacactttctcctgacggaacgattctccctggcattctcgggcagactcgcctt

SEQ ID NO: 221603 - DNA, 973 bp, Unknown
  Bacterial polypeptide expressing nucleotide sequence isolated from the Sargasso Sea
tgatcctcaagatcaagcgatgtattatggttttgataaacctagatatgaagagaacaaaagagcagttcaaaataaaaatatgggaccacttgtcaaaacaattatgacaagatgtatacattgtacaagatgcgtaaggttttctacagaagttgctggtgttgatgatataggattacttggcagaggtgaaaatgctgagatcacgacgtacttagaaaaaactattgagtcagaattatctggaaatgtaattgatttatgccccgtaggtgctttaacaagtaaaccatatgcatttaaatctagaccatgggagttaactaagacagaaacatttgatgtgtttgatggtttaggttcaagtataaggattgatacaagaggaaaaaaagttttaagagctcttcctagaataaatgaagaaaccaatgaagaatggataagtgataaatctagatttgcaattgatggactctcaagtcaaagattggataatgtatattctaaatcaaataaaaaactccaaaaatcttcatgggataatgcatttaaattaataaaaaaagaaattacaaaaagaggtaaagaaaatactgtattcctatctggtaagtttaccgatattgaaactttatattccgcacaaaaatttagcaattcactaaaatcaaaaaactatgattgtagatttgataatacacaaattatcgataattcatcttcaagttataaatttaattcaacaattcaagaaattgaaaaggctgatgctattcttttaatcggatcaaacccgagatgggaagcagctgtactaaacgctagaattagaaaggcatatattgaaaataactgcaaaattggacttataggtcctaaattaaatcttacttacgattatcatcatttatatgattctttagattaccttaataaattatctaataataaatctgaattcaataaa

SEQ ID NO: 221604 - DNA, 417 bp, Unknown
  Bacterial polypeptide expressing nucleotide sequence isolated from the Sargasso Sea
aatgcttgaagataaagatagaatttttcaaaatttatacaatgattttggtgctgatttaatatctgcaaaacagaggggagactggaaggatacaaaagaaatttgcggcaaaggaagagaatggataattaatgaaattaaagcatctgaacttagaggaagaggtggtgctggattccctacaggattgaaatggtcttttgctccaaaagaagttggatcaagaccacattatttagtaataaatgcagatgagtctgaacctggcacatgcaaagatagagatattctaagatttgaacctcataaattaatagaaggctgcttaatttcatcttacgcagttaatgcacacaagtgctatatttacataagaggagaatattttaatgaaggacaaaagcttcaaacagc

SEQ ID NO: 221605 - DNA, 904 bp, Unknown
  Bacterial polypeptide expressing nucleotide sequence isolated from the Sargasso Sea
atgagcgaagaggttaaaaaattcaaaataacgatagacggacagactactgaagttttgccgggtacttctattctggaagctgcaagacaaatcggcggaaaatctgtacctcctgcaatgtgctactacagcaaactggaaaccagtggcggaagatgcagaacctgccttgtggaagtttccaaaggatctgaagcagatccgcgtcctatgccgaaattggtggcaagctgcagaaccaacgttatggatgggatggaagtaaaaaatcttacttctgaaaaagctcaggaaggaagaaaagcagttaccgaattccttttggtaaaccaccctttagactgccctatctgcgatcaggcgggagaatgtcaccttcaggatttagggtatgaacatggaaatcttgaaaccagaacggagttcgaaagaaatacgtacgatgccgatgatttgggtccgcacatcaaactgaatatgaaccgttgtattctttgtgcaagatgtgtactcgctgcaaaccagcttaccggagaaagagaacacggaattttgttcagaggagatcacgctgaaatttcaacctacttaaataaagctttggataatgatttcatcggaaacgtaatcgacgtttgtcctgtaggagcattaaccgacagaacagcacgtttttcaagcagagtatggtttacaaaaccgatgaacgctacctgcaaatgtgataaatgttccggaaaagctgtagtctggatgaagggcgatgaaatcgtgagagttaccgcaagaaaagatcagtggggagaagttgaagaatttatctgcgacacctgccgtttcgacagaaaagaactttctgactggaacattgaaggtccgagacatatcgacagacactcag

SEQ ID NO: 221606 - DNA, 406 bp, Unknown
  Bacterial polypeptide expressing nucleotide sequence isolated from the Sargasso Sea
aatgcttaaacttaaagttaatgatattgatgttgaggtagaagaaggtacaactgtattgcaagcatgcgaacaagctggagcagagataccaaggttctgttatcacgaaaaattatcaatagccggaaattgtagaatgtgtttagttgaaatggaaaaatctcctaagccaatagcatcttgcgcgatgcctgctgcagaggggatggtgcttagaactaacaccgaaaaagtgaaaaaagcaagaaaaggtgtaatggaatttttactagcaaaccatccacttgattgtccagtatgtgatcaaggcggagaatgtgatttacaagatcaatccatgtattacggaattgataaatcaagatttaaagaaaataaaagatatgtacccgaaaaatatatg

SEQ ID NO: 221607 - DNA, 331 bp, Unknown
  Bacterial polypeptide expressing nucleotide sequence isolated from the Sargasso Sea
aatgcttaaattgaaagtaaatgacattgatgtagaagttgaagagggtttgacagtacttcaagcgtgtgaaaaagctggagttgaaattccaaggttttgttatcatgaaaaactctctatagctggaaattgtagaatgtgtttagtagaaatggaaaaatctcctaaacctattgcctcatgtgcaatgccagcagcagaaggtatgaaaattaaaacaaatactccatttgtagaaaaagctagaaaaggtgtgatggaatttttattagcaaatcatcctttggattgtccagtttgtgatcaagggggtgaatgtgatcttcaa

SEQ ID NO: 221608 - DNA, 797 bp, Unknown
  Bacterial polypeptide expressing nucleotide sequence isolated from the Sargasso Sea
acaggcaaaccgagttacctcatttgtaatgcggatgaatccgaacccggaacctgtaaggaccgtgaattaatgctcaaggatcctcatcagtttcttgagggaatgatgattggttgctacgcgatcaactgtaaacatggttacatttatgttcgaggagagtatttcccttcaatcaaaagcttgaatgaagccatcgatgaactttatgcggcgggtcttttgggcgaaaatgctcttggcaaagggaaacgcctcgatctcacagttcataccggggcaggggcgtatatctgtggtgaagaatctgcactgcttgattcattggagggcaaacgcggtcatcccagggtgaaacctccctttcccgcagtttcaggtttcaatgcatgcccgacaaccgtcaataatgttgagacccttacctgcctgcctttcatcgtcaatgaaggagcagaggctttcaaggacttcggtcctgataataatgcagggacccatcttgtcagcctcagtggacacgtggaaaaacctggggtttacgaagtaaggatggatgtcagcctgaagcagatcatctacgacctcggtggaggaattcggggagggaaagccctcaaaggagttatcccgggtggtgcgtcatcaccggttttgactgcaaaagaaattgatgtcgaatacagtttcgatgctcttggaaaagcagggacgatgatgggttctgctgcagttatggtctttgacgaagacaccgacgttgtcaaactgcttcaccgcatcacccgtttctt

SEQ ID NO: 221609 - DNA, 604 bp, Unknown
  Bacterial polypeptide expressing nucleotide sequence isolated from the Sargasso Sea
atgactaataacgaaattgtttggttaatattaatacttccctttgtagcttttcttataaatgggtttattacattatttaccaactacaagaattcaaaattttctggttatcttaatcttacatcaattggaatatcgttcattttaagtttataccttgcaattattgggttggataaaaactttgattatcaatcagcttcttttcaatggatttcatttgggatttttgaaataactatggcaattatgctcgatgaactaacccttattatgatttcggttgtaactgcaattagtttccttattcaaatttattctctctcatacatggagcacgatgatggatattctagatactttagttatatggggcttttcacaacatccatgttaggacttgtcacagctagaaacttaattcaactgtttatattttgggaattagttggagcaacttcatatttattaattggattttggtataaaaagcaaagtgcaataaaggctgctaaaaaagcttttcttatgactagagttggtgattttggtttaattgcaggaatattattaattgcaaaacaaggctctcaatatctgg

SEQ ID NO: 221610 - DNA, 976 bp, Unknown
  Bacterial polypeptide expressing nucleotide sequence isolated from the Sargasso Sea
tgatattgattgctatatcaagcatggaggctacgaggacttgaagaaggctttcaaaatgaagccagaagatatttgtgaagaggttttgcaatcaggcgtccgaggacgaggtggagcaggcttcccagcaggaatgaaatggaagtttttagatcgtaagtcaggaaagcctatttatctgatttgtaatgctgatgaatcagagccaggaacgtttaaggatcgacaaattattcataaagatccgcatcaattgattgaaggtatattatgttcggcttatgcgattcaagcgaagctagcctttatttacattcgtggagagttttttgagggatataaaattttggaacgtgcgattgaagaggctcgtgctaaaaatttcttaggggataatatattgggttctgattattcctgtgatattatagttcatcgtggagcaggcgcctatatctgtggtgaagaaaccggcttaatcgaatcgttagaaggcaagcgtgcaaaccctagaattaaaccgccttattttcctgcggctttaggtttatatcaatgtcctactattgttaacaatgtagaaacattgtgtgatgtgaaacatgtgattaacatgggaggcaaagaatttggaaaaatcggaactccaggtaatacaggtacacgaatttggtgcgtttcgggtcatgttcaaaagcctggctattatgaattcccatgtgcaggagttactttaggtgaattgatttatgatgtttgtggtggcttgctaccaggaagaaaattaaaagcagttattccaggcggttcatcatcaaaaattcttcgtgcggatgaacgctttactggtaagaaaaaagacggaacagaatttgattgggggattgaagacatccctatggatttcgatagtttatctttagtcggctcaatgtctggttctgggggtgtgatcattatggatgatagtaca

SEQ ID NO: 221611 - DNA, 334 bp, Unknown
  Bacterial polypeptide expressing nucleotide sequence isolated from the Sargasso Sea
ttgcttaaagagaaggataaaatatttccaaatattcatggtttccttgatcgctcagtgaaaggagtgatgtcgcgcggtggatgggttgatacaaaagctataatactacgaggtcccgacgatataataaaaaccatacaagattcaggcttgagagggaggggtggggcaggatttcctacaggtttgaaatggtcattcatgccaaaaagtacagaaaagcctaagtatttggtcataaatgcagatgagtctgaacctgggacctgcaaggatagagaaatacttagacatgagccacatagcctattggaaggctgtttgttagcag

SEQ ID NO: 221612 - DNA, 508 bp, Unknown
  Bacterial polypeptide expressing nucleotide sequence isolated from the Sargasso Sea
atgacagaattaaaaaaaattataattgatgatcaagaaatagaggttgacgccgctatgactttaatacaggcctgtgagcttgtcggcatagaggttcctagattctgctatcatgagcgactgtcaatcgcaggtaactgcaggatgtgtcttgtagaggtggttgggggacctccaaagcccactgcatcctgtgcgatgcaagttagagatcttcgtccaggacctgacggacagcctccagtagtgcgcacaaactccaaaatggtgaaaaaggcccgtgagggtgtaatggagtttctattgatcaatcaccctcttgactgtccaatttgtgatcaaggcggcgaatgtgatcttcaggatcaggcaatggcctttggtgtggattttagcagatttaaagaagcaaaacgtgcggtagacgaccttgaccttggcccgcttgtgtcaacaaacatgactaggtgcattagttgtactcgatgcgttcgatttacctctg

SEQ ID NO: 221613 - DNA, 379 bp, Unknown
  Bacterial polypeptide expressing nucleotide sequence isolated from the Sargasso Sea
atgctgaccgatcaggatcgcatcttcaccaacatctacggcatggccgatcgcagcctgaagggtgctcagtcgcgcggagcctgggacggaaccgccgatatcatcggcaagggccgcgattggatcatcaacgaggtaaaggcttcgggcctgcgcgggcggggtggtgcaggtttcccgacggggctgaagtggtccttcatgccgaaggaaagcgatggccgcccgtcctatctggtggtcaatgcggatgagtcggagcccggcacctgcaaggaccgtgagatcatgcggcacgacccgcatctgttcatcgagggctgtctgatcgcgtccttcgcgatgaacgccaacacctgctatatctatatccgag

SEQ ID NO: 221614 - DNA, 493 bp, Unknown
  Bacterial polypeptide expressing nucleotide sequence isolated from the Sargasso Sea
atgagtgatcaaattaacataaatgttaatggttcagaaatcgtaacagattctgatcagctaatcattgaagcttgtgaagattctggcattcatattccaagattttgctggcacaaacgcatggatccagttggcatgtgtcgcatgtgcttagttgaaattgaaaccccgcgtggaaaagctctagtcccctcatgcactactaaagtttcagaagatttagttgtagatactgaatcagaagttgtaaaaaaagctcaagaaggtgttttagaatttttattaataaaccatcctttggattgtcctgtatgcgataaggctggagagtgccctttgcaagaccaaactatggcttatggacctggtgagtctcgatttgttgaagataaaagacattttgaaaaacctataccaatttcagaaataattctccttgatagagaaagatgtattttgtgtgcacgttgtaccagattttctgatgaaa

SEQ ID NO: 221615 - DNA, 473 bp, Unknown
  Bacterial polypeptide expressing nucleotide sequence isolated from the Sargasso Sea
aatgcttaaattaaaagttaatgatattgaagtagaggttgaggaagggctgactgttcttcaggcttgtgaaaaagcaggcgcagaaataccaagattttgttatcacgaaaaattatcaatagctggtaactgcagaatgtgtttagttgaaatggaaaaatctccaaaaccaatagcctcatgtgcaatgcccgctgcagatggaatggttataaaaactaatactccaaaaatagagaaatcaaggaaaggtgtgatggagtttttattagcaaatcatccgttggattgtccagtgtgtgatcagggtggggaatgtgatcttcaagatcaatcaatgttttatggaatagataagtcaagatttaaagaaaataaaagagcagtgcctgagaaaaatatgggtccactgatcaaaactcaaatgacaagatgtattcattgtacaaggtgtgtgagatttgcaaccg

SEQ ID NO: 221616 - DNA, 621 bp, Unknown
  Bacterial polypeptide expressing nucleotide sequence isolated from the Sargasso Sea
aatgcttaaggatcaagacagaatttttcaaaacttatacaatgatttgggacctgacctaacctcatctcagaaaagaggtgattgggttaacaccaaagaaattacagataagggcagagactggattataaatgaaattaaagactctcaacttagagggagaggtggagcaggctttccaacaggtttaaaatggtcctttgcacctaaagaagtcggttcaagaccccattatttagtgattaatggtgacgagtctgagccaggtacttgtaaagatagagatattttaagatttgaacctcataaattaatcgaaggttgtttgattgcatcttatgctattcaagcacatgtttgttatatttatattagaggagaatattttgttgacggacaaaagctacaggcagcaattgacgaagcttatgaaaaaaaactattaggtaaaaatgctgcagatactgggtgggatctagatatttatattcactatggagctggtgcgtatatttgtggagaagaaactgcattactcgagagtattgaaggaaaaaaaggacaaccaagaattaaagcccccttttccagcgctaattggactttatggctgcccaa

SEQ ID NO: 221617 - DNA, 357 bp, Unknown
  Bacterial polypeptide expressing nucleotide sequence isolated from the Sargasso Sea
aatgttaaaagaggaagataaaatttttaaaaatttgtatggatttgatgattggtcattatcaggcgctaaaaggagagaggtttggtcaaatacaaaagatcttctcgatcaaggttctgaaaaaataattgaagaaataaaaaacagccaacttagaggtagaggaggcgcaggattccctgctggtttaaagtggtcatttatgccaaaagattcaggaaaagatcattatttagtagttaatgcagatgagtctgaacctggtacttgcaaagatagagaaatattacgtaatgatccccatttattgcttgaaggatgtttaatagcaggttttgcaatgcatgctcacaa

SEQ ID NO: 221618 - DNA, 331 bp, Unknown
  Bacterial polypeptide expressing nucleotide sequence isolated from the Sargasso Sea
atgattaaagaagaaaacaaaatatttaaaaatctttataatgatcttggttgggaaatagataattctttaaaaagagatgattggaaaaatactaaagaaataatctctaagggaagagattggattatcaatgaagttaaatcatcagaacttagaggcagaggtggtgctggttttcctactggtttaaaatggtcatttgctcccaaggaaataggttcaagacctcactatttagtaagtaacgcagatgagtcagaaccaggaacatgtaaagatagggatattttaagattcgaaccacaaaaactaatagaaggttgttaat

SEQ ID NO: 221619 - DNA, 569 bp, Unknown
  Bacterial polypeptide expressing nucleotide sequence isolated from the Sargasso Sea
aatgattaaattaaccgttgacgataaggaaatagaagttgaagaagggtgtactgttctccaagcatgtgagatcgcaggtgttgaaattccaaggttttgttatcacgataggctctctatagctggaaattgtagaatgtgcttagtggaagttaaacccggtccaccaaagcctcaagcaagctgcgcattgccagctactaatggacaaattatttccacaaattcaaaaatggttcatgatgcgcgtaaaggtgttatggaatttcttttaattaatcatcctttagattgtccaatatgcgaccaaggcggtgagtgtgacttacaagatcaggctatgtcatttggttctgataaaacacgtttttttgaaaataaaagagcggttgaagaaaaatcaatgggaccattaattaaaacaaatatgacaaggtgcattcactgcactagatgtgtgaggttttcaactgaagttgccggtgtaaatgatcttggagctcttggtcgaggggagagcatggaaataactacttatttggaaaaatcaatcgattcagaattat

SEQ ID NO: 221620 - DNA, 331 bp, Unknown
  Bacterial polypeptide expressing nucleotide sequence isolated from the Sargasso Sea
atgatatcagaaaaaaatattatattcagtgatatacatggttttaatggaagtgacattagtattagtgagaaaagaggggactgggataatacaaaagcactaattaataaaggagctgattggattattaatgaagttaagaattcagaattaagaggaaggggaggagcaggttttccaacaggtttaaaatggtcatttatgccgaagaaaaaaaataaacctcattatatagtaattaatgcagatgaaagtgagcctggtacttgtaaagatcgagaaattatgagaaatgagccccataaattgattgaaggaatattttagc

SEQ ID NO: 221621 - DNA, 316 bp, Unknown
  Bacterial polypeptide expressing nucleotide sequence isolated from the Sargasso Sea
atgcttaaaataaaagttaatgagattgatttagaagttgaagagggcctaacagttctccaagcctgtgagcaagcaggagcagaaattcctagattttgttatcatgaaaaactttcaatagccggaaattgtagaatgtgtctagttgaagtagaaaaatcaccaaaaccagttgcatcatgtgccatgccagtttcagcgggaatgaatataaaaacaaatactcctttagttgaaaaagctagaaagggtgtaatggaatttttattggcaaaccatcccttagattgtcctgtttgtgatcaaggaggcg

SEQ ID NO: 221622 - DNA, 851 bp, Unknown
  Bacterial polypeptide expressing nucleotide sequence isolated from the Sargasso Sea
atttttattagttaatcaccctttagattgcccagtatgtgaccaaggtggtgaatgcgatcttcaagatcagtccatgttttatggagtagataagtctagatttaaagaaaataaaaggcaagtccctgaaaaatatatgggacctttaattaaaactcaaatgacaagatgtatacattgtacaagatgcataagatttgcaactgaaatagcgggtgtgcccgagctaggagcaatcgggagaggtgaaaatatgcaaatcactacatatttagaaaaagcaatggcatcagagttatctgccaatgttatagatctttgccctgtcggagcgcttacttcaaaaccatacgttttcgaagctagaccgtgggaattaaaaaaaacagagtcaattgatgtaatggatgcagctgggtcaaatataagaatagatacgtatggatgggaagtaaaaagaattcttccaagaataaatgaagatattaatgaagaatggatttctgataaaactagatacgcgtgtgatggattaaaaaaccaaagattagacacaccatatattagagaaggggataaatttaataaaatttcttggaatgaagcatatgaagttttgaaattaaaattagaaaatacatcaccagaaaaaattggttgtattacaggtgatttaactaatatggaaacagcttatgctgctaaagaattatttaataaagtttttaaatcaaatttaatagaatcaaggtctgaaaattattatgtaaatttttcagaaaagcaaaactatagatttaatagcaacatttcaggcattgaagatacagatttaatattactggttg

SEQ ID NO: 221623 - DNA, 484 bp, Unknown
  Bacterial polypeptide expressing nucleotide sequence isolated from the Sargasso Sea
aatgcttaaggatgcagatcgtattttcaccaacatctatgggtggggtgacgctggtctcaagggggccaggaagcggggtgactggtcaaatacggcgaagctgctcaagctgggccatgatgagatcgttgagcggatgaaggcttctggcctgcgtggacggggcggcgctggctttccgaccggggtgaaatggtctttcatgcccaaggaagtcaaggatcgtccgcattacctcgtcgtcaatgccgatgagtccgagccaggtacatgcaaggaccgcgacatcatccgccatgagccacacaagctgcttgagggctgtgtggttgctggttttgcgatgcgggcgcatgccgcctatatctatatccgcggcgagtttgtgaatgaagcgcgccgcctgcaggctgcaattgacgaggcgtatgacgctggcctgcttggtaagaatgctgccaaatcggggctgggattttga

SEQ ID NO: 221624 - DNA, 524 bp, Unknown
  Bacterial polypeptide expressing nucleotide sequence isolated from the Sargasso Sea
tatgcttaaaccagaaaataaaatatttaaaaatctttataatcaatttggatgggaaattgatagtgcgattaaaagagacgattggaagaatactaaaaacataatttcgaaaggaagagattggataattaatgaagtaaaatcttcggaattaagaggaagaggaggagcaggtttttctacgggtctgaagtggtcatttgcaccaaaagaagttggctcaagaccacattatcttgtgattaatgctgatgagtcagagcctggaacttgtaaagatagagacatattaagattcgaacctcaaaaattaattgaaggatgtttaatagctggctatgctgttaatgctcacatttgttatatttatattagaggtgaatacttcaatgaaggtcaaagattacaggatgccattaatcaagcatacgaaaaaaatttcttaggaaaaaatgcgtgtggttctggatgggattttgatattcatatacattatggagcaggagcatatatttgtggtg

SEQ ID NO: 221625 - DNA, 403 bp, Unknown
  Bacterial polypeptide expressing nucleotide sequence isolated from the Sargasso Sea
atgcttcaagataaagatagaatatttcaaaacctttacaatgacagagatctaaatattgattcttcaatatcttttggagactggtcaaataccaaagacttaatttcaaaaggaaaagagtggataattgatgaaattaaatcttctgaattaagaggaaggggaggagctggttttcccactggtcttaaatggtcttttgcaccaaaagaagttggatctagacctcactatctagttataaatgctgacgaatcggaaccaggaacttgcaaagatagagacatattaagatttgaacctcataagcttttggagggttgtttaataacatcatatgccgtaagtgcacatatctgttatatttatattagaggagaatattatagagagggcgaaa

SEQ ID NO: 221626 - DNA, 394 bp, Unknown
  Bacterial polypeptide expressing nucleotide sequence isolated from the Sargasso Sea
aatgcttaaattaaaagtaaacgataatgaagttgaagttgaagaaggtttaacagttttacaagcttgtgaaaaagcaggtgttgagattccaagattttgttatcatgaaaaattatcaatagctggtaattgtagaatgtgtttggttgaaatggaaaaatcacctaaacctatagcttcatgcgcaatgcctgcagctgaggggatggttataaaaactaatactccaaaaatagaacaatcaagaaaaggtgtgatggaatttttattagccaatcatcctcttgattgtcccgtttgtgatcagggtggtgagtgtgatcttcaagatcagtctatgttttatggaattgataaatcaagatttaaagaaaataaaagagctgtacca

SEQ ID NO: 221627 - DNA, 441 bp, Unknown
  Bacterial polypeptide expressing nucleotide sequence isolated from the Sargasso Sea
aatgcttaaagaagaagataaaatttttaaaaatttatataatcaatatggttggagtattgaagactctttaaaaataggcgactggtctaaaactgatgaaataatttcaaaagggaaggaatggataattaatgaaataaaattgtctgagcttagaggaagaggtggagctggatttccaactggtgtaaaatggtcgtttgctcccaaaaaagcaggatctagaccgcactatctagtaataaatgcagatgagtcagaaccaggtacttgcaaagatagagatatacttagatttgaaccacaaaaattaatagaaggttgtttgatttctgctttcgcagttagcgcacatgtttgttatatttatattagaggtgagtattttaatgaaggtcaaagacttcaaaaagcgatagatgaagcctaccaaaaaaa

SEQ ID NO: 221628 - DNA, 775 bp, Unknown
  Bacterial polypeptide expressing nucleotide sequence isolated from the Sargasso Sea
ttagagtcagatcctcacaggtttcttgagggaatgttgattgcatcatcggttgttgaaatagataaaatatatatatatttaagagatgagtatcctgccgttaggtatatacttgaaaaagaattgtctcgcttgaaagataaattcaataatactatcccagatgttgagcttcgaagaggggctggggcatatatatgcggtgaagagtcagctatgattgagtctattgaaggtaaaagaggaatgccaagactcagacctccatttgttgcacaagtagggttatttggacgaccaacgctagcgcataatatggaaacgctatactgggttagggatattttacaaaaaggtgccgattggtttacgtctcacggcagaaacggaaggaaaggattgagatccttctcggtcagcggacgagttaaaaatcctggtgtctatcttgctccagcaggaataacagttagcgaactgattgacgaatatgctggaggaatgttagagggtcatgagttttatggatattttcctggtggtgcatctggcggaatattgccagcctcattatcagaaatacctctagattttgacactctacatgattacggttgttttataggttcggcagcaattattatattgtcagacaaagatactgctgtttctgctgcctcaaatactatgaaattttttcttcatgaatcatgtggaaaatgcaccccatgcagagttggtacatcaaaagctgtatcattaagagtgagaa

SEQ ID NO: 221629 - DNA, 547 bp, Unknown
  Bacterial polypeptide expressing nucleotide sequence isolated from the Sargasso Sea
atgcttaaactaaaaattaatgataaagaaatcgaagtagatgagggtcttaccgttcttcaagcttgcgaacaagcaggatttgaaattccaagattctgttatcatgaaaaattatccatagcaggaaactgcagaatgtgtttagttgaaattgaaaaatctccaaaacctgtagcatcttgtgcaatgccagcggcagaaggtatgaacataaaaacaaatactagttttgttgagaaagcaagaaagggtgtgatggaatttttattagtaaaccaccctttagattgtcccgtatgtgatcaaggaggagagtgtgatttacaagatcaatcaatgttttatggagtagataaatctagattcaaagagaataaaaggcatgttactgaaaaatatatgggtccactaattaaaactcaaatgacaagatgtatacattgtacaagatgtataagatttgcaactgaagttgctggtgttcccgaacttggtgcaataggtagaggagaagatatgcaaataactacatatttagaaaagg

SEQ ID NO: 221630 - DNA, 277 bp, Unknown
  Bacterial polypeptide expressing nucleotide sequence isolated from the Sargasso Sea
aatgcttaaagaggaaaacaaaatattcaaaaatttatataacgaacaaggttgggagttggaaaatgctcttaaaagagatgattggttagatactaaaaaaattatagagaagggaagagactggatcataaatgaaattaaagcttcagaacttagaggcagaggtggagctggtttttcaactggattaaaatggtcattcgcacccaaaaaagttggttcaagaccacactacttagttataaatgctgacgagtctgaacctggaacttgt

SEQ ID NO: 221631 - DNA, 386 bp, Unknown
  Bacterial polypeptide expressing nucleotide sequence isolated from the Sargasso Sea
gatgcctaaaataaaaattaataataaggagatagagttcgaaaatggcatgacagttttacaggcatgcgagattgctggcgctgaaattccaagattttgttatcatgaaagattatctatagcaggaaattgtagaatgtgtttagttgaaatggataaatcagcaaaaccaatcgcatcatgtgccttaccagctgctgaaggtatgaatattaaaactaataccaaaatggtcgaaaaagctagaaaaggcgtaatggaatttcttttagcaaatcaccctttagattgccctgtttgcgatcagggtggagaatgtgatttacaagaccaatctttattttatggttttgataaatcaagatttaaagaaaataagagag

SEQ ID NO: 221632 - DNA, 577 bp, Unknown
  Bacterial polypeptide expressing nucleotide sequence isolated from the Sargasso Sea
aatgcctaaattaaaagtaaacgatattgatatagaagttgaagatggtctaacggtgctccaggcttgtgaacaggctggagctgaaataccaagattttgttatcatgaaaaactttctatagctggaaattgtcgtatgtgtttggtcgaaatggaaaaatcatcaaaacccatagcttcatgcgcaatgcctgcagctgaagggatggttattaaaacaaatacggaaaaagtcgaaaaagcaagaaaaggtgtgatggagtttttactggctaaccatcctttggattgtcctgtttgtgatcaaggtggtgagtgtgatttacaggatcaatctatgttttatggaattgataaatcaagatttaaagagaataaaagatatgtacctgaaaaatacatgggtccattaataaaaactcaaatgactagatgtattcattgtactaggtgtattagatttgctacagaagtagcgggagtgccagaattaggcgcaattggacgtggagagaatatggaaattactacatatttagagaaatccatggagtctgaaatgtcagcaaatgta

SEQ ID NO: 221633 - DNA, 305 bp, Unknown
  Bacterial polypeptide expressing nucleotide sequence isolated from the Sargasso Sea
tgagagttgtggtcaatgcacaccttgtcgggaaggatctggatggatgtggagaatgttagaaagaatggcagcaggtgaggcaactccagatgaagtcgatatgcttttggatgtaacaaaacaaatagaaggtcatacaatttgtgcgtttggcgaaggttcatcttggccagtccaaggattaattagacattttaaagatgaaatacttgaaagaaataaatttgatcctgtagtgaaaaaacaaaaaaatattccatacctggttgatcaacatttattagaaaaggaaaatgcctaaa

SEQ ID NO: 221634 - DNA, 263 bp, Unknown
  Bacterial polypeptide expressing nucleotide sequence isolated from the Sargasso Sea
tactaattcaatgcgattttttgagcatgaatcttgtggtcaatgtacaccttgtcgcgttggtacttcaaaagcgatacaattgatggaaaatgaggagtggaataaagatttattagaagaattatctattgcgatgtgtgatgcatcgatatgtggtttaggacaggcggcgccaaacccagtcaagtgtgcaataagatattttccagaggaatttaaaaagtggccgccaacccaaaacaagcaaacgaaaaagtaac

SEQ ID NO: 221635 - DNA, 527 bp, Unknown
  Bacterial polypeptide expressing nucleotide sequence isolated from the Sargasso Sea
aatgcttaaagacgaagatagaatatttaaaaacttgtataacgatttaggtgcagatttattatctgcgaaaaaaagaggagattggaataatactaaagaaatatgtgaaagaggtcgtgaatggattataaatgaagtcaaaacttcagaattaagaggaagagggggagcgggatttccaaccggtttaaaatggtcatttgcccccaaagaagttggatcgagacctcactatttagttattaatgctgatgagtcagaacctggaacttgcaaagatcgagatatattaagatttgaacctcaaaaattaatcgaaggttgtttgataacttcttttgcggttaatgcacatgtttgttatatttatataagaggtgaatattttaacgaaggtcaaaaacttcaaaaagctattgatgaagcttataaagaaggattaattggaaaaaattcttcaggaacaaattgggatttagatatttacatccattacggtgcaggagcttatatttgtggagaag

SEQ ID NO: 221636 - DNA, 301 bp, Unknown
  Bacterial polypeptide expressing nucleotide sequence isolated from the Sargasso Sea
aatgattaaattaaaagttaataataccgatatagaaatagaagagggtttgacagtacttcaagcatgtgagcaagcaggttttgagattccaagattttgctatcatgaaaaactatcaatcgcaggaaattgcagaatgtgtcttgttgaaattgaaaaatcgcctaaacctgttgcttcatgcgcaatgcctgtttcagagggtatgaatatcaaaaccaacactcctcttgtggaaaaagcgagaaaaggtgttatggaatttctattagccaatcatcctttagattgcccagtt

SEQ ID NO: 221637 - DNA, 322 bp, Unknown
  Bacterial polypeptide expressing nucleotide sequence isolated from the Sargasso Sea
aatgccaactattacaattgataataaaaaagttgaatttgaaaatggaatgacagttatgcaagcatgtgagcttgctggagctgagatacctagattttgttatcatgaaaaactttctatagcagggaattgtaggatgtgccttgttgaaatggaaaaagctccaaaacctatagcatcatgtgcaatgccagcaggtgatggcatggtaattaaaacaaacactgatacagttcaaaaagcaagaaaaggagtgatggaatttctttttataaaccatcctttggactgtccaatttgcgatcagggtggagagtgt

SEQ ID NO: 221638 - DNA, 535 bp, Unknown
  Bacterial polypeptide expressing nucleotide sequence isolated from the Sargasso Sea
aaacggaaggaaaggattgagatccttctcggtcagcggacgagttaaaaatcctggtgtctatcttgctccagcaggaataacagttagcgaactgattgacgaatatgctggaggaatgttagagggtcatgagttttatggatattttcctggtggtgcatctggcggaatattgccagcctcattatcagaaatacctctagattttgacactctacatgattacggttgttttataggttcggcagcaattattatattgtcagacaaagatactgctgtttctgctgcctcaaatactatgaaattttttcttcatgaatcatgtggaaaatgcaccccatgcagagttggtacatcaaaagctgtatcattaatgagtgagaaaaaatggaatgtgccattgcttcatgatttatcacaagttatgtcagatgcgtctatttgtggcttaggtcaagctgcatcgaatccgctcaaatgtgtgttaaaatactttcctgaggaagtgaatgatgattgcaaaacctga

SEQ ID NO: 221639 - DNA, 407 bp, Unknown
  Bacterial polypeptide expressing nucleotide sequence isolated from the Sargasso Sea
gatgttaaaagtatatgtggatgataaagaaatagaagtagaagatggttctacagtaatgcaggcttgtgagaaaaatggaattgaaattccacgtttttgttttcatgagagattgtctatagcaggaaattgtaggatgtgcttagttgctttagagggatcccctaaacctgtagctagttgtgctatgccggctgctgaaggtatgaaaattataactagttcagagtctgtaagagcagcaagagaagggattatggaatttttattaattaatcatcctttagattgtcctatatgtgatcaaggtggagaatgtgatttacaagatcaggctctttattatggtagaggtaataccaggtatgaagaagataaaaggtcagtagaaaataagccttttg

SEQ ID NO: 221640 - DNA, 336 bp, Unknown
  Bacterial polypeptide expressing nucleotide sequence isolated from the Sargasso Sea
aatgcttaaagacgaagatagaatttttactaatttgtataacgactttagtcctgacctagattcttctaaaaaaaggggtgactggtcaaatactaaagatttaattctcaaaggaaaagattggattattaatgaaataaaatcatctgagcttagaggtaggggcggtgctggatttcctacaggtttaaaatggtcttttgcgccaaaagaagtaggatctagaccacattatcttataataaacgcagatgagtctgagcccgggacgtgcaaagatagagacattttacgatttgaacctcataaattgattgaaagatgtttgttagc

SEQ ID NO: 221641 - DNA, 328 bp, Unknown
  Bacterial polypeptide expressing nucleotide sequence isolated from the Sargasso Sea
aatgcttaaattaaaggtaaatgatatagaggttgaagttgaagaagggttaacagttcttcaagcttgtgaaaaagccggggctgaaataccaagattttgttatcatgaaaaattatctatagcagggaattgcagaatgtgtttagtagaaatggaaaaatctcctaaaccaattgcttcttgtgcaatgcctgctgctgatggaatggttataaagactaatactccaaaaatagaaaaatccagaaaaggtgtaatggaatttttattagcaaaccatcctttggattgtcccgtttgtgatcaaggtggtgagtgtgacctt

SEQ ID NO: 221642 - DNA, 526 bp, Unknown
  Bacterial polypeptide expressing nucleotide sequence isolated from the Sargasso Sea
gatgcttgaatatagtcttattgcactcttatcgccactatttggtggaatcatggctgcattcctaggtaaatcatttggtaagaattttgttaaccttgtcaccataataggtgtcagtatctcttttgttttatcttgcatcatctcccttgagatccttgaaacatccgctgtcatcaatcaaaatatttacacatggctgaatattggagatcagtcatttcatatagggcttctcattgataatctaacagccagcatgatggtggttgtaacctttgtctcattgatggttcatgtttatacaataggttatatgcatgatgatcctggatatcatcggtttttctcatacatcagtctatttaccttctcaatgttgagcctagtgatgtcaaataacttcctgcaattattctttggttgggaagctgttggtgtgatgtcgtatctgctcatcggtttttggtacaccaaagaatctgcaatcaaggcaaatttaaaagcatttattggtgaatag

SEQ ID NO: 221643 - DNA, 760 bp, Unknown
  Bacterial polypeptide expressing nucleotide sequence isolated from the Sargasso Sea
aagggatgaatatcctgaaataagaatttttataaatagagaaattaaaaaagtaaaattatttttaaaactggatataaacatccatgttagacgaggtgctggagcctatatatgtggcgaagaatctgctatgattgaatctatcgaaggcaaaaggggattgccaagacatagaccaccttatgtcgctcaaaaagggatttttaacaaacctacactggtaaataatattgaaacactatactggattagagaaatcattgaaaaaggtggtaaaaaattttcaagcaaaggaacaaaaaatcatcctggggctagaagttactcagtttctggaagggtaaaaaatcctggggtagtttttgctccagcaggctctacagtgaatgaacttattttaaaatgtggtggaatgcttgatggtcataaatttaaagcttatctaccaggcggtgcctcaggtggaattttaccatcaacaaaaggtgacatccctttggattttggtggggagttagctaaatatggttgctttgtcgggtcacatgctattgttattttatctgacaaagatagcttggcggatgtggctttaaacttaatggctttttttaaacatgaaagctgtggtcaatgcaccccatgtagaaatggtacagaaaaaattataaatattataaaaaataaatctaaatgggataaagaattactttgtgatatttcagaagttatggcaaacgcttcaatatgtggttta

SEQ ID NO: 221644 - DNA, 709 bp, Unknown
  Bacterial polypeptide expressing nucleotide sequence isolated from the Sargasso Sea
atgccagtctttcatattgatgatcagcctgtagaatttcaaccgggagaaaaaatactttctgcagctttacgaaatgggaataaaattcctcattactgttaccatcctggaatgtcgattgtggccacctgccgaatgtgcttagtcgatgttattgaccttggtaatgggcgtcccgcaccaaaacttcaaaccgcatgttcagtggatgcagctgaaggaatgaagattgagaccatgaatcaaaaagtagaagaaggacgtaaacttgtaaacgagtttctgctgattaatcatcccttagactgcccaatctgtgaccagtccggagaatgtactctccaggattactcttatgaatatggtacaggaaaatctgaaatggattattccaagcgagtttacggttggcgtgatattggaacgtttgtcagtcttgaacgcaaccgctgcattcagtgttcccgttgtgatagattcaccagggaaatcacaggaacaaatgaattcggtatgtttaaccggggccatgaactgacggtagatacatacaccgacaggccgatgacaaataaatttcaaggcaatatggctgacatttgcccggttggagctattactgaaaaagaattccgctttaagcgcagagtatggaaactgaaaaaagatcgttcgatctgtacaggttgttcaaccggctggtaac

SEQ ID NO: 221645 - DNA, 385 bp, Unknown
  Bacterial polypeptide expressing nucleotide sequence isolated from the Sargasso Sea
atgcttaaagacgaagatagaatatttcaaaatttatacaatgacagtggcgcagatatcgagtctgccaaattaagaaatgattggaacggaacaaaagaaattttagaaaagggaagggaatggataatcaatgaagttaaatcctctgagctcagagggcgtggaggtgccggttttccaactggtttaaaatggtcatttgcacctaaagaagtaggatctagaccacattatttagtcattaatgcagatgagtcggaacctggaacatgtaaagatagagacatattaagatttgaacctcataaattaatagaaggatgtttaattgcttcaaaggcagttaacgctcataaatgctacatttatattagaggagaat

SEQ ID NO: 221646 - DNA, 576 bp, Unknown
  Bacterial polypeptide expressing nucleotide sequence isolated from the Sargasso Sea
aatgcctaaaataattgtaaataataaagaagtagaattcgaaaatggaatgacagttctacaagcatgtgagatcgcaggtgtggagataccaagattttgctatcacgaaagactttctatagctggtaattgcagaatgtgcttagttgaaatggagaaatctcctaagcctatcgcatcttgtgcaatgccagcagctgatggaatgaaaattaaaaccaacacaacttttgttgaaaaagctcgaaaaggtgtaatggaattcttattagccaaccatccattggattgtccggtatgcgatcaaggaggtgaatgtgatttgcaggatcaatctttattttatggttttgataattcaagatattcagaaaataaaaggcaagttaaagaaaagcatatgggtcctttaatcaaaactcagatgacaagatgtatacattgcactagatgtgtaaggtttgctcaagaagtagcaggaatacctgaactacgagcaattggaaggggagaggatactgaaattacaacttatctagaaaaatctatggaatctgagctttcagctaacgt

SEQ ID NO: 221647 - DNA, 331 bp, Unknown
  Bacterial polypeptide expressing nucleotide sequence isolated from the Sargasso Sea
aatgcctaagattacaataaatggaaaagaaattgattttgaaaaaggaatgacagttctacaagcatgcgagttagcggatgttgagattccaagattttgttatcacgaaaaattgtcaatagcaggaaattgcagaatgtgtttagttgaaatggagaagtcaactaaaccaatcgcatcttgcgccatgccagctacggaaggaatgaatataaaaacaaacactactttagttgaaaaagctagaaagggtgtaatggaatttttattagctaatcatccactagactgccctgtatgtgatcaaggggagagtgtgattacagga

SEQ ID NO: 221648 - DNA, 476 bp, Unknown
  Bacterial polypeptide expressing nucleotide sequence isolated from the Sargasso Sea
gatgcctaaaataaaaataaacaataaagaagttgaatttgaaaatggaatgactgttcttcaagcatgtgaaatagctggagctgaaattcctagattttgctatcatgaacgtctttctatagccggaaactgtagaatgtgtttggtagaaatggaaaaatcatcaaaaccaatcgcatcttgtgcaatgccagctgccgagggtatgaatattaaaactaatacgaaaatggttgaaaaggctagaaaaggtgtcatggaatttcttttagcaaaccaccctttagattgtcccgtttgtgatcagggcggcgaatgtgatttgcaggatcaatctttatattatggttttgataaatctagatttaaagaaaacaaaaggtttgttgaagataaatacatgggtccacttattaaaactcaaatgactcggtgtattcattgtactagatgcattagatttgcaactgaag

SEQ ID NO: 221649 - DNA, 466 bp, Unknown
  Bacterial polypeptide expressing nucleotide sequence isolated from the Sargasso Sea
aatgttaaaaaaagaagataaaatttttaaaaatttatatggagaagatgattggtctcttcctggtgcattgaaaagaggtatatggaataacactaaagatttgatttcaatgggtagtgataatattattgaagaaattaagaaaagtgatttaagaggaaggggcggcgctggttttccagcaggcttaaagtggtcttttatgcctaaagattcaggtaaaccacactatttaatagttaatgcagatgaatctgaacctggtacatgcaaggatagagagattttaagaaatgatcctcatttattacttgaaggatgtttgattgctggctttgcaatgcatgctcatacttgttatatttacattagaggagaatattacaatgagtcgtctaatttacaaaaagctatagatgaagcttataaatctaatttaatcggtaaaaatgcttgtggaaca

SEQ ID NO: 221650 - DNA, 625 bp, Unknown
  Bacterial polypeptide expressing nucleotide sequence isolated from the Sargasso Sea
ttgaccaacatcttttggagaaggatagtgcctaaggtaatagttaataataaagaaattgaatttgaagaaggaatgacagtgcttcaagcatgtgaactggctggagaggaaattccacgattttgttatcatgaaagactttcgattgctggaaattgcagaatgtgtttagtagaaatggaaaaatctcctaaaccaattgcttcttgtgctatgcctgctgtagatggaatgaaaataaaaactaacacgccatttgtagataaagcaagaaaaggtgtaatggaatttttattggctaatcatcctttagattgtccggtatgtgatcaaggtggagaatgcgatttacaagaccaatcacttttttatggactcgataattctcgatacacagaaaacaaaagagaggtgagcgagaaatatatgggccccttaataaaaactcaaatgacaagatgtatacattgtacaagatgtataagatttgccactgaagtagctggtatacctgaattgggagcaatagggagaggagaagatatggaaataactacttatcttgaaaaatctatggagtccgaattatcagcaaacgtaatagatttatgtcctgtgggtg

SEQ ID NO: 221651 - DNA, 808 bp, Unknown
  Bacterial polypeptide expressing nucleotide sequence isolated from the Sargasso Sea
tctagatttaaagaaaataaaagattggttcctgaaaaaaatatgggaccgttaataaaaacacaaatgacaagatgcatacattgtacaaggtgtgtaagatttgctacggaagtagcaggtgttccagagttaggagctataggcagaggagaagatatgcaaattaccacgtatctagagcaatctatgcaatcagagttgtcagcaaacgtagtagatctttgtccagtaggagctctaacttctaaaccttatgtatttgaggctagaccttgggaattaaaaaaaacagagacaattgacgtaatggatgcggtcggttctaatattagagttgatacttatgattgggaggtaaaaagagttttaccaatcattaacgaggatataaatgaagagtggatttctgataaaactagatatgcgtgtgatggacttcttcatcaacgactagactctccatttattaaatataacaaaaaatttgagaaagcttcttggagcgaagtatataaaattttaaaatctaaatttgaaaatacaacaaaagaaaaaatttgtgggtttgttggggacttaaccaacatggaaactagctatatatttaaagaattttttgagagaacacttgatacaaagaactatgagtctagaccagataatagatttgtagatgtttccaaaagagagaattatatatttaatgcctcaattaacggaatagaaaaagcagatttaatatttttaataggtactaacccaagatatgaggcaactattctaaatgctagaattagaaaatctc

SEQ ID NO: 221652 - DNA, 550 bp, Unknown
  Bacterial polypeptide expressing nucleotide sequence isolated from the Sargasso Sea
gatgacggtggcagaacaagaagtcaaacaatgcacggtacacatagacggtaagtctcatcaagcaaagcatgggcaaaccatcattcaagttgcggattccgtcggggcttacataccgcgtttttgttaccatgaaaaactgtctgtggtggcaaattgccggatgtgcttggttgaagtaggtaatgtgccgaaggcacttcccgcgtgcgcaactcccatcagtgacggcatggaggtgatgactcaatcacccaaagcgctagcagcgcagcgttcagtgatggaatttctactaattaaccatcctcttgattgtcctgtgtgtgatcagggtggagcatgtgagctgcaagatttgtccatgggttttggtcgcggtaagagtgagttcactatgcgcaaacgttctgtggtggatcttgacattggaccactcatcaaaactcacatgactcgatgcattcactgcacgcggtgtgtgcgttttggagaagaagtggcaggaatgcgtgaattgggtgccacagggcgtggtgaggacatg

SEQ ID NO: 221653 - DNA, 774 bp, Unknown
  Bacterial polypeptide expressing nucleotide sequence isolated from the Sargasso Sea
gccgccaacttctacagcggcgtcgagcaaagcgaatgggaatgcctgcagaagatgctgcagatcctgcagcacggcggcgtacgcacccccagcctgcgtgacatggaagaggccgacgccgtgctggtgctcggcgaggatgtcacccagaccgccgcccgtattgccctggccctgcgtcaggccgtcaagggcaagggccgcgaaatcgcccgcaagctgaaagttgatctgtggcaggtcgccgcggtgcagaccctggcccagaacgagcgctacccgctgctgatcaccagcctggacagcacccgactggacgacgtggcgagcggcaccctgcacgctccccacgcggatcaggcgcgcctcggcttcgccatcgcccatctgctcgatggcagcgcccctgccctgaccgatctcgcccccgagcaacaggccctggccgccagctgggccgatctgcttggcaacgccaagaagccgctcatcatcgccggcaccggtgcccgcagccaggcgctgcttgaggcggccagcaacatcgcccacgccctcaagggccgtggccaggccgtggagctcgctctggtcgctcaggagaccaacagcctggggctggccatgctggccggcaatgccgccccgctggaagccgcttttgatcgtatcgaaagagaagagaagctcgcgctggtgatgctcgagaacgatctctaccgccgcgcaccgcgcagccgtgtcgatgccgccatcgaccgtctgcagcac

SEQ ID NO: 221654 - DNA, 504 bp, Unknown
  Bacterial polypeptide expressing nucleotide sequence isolated from the Sargasso Sea
tttgggtttaatttctaaaaaagaagaagttaatgatttaataaattttttaaaaaataatgatggactattatttaatcaactaatcgaaataactgctattgattttcctcaaaaagaattcaggtttgatataatatatatattattaagtttaaaacttaatcaaagattaattgttaaaacttcaataaaagaagatgaatcgattgaatcaataacttctatttataaatctgctaattggtatgaaagagaatgttatgatttattcggtatcaaatttttaaaccattctgatttaaggagaattatgactgattacaattttgaaggacacccattaagaaaagattttccattaactggacataatgaagtaaggtatgacgatcttgaaaaaaaagtaatctacgaaccagtgaaactttctcaggaatatcgaaattttgattattctagtccttgggaaggatttgaaaatgaattaattggtgatgaaaa

SEQ ID NO: 221655 - DNA, 784 bp, Unknown
  Bacterial polypeptide expressing nucleotide sequence isolated from the Sargasso Sea
agataaagcaagaaaaggtgtaatggaatttttattggctaatcatcctttagattgtcctgtatgtgatcaaggtggagaatgcgatttacaagaccagtctctattttatggattcgacaattccagatacacagaaaataagagaaacgttaaagaaaaaaacatgggtcccttaataaaaacacaaatgacaagatgtattcattgtactagatgtgtcagatttgccactgaagttgcaggtatacccgaattaggtgcgattggaagaggtgaagatatggaaattacgacttatttagaaaaggcaatggagtccgagttgtcagctaatgtaattgatctgtgtccagtgggagctttaacttccaaaccatatgcttttgaagcaagaccatgggatttaaaaaaaactgaaacaatagatgttatggatgccgtggggtctaatataagagtagatacttacggatgggaagttaagagaattctacccagaatcaatgaagatattaatgaagaatggatttcggacaagacgagatatgcgtgtgatggtcttttaaagcaacgattggataccccttatataagaaaagatggacgattagtaaaaagttcatggaacgaaacactaaaacttttaattaataaatttaaatcttttactccaaatgaaatagccggaatggtaggtgatttggcagatttagaaatgatttatagttttaaatctttttttgaaacatgtataggttctaaaaacttagagtgtagacaa

SEQ ID NO: 221656 - DNA, 645 bp, Unknown
  Bacterial polypeptide expressing nucleotide sequence isolated from the Sargasso Sea
gatgtgcttagtagaagtggtcggtggtcctccaaagcctactgcatcgtgtgctatgcaagttaaggatctacgtccaggacctgaggggcaacctccagtggttcgtacaaactccaaaatggttaaaaaggcgcgtgagggagtaatggaattcttgttgattaatcacccccttgattgtccaatttgtgatcagggaggagaatgcgaccttcaggatcaagcaatggctttcggcgtggactttagtagatttaaagagcctaaacgcgcggtagatgatctcgatttaggaccacttgtatccaccaatatgacaagatgcataagttgcacacgatgtgttagatttacctcggaagtagctgggataagtcaaatgggacaaacaggtcgtggtgaagatgctgaaataaccagctatctaaatcagactttagatagcaacttgcagggtaatattattgatctctgcccggtaggggctttaacctctaagccctatgcttttacagctagaccgtgggaactatcaaacacagagacaattgatgttatggacgcattagggtccaacataagagttgatacaaaggggcgcgaagttatgcgcattctgcctcgtaatcatgacggtataaa

SEQ ID NO: 221657 - DNA, 305 bp, Unknown
  Bacterial polypeptide expressing nucleotide sequence isolated from the Sargasso Sea
aattcataaatctgcaaattggtatgaaagggaatgttatgacttatttggcataaaatttttgaatcaccctgatttaagaagaataatgacagattataattttgagggtcatccattaagaaaagattttcccttaacaggtcacacagaagtgcgctatgataatttagaaaaaaaagtagtttatgagccagttaaactaacccaagagtatagaaactttgactatatgagtccttgggaaggttttgataatgagttaattggagatgaaaagtttgaagaagaaagaaaaaaatgaa

SEQ ID NO: 221658 - DNA, 700 bp, Unknown
  Bacterial polypeptide expressing nucleotide sequence isolated from the Sargasso Sea
tgaagaaagtgctatgatagaaagcatagaaggtaaaagaggcttgccaagacatagaccgccatatattgcagaggtgggtttatttggaagacctacgctaaatcataatgtcgagactttaaactggctccctgaaataattgaaaatggggttgactggtttaaaagaaaggggtggaatgaacgtcatagcggcgtgagatctttttcagtatcaggtcgagtaaaaaatcctggagtaaaaattgctccagcaggtatacctcttcaacggctaatagtcgactattgtgggggaatgcaagacggacatacattaaaggcttttttccccggtggagcctctgggggaatacttccggccaatctagcatcattaccactcgattttggagtctttgaagagtatgggggattcatcgggtcccatgcaatagtgatattatctgatcacgataatatcaaagaggcagccttgaacaccatgcgtttttttaaacatgaaagttgtgggcaatgtacgccatgtagatctggtacggacaaaatgataagtttacttgaagataacaataaggagttagatctttataacgctcttatcaaagttatgagtgacagttcgatttgtgggctaggtcaagcggctagcaattgtgtatctcatcttatcaaatattttccagaggagttttga

SEQ ID NO: 221659 - DNA, 364 bp, Unknown
  Bacterial polypeptide expressing nucleotide sequence isolated from the Sargasso Sea
atgcttaaattaaaagttaatgatgcagaggtagaagtcgaagatggacttactgtactccaagcttgtgaaaaagcaggtgtagaaataccaagattttgttatcacgaaaaattatcaatagctggtaattgtaggatgtgcttagttgaaatggaaaagtcaccaaagccgattgcttcatgcgcaatgccagcagctgatggtatggtaataaaaactaatacgccgaatgttgaaaaatcaagaaaaggtgtaatggaatttttattagcaaatcatcctttggattgtcctgtttgcgatcaaggaggagaatgtgatcttcaagatcaatcaatgttttatggaatagacaaatcaa

SEQ ID NO: 221660 - DNA, 619 bp, Unknown
  Bacterial polypeptide expressing nucleotide sequence isolated from the Sargasso Sea
atgcttaaattaaaagttaacgatattgatattgaaattgaagaaggtctaacagttttacaggcatgcgaacaagcaggtgcagaaataccaagattttgttatcatgaaaaactttcaatcgctggaaattgtagaatgtgtttagttgaaatggaaaaatcacccaaacctattgcatcttgcgccatgccagctacagatggaatggttattaaaactaatactaaaaaagttgagaaagcaagaaaaggagttatggaatttttattagttaatcatcccttagattgcccagtttgtgaccaaggtggtgaatgtgatttacaagatcaatctatgttttatggaattgataaatcaagatttagagaaaacaaaagacatgttccggaaaaatatatgggtccactaataaaaacacaaatgactaggtgtattcattgtacaagatgtataagatttgcaacagaagtggctggaattcctgaattaggtgcaataggaagaggtgagaacatggaaatcaccacttatcttgaaaaatcaatggaatcaggaatgtcagcaaatgttattgatttatgtcccagtaggagctcttacctcaaaaccttat

SEQ ID NO: 221661 - DNA, 299 bp, Unknown
  Bacterial polypeptide expressing nucleotide sequence isolated from the Sargasso Sea
ttgtggtcaatgtactccttgtagagaaggttctggatggatgtggagaatgttggaaagaatggccgcaggtgaagctacatctgaagaagtagatatgttaatggatgtaacacaacaaatagaaggtcacacaatatgtgcgtttggtgaaggatctgcttggcctgttcaaggtctattgagacattttaaagatgaaatattagaaagaaataaattcgatccaatagttaaaaaacaaaaagatattccttatttagttgatcaacatttattagaaaaagaaaatgcttaaa

SEQ ID NO: 221662 - DNA, 990 bp, Unknown
  Bacterial polypeptide expressing nucleotide sequence isolated from the Sargasso Sea
aatatcaaaactaatacagaaaaagtagagaaagcaagaaaaggcgttatggaatttttgctagccaaccatccattagactgtcctgtgtgcgatcaaggtggtgaatgtgatttacaagatcagtcaatgttttatggaatagataaaagtagatataaagaaaataaaagggaagtatctgataaatatatgggtcctttaatcaaaacccaaatgaccagatgtattcattgtacaagatgtattagattcgccacagaaattgctggcgttccagaactcggtgcaattggtagaggtgaaaatatggaaattacgacttatttagaaaaatcaatggaatcagaactatcagctaatgttattgatttatgcccggttggagcattgacatcaaaaccttatgtttttgaagctaggccatgggaacttaaaaaaactgaaactattgatgtaatggatgctgttggatcgagtataagagtcgacacctatggttgggaagttaaaagaattttaccaagaataaatgaagatataaatgaagaatggatatctgataaaaccaggtatgcatgtgatggaattaaaaatcaaagaatagacataccttatcttaaaaacaaaaaaggttttgaaaaaatttcatgggaagaagcaaatcaaataattgtcaaaaaaataaacgaaacatcgtcagataaaattgctggatttacaggagacctttctaacatggaaactctatatattgcaaaagagttttttaacaaaactataaaatctaaatatttagattcaagaattgataacacttatgtaaatacaagcaaaaaggaaaattatattttcaattcaacaattaatggcatcgaagactcagatttgattgttcttataggaacaaacccaagatatgaaagcacaatttttaatttaagaataagaaaaagtatcttaaaaatatataaaaatttattcaattgg

SEQ ID NO: 221663 - DNA, 274 bp, Unknown
  Bacterial polypeptide expressing nucleotide sequence isolated from the Sargasso Sea
aatgcttaaggacgaagataggatatttaaaaacttatataatgatcttggttgggaaatagattcagctattaaaagaggagattggtcccaaacaaaagatattatttccaaaggaaaagatttcattataaaagaaattaaagattctgagttacgtggtagaggtggcgctggatttccaaccggtcttaaactatcttttgcaccaaaagaagttggatccagacctcattacttagtcattaatgcagatgaatcagaacctggaact

SEQ ID NO: 221664 - DNA, 819 bp, Unknown
  Bacterial polypeptide expressing nucleotide sequence isolated from the Sargasso Sea
cctgcaaaaaccaaggaaaaccaaggaaaaaacgaggaacacggagctccggaccccctccgggtggcccaggggcacccaagagagctccaaggcgaccccaagagctcccaggagcaccccgggaggcgtccgagggtgctccgggaccggagggtcccgggagagcccgagagcgctcccagagctccccgggagctcccaagaacgctccgagagcgctccgagtgtccgaagagcactccgagagcctgaaactgcttcaagagcgctctggagtagcggcaatgctcgaaaacttcgactcttcgttacatttcttcggcgcttcctgccagctcgcaacatttcttcgtcgagcgccgcgtctgctgagctacattcgctacgctacgttagccacgccatgttcgctacaacgcgctggctacgcgacgctacggtcgctacgccacgttggttacgctacgttcgctacgctacgttcgtaatgctgtgtgcgccacgctacgctcgctacgctgcgctcgcttcgctatgctggctacattacgttcaccacgctacgttcgctacgctgcgtctgctacgctacacgctcgcagcgctgcattcgccgcgctgcgttcgctacgctacgttcgctacgttacattggccacgctgtgttcgctacgctgcgttcgctacgctgcgcttgctgcgctacgctggccaagctgcgttcgctacgctactttcgctacgctacatctgctatgctacacattggctgcgctgcgttcgccacgctgcgttcgctacgctgtgtgggatctg

SEQ ID NO: 221665 - DNA, 679 bp, Unknown
  Bacterial polypeptide expressing nucleotide sequence isolated from the Sargasso Sea
gatgcaatacaaacttactcgggtcgacccgaatgcgcccaacgaggcgtatccgatcggccagcgggaggtcgtctccgacccgctgctagaggaccaggttcacaagaacatctacatgggcaagctctcggacgtgcttaacggcgcggtcaactgggggcgcaagaattccttgtggccgtacaacttcggcctgtcctgctgctatgtggaaatgaccacagccttcaccgcgccgcacgacgtggcgcgtttcggtgcggaggtcattcgcgcatcaccccgccaggccgacttcatggtcatcgccggcacctgcttcatcaagatggcgccggtcatccagcgtctctatgagcagatgctggagcccaagtgggtcatctccatgggttcatgcgccaactccggcggcatgtacgacatctactcggtcgttcagggcgtggacaagttcctccccgtggacgtctacattcccggctgcccgccccgtccggaggcgttcctgcaaggcttgatgctgctgcaggaatccatcggccaggagcgccgcccgctatcctgggtcgttggcgatcaaggcatctaccgtgccgaaatgccttcgcagaaggaacagcgacgcgagcagcgaatcgccgttaccaacctgcgtagccccgacgaagtctga

SEQ ID NO: 221666 - DNA, 490 bp, Unknown
  Bacterial polypeptide expressing nucleotide sequence isolated from the Sargasso Sea
atgattaaattaaaggttaatgatatagatttggaagttgaagaaggattaactgtgcttcaagcttgtgaaaaagcgggagctgaaattcctagattttgttatcatgaaaaactttcaatagctggaaactgcagaatgtgcttagttgaaattgaaaaatcacccaagccagttgcctcatgcgctatgccaataaccgaaggaatgaatatcaaaactaacaccgaaaaagttgaaaaagcaagaaaaggtgtaatggaatttttactagcaaatcatcctttagactgtcctgtctgtgatcagggtggagaatgtgatttacaagatcaatcaatgttttatggaatagacaaaactagatacaaagaaaataaaagagaagtaccagacaaatacatgggtcctttaattaaaactcaaatgactagatgtattcactgtacgagatgcattagatttgccacagaaagttgctggagttaca

SEQ ID NO: 221667 - DNA, 520 bp, Unknown
  Bacterial polypeptide expressing nucleotide sequence isolated from the Sargasso Sea
atgttaaaagaacaagataaaatatttaataatttatatggagatcaaagctattcattggctgacgcaacgcgtaggggtgattgggatcagacaagcaacctaattaaaaaaggttctgaatggataattgaggaaatgaaaaaatcggaactaagaggtagaggcggagcaggatttcctacaggtttaaaatggtctttcatgcctaaagatcctggttcaaataattatttagtagtaaatgcagatgagtcggaacctggcacttgtaaagatagagacatgataagaaacgagcctcataaattgattgaaggctgcttgctctcatctttcgcaatgaatgctcataattgctacatctatattagaggagaatattttaatgaggccgttgtattacaaaaagcaattgatgaagcatacgaagcaggtctagtaggaaaaaatgcttgtggttctggatgggattttgatatttatttacatcgaggtgcaggagcatatatctgtggag

SEQ ID NO: 221668 - DNA, 1186 bp, Unknown
  Bacterial polypeptide expressing nucleotide sequence isolated from the Sargasso Sea
agctttttatcctgagttgccagaatatataaatttagatgagtatattaagagcaatggctataagatttatcaatccatttgtaacggtgaaatatcagctgagaatgcagtatctatacttgaggattcagaattgaaaggtctaggtggcgcaggatttcctgctgggcgaaagtggaggattcttagagatcaacaagcacctagacttctcgcgatcaatatcgacgaaggtgagcctggtacatttaaagatagacattatcttgaatccgacccacatagattttttgagggaatgttgattgcatcaaaagtagttggcattgataaaatatatatctatctgagagatgagtatcctgctgttaaaattatcatggaacaagaaatccaaaaaattaagaaacactttgatgacattccagaaatagaaatgaggcgcggcgcaggtgcttatatctgtggggaagaatctgcgatgattgaatcaattgagggtaaacgaggaatgccaagattacgtcctccttttgtcgcacaagttggtttatttggacgtcctacactggagcataatatggagacgctttattggattagagacatacttgacaaaggttccaagtggtttgctgataaaggtgttaacggaagaaaagggttaagatctttttctgtgagcggacgggtaaaaaatcctggcgtacatcttgctccagcaggaactacggttcaagaactcattgatgactatgcgggaggcatgttggatggtcatgaattttatggttacttcccaggtggggcatctgggggaattttacccgcatccatgaataacatacctcttgattttggaacactggaagaatacggatgctttataggttctgctgctgttgtcatactatcagacaaagataaagcaagagacgctgctaaaacaacaatagatttttttaaacatgaatcatgtgggaagtgcacaccatgtagagctggaacatctaaagcttcggaattgatgaaagagattcattgggacacagatctgcttaaagaccttagtcaggccatggctgatgcatcgatatgtggcttaggtcaagcagcatctaatccattaaaatctgtgctaaaatattttccgaatgaggtaaaagatggcagcaaaacctga

SEQ ID NO: 221669 - DNA, 1597 bp, Unknown
  Bacterial polypeptide expressing nucleotide sequence isolated from the Sargasso Sea
ttgggagataatactgaatttaaaagggatatgctcatagaatatcttcatttaattcaagatgctaatggatatatatctagtgacataatggaagcattatcaaatgaaatgaaacttccgttggttgaagtttgggaagttgcaagtttttatgatcattttgatttgataaaagacaacgaaacaccaccaccaaaaaaaactataagagtatgtaattcattatcctgttttttaaatggctctagtaatttaattaaagaacttaaggaagatagctacataaatgatgacgttcgtgtaattgaggctccatgccttggagcctgcgacatggcacctgccgcagctcaaaaacattatttaatacctaaagcaaataaaaataaaatagtaaaaattctaagtggatcaaaagtaaaagaccctttagaaaacaccatagattttgatcaatatataaaaagtggtggttattcatctttagtaaaaattattgatggaaagataacacactcaaaaatcttaaatgaaattaaagtttccggcttaagaggtttaggaggagctggttttccaacttttaaaaaatgggaaatagtaaactctgaaaagggaataaaatacgttgctgtaaatggagatgaaggtgagccaggaacttttaaagataggttctatctagaaaaagatcctcatcgagtattagagggcatgctaattgcagcctatttcataggagctaaagattgttatttttacataagggatgaataccctgaaataagaattttcattaataaagaaattaaaaaagtaaaattatatctaaatttaaatattaatattcatataagaagaggtgctggtgcttatatttgtggtgaagaatcagctatgatagaatctattgaaggcaaaagaggtttaccaaggcacaggccaccttatgttgctcaaaaaggaatttttaataaacctacattagtgaataatattgaaacactttattggataagagaaatcatagaaaaaggaggtaaaaattttgcaagcaaaggctctaaagaccatcctggagctagaagctactcagtttctggaagagtaaaatatcctggagttgtttttgctcctgcaggctctacagttaacgaactgattcaaaaatgtggtggtatacttgatggtcataaatttaaagcttatctaccaggtggagcttcaggtggcattttaccatcagcaaaaggtgatgtcccattggattttggtggagaattaactaaatatggctgctttgttggttcacatgctattgttattttatctgacaaagataacttagcggatgtagctttaaatttaatatcttttttcaaacatgagagttgtggtcaatgtactccttgcagaaatggcacagaaaaaattattaatattataaaaaataattctaaatgggataaagatctactttccgatatttcagaagttatggcaaatgcctctatatgtggtttaggacaagcagcttcaaatccaattttatctgtattgaaattttttccaaaagatgtaggaattaaataac

SEQ ID NO: 221670 - DNA, 1234 bp, Unknown
  Bacterial polypeptide expressing nucleotide sequence isolated from the Sargasso Sea
atgaaaaccgccgtaaatacatcagcaaatagcgagttcgcacctaatctgcttgttggtcttcgtgaggagtttgagcagcttatccttgcttggcaaaccacttccgacaacatgcctaccatctgggtagatcgaaaagatctgacgtcgattttgatctatttgcgagacaaagcagaacctcgtttcgaaatgctttttgacataacggccattgatgaaagggttagagtccaccgtcttgggcagcctgagtcagaattttcagttgtttatcacctaatgtcattttcagggaatagagattttcgaattaaagttccgttgatggatgctgacttaaacatcccgtctatagtgagtttatggccttctgctaactggtacgagcgtgagacgtgggacatgttcggaataaattttgaaggacaccctaatctctataggatagttctgcctccaacttgggaaggtcatgcacttcggaaggagcacccggcgcgggcaacagaaatggagccgttttcgcttgaggatgagaaagctgaagaagagcaaaatgcgctactctttaaccccgaagaatgggggatgaagcgcaaatccgagaactctgagtttatgtttctaaacctcggacctaatcatccaagcgttcacggtgcttttagaattgcagtgcagttagatggagaaatattggttgatgcagtgcctgatattggttaccaccaccgaggtgctgaaaaaatgggtgagcgccagtcatggcacacctatattccttacactgatcggatcgattatctcggtggtgtaatgaataacctaccttacgtgatggccgttgaaaagatggccggaatcgaagtgcctgagcgagttaagacgatacgtattatgcttgcagaaatgttcaggatatgtagtcacttgttgttttatggaacttttgctcaagatgtggggcaactgtcacctatattttacatgtttgttgagagggagcgcatttttaacataatagaatcaatttgtggtgctcgtatgcatccaggttggtttcgaatcggaggcgttgcgcaggatctgcctgaaggttgggagagcagggttagagagttgttggagtttatgccgcctcgcattgatgaatacgacaaaatggttctgaataacggtattctgaaaaggagaacgcagggtgtaggcgcgtattcaactcagcaag

SEQ ID NO: 221671 - DNA, 329 bp, Unknown
  Bacterial polypeptide expressing nucleotide sequence isolated from the Sargasso Sea
tttgccaaaaccaatctctgcagtttttaactgggcaagatcttactcgttatggtattttcaatttgggttagcgtgttgtgcaattgaagttatggcagtaagtggacctagacatgattttatgagattgggtgtcattcctttgccagcatctccaagacaagctgacttaatgatagtagctggaacagttacagataaaatggctccagcagtaaaaaggctctatgaccaaatgcctgaacctaaatatgtaatttctatgggatcatgttcaaatagtggaggtccatattgggattcctattctgttacaaaagggtgtt

SEQ ID NO: 221672 - DNA, 457 bp, Unknown
  Bacterial polypeptide expressing nucleotide sequence isolated from the Sargasso Sea
atgcttaaggacgaagatagaatatttcaaaatttatataatgatagtggttcagattatgagtctgctaaaaaaagaaatgattggaatggaacaaaagagattctagataaaggtagggattggattattaatgaagtaaaaacctctgaacttagaggacgaggtggtgctggttttcctactggtcttaagtggtcctttgctcctaaagaagtaggatctagacctcattatttagttataaatgctgatgaatcagaacctggaacatgtaaagatagggatatattaagatttgagcctcacaagttaatagagggatgtctaatcgcttcttatgctgttaatgctcacaaatgttatatttacattagaggtgaatattttaatgaaggtcaaaaacttcaaaatgccatagatgaagcttatcaaaataatttaattggagaaaatg

SEQ ID NO: 221673 - DNA, 655 bp, Unknown
  Bacterial polypeptide expressing nucleotide sequence isolated from the Sargasso Sea
tatggctgatgagcgaagagtgataattgatgaagtcgaattggaagtagatggttcaatgactttaatacaggcttgcgaagaggctggcatagaaattccgcgtttttgctatcatgaacgtctttccattgcaggaaattgccgaatgtgtctgattgagatagttgggggaccccccaagccagccgcatcttgcgccatgcaagttcgagatctacgccctggtccagatgggcagcctccagtagtgaggaccaactccccgatggtaaagaaagcccgagagggtgtaatggaatttttactaatcaatcatccacttgattgtccaatatgtgatcaaggtggggagtgtgacttacaagatcaggctatggcttatggagtagatttttcgcgttttagggaagcaaagcgagcttcggatgatttagaccttggcccgctcgttgaaactcacatgacccgttgcataagctgtacccggtgtgttcgcttcacaactgaggtggcggggacatctcaaatggggcaaacggggcgtggtgaagatagcgaaattacaagttatttaggtgaaacattagaaagcaatttgcaaggcaatataatcgatttatgtccggttggagccttaacgtctaagccttat

SEQ ID NO: 221674 - DNA, 1345 bp, Unknown
  Bacterial polypeptide expressing nucleotide sequence isolated from the Sargasso Sea
gacattctaccacctattttgatgtcatccggggaaaacgaaactccacccccctcgttgaccgttcgggtttgcgattcaatgagttgtcgaatggcaggggcagaaaacttgatccaggagcttgatcaaaaatttgatgaatccattcgggttcagagagttccctgtgtaggacgttgccagcatgctcctgtggcagtggttgggcaaaatcctgtggaccttgcgaatccggtaaaagttcaacaaaaatccgaattaaacgatacgattccttcattgccagattatgtggactacaattcttaccggactgcagggggttatcaggtttttcaatcctgcatcaagggggaaagacaacctaaagaagttatcgaagttctaaaaaactcaaacctgaggggattgggaggagctggatttcctgcagggatgaagtgggagattgtcggaaaattcgagggaccaaggttgttggcagtaaacatcgatgaaggagaaccggggacattcaaggaccggtatttcctggagagcgatcctcaccggtttttggaggggtgtctgattgcttgctgggcagtgggtattgaagaaatttatctttacctccgagacgaatatgctgcatgcatgactttattgctgaaggaacttgaggcattaaaaaacgatctgcctgagaaacttccgaagatccatcttcgccgtggggctggtgcctatgtctgcggggaggaatctgcgatgatcgagtcgatcgaaggtaagcggggcatgccacgactgagaccgccttatgtcgcagaggttgggctttttggtcgcccaaccctggaacataatcttgaaacgcttcactgggtcagagacattctgaataatggagcagactggttcaactcccagggacggcatggacgcaaaggactgcggtccttttcagtaagcggtagggtcaaaaaaccaggggtgcatcttgctcctgcaggaattaccgtaaaggaactgattgaagaatattgtggaggtatgcttgaagggcacgaattctacggttactttcccgggggtgcgtccggtggaatccttcctgcaagcttgggagatgttccacttgattttgataccctccaggaacatggttgtttcattggatctgcggcagtgattattttttcgaatcaggattcagcaaaggatttggccatcaatgcaatgcgtttttttgaacacgagtcctgcggacaatgtaccccgtgcagggttggaaccggaaaggctacaattctgatggaacaacccaaatgggacaaagatttactggaagaactctcta

SEQ ID NO: 221675 - DNA, 565 bp, Unknown
  Bacterial polypeptide expressing nucleotide sequence isolated from the Sargasso Sea
atgcttagagacgaagatagaatatttacaaatttatataatgattttggatctgatgtagattcttcccaaaaaagaggtgattggaaagatactaaggaaatcattagcaaaggaaaagaatggataataaatgaaattaaattatctgaacttagaggaagaggtggtgctggttttccaactggtctcaagtggtcctttgctcccaaagagattggttccaaacaacattatcttgtaataaacgctgatgagtcagagcctggcacttgtaaagatagagatattcttagatttgaaccacaaaaattaattgagggttgtctcatatcatcatatgcagttaacgcccacatatgttatatttatattagaggcgaatattacaacgaaggaaaaaaagttcaggaagctatagatgaagcatataaaaaagagctaataggaaaaaatgcatgtggtagtggttgggatttagatatttacattcattatggagcgggagcttatatttatggtgaagaaactgctttattagaaagtatgaaggaaaaaaagggca

SEQ ID NO: 221676 - DNA, 843 bp, Unknown
  Bacterial polypeptide expressing nucleotide sequence isolated from the Sargasso Sea
gatggttgagtcttctttacagactggttatgtaaaacatgcacctggtttcgtcgaaaatgagggtccaaagcttattacaagccgtttcaaacatgcggattcttttacacttgataagtatttgtcaacaggtggttatgaaggtttaaagtcatcacttaatcgttcacccggccaagttcatgacgaggttagagaagccagtcttcttggacgcggaggtgctggtttccccgcaggaattaaatggggattccctcccgaaggggtttggccacggtatttagtggttaatggagatgaaagtgaaatagggacttataaagaccggcttttaatggaaagggatcctcatcagttaatagaaggagttttgattgcttgctatgcacttggcttatctcaggcttttttatatgtccggggtgaaatggctttggcgcaagaacggatagctcttgcacttgatgaagcatatgaagctggttatatcgggaaaaacattttagatactaagttttctgttgatgtagtaatgcattggggtgcaggagcatacatagttggagaagaaacagctttaatagaaagtcttgaaggaaaacgaggaatgccacgtttaaaacccccttattttccagctgcaattggcttatacggtaagccgacgattgtaaataatgttgaaacactttctaatcttccttggattctcaataatggagcctctgcttataaaggatttggttcagaatcatcacctggaacacgaatgtttgcaatatctggtcatgtaaaacgtccgggtgtctatgaggttgaacatggagtactacctta

SEQ ID NO: 221677 - DNA, 541 bp, Unknown
  Bacterial polypeptide expressing nucleotide sequence isolated from the Sargasso Sea
atgcctaaaataattattaatggaaaagaaatagaatttgaaaagggaatgacggttctacaagcatgcgaactagctgatgtggagataccgagattttgttaccacgaaaaactttcaattgcgggaaattgtagaatgtgtctagtagaacttgaaaaatcaccaaagcctattgcatcatgcgcgatgccagcagccgagggcatgaatataaaaacaaatacacatctagttgaaaaagctagaaagggtgtgatggaatttttactcgctaaccaccctcttgattgcccagtatgcgatcaaggaggagagtgtgatttgcaagatcaatcaatgtactacggagtagataagtcaagatttattgaaaataaaagacaagttaaagaaaaatatatgggtcctctaataaaaacccaaatgactaggtgcattcattgcacaaggtgcgtaagatttgcaacggaagtcgcaggtgtccctgaaattggagctattggtcggggagagatatggaaatttacacttatttaag

SEQ ID NO: 221678 - DNA, 583 bp, Unknown
  Bacterial polypeptide expressing nucleotide sequence isolated from the Sargasso Sea
aatgcctaaattaaaagtaaacgatattgatattgaagttgaagatggtctaactgtgctccaggcttgtgaacaagctggggctgaaataccaagattttgttaccatgaaaaactttcaatagctgggaattgtcgtatgtgcttggttgaaatggaaaaatctccaaaacccatagcttcatgtgcaatgcctgcagctgagggtatggttattaaaacaaatacagaaaaagtcgaaaaagcaagaaaaggtgtgatggagtttttgctggccaatcatcctttagactgtcctgtttgcgatcaaggtggcgagtgtgatttacaggatcaatctatgttttatggaattgataaatcacgatttaaagagaataaaagatatgtaccagaaaaatacatgggtccattaataaaaacccaaatgacaagatgcattcattgtactagatgtatcagatttgccactgaaatagcgggagtgccagaattaggtgcaattggacgtggagaaaatatggaaattaccacatatttagagaaatcaatggagtctgaaatgtcagccaaatgtaattga

SEQ ID NO: 221679 - DNA, 334 bp, Unknown
  Bacterial polypeptide expressing nucleotide sequence isolated from the Sargasso Sea
atgcttaaacttaaagtaaatgatattgatgttgaattagaagaaggcttgacagtattacaagcgtgtgaacaagcaggtgttgaaataccaagattttgctatcatgaaagactatccatagctggtaattgcagaatgtgtttagtcgaaatggaaaaatctccaaaaccaattgcttcatgtgcaatgcctgcggcagaaggaatggttattaaaacgaatactgaaaaagttgataaggcaagaaaaggtgtaatggaatttttgcttgcaaatcacccactagattgccccgtatgtgatcaaggaggtgaattgattacaagatcaa

SEQ ID NO: 221680 - DNA, 511 bp, Unknown
  Bacterial polypeptide expressing nucleotide sequence isolated from the Sargasso Sea
cgcaagggcctgcgttgtttttcagtgagtggccgtattaacaaacctggagtgcaccttgcgcctgcgggcatttcaatccatgaattgatagatgaatactgcgatggaatgatgcctggacacaaattttatggttatttcccagggggtgcatccggagggatgttaccggcgtcgttgggagatgtgccattagattttgacacgctccaggaatatggatgtttcattggttcagcagcagttatagttttttcagaacaggatgcagctagagatttggctcttaacgcaatgcgtttctttgagcatgagtcatgcggccaatgtaccccctgccgttcaggcacatcaaaagccattccattgatgaaaaaagaaaaatgggataagactctgctagaagaactttcaagtacaatggaagatgcttcaatttgtggattagggcaggctgccccaaatccattaagaagcgttatcaaatatttccctcaagaagtgtgaa

SEQ ID NO: 221681 - DNA, 235 bp, Unknown
  Bacterial polypeptide expressing nucleotide sequence isolated from the Sargasso Sea
catgagtctggcatcccttggtaccgccaatcgcatcacccgcgccgccgagacccatcccctcacctggcggctgcgcgacgacggccagccggtatggctggatgaataccagagcaagcagggttacgatgcggcccgcaaggcgctgggccagatgagcccggacgagatcgtcggcaccgtcaaggatgccggcctcaaggggcgcggcggcgccggtttctccaccggc

SEQ ID NO: 221682 - DNA, 220 bp, Unknown
  Bacterial polypeptide expressing nucleotide sequence isolated from the Sargasso Sea
ttatgaccagatgccagaacctagatacgtaatatcaatgggaagttgtgcaaattgtggaggttattatcattactcgtattcagtagtcaggggatgtgatcgagtggtaccagttgatgtatatgtccctggatgccctccgtcagctgaagcattactttatgggattttacaattacagaaaaaaattagaaataaaggttctttagagagataa

SEQ ID NO: 221683 - DNA, 361 bp, Unknown
  Bacterial polypeptide expressing nucleotide sequence isolated from the Sargasso Sea
atgggtttactaacaaataaatttcaagaagataatgtaattgttgagaaacttgaaaagctacttaactggagccgtagtacgagtccgtggttttttcaatttggtactgcttgttgtgcaatcgaaatgatggctgctgcagcaccaaggcatgatattaaaagaatcggttttattcctaggtcatcgcctaggcaagcagatgtgatgatagttgctggtactgttacaatgaaaatggcgattcgagtcaaaaaactctatgagcagatggcagatccaaaatacgttgtagccatgggttcatgcgctacgagtggagggccatattggcaacatggttatcatgtgctaaagg

SEQ ID NO: 221684 - DNA, 514 bp, Unknown
  Bacterial polypeptide expressing nucleotide sequence isolated from the Sargasso Sea
atgcataaattaaaagttaatgatattgaagttgaagttgaagaaggtttgacagttttacaagcttgtgaaaaagcaggagttgaaattccaaggttttgttatcatgaaaaattatcgatagctggtaattgtagaatgtgtttagttgaaatggaaaaatcccctaaacccatagcctcatgtgcaatgccagcagctgatggaatggttataaaaaccaatacagcaaaaattgaaaaatctagaaaaggagtaatggagtttttgttggctaatcatcctttagattgtccggtttgtgatcaaggtggagaatgtgaccttcaagatcaatcaatgttttatgggatagataaatcaagatttaaagaaaataaaagggcagttccagataaaaacatgggccctttaattaagactcaaatgacaagatgcattcactgcactagatgcataagattcgcaacagaaattgccggggttccagaattaggtgcaatggcagagggaa

SEQ ID NO: 221685 - DNA, 604 bp, Unknown
  Bacterial polypeptide expressing nucleotide sequence isolated from the Sargasso Sea
attgttaattccttttagcgtttttatttttaattcaattgtactaagaaacttaataagcggtaagaatgaaattcctggtattgtaaactcaatttctattggaataagttttatttttgctttaattgtactttttaatgtaggggatttttcatcgtcaatttcatttacatggatcaacctaaatgatgttgatataactttttctttcttggtagatccgctgactgcaataatgttagttgtagtttcaggagtctcgtttttggttcagatttactccattggatacatgcatggagacaaaagtttttgtagatacttctcctatatggctttatttacaggttctatgcttggcctagtaatgtctagaaacattctacaattatttattttttgggaattagtgggtgtttcttcttatctacttattggcttttggcatgaaaggaaatctgcagctgcagctgcaaagaaagcctttattatgacaagattaggagatttcggatttttattctctataatttatttatttaatgtgaattctgacttattagaaattcctgctttatacaatgcaatattgaataatgaa

SEQ ID NO: 221686 - DNA, 553 bp, Unknown
  Bacterial polypeptide expressing nucleotide sequence isolated from the Sargasso Sea
aatgcttaaggatcaagatagaatattcaaaaatttatacaatgatatgggttctgatgtagtttcttctcaaaaaagaggcgactgggttaatactaaagaaattacagacaaaggtagagattggataataaatgaaattaaagactcgcaacttagaggaaggggtggtgctggatttccaactggtttaaaatggtcatttgcccctaaagaagtgggttctagaccacattatttagttataaatggcgatgaatcagaaccaggaacatgtaaagatcgagatattttaagatttgagcctcataaattaattgagggctgtttaattgcatcttacgctgtccaagctcacatttgctatatttatatcagaggtgaatactttattgatggtcaaaaacttcaagcagctattgatgaagcttacgaaaaaaaattgttaggaaaaaatgcggctgggactggttgggatttagatatttatattcattacggcgctggagcttacatatgtggagaggaaacagccttattagaaagtatagaa

SEQ ID NO: 221687 - DNA, 711 bp, Unknown
  Bacterial polypeptide expressing nucleotide sequence isolated from the Sargasso Sea
aatgattaaattaaaagtaaacgatatagatcttgaagttgaagaaggtttaactgttcttcaagcatgcgaaaaagctggagctgaaattccaagattttgttatcatgaaaaactctctatagctggtaactgtagaatgtgtttagtagaaattgagaagtctcctaaaccagtagcctcatgtgcgatgcctataacagaaggcatgaatataaaaacaaatacagaaaaagtggagaaggcaagaaagggtgtaatggagtttttattagcaaatcatccattagattgccctgtttgtgaccaaggtggagaatgtgatcttcaggatcaatcaatgttttatggaatagataaatctagatacaaggaaaataaaagagaagttccagataaatatatggggcccttaatcaaaactcaaatgaccagatgtattcactgcactagatgtattagatttgctacagaagtagcaggtgtcccagaacttggtgcaatcggaagaggtgaagatatgcagattacaacgtatttagaaaaatcaatggaatcagagctgtcagcgaatgttattgatttatgtcctgttggagcttttacatcaaagccctacgtttttgaagcaagaccttgggagcttaaaaaaactgaaactatagatgtaatggatgctgtaggttcaagcattagagttgatacttatgg

SEQ ID NO: 221688 - DNA, 970 bp, Unknown
  Bacterial polypeptide expressing nucleotide sequence isolated from the Sargasso Sea
atgagtgactctctgatcgatctgttgctggaaatcggcaaggcattgatcgtgctggtggggatcgtgggggccggcgccttcatgagcttcatcgagcgccgtctgctggcgctgtggcaggatcgttacggccccaaccgggttggccccttcggcctgctgcagctggcggccgacatgatcaagatgttcttcaaagaggactggatcccgccgttcgccgatcgccggatcttcgtgctggcccccatcatcgcctttaccgccttcattctggcgtttgcagtggtgcccatcacccccacctggggcgtggcggacctcaacgtggggctgctctacatcctggccatcgcggggctggcggtctacgccgtgctgttcgccggctggtcgagcaacaacaagtactcattgctcggcagcctgcgcgcctcggctcagaccctctcctacgaggtgtttctcggcctctccttgatgggcatcgtcatccagaccggcagcttcaacctgcgcgatatcgtggaagcccaggcaggactgtggaacgtgatcccccagatcctgggtttcatcaccttcctgtttgccggcgtcgccgtcacccaccgccatccgtttgaccaaccagaagccgagcaggagctcgccgacggttatcacatcgagtatgcgggcatgaaatggggtctgttcttcgtgggcgagtacatcggcatcgtgctgatctcttcgctcatcgtaaccctgttcttcggtggctggcacggcccctggctgccgcccttcatctggtttgccctgaagaccgcctgtttcatggtgttcttcatcctgctgcgggcctccctgccccgcccgcgctttgaccaggtgatgtcgtttggctggaaagtctgcctgccgctgaccctgctcaacatgctggtcaccggcgccgtggtgctgatgaatgcgcagtgag

SEQ ID NO: 221689 - DNA, 277 bp, Unknown
  Bacterial polypeptide expressing nucleotide sequence isolated from the Sargasso Sea
gtgtacaccatgtcgagaaggtacaggatggatgtataaaattatagacaaaatacttaaaggtaatggcactctggaagatctaaaaactcttgagtctattccaaatatgatttctggaagtacaatttgcgccttgggtgatgccgctgccatgccagtagaaagttttataaaaaattataaagaagaatttttaaagtatattaaaacccaagaagaagttgtagataataactatactaataataaagaatttgtaatacagcaaaaatga

SEQ ID NO: 221690 - DNA, 1072 bp, Unknown
  Bacterial polypeptide expressing nucleotide sequence isolated from the Sargasso Sea
tttctagtatccactttttgtcggctttccaatgcagttggagtaggaggagcagtcataggaactagaatgatatatttaatatcaaaatctaattctcaactacatgctttagcatttacctttttaataggtgcctttgggggagcagttatgtttttcagtcttatacttgactcatttttgcttctgctgcttggagctttcattttagggattggtcaatcggcaacacttcaaaccaggtacgcagcttcatttgttgctggtgcgaagtttaaagctactgcattgtctctagcagtttggttttcagtttttggttctgtatttggaccacgtatggttggaagctattcaaatttttttgaaaatatatttaactcagacctaatcgttggttatgtaattgcgttcgttggaatgctatttgcagcggcctctctgttcacatttacttcaaaaaaaagtattttaaggagcccaagtgatttagaaagtgaatcaagtgatcaaagttctgaaagaaaaaatggtaacttattatcgcttctcttagttttgaatcatttcacaatggttgtaataatgtctgctacaccattgcatatacaagatataggtgaaaccgttcagctggttggaattattattagttatcacactttagggatgtttctattttcacccattctcggaaattatgtagataaatatggatacaagaaatttacatatgtaggaactgtaattttatttataagttgcttaattactttaattaattctggacctactgcgttaaaaataggtttatacctattaggacttggatggaattttaattatgttgcaattagtgcagctatttcaaaattttcaatcaaatacaggactcctctaaacataaaaagtgactcttttgttttcttaggaagttttgtagctcatacatctttaggcttaagttacttgctaattggatttaaaggcttatcttttgtaggaattgctgtaagtgtttttttattttacaatttaaaaaatttaaataagttaaatattgaatgaa

SEQ ID NO: 221691 - DNA, 1801 bp, Unknown
  Bacterial polypeptide expressing nucleotide sequence isolated from the Sargasso Sea
tacctctttagtgcaaaaagccagaaaaggtgtgatggaatttttattagcaaatcatcctttagattgccctgtttgtgatcaaggaggagaatgtgatttgcaagaccagtcaatgttttatggaattgataaatcaagatataaagagaacaaacgccaagttccagaaaagcacatgggaccattaataaaaacacaaatgacaagatgtattcattgtactcgttgcataaggtttgctacagaagtagcaggagttacagaacttggtgcaataggtcgtggtgaagatatgcaaattactacatatcttgaaaaatccatggaatccgaaatgtctgcaaatgtaattgatttgtgcccagttggcgctttaacatcaaaaccctatgtttttgaggctagaccttgggaactaaaaaaaacagagtcaattgatgttatggatgcagttggatctaatattagagtagatacttatgggtgggaagtaaaaagaattttaccaagaattaatgaagatattaatgaagaatggatctcagataaaacaagatacgcttgtgatggattaaaaaatcagagattagatataccctatataaaaattaatggaaaattaaaaccaactacatggaatgatgcatttaatcatatagttgataaaattaaaaaaagtccaccagaaaaaatagctggattaactggcgatttaacaaacatggaaacaatgtttattgctaaagaatttttccagaaaacaattaaatcaaaaaacttagagtcaagaacaaataattactatgttaatactgatgatagaaaaaactatatttttaactctacattaaatggaattgaagaaagtgatttaattattttaattggcacaaatccacgctacgaagctactattttaaatgcaagaattagaaaatcatatttaaaaaataaaacaaatatttactctttgggcgatgtcggtgaactgacatacccttatattgttttagacaacaaaacagaggtagttaaagatattcttgaaaataaaaatgaattaactgaaaaattaaaaaaagcaaaaaaaccaatggttgtaattggtcaatctgcactaaaactaaattcagcaaaatatatttttgaagaatttaaaaaatttttaattaataacaaaaaaattaatgatgattggaattcattaaacattatatcaaaccatgcttctactgtaggaggttatgatttagatatattagatttacaagaaaaaaaagactcaactttagaaaaaataaagaataattatttcgaaattttatttttgtttgctcaagataattttaattttaaaaagaaaaatgaatttataatttatgttggtagtcacggtgatttaggagctgagttagcagatgtcattttaccaggcgctgcttatactgagcaggatggttattttacaaatttagagggaaaaatccaaaaagcttataaagcatcttatcctcctggtgagtcaaaagaagattgggaaataattaatgaactttcagaacttttaaaaaggaaaaaactttataataataaagatgaattaatagatagtatgatgaattatataaagttaaaagaaagcgataataatttatctgataatcaatttattagcgaaaaaattattattgaaccagttgattattattattcaaatgtcatagctagatcttctcaaactatgtcagagtgtcgaaatgaaaagttaaaaattaaacccacaggtactgatggataa

SEQ ID NO: 221692 - DNA, 692 bp, Unknown
  Bacterial polypeptide expressing nucleotide sequence isolated from the Sargasso Sea
accatttccagcagttcaaggactttatggcaagcctacgataataattaatacagaaaccatagcatcagtcccatatatcataaaaaatggaatagattggtacaaaaatttaggtgcgggtgatgcacatggagtaaaaatgttttgtatgagtgggcatctcaacagaccaaaagttatagaggcgccattgggaacaccattttcaaagttattagatgagtgtaatggagtactaaatgacaaaaaactaaaagctgttatacctgggggatcatctgtacctgttgttaaaggtgaggttataatggacaccccaatggattatgagcctctgatgaaaattggcactatgctagggtcaggcggtgtaattgtaatggatgaaacaacatgtatggtatctgttctcgaacgcatatctagattttattacgctgaatcgtgcggtcaatgcacgccatgtcgtgagggaactggctggctctataaaacacttgtaaaaataagagcaggtcaaggagatcaatcagatctagatttacttaatagagttgctaatcaaattgaaggacattgcatatgtgctctgggtgatgccgcggctatgcccgtaaaaagctttctctcaaacttttggaatgagttcgagtactatgtagaaaaaaagcaatcaatgattatttaaa

SEQ ID NO: 221693 - DNA, 418 bp, Unknown
  Bacterial polypeptide expressing nucleotide sequence isolated from the Sargasso Sea
aatgattaaattaaaaataaatgataaaaatatcgaaattgaagatggtttaacagttcttcaggcctgcgaaaaagctggagttgaaataccaagattttgttaccatgaaaaactgtcaatagctggaaattgtaggatgtgtttggttgagatggaaaaatctccaaagccagtagcttcatgtgcaatgcctgcttccgagggtatgataataagaactaatactgaaaaggttgaaaaagctagaaaaggtgtaatggaatttttattagcaaaccatccattagactgtcctgtctgtgaccaaggtggtgaatgtgatttacaagatcaatcaatgttttatggaattgataaatcgaggtttaaagaaaataaaagacatgtgcctgaaaaatatatgggtccacttatt

SEQ ID NO: 221694 - DNA, 493 bp, Unknown
  Bacterial polypeptide expressing nucleotide sequence isolated from the Sargasso Sea
aatgcttaaagttaaaattaacgacatagatcttgaggtagaagaagggctaacagttttacaagcctgtgagcaagctggagctgaaatacctagattttgctatcatgagaaattatctatagctgggaattgtcgaatgtgtttagtagaaatagaaaaatctcctaaaccagtagcttcatgtgctatgccagttactaatggtatgaatattaaaacaaatactgaatttgttgagaaggcaagaaagggagttatggaatttttacttgctaatcatccattagattgtccagtatgtgatcaaggtggagaatgtgatttgcaagatcaatcaatgttttatggtgtagataaatctagatataaagaaaacaaaagatctgtgcccgaaaaatatatgggcccattaataaaaactcaaatgacaagatgtatacattgtactaggtgtataagatttgccacagaagtagctggtgtacctgaa

SEQ ID NO: 221695 - DNA, 311 bp, Unknown
  Bacterial polypeptide expressing nucleotide sequence isolated from the Sargasso Sea
aatgcttaatgctaaagataaagtttttcaaaaccttcatggttttcaagaaccctttattgaaggagccttacaaagaggttcatggtctaacacaaaagaaattttgtccaaaaatcaaaatgatattattgaattagtgaaatcaagtcagctcagaggaagaggtggtgcaggtttttctactggtcttaaatggtcatttatgccgaaggatacaggcaagcaacattatttagttgttaacgcagatgagtccgaacctggaacttgtaaagacagagaaattataagaaatgatcctcatactc

SEQ ID NO: 221696 - DNA, 1719 bp, Unknown
  Bacterial polypeptide expressing nucleotide sequence isolated from the Sargasso Sea
aaagctagaaaaggtgtaatggaatttttattagccaatcatcctttggattgtccggtttgcgaccaaggtggtgaatgtgatcttcaagatcaatcaatgtactacggagttgataaatcaagatttgtagaaaataaaagacaagtcaaagaaaaatacatgggcccattaataaaaactcaaatgacgagatgtatacattgtacaaggtgtgtgaggtttgcgacagaagtcgcaggtgttcctgaaataggagcaacaggaagaggtgagaatatggaaataactacatatttagaaaaagccatggaatcagaactttctgcaaatgttatagatttatgtccagtgggagctcttacttcaaaaccgtacgcttttgaagctcgaccttgggaacttaaaaaaactgaaagtgtagacgtaatggatgcagttggctcaaatataagaattgatacttacaattgggaagttaaaagaatattaccaagacttaataacgatattaacgaagaatggatttcagataaaacaagatattcatgtgatggcttattaaaacaaaggctagatgtgccatacataaaaaaaaataacaaacttcaaaaatctaactgggatgaagcaatctcaattttggtagagaaaattaaaactttaaatccagatgaaataggtggccatattggtgatatggtcaatttagaaaacgccttaagctttaaaaaatttttctctgttttaaaaagtaataatttggaatttagagaaaaaaatttttttatagacccatctgaaaaaagcaattatatatttaattcttcaataaagggtatagaaaagtctgatttaattcttctaattggaacaaatcctagacatgaagcaacaatgctaaacgcaagaatccgaaaagtttttgcccaaaaaaaagttccaatttattcaataggaaatccaggtgacctcacatacgattatactattattggtaataaaacagatgatataaagaaaatactaagcaatgaatcagatttttcaaaaatattatcttcctcaaaaaaacctgtaattataattggagagtcagctttagaattaaaaagtggaaaatatttaattgaaggttttaaaaattttttgaaaaacaataactttataaataaagattggaacgcgtttaactttttacctcaaaacgcctcaacagttggcttaatagacttaaaaatattatctaaagaggaaaataaaagaaatttattttttgagaaattaaaaaataatcaatttaagttattatatcttttagggtctgataatttagatataaaaaaaaataatgaatttattgtttaccaaggaagtcacggcgataaaggggctgaaattgcagatttaattcttccaagtgctgcttttacagaacaaaacggtctttatgaaaatcttgagggaagagtgcaagaatgcaaaaaagcctcttaccctataggagaagctttagaagattggaagatattaaatttaatattaaaagctttaggaaaaaatgaaaacttattaaattttgactctttgagagaagaagtcttaaaatcaattccaaatttttcaaaattaaatgaattaccccattttaaaaattgtgaattaattgatacatctccttactttggaagtgaggaaagtcatataaaagaatttaga

SEQ ID NO: 221697 - DNA, 676 bp, Unknown
  Bacterial polypeptide expressing nucleotide sequence isolated from the Sargasso Sea
atgaagtacaccctgacccggatcgacccagatgcgcccgttgagcgctatccccaggaacagcgccagaccgtcgaggatcccctggctcaagaggcctcacgcggcatcatgatcgggcgcctcgaagaggtgctgcaagacactgtcaactggggccgcaagaactccctctggccttacaacttcggtatctcctgctgctacgtagagatgtgtaccgccttcacctccccccatgatgtggcccgcttcggcgccgaagtcattcgtgcctcaccgcgccaggccgatttcatggtgatcgccggcacccccttcatcaagatggcccccgtcatccagcgtctgtatgaacagctgctcgaacccaagtgggtcatctccatgggtgcctgtgccaactccggcggcatgtacgacatctactcagtggttcagggcgtcgacaagttcctgccggtcgacgtctatattccgggttgtccaccccgtcccgaggcattcctgcaagcgctgatgctgctgcaggactccatcggcaaggagcgccgtccgctctcctgggtggttggcgatcagggcatctatcgcccccaaatgcctgccgagaaggaccgcaagcgtggcgagcggatcaacgtcaccaacctgcgcacgccggatgagatctgac

SEQ ID NO: 221698 - DNA, 322 bp, Unknown
  Bacterial polypeptide expressing nucleotide sequence isolated from the Sargasso Sea
atgcttaaaactgaagatagaatctttaaaaatctttataacgaattaggttgggagatagatagtgctatcaaaagagatgattggaaagatactaaaaatataatttcaaaaggcagagattggatcataaatgaagtaaaaatatctgagttaagaggtagaggtggagcaggcttctcaactggcctaaaatggtcctttgctcctaaacaagttggttcaagaccacattatttaataataaatgcagacgagtcagaaccaggaacttgcaaagatagagatattttaagatttgaacctcaaaaaattaattgaa

SEQ ID NO: 221699 - DNA, 631 bp, Unknown
  Bacterial polypeptide expressing nucleotide sequence isolated from the Sargasso Sea
gcagaggtcggactttttggtcgcccaaccctggaacataatcttgagacgctccactgggttagggacattctggaaaatggagcagactggttcacttcccagggacggcatgggcgtaaaggactgcggtccttttcagtgagcggaagggtcaaaaaaccgggagtgcatcttgctcctgcaggaattacggtaaaggaactgatcgaggaatattgtggaggtatgcttgaagggcatgaattctacggttactttcccgggggtgcttccggtggaatcctccccgcaagtttgggagatgttccacttgattttgataccctccaggaacatggttgtttcatcggatctgctgcagtgattattttttcggatcaggattcggcgaaggatttggccattaatgcaatgcgtttttttgaacacgagtcctgcggccaatgtaccccatgcagggttggaactggaaaggctgcaatcctgatggaacaacccaaatgggacaaagatttactggaagaactctctaaggctatggaagatgcatccatatgcggtttaggccaggcagccccgaatccaatccgttcggtggtcaactattttccacaggagcttgactgac

SEQ ID NO: 221700 - DNA, 311 bp, Unknown
  Bacterial polypeptide expressing nucleotide sequence isolated from the Sargasso Sea
aatgcttaaagaggaaaacaaaatatttaaaaatttatataacgaacaaggttgggaattagaaaatgctcttaaaagagatgattggttagatactaaaaaaattatagagaagggaagagactggatcataaatgaaattaaagcctctgaacttagaggtagaggaggagctggtttttcaactggattaaaatggtcattcgcacccaaaaaagttggttcaagaccacattacttggttataaatgctgatgagtctgaacctggaacttgtaaagatagagatatacttagatttgagcctcaaa

SEQ ID NO: 221701 - DNA, 1603 bp, Unknown
  Bacterial polypeptide expressing nucleotide sequence isolated from the Sargasso Sea
atgaacattaagacgacgacggatctcgtgaagaaggcgcgcgagggtgtgatggaatttttactcatcaatcacccgttggattgcccgatttgcgatcagggcggggagtgcgagttgcaagatcagagctacatcttcggaagcgaccgctcgaggttcaccgagtacaagcgcgcggtcgaggataaggagctcggtccgctcgtgaagacggtaatgtctcgttgcattcactgcacgcgctgcgtgcgattttccacggaaattgcgggcgtgcaagacatgggcatcaccggtcgcggcaatcaagccgaagttgggacgtacgtctccaagctcttggcgagcgagttgagcggtaacgtcatcgatctctgcccggtcggtgcgttgacatccaagccgttcgcgttctcggcgcgttcgtgggagctcgaatcgactccgagcattgacgtcaccgatggtttggggagcaacattcgcgtggacacgcgcggcgcagaagtgatgcgcatcgttccgcgggcgaacgaagaggtgaacgaggaatggattagcgacaaggcgagattctcgtacgacgctctcaagcgtcagagattggaccgaccgatggttcgcgatggctctggaaagctccaagaaacgtcttgggagtttgccttggagtacgtcgccgaaaagttgcaatccgtcgagccgaacgccatgcgtgcggtcgccggtaagctctgcgacgccgagtcgatgatttccttgaaggatatgatgaacaagctcggcgcttcccatctcacgccggaaggcatggcgaacacgtccgcggatgtgcgttcgtcgtacctcttcaactccaacttggttggcgtcgaagacgccgactacgtgctcctcatcggtaccaacccgcgcacggaagcgccggttctcaacgtcagacttcgtcgcgctgtcatcgccggcggcgccaccgtcgcaagcgtcggcccgaacgccgacttgtcctacccgagcgaacacttgggcgacacgacggcgacggtcgatgaaatcgcctcgggcaagcacgccgcctgcgaagctatcaaggctgcgcaaaaccccatggtgatcgtcggtagcgaactcttgcgacgaccggacgccaaggtgttgctgaagaagattcacgccatgtgcgatgacttgggcgtggtgaagggtgattggaacggattcaacgtcttgcacgacgcgggcggcacggtcggcgcgttggacatcggcttcgttccgggaacgtccgcttcggacgacgttccggcgcaattggtgtactccctcggcgccgaagagtttgacgctcccgagggtgcctttgtggtgtaccaaggacaccacggcgacaaaggcgcggcgcgcgccgacgtcattttgcccggcgccgcgtacacggaaaagaccggtacgtacgtcaacacggagggccgagcgcaaatggcgatcgcctccatgggacccgtgggccaagcgaaggaggattggcgaatcttgcgcgcgctcagtgaattcgcgggcgtgcctctgtcgtacaacactcaccagcaggtgcacgagc

SEQ ID NO: 221702 - DNA, 268 bp, Unknown
  Bacterial polypeptide expressing nucleotide sequence isolated from the Sargasso Sea
aatgttaaaagaaaaagataaaatatttactaatttatttggagatgaatctttccatttaaaaaatgcacaggcgagaggcgattgggataatacaaaagaacttattaaaaaaggaagagaatggataattgatgagatgaaaaaatctgagttaaggggaagaggaggtgcaggtttccccaccggattaaaatggtcatttatgcctaaagattcaaagcttactaattaccttgttgttaatgcagatgagtctgaaccaggc

SEQ ID NO: 221703 - DNA, 424 bp, Unknown
  Bacterial polypeptide expressing nucleotide sequence isolated from the Sargasso Sea
atgcttaaagatcaagatagaattttcaaaaatttatataacgacttgggatctgatattaactcatctcaaaaaagaggagattgggtcaatacaaaagaacttacgaacaaaggaagagattggatcattaatgagattaaagactcacaacttagaggaaggggtggagcaggttttccaactggattaaaatggtcttttgcacctaaagaagttggatcacgacctcattaccttgtcataaatgcagatgagtcagaacctggaacttgtaaagatagagatttattaagatttgaacctcataaacttatagaaggttgcttaatagcttcattcgcagttcaagcgcatgcttgttatatctatattagaggagaatattttatagaaggacaaaaacttcaaagctgcaattgat

SEQ ID NO: 221704 - DNA, 358 bp, Unknown
  Bacterial polypeptide expressing nucleotide sequence isolated from the Sargasso Sea
atgcctaaaataattattaatggaaaagaaatagaatttgaaaagggaatgacggttctacaagcatgcgagctagctgatgtggagataccgagattttgttaccacgaaaaactttcaattgcgggaaattgtagaatgtgtcttgtagaacttgaaaaatcaccaaaacctattgcatcatgtgcgatgccagcagccgagggtatgaatataaaaacgaatacacatctagttgaaaaagctagaaagggcgtgatggaatttttactcgctaaccaccctcttgattgcccagtatgcgatcaaggaggagagtgtgatttgcaagatcaatcaatgtactacggagtagata

SEQ ID NO: 221705 - DNA, 597 bp, Unknown
  Bacterial polypeptide expressing nucleotide sequence isolated from the Sargasso Sea
aatgcttaaactaaaagtaaatgatatcgatgtcgaagttgaagagggtttaactgtacttcaagcatgtgaaaaagctggggtagaaataccaagattttgttatcatgaaaaattatcaatagcagggaattgtagaatgtgtttagttgagatggaaaaatctcctaaacctattgcatcatgcgctatgccagctgctgaaggaatgaatataaaaacaaatacagaatttgttgaaaaggccagaaaaggtgtaatggaatttcttttagctaatcatcctttagattgccctgtatgcgatcaaggtggtgaatgtgatttgcaagatcaatctatgtattatggtgtagataaatcaagatttaaagaaaacaaaagattggttccagaaaaaaatatgggaccattaataaaaacacagatgaccagatgcattcattgcacaagatgtgtaagatttgctactgaagtagcaggtgtgccagagcttggagctatcggtagaggagaagatatgcaaattacaacataccttgaacagtctatgcaatcagagttatcagcaaacgtagtagatctatgtcctgtagg

SEQ ID NO: 221706 - DNA, 415 bp, Unknown
  Bacterial polypeptide expressing nucleotide sequence isolated from the Sargasso Sea
aatgcttaaattaaaagtaaatgaaattgaagtagaagtcgaagacgggttaacagtacttcaagcttgtgaaaaagcaggcgttgaaataccaagattttgttatcatgaaaaattatcgatagcaggtaattgtagaatgtgtttagttgaaatggaaaaatctcctaaaccaattgcatcatgtgctatgccagctactgagggcatgaatattaaaacaaatacagctctagttgaaaaggcccgtaaaggtgtaatggaatttctgttagctaaccatcccttagattgtccagtgtgtgatcaaggtggtgaatgcgatcttcaagatcaatcaatgtattatggagtggacaagtcaaggtttaaggaaaataaaagagcagtccctgaaaaaaatatgggaccatga

SEQ ID NO: 221707 - DNA, 310 bp, Unknown
  Bacterial polypeptide expressing nucleotide sequence isolated from the Sargasso Sea
aatgcttaagaatgaagataaaatatttacaaatatatacggggccaacagctcagaaattagcgctgcaatccggaggggtaattgggatagcacgaaaactttattaagtaagggcaaagattggataattgaagaattaaaggcatccggcctaaggggtcggggtggcgccggttttccaactggattaaaatggtccttcatgccaaaagaggtaaaggatcgcccacactatcttgttgtcaacgcagatgagtcggagcctggcacctgtaaagatagggaaatattacgaaatgagccccat

SEQ ID NO: 221708 - DNA, 1291 bp, Unknown
  Bacterial polypeptide expressing nucleotide sequence isolated from the Sargasso Sea
agttacctgcgaaatgtcaggttcaaaagaactactagatgaactcaataaagaatcaatggttatcccagattctggagaagttgtccgcattcaatctgtaccgtgtgttggacgctgtcaacacgcacctgtagctgtagtgggcaaaaatccggtagattatgcatctactgggagagtaaagcagaaagtggaagaaaaagcagttataccggaaattcctaaatacacaggacttgaggagtatatggcctccggaggataccagctttttcaaaactgtattacagaaaagaaaactccagaagaagttatcaatgaattaaagagttccggtctgagggggcttggtggtgcggggtttcctgctggagcaaaatgggaaatagttaaaaaattctcatctcctagatttcttgcagttaatatagatgaaggtgaaccaggtacatttaaggacaggtattttcttgagactgatccacatcgtttcttggaggggagtctgattgcttcctgggctgtgggaattgatgaaatttatctttatcttcgtgatgaatacgctgcaggacatgaaattttacgtcgcgaaattaaaaaaatggaaggttttttcaaggataaattatgcaagattcatttgcggcgtggcgctggagcttatatctgcggtgaagaatctgcaatgattgaatcaattgaaggaaaaagaggtattcctcgtttgcgaccgccttatgttgccgaagttggtttattcggcagacccactctagaacataatctggaaactcttcactgggttagggatatagttgaaaaaggggcagaatcattttctaaacatgggcgcagaggacgcaagggcctgcgttgtttttcagtgagtggccgtattaacaaacctggagtgcaccttgcacctgccggcatttcaatccatgaattgatagatgaatactgcgacggaatgaagcctggacacaaattttatgggtatttcccaggaggagcatctggaggaatgttaccggcatctttgggagatgtgccattagattttgacacactccaggaatatggatgtttcattggttcagcagcagttatagttttttcagaacaggatgcagctagagatttggctcttaacgcaatgcgtttttttgagcatgagtcatgcggccaatgtaccccctgccgttcaggcacatcaaaagccattccattgatgaaaaaagaaaaatgggataagactctatggaagaacttcaagtacaatgaa

SEQ ID NO: 221709 - DNA, 1195 bp, Unknown
  Bacterial polypeptide expressing nucleotide sequence isolated from the Sargasso Sea
atgccagctgctgaaggaatggttataaaaactaatacagaaaaagttgaaaaatccagaaaaggtgtgatggagtttcttcttgctaaccatccacttgattgtccagtttgtgatcagggaggtgaatgtgatcttcaagatcagtctatgttttatggaatcgataaaagtagatttaaagaaaataaaagatatgtgcctgaaaaatatatgggcccattgatcaagactcaaatgacaagatgtattcattgtacacgatgtataagatttgctactgaagttgctggcgttcctgaattgggtgcaatcggaagaggtgaagatatgcaaattacaacttatctagaaaaatcaatggagtcagaaatgtcagcaaatgttattgatttatgtccagtaggagctcttacatcaaaaccttatgtatttgaggcaagaccgtgggaattaaaaaagacagaaacgattgatgttatggatgcagtaggatcaaatattagagttgatacttacgggtgggaagtcaaaagagttttacctagaataaatgaagaaattaatgaagaatggatatcagataaaactagatatgcttgtgatggtttaaaaaaccaaagattagacactccatacataaaatctagaaacaaatttgagaaaatatcttggaatgaggcatattctaaaatttttgataaaatttctataacagcatctgataaaatagcaggaattactggtgatatgaccaatatggaaaccctttacataataaaagatttttttgataagacaattaaatcaaacaatttagattctaggaatgaaaattattatgtaaattcaagtagtaaaaataattatatatttaactcaaaaataacaggtatagaagatgcagatttaatttttttaattggaacaaatcctagatatgaagccactattttaaattcaagaattagaaaaacatacataaataaaaatattaacatttattcattgggtccggttggagatataacttatccatatataacattagaaaactcaaccaaaacaattaaagatattattaacaacaatcacgaattatctaaagttattgatacagcaaaaaaaccaatgtttataattggtcaatcagtattaaaacaaagttcttctatatatttggtagaagaataaa

SEQ ID NO: 221710 - DNA, 733 bp, Unknown
  Bacterial polypeptide expressing nucleotide sequence isolated from the Sargasso Sea
ggcagaaagaattaagaccttgtatgatcaaatggcaggcccaaaatgggtcattgcagctggaagttgtgctatttcaggagaccactatagacatatatatagtgttgtccctggtgtagattggataattccagttgatgtttatgtaccaggttgtccacctacccccgaagcttttattgatggaattcttgaattgcagaatataattggcgaaggtaagacttctccaacatttaactcatctccagttcctgaagaaaaaacactttcacctctcgaggtcactaaaccacccaaaaaatcaaaaaatgtaattgaatcagaattcatagataaaacaaatattattaaccattcaatggatttaaagaatcaagggtttacctatcttaagtttatcaccgccacagattttgacactaatatcgtccttacatattttctaggaaataatgtatcaaacaaagaggtcgagtttaatataaaattggacgatgatatgaaagtaagctcactttcaaatatttattctggtgctgactggcaggagagagagatttttgatttgtttggaataatttttgaaggccaccctaacctaaaaagaattatgatgcccgatgaatggattgggcatccattaagaaaagaatatgttatggattctcattactacccatatcgccccacacgaaaggaatatgaaaaatggaagacagaattgtag

SEQ ID NO: 221711 - DNA, 382 bp, Unknown
  Bacterial polypeptide expressing nucleotide sequence isolated from the Sargasso Sea
atgcttggctccggagctattgtggtcatggacgagacaaccgacattgttaaagcatgccataacgtcgtccgattcttctcgcgagaatcctgtggcaaatgtactccatgtagagagggaacaaactggttagaaaagattctagatcgaattctaaacggctatggtcgccctgaagatatagacctacttcttgacgtatgcgacaacatcagtcccgggatttcatggcctcccaagcaaacaacgatatgcccgctggggccatcggcagtttcacccattgcatcggctttaaaacgctataggtcagagtttgatgcttacatcggatcaaatacggttacgcctgtctcagtagatggaggctcatcatgac

SEQ ID NO: 221712 - DNA, 481 bp, Unknown
  Bacterial polypeptide expressing nucleotide sequence isolated from the Sargasso Sea
atgcttaaattaaaagtaaatgaaattgaagtagaagtcgaagaaggtttaacagtgcttcaagcttgtgaaaaagctggagttgaaataccaagattttgctaccatgaaaaattatcgatagcaggtaactgcagaatgtgtttagttgaaatggaaaaatctcctaaaccaattgcttcatgtgctatgccagctgctgagggtatgaatattaaaacaaatactgctttagtagaaaaagctcgcaaaggagtgatggaatttttattagctaaccatcccttagattgcccagtatgtgatcaaggtggtgaatgtgatcttcaggatcaatcaatgtactacggagtagataaatcaagatttaaagaaaataaaagagctgttcctgaaaaaaatatgggaccattgattaaaactcaaatgacaagatgtattcactgtacgagatgtgtgagatttgcaacggaagttgcgg

SEQ ID NO: 221713 - DNA, 356 bp, Unknown
  Bacterial polypeptide expressing nucleotide sequence isolated from the Sargasso Sea
aatgcccaaaataaaagttaacaataacgaattagaagtagaagatggcttaacagttttgcaggcatgtgaacaagctggagctgaaataccaagattttgttatcatgaaaaactttcaatagcaggaaactgtagaatgtgcctagttgagattgaaaaatccccaaaaccagttgcatcttgcgcaatgcctgtagcggatggaatgaatattaaaacaaatactgaatttgttgaaaaagcaagaaaaggcgttatggaatttttattagcaaatcacccgctcgactgtccagtttgtgatcaaggaggtgaatgcgatctgcaagatcaatcgatgttttatggaattg

SEQ ID NO: 221714 - DNA, 1588 bp, Unknown
  Bacterial polypeptide expressing nucleotide sequence isolated from the Sargasso Sea
tgttgaaaaagctagaaaaggagttatggaatttctattggcaaaccatccattagattgccctgtttgtgaccaaggtggtgagtgcgatcttcaagatcagtcgatgttttatggagtagacaagtcaagatataaagagaacaaaagatctgttccagaaaaacatatgggaccattgattaaaactcaaatgacaagatgtatacattgtactcggtgtgtaagatttgcaactgaagttgcaggtgtatcggaattaggtgcaatcggtagaggtgaagatatgcaaatcacaacttatttagagcagtcaatgcaatcagaattgtcagcgaatgtaatagatctttgtccagtaggcgctctaacatcaaaaccttatgtatttgaagcaagaccttgggaacttaaaaaaactgaaacagttgatgttatggacgctgttggatcaaatgttagggtagatacctatgactgggaagtcaaaagagttttaccattaattaatgaggatattaatgaagaatggatttcagataagacaagatatgcatgtgatggtttattaaatcaaagattggatacaccgtatataaaatataacggtaaatttgaaaaagcttcatgggatgaagtgtttaaaataatgaaatctaaatttgaaaacgcatcaaatgataagatttgtggctttgttggagatttaaccaacatggaaacaggatatatcttcaaagaattttttgatcgaaccttgaataataaaaattatgagtcaagatcggataacagatttgtagataactccgctagagagaattatatatttaattctactattaatggaattgaagagtcagatttgatatttttaattggagcgaatcccagatatgaagctacaatcttaaatgcaagaatccgaaaagcttatgtcaataataaaaccaaagtaatatcattaaatgatgttggtgatctaacctatccatatgaaaatttaaatggtcaaactcaatcaataaaaaatatttttgaaggttcaaatgaaatatctaaagaaattattagcgcaaataagccaatgattatgattggtgagtcattattaaaattaaattcagcaaaatacttatttaatttaattaaagattttctaaagaaaaataataaatttactgagagctggaatcctttaaatattttatcttgtgatgcagcaacagtaggtaattttgatttaggaatattaaataacggaattaatttattggaacaattaaaatccaataaatttgaaattgtttatctagttggacaagacaacttagaatttaataaaaaaaatgaatttgttatttatcaaggcagtcacggcgataaaggagcagaaattgcagatattattttaccaggatcagcttatacagagcaagatggatattttacaaatttagaaggaaaaatacagaaagcgtacaaagcatcttatcctccaggtgaagctaaagaagactggcaaattttcaatgaattagctgaagttatgaataatcgaaattatttaatgataaagatgaattag

SEQ ID NO: 221715 - DNA, 463 bp, Unknown
  Bacterial polypeptide expressing nucleotide sequence isolated from the Sargasso Sea
catgagcgacgatcagatcaatatagaagttgatggaaagtccgttaaggccaaaaaaggtcaaatgatcattgaggcaaccgatgagcatggctcgtatgtgccaagattttgttatcactcaaaattaagcattgcggctaattgccggatgtgtcttgtcgaagtagaaaaagcacctaaacccttaccagcctgtgcaacaccggttgcagatggcatgaaaatatccactaaatctccttttgccatcgcagctcagaaagcaaccatggaatttttgttgataaaccatcctctggattgcccaatttgcgatcaaggtggtgagtgtgaactgcaagatttggcgatgggttatggcagaggtgtctcaaggtacaacgacaataagagagtagtgaaagacaaggacattggacctttggtctccactgatatgaccagatgcatccattgcacg

SEQ ID NO: 221716 - DNA, 1036 bp, Unknown
  Bacterial polypeptide expressing nucleotide sequence isolated from the Sargasso Sea
tgctatgcggtcgccctaagtcagtgttttctctatgttcgcggtgaaatggccgtcgctcaagaacgaattgcttgcgcgcttaacgacgcctacgaagctggctacattggcaggaatattcttggaagccacttttcggttgacatcgtcctccattggggcgcaggtgcttacgtagtaggtgaggaaacagcgctaattgaaagcctcgaaggcaatcgtggaatgcctcgtttgaagccgccctattttcctgcatcgattggtctctacgggcagcctacgatcgttaataacgtcgagacgctctcgaatctgccgtggattatcgataacggggcggatgcgtttacaaatattggtactgaaacttctcccgggactcgcatggtcgccgttagcggccacgtaaaacgtccaggtgtatatgaaatagttaatgggacaacgacattcagagatttgttgtatggacaagatatgtgtggcggtattcgcgatgacaatcagctaaaggcctttgtgcccggcggcggatctgcgccatggttcacaccggaccaattagacctgccgttcgaagcaagccaagtaggccctcaaggttcaatgttgggctccggggcgatcatggtgatggatgaaaccactgatattccggcggcggcgctcactctcacaaagttttatgcccacgagtcatgtggcaaatgtgtgccctgccgtgagggcggcacatggttggagcagatactaagaagagtcgtagacggcaggggcagccgccgcgacctggatctacttatcgaagttggcgagactatctgtcctggtgattttccccacgccgctgtcccttcaaagggcattgaagcgaagccgttcccctacaaaatgacaacgatctgcttcgttggaccctccgcctttgctccgattcattcggcactgacgctttttcgtgaagaattcgaagccaaagttgcagggaatgatgatcgggtattgatcgaggtgcctgtcaatgtctgat

SEQ ID NO: 221717 - DNA, 394 bp, Unknown
  Bacterial polypeptide expressing nucleotide sequence isolated from the Sargasso Sea
aatgcttaaagacgaagatagaatatttaaaaacttgtataacgatctaggcgcagatttaatatcttcaaaaaatagaggagattggaataatacaaaagaaatttgtgaaagaggtcgtgaatggattattaatgaagtaaaaacttcagaattacgcggaagaggaggagcgggatttccaactggtttaaagtggtcttttgctccaaaagaagttggatctagacctcattatctagtaattaatgctgacgaatctgaacctggaacttgtaaagatcgagatatattaagatttgaacctcaaaaactaatcgaaggttgtttgataacctcttttgcggttaaagctcatgtttgttatatttatataagaggggaaaatatttaa

SEQ ID NO: 221718 - DNA, 1588 bp, Unknown
  Bacterial polypeptide expressing nucleotide sequence isolated from the Sargasso Sea
ctgcagcgtatccgccgggataaggagccagcgccggaagcctggaatcgttgccggtcccgcggcggcacttgctcgggtccagggcgctgcgccgcagcctgcgatgccatgcgctgcctgcgcctcgcggtcgccgccggggttgaccgggccgaaacgggggcgatgctgggccatgctcacccccgacgagaagcagctgatgcaacggtgtctcgacgcgatccgcgaacgatcgccggggttccgcgcgcgccgcccgcagctgcagatgatcgcggcggtggcgcacgcgcttgcccgcgtcgatgccagcgacgcagagcgaagcgacggagcgcacctcgccgtgatcgaggccggaacgggcaccggcaagacggtcgcctatctgctgcccgcactggtgctggcgcacttgcgcggccgcaagctggtcgtgtcctcgtccaccgtcacgctgcaggagcaactgctgcacaaggacgtgccggacctgctgcgctttctgccgttcccggtctcctacgtcgtggccaagggccggcggcgcttcctgtgcccggcgcggctcgcgcagcgtctggaccagcaggccgcggtcgagccgcgcgacgcgcccgggcagcaagacgacgcggcggcggacggtgccggcgtgcggccgctgcgctggttctcgcgcctggccgaggccttcgatgccggccgctggtgcggagaccgcgacgcctggccgcaggtgatcccggagtccgtctgggccagcgtcacgacggaccgcccgggctgcctgggcagccgctgtccgagctatgcgcgctgccccttctaccaggcccgccagcgtgccaaggaggccgacctcaccatcgccaaccacgacctcgtgctggcggcagcggacatggagcccggcagcacgctgcccgatctgcgcgaggcgctggtagtcttcgacgaggcgcacagcctgccctccaaggtggtggaccactgcgcctcgcgccactccgtgtgcagtgcggcctcctgggtgtcccatgcggcccgcgatgcccgcgccgccgtcacggcgctgcggctcggccggttcggcccggatctcccggatcctgccctccctgccgcgcggctgtgcgcggcgctggagcgcctgctggaggccgtggggcggcactgcgagttcgctggccagcaacgcatcagccgcttcgcaggcggcgtgctgcctgtggaggtgcggaaagcgggcgctgccgtgctggacgcagcgcgcgcgatgggccaggaccttctgacgctccgcacggcgctcgtggaccgcgcaggcgatcgtgccgaggccgtgcagccgcacctggccacgctcggggggtacttcccgaaactggaggagctggtcgcgacctgggactggatgctgtgcgacgagacgcagcatccgctgcccgtggcgcgctgggtggagcgccatgcgggttcgggcggtggcgacgacttcctggtctgcgcggcgccgatcagcggcgggccgcggctgcgggaactgctgtggaacaaggtcggcgctgcggtgttgacg

SEQ ID NO: 221719 - DNA, 1482 bp, Unknown
  Bacterial polypeptide expressing nucleotide sequence isolated from the Sargasso Sea
ccccaaaaccgggttgcctcatgtcatttctctttgtctgatttaagaccgggtccaaatggagagttgcccgaggttctaacaaatacagatcaggttcataatgcaagaaagggcgcaatggaatttctcttggttaaccacccattggattgtcctatttgtgaccaaggtggagagtgtgacttgcaggaccaagctctgcattatggaataaataagagcaggtacaaagagaataagagagctgttgataacaagaatattggtccgctagtaaaaacgacaatgaccagatgcattcactgcacaagatgtgtaagatttacatcagaggtcgccggtactgaagagttgggagcaatccataggggtgaaaatatggagataaccacctacttagaaaagggtatgtcctcagagctacaaggaaatattattgatctttgcccagttggtgctttaacatcaaaaccttacgaatatcatgcgagaccttgggagctacggaaaactgaatccatagatgttatggatggtataggatctaacatacggatcgattcaaaaggttccgaagtaatgcgcattatgccaaggtacaatgaggatataaatgaagagtggatttccgataaaacaagatttgtttgggatggcttaaaaactcaaaggattgataccccatacattcgtgaaaatggtaaattgatcgcggtgtcatgggatagggcactaacattgctaacaaagctcataaaaaaaactgacccaggtaggatcggggccatagcaggtgatatggtctcggctgaggaaatgtttcttatgaaaaaattaatggaaaagatcggttcaaataagtacgactgtagacaagatgggtcaattttgggtaatcaatatgggaggtcatcatacatttttaatccaacaatagctggtattgaaaatgccgacgcaatagttattataggttcaaacccaagaatggagtctcctgttttgaatgctcggatacgcaaaagatggctgactgggaatttgaatatatatgttgttggtcaagagcatgatctgacctatgattatactttcattggggactcaccaaagagtatagatctcaaaaatattccattgaatggctctaaaaatatcatctggctactgggtgatgacgtgtttttaagagatgatggaatggatattctatcccaggttattgactgcgcagaaaaaactggtgcaatccgtgacgattggaatggggtggctgttttacacaaatacgcatcgcgagttgccggcctagatctcgactttctacctcaagatgaaaaacataccgctcaaaagatggcgtcatcaagtgagatagaattattatttcttctcgatgcggatgaaatcgatgccaaaaataaacgtactgtatatattgggagtcatggagatagaggtgcaactaatgctgatata

SEQ ID NO: 221720 - DNA, 1694 bp, Unknown
  Bacterial polypeptide expressing nucleotide sequence isolated from the Sargasso Sea
aaaagctccaaaacctattgcttcatgcgcaatgccagcagctaatggaatggttataaatactaacaccgaaacagtaaaaaaagctcgaaaaggagttatggaatttttacttattaatcatcctttagattgtcctatttgtgatcaaggtggtgaatgcgatttacaggatcaagcaatgtattatggttttgataaaacaagatatgaagaaaacaaaagagcagttcaaaataaaaatatggggcctcttgtaaaaacgataatgacaagatgtatccattgtacaagatgtgttaggttttcaactgaagttgctggagtggatgatataggattgcttggcaggggtgagaatgcagaaatcaccacctatcttgaaaaaacaattgaatctgagctatctggaaacgttatagatttatgtccagtaggagccttaactagtaagccttacgcatttaaatctagaccttgggagcttactaaaacagaaacctttgatgtatttgatggtgtaggatcaagcattagaatagacactagaggaaaaaaagttttaagggctttaccaagaataaatgaagaaacaaatgaagaatggatcagtgataaatccaggtttgctattgatgggctttcaagtcaaagacttgataatgtttattctaaaataaatggcaaacttgaaaaatcttcatgggataatgcatttgctctagttaaagatcaaattattaatagaggtactgaaaatactgtttttttatctggtaaatttacagatgttgaaactttatattctgctaaaaaatttagtgagtctttaaattctaaattttatgattgtagatttgataatgctcaatttgttgaaaattcccctgaaagttataaatttaattcttctattcaagaaattgaaaatgctgatgcaattcttttagttggatctaatccaagatgggaagcaagtgttttaaatgcaagaataagaaaagcttttattaataataactgtaaaataggtattgttggccctgatcttgatttgaattactcttacttaaaaatttctaattctttaagtggacttaatgatattttggataatacatctgaattttctaaagaattatttaatgctaaaaatcctataatcattgttggaacatcagcaattaatactagtcagggtagttcaattataaaaacttgtgctgaaattgctaaaaaattgccaaacttttctagttctttcaatccattaaatattttaaatcaagatatatcaagagtaggatcattggaacttggctttgttaataaagtttttgattgtaattttgaagaaaaacttaaagaagaaattaataaaaataaacctgttgttttcttattaggtttagatgaagtagatccaaaattgctggaggaatcttttatagtatattgcggtcatcatggtgatatcaatgctcaacatgcagatataattttgcctacacctgcttatactgaaaaatcatctacttttatgaacatagagggtagggcaattcaaacatctcgatgtcacaatcctttgggtgaatcaaaagaagaatggaaaatatttagagttttaagcgatcttcttagttgtgatttagattttaatactctcaatgatgttaagaaaaaaattagtt

SEQ ID NO: 221721 - DNA, 634 bp, Unknown
  Bacterial polypeptide expressing nucleotide sequence isolated from the Sargasso Sea
cgggcaaaaaatactggaacaaaaatttattgtatatcagggaacgttaataatccgtgtaatgttgaagaagagatgggtgtaactttaaaagatctaatagaaaaacatgcaggtggagttattggtggatgggataatttaaaagctgtaataccaggaggttcttcaatgcctttattacctaaaaaaatatgtgatacaataaaaatggactttgatgcctgtgttgagaataagactggtcttggtaccgcaggaattgtagttataaataatgatcaagacataattaagtgtatggcaagaattgccaaattttataaacacgaaagttgcggtcaatgcaccccatgtagagaaggatctggttggatgtggagaatgttagaaagaatggcaaaaggagacgcaacaagagacgaagttgatatgttaatggatgttacaaaacaaatagaaggtcatacaatttgtgcatttggtgaaggttctgcttggcctgtgcaaggattgattagacattttaaaaatgaaatagttgagagaaataaatttgatcctgttgtaaaacaaaaaaaagatatcccttatttagtagatcaacacttattagaaaaagaaaatgcttaaa

SEQ ID NO: 221722 - DNA, 651 bp, Unknown
  Bacterial polypeptide expressing nucleotide sequence isolated from the Sargasso Sea
aatgcttaaattaaaagtcaatgacactgaggtagaagttgaagatggtttaactgtgcttcaagcatgcgagaaagctggtgttgaaatacctagattttgttatcatgaaaaattgtcaattgctgggaattgtagaatgtgtcttgtagaactggaaaagtcacccaagcctatagcttcttgtgcaatgcctgctgcagacggaatggtaataaaaactaatacaccgaccgttgaaaaatcaagaaaaggtgttatggaatttttattagctaaccaccccttagattgccctgtttgtgaccaaggaggagaatgtgatcttcaagatcaatcaatgttttatggaatagataaatcaaggtttaaagaaaataaaaggtttgtacctgataaaaatatgggacctttaataaaaactcaaatgaccaggtgcattcattgcacaagatgtattaggtttgcaacagagatcgcaggtgttcctgaacttggcgccataggaagaggggaagatatgcaaattacaacttacttagaaaaatctgtacaatctgaattatctggaaatgtcattgatctttgcccagttggagcattaacatcaaaaccatatgttttcgaagcaagaccttggaataaagaaaa

SEQ ID NO: 221723 - DNA, 331 bp, Unknown
  Bacterial polypeptide expressing nucleotide sequence isolated from the Sargasso Sea
tatggctagaattgcaagattttataaacatgaaagttgtggtcaatgtactccatgtagagaaggatcaggctggatgtggagaatgttagaaagaatggcaaaaggtgaagcaacaaaagatgaagttgatatgcttggcgatgttacaaatcaaatagctggtcatacaatttgtgcatttggagaaggctcttcttggcctgtgcaaggattactgagacattttaaaaaagaaattaaagaaagaaataaatttgaccctattgttaaagaaaataaaaatattccttatttagtggatcaacatttattggatgaaaatgcttaa

SEQ ID NO: 221724 - DNA, 504 bp, Unknown
  Bacterial polypeptide expressing nucleotide sequence isolated from the Sargasso Sea
gttgggataatttacaagcagttataccaggtggatcctcaatgcctttattacctaaaaaaatatgtgaaacaattaaaatggattttgactctctaatagaaaacaaaagcggtttaggcaccgcaggtatagttgtcattaataaagaccaagatattgtttcatgcatggcaaggatagcaaggttctataaacacgagagttgcggccagtgtactccttgtagagaaggttctggttggatgtggagaattttaaacagagcgacgaaaggtgaaacaactttaagtgacatagatttattagaagatgttactaaacaaattgaaggtcatacaatttgtgcttttggagaaggttcagcttggccagttcaaggtttattaagacatttcagaaaagaagttgataaaaaatgtagcaatgaccctctaataaaaaagaagaaagatgtcccttatttaatcgatcaacatttactagaaaaaaagaatgcctaaa

SEQ ID NO: 221725 - DNA, 433 bp, Unknown
  Bacterial polypeptide expressing nucleotide sequence isolated from the Sargasso Sea
atggcaaaagaaactaaaactttgaatctaaattttggacctcaacatccagcagctcatggagttttgcgattaatattacagctagatggtgaaatcgttgaaaaagcagatccacacattggtttattgcatagggggacagaaaaattaattgaaaataaaacttatacccaagcggttccgtattttgatcgactagattatgttgcaccaatgaaccaagagcacgcttttgctttagcaattgaaaaaattctaaaaatagaagttccgataagagcgcaatacataagagtaatgttttgtgagattggaagaatacttagtcatattttaaatgtcacaacacaagcaatggatgttggcgcattaacaccaactttatggggatttgaagagagagaaatattaatgggtttttatgaaaaag

SEQ ID NO: 221726 - DNA, 1045 bp, Unknown
  Bacterial polypeptide expressing nucleotide sequence isolated from the Sargasso Sea
gggaaagaaatagaatttaaaaaagggatgacggttttacaagcttgtgagctagccgatgtcgaaattccaagattttgctatcacgaaaagctatctatagcaggaaattgcagaatgtgtttggttgaaatggaaaagtccacgaaaccaatagcttcttgtgcgatgccagcagccgaaggaatgaatattaaaacaaacacagcttttgtggagaaagccagaaagggtgtaatggaatttttattagctaatcatcctttagactgtccagtttgtgatcagggaggcgagtgtgatttgcaggaccaatcaatgtattacggaatagataaatctagatttgtagaaaataaaagacaggtgaaagaaaaatatatgggtccactaattaaaactcaaatgactcgatgtattcattgcacgagatgcgttaggtttgcaaccgaagttgccggagttcctgaaataggagctataggacgaggtgagaatatggaaataacaacttatttagaaaaagccatggagtcagagctttctgcaaatgtaattgatttatgtcctgttggagctttaacctctaaaccatatgcttttgaggctagaccttgggagcttaaaaagactgaaagtatagatgtcatggatgccgtaggttcgaatgttagagttgatacatataattgggaggtgaagcgaatattaccaagattaaataatgaaattaatgaagagtggatatcagacaaaacaagatattcctgcgacgggcttttaaaacaaagattagatattccctatataaaaaaagataataaacttaaaaaatctagttgggatgaagctatagaacttattttaaataaaataaaatctgttcaacccaatgaaattggagggcatattggtgatatggttaatttagaaaatgccctggcttttaaaaaactatttaaggttttaaaaagcaataatttagaatttagagaaaaaaaactttacattaattctgacaataaaaaaaattatgtattcaatt

SEQ ID NO: 221727 - DNA, 809 bp, Unknown
  Bacterial polypeptide expressing nucleotide sequence isolated from the Sargasso Sea
tctgaactttctattaaaattcgaaattcattaattgaaaataatgaattattaatagaagttgatcaaaaagatttagtccaagttattcaatttttaaaatctgatgacaaatgtaaatttagacaactagttgatattgcaggtgttgattatccctcagaagaaaaccgttttaagttagtatatctatttttatctcatgaaaataataaccgaattaaactttcaattaaattcaaggtaaatgaaattataaattcaataacaaaaatttttccttcagccaattggatggaaagagaagttttcgatatgtatggcattaaatttaaaaatcatcctgatttaagaagaatattaactgattatggctttaaaggacatcctttaagaaaagactttcctctgaccggttttaacgaagttagatatagcgaaaaagaaaaaaaagttatttatgaacctgtaaagctggaacagaattacagaaattttgattttgagagtccttgggagggaacaagttatttaaaaggaaatcaacaaaaaaagaaacagatggtaaaaaaaactaaatcattaaatttaaactttggacctcaacacccagccgcacatggtgttttaaggctgatattagaattagatggtgaagttgtagaaaaagctgatccacatataggattattacatagagggactgaaaaacttatagagcaaaaaacatatactcaagcattaccttattttgatcgtttagattatgttgctccaatgaatcaggaacatgcttttgctttagcagc

SEQ ID NO: 221728 - DNA, 685 bp, Unknown
  Bacterial polypeptide expressing nucleotide sequence isolated from the Sargasso Sea
aactattgcagttgttcctactatattaaaaaaagggtctaaatggttttcttcaattggtagacctaaaaacacaggaacaaaaatattctgcatatctggaaacgtaaataatccatgtaacgttgaagaagaaatgggagtttcattaaaggaattgattgaaaaacatgctggaggagtaattggaggatgggataatttaaaagctgtaataccagggggctcatcaatgcctcttctgccaaaaaaaatatgtgaaactttaaaaatggattttgattctttgatagagcaaaaaagtggcttagggaccgcaggtgtagttgtaataaataaagaccaagacattattaaatgtatggcacgtatagcaagattttataaacatgagagttgcggacagtgcacaccatgtcgtgaaggatcgggttggatgtggagaatgttagaaagaatggctattggcgaagcatcaagagaagaagttgaaatgttaatggatgttacaaaacaaattgaaggtcacactatctgtgcatttggagagggatcagcttggccagttcaaggtcttcttcgacactttaaaaaagaaattataaaaaaaaataattttaatccattaattaaaacaaataaaaaaataccatacttgatagatcaacatttattagagaaataa

SEQ ID NO: 221729 - DNA, 796 bp, Unknown
  Bacterial polypeptide expressing nucleotide sequence isolated from the Sargasso Sea
aatgcctaaattaaaagtaaacgacattgatattgaagttgaagatggtctaacagtactccaagcttgtgaacaagcaggagcagaaataccaagattttgttatcatgaaaaactttccatagctgggaattgtcgtatgtgtttggttgaaacggaaaagtcgccaaaacctattgcttcgtgtgcaatgcctgcagctgaaggtatggttataaaaacaaatacagaaaaagttgaaaaagcaagaaaaggtgtgatggaatttttgttagccaatcatccattagactgtcctgtttgtgatcaaggtggtgagtgtgatttacaggatcaatcaatgttttatggaattgataaatcacgatttaaagagaataaaagatatgtacctgaaaaatacatgggtccattaataaaaactcaaatgactagatgtattcattgtactagatgtattagatttgctacagaagtcgcgggagtgccagaattaggagcgatcggacgtggagaaaacatggaaattactacatatttagagaaatctatggagtctgaaatgtcagctaatgtaattgatttatgtccagttggtgcattaacttctaaaccttatgtgttcgaagcaagaccttgggaattaaaaaaaactgaaacaatcgatgttatggatgctgttgggtcaaacattagagttgatacttacgattgggaggtaaaaagggttttaccaagaattaatgaagaaattaatgaggagtggatttctgataaaacaaagatatgcatgtga

SEQ ID NO: 221730 - DNA, 838 bp, Unknown
  Bacterial polypeptide expressing nucleotide sequence isolated from the Sargasso Sea
atggcaaaagaaaaaaaaacactaaatttaaattttggaccacaacatcctgcagcgcatggagttttaagattaatacttcaattagatggagaagttgttgaaaaagccgaccctcatattggattattgcaccgaggtactgagaagttaatagaaaataaaacttatatccaagcagttccttattttgatcgtcttgattatgtagcaccgatgaatcaagaacatgcatttgccttagctatagaaaaaattcttaaaatcgaagttccttcaagagcaaaatatataagagtaattttctgtgaaataggtagaatattaagtcatatattaaatgtaactactcaagcaatggatgttggggcgttaacaccaactttatggggatttgaagaacgagaaaaattaatgggattttatgagcgggtatctggatcaaggttgcacgctaattattttagagctggcggagtacataaagatcttccaagtggacttgacaatgatattggtgaattttgcgaaaaattcccaaaaattattgatgatttagaaactttactcaccgataacagaatatttaaacaaagaaatgtagatataggaattgtatccaaacaagacgcactagattattctttttcaggagtaatgttaagaggttctggtgtagcttgggatttaagaagaagtcaaccttatgattgttatgacgatttagaatttaaaattcctattggaaaaaatggagattgttacgacagatatctttgcagaattgaagaaatgagagaaagtgtaaaaattattaaacagtgtttaacaaatattc

SEQ ID NO: 221731 - DNA, 730 bp, Unknown
  Bacterial polypeptide expressing nucleotide sequence isolated from the Sargasso Sea
catgagtgaaaatctaataaacataaaaattaatcaaaaagaaattcaagttgataaaaacctcactgttatgcaagcatgcgaaattgcaggtgaagaaataccaagattttgttatcacgacaaactatctatagctggaaattgtagaatgtgcttggttgaaatagaaaaggctccaaaattagtttcttcctgcacaatgcccttaatggaaggcatgtctataatcactaattcagaaaaagtaaatgcaggtaggaaaggcgtgatggaatttttattaattaatcatcctttagattgcccaatatgtgatcaaggcggagaatgtgatttacaagatcaggctatgtactacggctttgataagtctagatacaaagaaaataaaagagccgttgataataaaaacatgggacctttggtaaacaccataatgacaagatgtattcattgtacaagatgcgtaagatttgcaaccgaagtagcaggggtaccagaattaggtatgttgggcagaggtgagaacgcagaaattactacctatcttgaacaatcaatcacctcagagctttctggtaacgttattgatttatgccctgttggtgcacttacaagcaaaccatatcaatttaaagcccgtccctgggaactaaaaagaacagactcaattgatatttttgatagcgttggctccaatatcaaggggttgatagcagagcagagg

SEQ ID NO: 221732 - DNA, 268 bp, Unknown
  Bacterial polypeptide expressing nucleotide sequence isolated from the Sargasso Sea
tttgcacacttttataaacatgaaagctgtggtcaatgcacaccgtgcagagaaggaacaggttggatgcacagaatgatgcaaagactagttagaggagaaatatctcctgagcaaatagaacttttagagaatgtaacaaagcaagtagaagggcacactatttgtgccttaggagatgcagcggcgtggcctattcaaggacttattaaaaactttaaatcagagttgattagcaaatataataaaaagttaaaagcttcatgag

SEQ ID NO: 221733 - DNA, 913 bp, Unknown
  Bacterial polypeptide expressing nucleotide sequence isolated from the Sargasso Sea
aatgcttaaacttaaagtaaatgatatcgatgttgaagtagaagagggattaacggtacttcaagcatgtgaaaaagctggagtagaaatcccaagattttgttatcacgaaaagttatctatagcaggtaattgtagaatgtgtttagtggaaatggaaaaatcacctaaaccaattgcttcatgcgctatgccagcagctgaagggatgaatataaaaacaaatactgaatttgttgaaaaagcaagaaaaggtgtgatggaatttttattagccaaccatcctttagactgtccagtatgtgatcaaggtggtgaatgcgacctgcaagatcaatctatgtattatggtgtagataaatcaagatttaaagaaaacaaaagattagttcctgaaaaaaatatgggaccattaataaaaacccagatgacaagatgtatacattgtacaaggtgtgtgcgttttgcaacagaagttgcaggtgtaccagaactgggagctataggtagaggtgaagatatgcaaattactacttatctagaacaatctatgcaatcagaactatcagctaatgtagtcgatctttgtccagttggagctttaacctctaaaccttatgtatttgaagctagaccttgggaattaaaaaaaacagagacaattgacgtgatggatgcggtcggttctaatataagagttgatacttatgattgggaggtaaagagagttttaccaatcataaatgaagatataaatgaggagtggatttctgataaaactagatacgcatgtgatggtcttcttcatcaacgactagatactccatttattaaatataataaaaaatttgagaaagctacgtggagtgaagtatataaaatttttaaatctaaatttgaaaataccacaaaa

SEQ ID NO: 221734 - DNA, 598 bp, Unknown
  Bacterial polypeptide expressing nucleotide sequence isolated from the Sargasso Sea
aatggcaaaagagaaaaaaacactaaatttaaattttggaccacaacatcctgcagcacatggagttttaagattaatacttcaattagatggagaagttgttgaaaaagccgatccccatataggattattacaccgtggcacagagaaattaatagaaaataaaacttatattcaagcagttccatattttgatcgtcttgattatgtagcaccaatgaatcaagaacatgcatttgcgttagctatagaaaaaattcttaaaatcgaagttccttcaagagcaaaatatatacgagtaattttttgtgaaataggaagaatattaagtcatatattaaatgtaactactcaagcaatggatgttggggcgctaactccaacgttgtggggattcgaggaaagagaaaagttaatgggattttatgaaagagtatctggatcaaggttacatgccaattattttagagctggtggggtacataaagacatgccagttggattggatagtgatattgaggaattttgtaataaatttccaaaaattattgatgatttagaaacgttacttaccgataacagaatttttaaacaaaga

SEQ ID NO: 221735 - DNA, 825 bp, Unknown
  Bacterial polypeptide expressing nucleotide sequence isolated from the Sargasso Sea
aaaagttaacgatatacatattgaagttgaagaaggtcttactgtcttacaagcttgtgaacaagccggcgcagaaattccaagattttgttatcatgaaaagctttcaattgctggaaattgtagaatgtgtctagttgaaatggaaaaatctcctaaaccgattgcatcttgtgcaatgccagcagcagatggaatggtaataaaaacaaatactgaaaaagtcgaaaaatcaagaaaaggtgttatggaatttttacttgcaaatcatccactagactgtccagtgtgtgatcagggcggtgaatgcgatctacaagatcaatcaatgttttatggaatagataaatcaagatttaaagaaaacaaaagatatgttcctgaaaaatatatgggaccactaataaaaacacaaatgactagatgcatacattgcaccagatgcattaggtttgccacggaagtagcaggagtaccagaattaggtgcgataggaagaggagaaaatatggaaattacaacatatttagaaaaatcaatggagtcagaaatttcagcaaacgtaattgatttatgtccagttggtgcattaacttcaaaaccttatgtatttgaagccagaccttgggaacttaaaaaaacagaaactatagatgttatggatgccgttggttcaaatattagggctgatacatatggatgggaagtaaagagaattcttccaagaatcaatgaagaaattaatgaagaatggatttcagacaaaacacgttatgcatgtgatggtcttaaaaatcaaagattggattatccatttatgaaaaa

SEQ ID NO: 221736 - DNA, 782 bp, Unknown
  Bacterial polypeptide expressing nucleotide sequence isolated from the Sargasso Sea
aatggcaaaagtaaaaataaatgggtccgagattgaagtatctgatggcatgacgatactgcaggcatgtgaagaggcaggaattgaaataccaagattttgctaccatgatcgtctttcaattgcaggtaattgtagaatgtgccttgttgatgtggaaggttcacctaaaccagtagcatcgtgcgcgatgccaattaacgaaggcatgtcaattcatacaaatactcagtctgtaaaaaaagcgagagaaggtgtaatggagtttttgctaattaatcacccactagattgtccagtttgtgatcaaggcggtgagtgcgatctacaagatcaaactattgcttttggtcctgaaaattcaaggttcgaagagaataaaagggcagttgaagaaaagcatatgggcccattgattaaaacttatatgactcgatgcattcactgcacaaggtgtatccgatttgcagatgaagtagcgggagtaaatcaattaggtgcagtaaatcgcggcgaaaatatggaaataacaacttatttagaaaagacattagactccgagctatcggctaatatcgttgatttatgtccggtaggtgcacttacatcgaaaccatatcaatttgaagccagaccttgggaattaaagaagacagaaacgattgatgttttggatgcggtagggtcgaatattagagttgatacttacgggtggaaagtaaaaagagtattacccgtgcttaatgaagatattaatgaagagtggatatcagataaaacaa

SEQ ID NO: 221737 - DNA, 622 bp, Unknown
  Bacterial polypeptide expressing nucleotide sequence isolated from the Sargasso Sea
tccaagttggggaccgagaaaagtggtggcaccaagattttttgtgttagcggccatgttcagcaacccgggacatttgaagtccccttgggaacgccatttaaagatttgctggcattggccggcggtatgcgtgaaggtcgcacatgtaaagcggtgattcctggtggaagctctatgaagatcattcccggtgatgtcatgttatccctgaacatggattatgagagcatcgctgctcagggttcagctttgggatcgggtggtgtgattgtgatggacgataccacgtgtatggttcaggctctggcctcggtattacatttttatgaacacgaatcctgtgggcagtgcaccccgtgtcgcgaagggactccttgggtatcaaaaattgtgaaaaacattttgcgtggtcaaggtcgtttggatgatgttgcgcgtttggtttccattgcccgcggtatcgaggggcataccatttgtgcctttggtgaggccgtggcttggcctgtgttgagttttatggaccatttttcggatgaatttgagtatgttattcgccatggccgatcccaagtgaccggcgaaccgttgacacgttttgggctgacagctgcctgat

SEQ ID NO: 221738 - DNA, 846 bp, Unknown
  Bacterial polypeptide expressing nucleotide sequence isolated from the Sargasso Sea
cggctgttgatggagcagctgccccacctgctgattgaagggatgattatctcggccaaggccctcaaggcctaccgtggctacatctttttgcgcggcgaatacgtggatgccgcagccaacctgcgccgtgcggtggaggaggccaaggctgccggtctgctcggcaagaacattctgggctcgggctttgacttcgagctgttcgtccacaccggcgcgggtcgttacatctgcggcgaagagacggcgctcatcaactccctggagggtcgccgcgccaacccgcgcgccaagccccccttccccgccgtttccggcgtctggggcaagcccacctgcgtcaacaacgtcgagaccctgtgcaacgtgcccgccatcatcggcaacggtgtggcctggtatcaggggctggcgctgccgggttcagaagatcacggcaccaagctgatgggcttctccggcaaggtcaacaaccccggcctgtgggagctgccgtttggcatcaccgcccgcgagctgttcgagcactatgccggcggcatgaagcccggctatcgcctgaaagcctggcaaccgggcggcgccggtaccggcttcctgctgcccgagcacctggatgcccagatgtacgccggcggcatcggcaaggtcggcacccggatgggcacgggccttgccatggcggtggatgacagcatcaacatggtctccctgctacgcaacatggaagagttcttcgcccgcgagtcttgcggctggtgcaccccctgccgcgacggcctgccctggagcgtcaagctgctgcgggcgctggagcggggcgagggtcagccaggggatctc

SEQ ID NO: 221739 - DNA, 579 bp, Unknown
  Bacterial polypeptide expressing nucleotide sequence isolated from the Sargasso Sea
aatgcttaaagacgaagacagaatatttcaaaatttatacaatgacagtggtgctgatattgagtctgctaaattaagaaatgattggaatggaacaaaagaaattttagaaaaaggaagagagtggataatcaatgaaattaaatcttcagagcttagaggacgtggtggagctggttttccaactggtctaaaatggtcatttgcacctaaagaagtagggtctagaccacattacttggttatcaatgctgatgaatcagagcctggaacatgcaaagatagagatatattaagatttgaacctcacaaattaatagagggatgtttaattgcttcttacgcagtgaacgcccaaaaatgttatatttatattagaggtgaatattttaatgaaggacaaaaacttcaaactgcaatcgatgaggcttataaaaacaatttaatcggtaaaaatgctttaaattcaggatgggatttagatatttatattcattatggtgcaggtgcctatatttgtggtgaagaaactgcattacttgagagtttggaaggaaaaaagggtcaaccaagattaaa

SEQ ID NO: 221740 - DNA, 514 bp, Unknown
  Bacterial polypeptide expressing nucleotide sequence isolated from the Sargasso Sea
gtagtgggaggatgggaaaatctcaaagcagttattccaggcggttcatcaatgcctctactgccgaagaaaatttgcgatacaatcacgatggactttgactcattaatagaaaataaaagtggattaggaacagccggtattgttgttattaataaagatcaagacatagttgaatgcatggcaagaatagcgagattttataaacatgaaagttgtggtcagtgcacaccttgtcgtgagggttctggttggatgtggagaatattggatagagttgttaaaagaaaagcaacttatggtgatgtagaattattatcagatgtgactaaacaaattgaaggtcacactatttgtgcttttggtgaaggttcggcttggccggttcaaggtctattaagacattttagaaaagaagtggaaagtagatgcagagaagaacctttaattaagaaaaaattaaacaatccttatctagtcgatcaacatttattggagaataaaaatgcctaaa

SEQ ID NO: 221741 - DNA, 259 bp, Unknown
  Bacterial polypeptide expressing nucleotide sequence isolated from the Sargasso Sea
acactaacgaacaaaatggcagcacctcttagaaaagtttatgatcagatgcctgaacccagatacgttatatctatgggaagttgcgcaaatggcggcggttattatcactactcgtattctgttgttagaggttgtgataaaatagttccagtagatatttatgttccaggatgccccccatcggccgaggctttgctttacggaattcttcagcttcagaaaaaaattagaagagaaggtagtcaaaaaagataac

SEQ ID NO: 221742 - DNA, 925 bp, Unknown
  Bacterial polypeptide expressing nucleotide sequence isolated from the Sargasso Sea
atgacagtacttcaagcttgtgagctagctggagttgagatcccaagattctgttatcatgaaagattatcgatcgcaggaaattgtagaatgtgtttagttgaaatggaaaaatcagctaaaccaattgcttcctgcgcaatgccagcgactgagggcatgaaaattaaaacaaattctaaaatggttgagaaggctagaaaaggagtaatggagttcttgctcgttaatcatcctttagattgtcctgtgtgtgatcaaggaggagagtgtgatttacaagatcaatctttgtactacggttttgatggatcaagatttaaagaaaacaaaagattagtgaaagataaatatatgggacctttaattaagacgcaaatgactagatgtattcattgtacaagatgcataagatttgcaactgaggttgcaggtgtttccgaactcggtgcggtaggtagaggagaagatatggaaataacaacttatttagaaaaatcaatgacctcagaattgtcgggtaacgtaatagacttatgccctgtaggcgccttaacatcaaaaccctatgcttttgaagcaagaccttgggaattaaaaaaaactgaaagcatagatgtaatggacgctgttggatccaacatcagagtagatagttatggttgggaggtcaaaagaattttgccaaggcttaataattcaataaatgaagaatggatatcagataaaaccagatacgcctgcgatggattattaaaacaaagattagataaagtttatattcgaaaaaataaccaattggtagaagcaagctgggatgacgcaatcaatttaatttcttcaaaaataaaatcaacaagttctgataaaatcgcaggtcatgttggaggtttaagtagttttgaaactattaattcatttaaaa

SEQ ID NO: 221743 - DNA, 577 bp, Unknown
  Bacterial polypeptide expressing nucleotide sequence isolated from the Sargasso Sea
atggcaaaagaaaaaaaaacactaaatctgaattttggaccacaacatcctgcagcacatggagttttaagattaatacttcaattagatggagaagttgttgaaaaagctgatcctcatataggattattgcatcgaggtactgagaagttaatagaaaataaaacttatatccaggctgttccttattttgatcgtcttgattatgtagcaccaatgaatcaagaacatgcatttgctttagctatagaaaaaattttaaaaattgaagttccttctagagcaaaatatataagagtaatattctgtgaaataggtcgtatattaagccacatattaaatgttactactcaagcaatggatgttggggcgttaacaccaactttatggggatttgaggaacgagaaaaattaatgggattttatgagagggtgtccggatcaaggttgcacgctaattattttagagctggtggagtacacaaagatctgcctgtcggactagaaagtgatattgatgaattttgtgaaagattcccaaaaataattgatgatttagaaactttactcaccgata

SEQ ID NO: 221744 - DNA, 244 bp, Unknown
  Bacterial polypeptide expressing nucleotide sequence isolated from the Sargasso Sea
aatggctccagctttaagaaaagtttatgatcaaatgccggaacctcgttatgtaatttcaatgggaagctgtgctaatggtggcggctattaccattactcttattcagtggttagaggatgtgataaaattgtgcctgttgatgtttatgtaccgggttgcccaccttctgcagaagctcttttatacggcgttttacaattacaaaaaaaaattagaagagagggaaatttaaatagataa

SEQ ID NO: 221745 - DNA, 196 bp, Unknown
  Bacterial polypeptide expressing nucleotide sequence isolated from the Sargasso Sea
atggcagccgcaatagagaaaatacacgaacctggcattgtcacaaccagtgttgataatttagttaactgggcaagaacaggttcgatgtggccaatgacatttggtttggcttgttgtgcgattgagatgatgcacgccggggcatctcgctatgatctggatcgctttggtgtcatttttcgccccaagcccg

SEQ ID NO: 221746 - DNA, 388 bp, Unknown
  Bacterial polypeptide expressing nucleotide sequence isolated from the Sargasso Sea
cattatttagttgttaatgctgatgagtcagaaccaggcacatgtaaagatagagaaattatgagaaatgatccacatcttcttttagaaggttgtttagttgctggctttgcaatgcatgcacatacttgttatatttatattaggggtgaatattattcggaatcttctaatttacaaaaagcaatagatgaagcttatgcaaataacttaattggtaaaaatgcatgtggtacaggatgggatttcgatatttatcttcaccgaggagcaggagcatatatttgtggtgaagaaacagctttacttgaaagtttagagggtaaaaaaggtcagccacgattaaagcctccatttcctgcaggcgcaggtttatatggatgtccta

SEQ ID NO: 221747 - DNA, 1003 bp, Unknown
  Bacterial polypeptide expressing nucleotide sequence isolated from the Sargasso Sea
ccggcattgccggatgtgtctggttgatatggagcgtgcgccaaagccgattgccccttgtgcgatgccggctggcgacggcatggtcattcgaacggacacggatcgtgtcaaaaaggcgcgcgaaggggtgatggaatttctgctgatcaatcacccgctggattgcccgatttgtgatcagggcggggaatgtgacctgcaggatcaggccatgggctatgggcttgatgggtcgcgtttttccgaaaataagcgggctgttgataacaaacatatggggccgctgatcagtacggtgatgacccgctgtatccattgcacacgttgtgtcagatttgccaccgaggtggctggggtgccggaacttggcgccatcggtcgtggtgagactatggagatcaccacctatctggaaaaatcactggcctctgaattatctgccaatgtgattgatttatgtccggttggtgcgctgacatcgcggccctatgcctttaccgcccgtccatgggaattgaacaaaaccgaatcaattgatgtgatggatgccgttggcagtaatgttcgcgttgatgcgcgtggtgcgcaggtgatgcgggtattgccacggctgaatgaagatgtgaacgaagaatggatttctgacaaaacgcgatatgctatcgacggcctgcggcggcagcggcttgaccgcccctatgcgcgtggccgcgatggtaaattacagccgatcagctgggacgaggcgctgcaaacagtggctggcaagctgcgcaaggcgaaagccaaccaggtagcggcgattgccggcaatcaatgtgatgccgaatcaatgtttgccctgaaaagcctgatggcgcggcttggcagcccgcacttggattgccggcaggatggcgctaaaattggtggtgtacggtctggctatctgtttaattcaacaattgcgggcattgacgacgctgatgctttgttgattggtgggcagcacccgcgactg

SEQ ID NO: 221748 - DNA, 787 bp, Unknown
  Bacterial polypeptide expressing nucleotide sequence isolated from the Sargasso Sea
aattcaaatattagaggtcgtggaggagcaggatttccaacaggagtaaaatggggttttttagcagaaaatgaagacagatatcttgtaattaatggagacgaatctgaacccggtacatttaaagacagaattttacttgaaagagatccacaccaattaattgaaggtgtaataatcacttgttttgcgtcaaacattaaaaaagcttttatctacataagaggtgaatatgcaaaacctgcaagaagagtacaggatgcagtcaagcaagcttatgaaaagggatatttgggaaataatattttaggaacgaatttctctttagatgttgttgtacatcttggagctggtgcatatatatgtggtgaggaaacagctctattgaattctttagagggtaagagaggtgagccaagattgaagccaccttatttcccagctgtaatgggtttatataacaaaccaacacttgtaaataatgttgaaacaatatcttcagtcccttggatagtacaaaactccggaaaagagtattcaaaacttggtgttgaaggctcaactggaacaagaatatttagtttatcaggtcatgtaaataatccaggaaattttgaaatagagatgggaaaaagctttggagaatttatcgatacattcggaaacggaatcaaaaataataaaagtgtaaaagcctatattcctgggggagcttcagcaccatggttcactggagatcagttagatataaaaatgacaattgatgatgtagcaaacgccggttcaa

SEQ ID NO: 221749 - DNA, 274 bp, Unknown
  Bacterial polypeptide expressing nucleotide sequence isolated from the Sargasso Sea
ttatctcatttttataaacatgagagctgtggccagtgtacaccttgtagagagggaactggttggatgtacagaataatgaaaaaaatgattaatggaaatgtaaacattgaagatattgatcatttattagatgttacaaaacaaattgaaggtcacactatttgtgctttaggtgatgctgctgcttggcccattcaaggcttaattagacattttagaaaagaagttgagagtagaattttaaataataaaaccaaggaagttgcataat

SEQ ID NO: 221750 - DNA, 823 bp, Unknown
  Bacterial polypeptide expressing nucleotide sequence isolated from the Sargasso Sea
tatcatgaaaaactttctatagctggaaattgcaggatgtgtttagtagaactagataaatctgcaaaaccaatagcttcatgtgctatgccagcagctgaaggtatgaatattaggactaacacagaaatggttgaaaaggctagaaaaggaattatggaatttcttttagcaaatcatccgttggattgtccagtttgtgaccaaggtggagaatgtgatttacaagatcaatcactttattacggcgtagacaagtcaagattctcagaaaacaaaagggttgtaaaagacaagtatatgggccctttgataaaaacccaaatgacaagatgtatacattgcactaggtgtgtgaggtttgcaactgaagttgctggagttcccgagattggagcgattggaagaggtgaaaatatggaaatcacaacttacttagaaaaatctatgacatccgaactatcagcaaacgtaatagatctttgtccagttggcgcactgacatcaaaaccttatgcttttgaggcgcgaccttgggaattaaaaaaaaccgaaagcatcgacgtaatggatgctgtaggatcaaacattcgtgttgatacttatggatgggaggtaaaaagagttttacctagaataaacgaagatatcaatgaagaatggttatcagacaaatcaagatattcctgtgatgggcttgcaaaacagaggttggatgtcccatatataaaaaaacaaaataagttagttaagtcgtcttgggatgaagcaatagacattatagcaaaaaaaataattgatactccaaaagatcaaatagctg

SEQ ID NO: 221751 - DNA, 697 bp, Unknown
  Bacterial polypeptide expressing nucleotide sequence isolated from the Sargasso Sea
tgagacaattgctgttgttccaacaatattaagacgtggaggaaaatggttttcctctttaggtagagaaaaaaatacaggtacaaaaattttttgtatatcaggaaatgtaaataacccatgcaatgttgaagaagaaatgggtgtacctttaaaagatttaattgagaaacatgctggtggagttgttggtggctgggataatttaaaagctgttatacctggtggatcctcaatgcctttattaccaaaagaaatttgcgacactataaaaatggattttgacgcctgtgttgaaaataaaactgggcttggaaccgctggaatagttgtaatcaataaagatcaagacataataaaatgtatggcaagaattgccagattttataaacacgagagctgtggacaatgcactccttgtagagaaggatcaggctggatgtggagaatgttagaaagaatggcaaaaggtgaggctactagagacgaggttgatatgttaatggatgtcacaaaacaaattgagggacatacaatttgtgcatttggcgagggttcatcttggccagtacaaggtttaataagaaattttaaagatgaaatcttagagagaaataaatacgatccattaattcagagaaaaaaagaagttccttatttggtagatcaacatcttttggaaaaagaaaatgcttaa

SEQ ID NO: 221752 - DNA, 526 bp, Unknown
  Bacterial polypeptide expressing nucleotide sequence isolated from the Sargasso Sea
ttgggctgtttcatttggaaccttgggcttatttggctttgtttcaatgatggttttcctagctatactaacaattggtttcatatacgagtggaaaaaaggagcattggagtggcaataaatacaaacattgaagagacaagtccagaactagaaagactaaagaagttgtatgctgataaggggtttgttgtcaccagtatcaataaccttattaactgggctcgaacaggctctctgcattggatgacatttggattagcttgttgtgctgtcgaaatgatgcatgtaggaacaccgcgctacgacgttgagcgttttggcgcagctccaagagcatcaccaagacatgcagacgttcttatagtggcaggtacgttgacaaataaaatggcagcggcattaagaaaagcttacgatcagatgccagaacctcgatatgttatttccatgggaagttgtgcgaatggtggagggtattatcactactcatattctgttgttagaggttgtgatcgaaaataat

SEQ ID NO: 221753 - DNA, 553 bp, Unknown
  Bacterial polypeptide expressing nucleotide sequence isolated from the Sargasso Sea
atgcttaaagctgataacaaaatatttaaaaatctttataataatcttggatgggaaatagaagctgctctcaatagagatgattggaaagatactaaaaatataatttcaaaaggtagagaatggatcattaatgaggtgaaaacttcagaattaagaggaagaggaggagccggtttttccacaggtcttaaatggtcttttgcgcctaaggaagttggctcaagaccacattatttagtaattaacgcagatgagtctgaacctgggacatgtaaagatagagatatacttaggtttgaacctcaaaaattaattgaggggtgtttaatagctggttatgcagtgaacgctcatgtttgctacatttatattaggggagaatattttaaagaagggcaaagattacaaaattcaattaatcaagcatatgaaaaaaaatacctagggaaaaatgcctgcggttccggatgggattttgacattcatattcattatggagcaggagcatatatatgtggtgaagaaactgctttacttgaaagtatagagg

SEQ ID NO: 221754 - DNA, 887 bp, Unknown
  Bacterial polypeptide expressing nucleotide sequence isolated from the Sargasso Sea
gggaaattgtagaatgtgtttagttgaaatagaaaaatcccctaaaccagttgcatcgtgcgcaatgccagcatcagagggtatgaacattaaaacaaatacaagcttagtagaaaaagcaagaaaaggagtaatggaatttttattggtaaatcatccattggattgtccagtttgtgatcaaggtggagagtgtgaccttcaagatcagtcaatgttttatggagtagataaatcaagatttaaagaaaacaaaagacaagtacctgaaaaatatatggggccactaattaaaacacaaatgacaagatgcatccactgcacaagatgtataagatttgcaacagaagttgcaggtgtacctgagttgggagcaattggaagaggtgaaaatatggaaattactacatacctagaaaaggccatggagtctgaattatctgcaaatgttatcgacctttgtcctgttggagcacttacttctaaaccatacgtttttgaagcaagaccttgggaacttaaaaaaacagagtcaatagatgtaatggatgcagttggatcaaatattagagtagatacatatggatgggaagtaaaaagggttcttccacgtattaatgaagatattaatgaagaatggatctcagataaaaccagatacgcatgcgatggtttaaagaaccaaagactagatacaccatttgaaaaagatggaaataaatttaataaaatctcatggaagaaagcatatgaaattcttaaatcaaaaattgagcataccgatgtgaacaaaattggttgttttactggtgatttaactaatatggaaactggttatgcggtaaaagaattgtttaataaagtttttaaatcaaatttattagact

SEQ ID NO: 221755 - DNA, 609 bp, Unknown
  Bacterial polypeptide expressing nucleotide sequence isolated from the Sargasso Sea
gtgcaaaatggttcactagctttggaaatccaaataatacaggaacgaaaatttttagtatttcaggacatgttaacaatccatgtaatgtggaagaagaaatgggaatcccattaaaagaacttatagaaaaccatgccggtggtgtaattggaggttgggataatttgttggcagtaattccaggaggcgccagcgttccacttatacctaaatcaatatgtgattatgtaaaaatggatttcgataatttaaaaaatgttcaaagtggcttaggaacagccgctgttatagttatgaataaatcaactgatattgttgaagcaatttcaagattatcacatttttacaaacatgaaagctgtggtcaatgtaccccatgtagagaaggtacaggttggatgtacagaatgatggaaaagatgattataggtaatgctaattttgaggatatagataagctaattgatgtaacaaaacaggttgaaggtcatacaatatgtgccttaggagatgctgctgcgtggcctatacaaggtctgtttaggcattttcgtgaagaagtagaaaaaagaataaagttacaccaaagtgatagagtagcatagt

SEQ ID NO: 221756 - DNA, 552 bp, Unknown
  Bacterial polypeptide expressing nucleotide sequence isolated from the Sargasso Sea
aatgcttaaagatcaagatagaatttttcaaaatttatataatgatttaggatttgatgttacatcatctcaaaaaagaggtgactggattaatactaaagaaattataaataaaggcagagattggattatcaatgaaatcaaaaattcacaacttagaggaagaggaggagcaggattcccaacaggattaaaatggtcatttgctcctaaagaagttggttcaagacctcattatttagttattaatgctgatgaatctgagcctggtacttgcaaagatagagatatattaagatttgaaccgcataaattaattgaaggatgtttaatagcttcttatgcagttcaagctcatgtttgttatatttatataagaggagaatactttattgacggacaaaagcttcaaaaagcaattgatgaagcttataaaaaaaatttaataggaaaaaatgctgcaggaacaggatgggatctagatattcatatacattatggtgctggagcttatatatgtggagaggagaccgcattattagaaagtattga

SEQ ID NO: 221757 - DNA, 597 bp, Unknown
  Bacterial polypeptide expressing nucleotide sequence isolated from the Sargasso Sea
agaaaaaaataaatcacggcacaaaaatatttgcaatatctggacacgtcaatagtccttgtgtcgtagaagaagaaatgtctatatctttaagagatttaattgataagcattgtggaggagtaactgggggttggaataatttaaaggcggtgattcctggtggtgcctcagtgccactaattcctaaatcggtatgtgataacgctttaatggacttcgattggcttaaagaacaaggctcagggctaggcacagcagcagttattgtcatggatcagagcacggatgtaataaaagcaatttggagattgtcaaaattttataaacatgaaagctgtggccaatgcacgccttgtagagagggaactggttggatgatgagaattatggaaagactcgttacgggccacgcctctgtggatgagatagatatgttgatagagattactaaacaagtcgagggtcacactatttgtgcccttggagatgcggcagcctggccaatacagggattaatacggcattttagaagtgaggttgaagatagaataatgaatcgttcaagaagaaacactgttcaagcagcagagtaga

SEQ ID NO: 221758 - DNA, 744 bp, Unknown
  Bacterial polypeptide expressing nucleotide sequence isolated from the Sargasso Sea
aatgactaaagaaacaaaaaaacttaatttaaattttggacctcaacacccagctgcacatggagtcttaagattaattctacaattagacggtgaagttgttgaaaaagcagatcctcatattggattgcttcatagaggaactgaaaaacttatagaaaacaaaacctatatgcaggcagttccttattttgatagacttgattatgttgcacctatgaaccaggagcatgcatttgcaatagcaattgaaaaaattttaaaaataaatgttccagctagagcacaatatataagagttattttttgtgaaataggtagaatacttagtcatatattaaatgtaactacgcaagcaatggatgtaggtgctttaacaccaactttgtggggatttgaagaaagagaaactttgatggggttttatgaaaaagtttctggttcacgtttgcatgcaaattattttagagccggaggtgtacatcaagatttacccaaaggtctagacgatgaaattttaaaattttgtgaaaaatttccaaaaattattgatgatctagaaacactattaacagataatagaatttttaagcaaagaaatgttgatataggtattgtatccaaacaagatgctcttgattattctttttctggagtaatgcttagagggtctggagttccttgggatcttagaaaatcgcaaccatatgattgttataatcaaatagattttaagatacctgt

SEQ ID NO: 221759 - DNA, 866 bp, Unknown
  Bacterial polypeptide expressing nucleotide sequence isolated from the Sargasso Sea
tatgccaagtattataataaatggtcgtgatattgaagttgaagagggtttgactgttttgcaagcttgtgaagaagctggcgtagaaatacctcggttttgctaccatgagcgcctttcgattgccggcaattgtaggatgtgtttggttgaaatggaaccttctccgaagcccatagcatcgtgtgcaatgcctatcaatgatgggatggttattcacacagatactgatttagtaaagaaggcaagagagggggttatggaatttctccttattaaccatcctcttgattgtccaatatgcgatcaaggtggggaatgtgatcttcaagatcaggctatgggctacggcctggataagtcccgttttttggagtctaaacgtgcagttaaaaataagtatttagggcctttagtctctacgataatgactagatgcattcactgtacaagatgtattaggttcgcccaagagattgcaggagttccagaattaggtgcgacaggacgtggtgaaaatatggaggtgggtacctatgttgaaaaggcattatcctcggaactgtctggtaatttggttgatttatgtccggttggtgcgctgacatcgaagccgtatgaatttaaagcacgatcctgggagttggttaagactcagtcaatagatgtttttgatgctatggggtctaatatccgtattgatagcagaggttctgaggtaatgagagttttgcctagaattaataactcaatcaatgaagaatggatttccgacaaaacccgacatgcttgtgacggtcttagtaggcagaggttagacaggccgtatgtaagaagaaatggaaaattagaagaagaaagttggg

SEQ ID NO: 221760 - DNA, 841 bp, Unknown
  Bacterial polypeptide expressing nucleotide sequence isolated from the Sargasso Sea
ttttgttatcacgaaaaattatccatagcaggaaattgtagaatgtgtttggttgaaatggaaaaatcacccaaaccaattgcttcttgcgcaatgccagcagctgaaggaatgaatattaaaactaatacagctttcgttgaaaaagcgagaaaaggcatcatggaatttttattagctaatcatccgttagactgtccagtttgcgatcagggcggcgaatgtgatttgcaagatcagtctatgtattatggaatagataaatctagatttgtagaaaataaaagacaagttaaagaaaagtatatgggtccactaattaagactcaaatgacaagatgtattcattgtacaagatgtgtcagatttgccaccgaagtagcaggtgttcctgaaattggagctataggcagaggtgaaaatatggaaattacaacttatttagaaaaagctatggagtcagagctttctgcaaacgtaatagatttatgtcctgtaggagctttaacatcacaaccatatgcctttgaagctagaccttgggaattaaaaaaaactgaaagtatagatgtgatggatgcagttggttcgaatataagaattgatacttataattgggaagtgaaaaggatattaccaagacttaataatgaaattaacgaagaatggatttcagataaaacaagatattcttgtgacggtcttttaaaacaaaggttggatgttccgtatattaaaaaagataacaaactaaaaaaatctagctgggatgaggcaattgatcttatatggaataaaattaaatcaatacaacccgatgaaataggcggacacatcggtg

SEQ ID NO: 221761 - DNA, 760 bp, Unknown
  Bacterial polypeptide expressing nucleotide sequence isolated from the Sargasso Sea
aatgccttatataactatcgataataaaaaaattgaatttaaagatggtatcactgtcatgcaagcttgtgaaattgctggtgtagaaatacctagattttgttatcatgataaattgtcaattgctggtaattgcagaatgtgtttagtggaaatggaaaaatcaccaaaaccaattgcttcatgtgcaatgccagctactgaaggtatggttataaaaacaaatactgaatcagtaaaaaacgcaagaaaaggggtaatggaatttcttttaattaaccatccattagattgtccgatatgtgatcaaggaggggagtgtgatttgcaagatcaggctctttattatggttttgacaaatcaagatatgaagaaaacaaaagggcagttcaaaataaaaatatgggccctttagttagtactataatgaccaggtgtattcattgtacaagatgtgtaagattctctactgaggttgctggagttgatgatattggaatgttaggaagaggagaaaatgcagaaattactacatatcttgaaaaaactattgagtctgaattatcaggcaatgttatagatctttgtcctgtgggtgctttaacaagtaagccatatgcgtttcaagctcgaccatgggaattaaaaaaaacagaaactactgacatatttgatgcaatgggatcaagtatcagaattgactctttaggaaaaaaagccttaagagtattacctttacttaatgaacaaatcaatgaa

SEQ ID NO: 221762 - DNA, 895 bp, Unknown
  Bacterial polypeptide expressing nucleotide sequence isolated from the Sargasso Sea
gatattcatatcccaagattttgctatcataaaagattaagtgttgtagcaagttgtagaatgtgtctagtcgaagttgagggtgctaaatacccgcaaccagcatgttctacaattgtaagagatggtatgaaagttaacaccgtgggatcagttacagaagatgctcaaaaaagcaccatggagttcttgttaattaatcatccacttgattgtcctgtttgtgatcaagctggcgaatgcgaacttcaagatgtctccttagatcatggagactataaatcaaattataaagagataaaacgcactgtagtagataaagatattggcaatcttgttacaaccgaaatgactcgatgtattcattgcagtcgatgtgttcgttttggagaggaagttgcaggtattaaagaacttggtatgacaggtaggggtgagaagactaagattgaaacatttgtaaatcaaagtctgacttcggaactatccggaaatgttatcgacctttgccctgtaggagcattaaataataatctgtataaatacagcgctagaacatgggacttgaaacaaattagttctgtttcttcaaatgactgtttgggttcaaatattaattatcatacctataaagatcagattaaaagaactattcccaaggaaaacgatcaaattaatttatcatggttagcagacagtgatcgatttggttatgaaggaatagaatctgaagaacgaatactttctgcgcttattagaaaagatgatgtacttattaaatctgatttggatacacttaatcaagttgtatctgaagaaattcataagcatagatcaaatacaacagctgtgatgtcagcgcagtcatcatgtgaagagatgtacctattccaaa

SEQ ID NO: 221763 - DNA, 436 bp, Unknown
  Bacterial polypeptide expressing nucleotide sequence isolated from the Sargasso Sea
gcttcagcgccatggtttactggagatcaactcgatataaaaatgacaatagacgatgttgctaatgctggatctatgctgggttcaggggcagttgttgtaatggatgaggatactaatttagtctacgcagcgaaaagcatagtaagtttttttgctcatgaatcttgtggtcaatgtactccttgtagagaaggaactacatggttagaaatgatactggagcgaatagcaagcggaagaggaaggctgtcagacataagcttgttggtagatgtttgtgataatatttcaccaggtttgtcgtggccacctaaaatgacaacaatatgtcctttaggtccatctgcagtatctccaataacgtctttgttagataatttttcagatgaattaatgaaaatgttaccaacaaaaattcctattgctcaatgag

SEQ ID NO: 221764 - DNA, 577 bp, Unknown
  Bacterial polypeptide expressing nucleotide sequence isolated from the Sargasso Sea
tgtaacgttgaagaagaaatgaacattcctttaaaagaattaatagaagttcatgcaggtggtgttattggtggatgggataatttacaagctgtaattcctggtggatcttcaatgccgttaattcctaaaaaaaaatgtgaaacattaacgatggattttgattcattaatggctgaaaaaagtgggttaggtacggcaggtatagttgtaattaataaagaccaggacataattaaatgtatggcacggattgcaagattttataaacatgaaagttgtggccagtgcacaccttgtagagaaggatctggatggatgtggcgtatgcttgagcgtatggcaaaaggtgaagctacaaaagatgaaattgaaatgttaggagatgtaacaaatcaaattgctggacacacaatttgtgcatttggcgaaggatcatcatggccagttcaaggtcttcttagacattttaaaaaggaaatagaggaaagaaataatctagatcttattgtggagaaaaaaaatacaattccatacttagtagatcaacatttattggataaaaaaaatgcttaaa

SEQ ID NO: 221765 - DNA, 732 bp, Unknown
  Bacterial polypeptide expressing nucleotide sequence isolated from the Sargasso Sea
aatgcctaaaattactatcaatggaaaagagatagaatttcaaaaaggcatgacagtccttcaggcatgtgagcttgccgatgtagaaattccacgattttgttaccacgaaaaactatctattgcaggtaactgtagaatgtgccttgttgaaatggaaaaatcagcaaaacccatagcatcatgtgcaatgccagcagcagagggtatgaatattaaaaccaacactccattcgttgaaaaggctagaaaaggtgtgatggaatttttgcttgccaaccatcccttagattgcccggtttgcgatcaaggtggtgagtgcgatcttcaagatcaatcaatgtattacggaattgataaatctagatttatagaaaacaaaaggcaagttaaagaaaaatatatgggcccattaatcaaaacgcaaatgaccagatgcattcattgcacaaggtgtgtgagatttgcgactgaggttgctggcgttccagaaataggggcaataggacgtggggagaatacggaaattactacttacttggaaaaagcaatggagtcagaactatctgcaaatgtcatagatttatgtccagttggagctcttacttcgaaaccatacgcatttgaagctagaccttgggagcttaaaaaaactgaaagtgtagacgtgatggatgcagttggttcaaatatacgaatcgatacctataattgggaggtcaaaagaatatt

SEQ ID NO: 221766 - DNA, 614 bp, Unknown
  Bacterial polypeptide expressing nucleotide sequence isolated from the Sargasso Sea
aatggttaaattaaaagttaacgatatagatttagaggtagaagaaggtttaactgtacttcaagcatgcgaaaaagctggagcagaaattcctagattttgttatcatgaaaaactttctatagctggtaattgtagaatgtgcctagttgaaattgaaaaatctcctaaacctgtagcctcatgtgcaatgccaatatctgaaggtatgaatataaaaacaaacactgaaaaagttgaaaaagcaagaaaaggagtcatggagtttttgttagcaaatcatccattagactgtcctgtttgtgaccaaggaggtgaatgtgatttacaggatcaatcaatgttctatggcatagataaatccagatataaggaaaacaaaagagaagtagcagataaatacatgggccctttaattaaaactcaaatgacgagatgtattcattgtacaagatgtattagatttgcaactgaagttgctggagttcctgagcttggtgcaattggtagaggtgaagatatggaaattacaacatatttggaaaaatcaatggaatcggaactttcagctaatgttattgatttgtgcccagtaggagctttaacatcaaaac

SEQ ID NO: 221767 - DNA, 860 bp, Unknown
  Bacterial polypeptide expressing nucleotide sequence isolated from the Sargasso Sea
ccgcacctgagccgcatcatgatgccgccgacctgggaaggtcacccgctgcgcaaggactacccggcgcgcgccaccgaattcgatccgttcagcctgaccctggccaaacagcagctggaagaggaagccgcgcgcttccgccccgaagactggggcatgaaacgcggcggcgatcatgaggactacatgttcctcaacctcggtcccaaccacccatccgctcacggcgcgttccgcatcatcctgcagctcgacggcgaagagatcgtcgattgcgtaccagagatcggctaccaccaccgtggcgccgagaaaatggccgaacgccagagctggcacagcttcatcccctacaccgaccgcatcgactacctcggtggggtgatgaacaacctgccctacgtgctttcggtggagaaactcgccggcatcaaggtgccggcccgcgtcgacttcatccgcgtgatgctcgccgagttcttccgcatcaccagccacctgctgttcctcggtacctacatccaggacgttggcgcgatgacaccggtgttcttcaccttcaccgaccgccaacgcgcctacaaggtgatcgaggccatcaccggcttccgcctgcacccggcctggtaccgcatcggtggcgtcgcccatgacctgccgcgcggttgggacaagctggtcaaggagttcgtcgactggctgcccaagcgcctcgacgaatacgagaaggcggcgctgaagaacagcatcctcaaggcccgtaccatcggtgtggcgcagtacaacaccaaggaagcgctcgagtggggcaccaccggcgccggcctgcgcgccaccggttgcgacttcgacctgcg

SEQ ID NO: 221768 - DNA, 719 bp, Unknown
  Bacterial polypeptide expressing nucleotide sequence isolated from the Sargasso Sea
ccctacaataattaataatgttgaaactatagctgtcgtaccaacaatactaagaagaggagctaagtggtttgcttctttaggaagaccaaaaaatactggaacaaaaatttattgtatatcaggcaatgttaacaatccttgtaatgttgaagaagaaatgggaattccattaaaagaattaatagaaaaacatgcaggtggtgtcataggtggttgggaaaatttaaaagccgtaataccaggtggatcttcaatgccacttctaaacaaggaaatttgtaataatataaaaatggattttgattcgtgtgtagaaaacaaaaccggccttggtactgcaggaatagtagttattaataatgatcaagatattattaaatgtatggcaagaattgctagattttataagcacgaaagttgtggtcaatgtacaccttgtagagaaggatctggatggatgtggagaatgttagaaagaatggctaaaggcgaagctactagagatgaggttgatatgcttatggatgttactaaacaaattgaaggtcatacaatttgtgctttcggtgaaggttctgcttggcctgtacaaggattaattagaaattttaaagatgaaattatcgaaagaaataaatttgacccgatagttaagaaacaaaaaaatattccatatttggtagatcaacacttattagagaaggaaaatgcttaag

SEQ ID NO: 221769 - DNA, 229 bp, Unknown
  Bacterial polypeptide expressing nucleotide sequence isolated from the Sargasso Sea
agaaaagtttacgatcaaatgccagaaccaaggtacgttgtatcaatgggaagctgcgctaatggaggagggtattaccattactcttattcagttgtaagaggatgcgataggattgttccagtagatatctatattccaggttgtccaccatcagctgaggcattgttatatggaattttacaacttcaaaaaaaaataagaagagaaggttctttaaaaagataaa

SEQ ID NO: 221770 - DNA, 319 bp, Unknown
  Bacterial polypeptide expressing nucleotide sequence isolated from the Sargasso Sea
atggcaaaagaaaaaaaaacactaaatctgaattttggaccacaacatcctgcagcacatggagttttaagattaatacttcaattagatggtgaagttgttgaaaaagccgatccgcatataggattattacaccgaggtactgagaagttaatagaaaataaaacttatatccaagcagttccttattttgatcgtcttgattatgtagcaccaatgaatcaagaacatgcatttgctttagctatagaaaaaattcttaaaatcgaagtaccgtctagagcaaaatatataagagtaattttctgtgaaataggaa

SEQ ID NO: 221771 - DNA, 343 bp, Unknown
  Bacterial polypeptide expressing nucleotide sequence isolated from the Sargasso Sea
atgaagggacttttagatcagcaatttcagtcgggaggagttgtaattaccaaagtagatgatttggtaaactgggcgagactctcttctttatggcctatgggtttcggattagcttgctgtgctatagaaatgatggccacctatgcttcaggctatgacttagatagattcggggtcattcctagagcctctcctcggcagtctgatgtcatgattattgcgggtacggttacttttaaaatggccgaccgagtacggaggctttatgagcaaatggccgaacctcgctatgtgatttccatgggtagttgctccaattgtggtggcccgtattgggagc

SEQ ID NO: 221772 - DNA, 886 bp, Unknown
  Bacterial polypeptide expressing nucleotide sequence isolated from the Sargasso Sea
catgatcgaagaaacactggtcctgttccaaaatatacgcaatcccagttacgacaaatccctcaagggttataaaaaagtgggtggtttcaaagcgttgaaaaaggctttgaaaatgaaaccagaggaactggtggaagttgtcaaggcttccggtttaagaggcagaggcggagcaggattcccaacggggctgaagtggagtttcatggccaaaaatacaggcaaaccgagttacctcatttgcaatgcggatgaatccgaacccggaacctgtaaagaccgtgaattaatgctcaaggatccgcatcagtttcttgaggggatgatgattggttgctatgcgatcaactgtaaacatggatatatttatgttcgaggagagtattttccttcaatcaaaagtttgaatgaagccatcgatgaactttatgcggcgggtcttttgggcgaaaatgctcttggtaaagggaaacgccttgacctcacagttcataacggcgcaggggcgtacatctgtggtgaagaatctgcactgctcgattcattggagggcaagcgcggtcatcccagggtgaaacctccctttcctgcagtttcaggtttcaatgcatgtccgaccaccgtcaataatgttgagacccttacctgcctgcctttcatcgtcaatgaaggggcggacgccttcaaggatttcggtcctgagaataatgcagggacccatcttgtcagcctcagcggacatgtggaaaaacccggggtttacgaagtaaggatggatgtcactctgaaacagatcatctacgacctcggcggaggaatccggggagggaaagcccctcagggagttatcccgggaggtgcgtcatcgccggttttgaccgca

SEQ ID NO: 221773 - DNA, 541 bp, Unknown
  Bacterial polypeptide expressing nucleotide sequence isolated from the Sargasso Sea
atgcttgaagacaaagatagaatttttaaaaatttatataacgactttggctcagatctaaagtctgcaaaagaaagaggggattgggtaaatactaaggaaatctgtcaaaaaggaagagattggataattaatgagattaaggactcacaattaagaggtcggggcggcgcaggatttccaactggattaaagtggtcatttgcgcctaaggaagttggaaatagacctcattatttagttattaatgctgatgaatctgaacctggaacatgcaaagatagagatattttaagatttgaaccccacaaattaatagaaggatgtttaatttcatcatacgcagtcaacgcacatatttgttatatttatataagaggagaatacataaatgagggtgctaaacttcaacaagcaattgatgaggcctataaagaaggtttaataggaaaaaattcttcaggtacaggatgggacctagatatttatttgcattatggtgctggcgcctacatttgtggagaagaaacagctttataga

SEQ ID NO: 221774 - DNA, 220 bp, Unknown
  Bacterial polypeptide expressing nucleotide sequence isolated from the Sargasso Sea
ttatgaccaaatgccagaacccagatatgttatttctatgggaagctgtgctaatggaggtggttactatcattactcttattcagttgtaagaggctgtgatagaatagtaccagttgatgtttatgtccctggatgcccaccttcagctgaagcattattgtatgggattttacaacttcagaagaaaataagaaatcgtggatctttacaaagataa

SEQ ID NO: 221775 - DNA, 424 bp, Unknown
  Bacterial polypeptide expressing nucleotide sequence isolated from the Sargasso Sea
aatggactttgacgctttattagaaaataaaagtggtttagggacagccggaatagtagtaatcaataaagatcaagatataatttcttgcatggctaggattgccagattctataagcacgaaagctgcggtcaatgcacaccttgtcgagaaggagcaggatggatgtggagaatacttgatagagttgaaaaaagaaaagcaacttttagtgatattgaactcttatctgatgttacaaaacaaatagagggtcatacaatttgtgcatttggcgaaggttcttcctggcctgtccaaggtttattaagacattttagaaaagaaattgaaagtagatgcagagaggaacctttaattaaaaaaaaatcaaataatccttatttagttgaccaacatcttttggagaacaagaatgcctaa

SEQ ID NO: 221776 - DNA, 831 bp, Unknown
  Bacterial polypeptide expressing nucleotide sequence isolated from the Sargasso Sea
aaaaaaagtcttaaaagaagacaatccagaaaatgtaattaacgaaattaaagattcaaacataaaaggtagaggaggagcaggttttcctacaggagtaaaatggggctttttagccgaggatgaagacaggtatttagtaatcaatggtgatgaatccgagccgggtacatttaaagataggattctattagaaagagatccacaccaattaattgaaggtgtaataattacatgttttgcctcaaatattaaaaaagcattcatttatattcgtggtgaatatgcaaaaccggcaagaagagtacaagaagcagtagagcaagcttatgagaaaggatatttgggcgataacatacttggaaccaatttatcacttgatattgtagttcacctaggggcaggagcctatatatgtggagaagaaactgctcttcttaactcacttgaaggaaagagaggagaacctagactaaaaccaccttactttcctgccgtgatgggattatataacaaaccaactttggttaataatgttgaaacaatatcatccgttccatggatcataaataattcaggcaaagagtacgcaaagcttggagtagaaggttcaacaggaacaagaatctttagtctttctggacatgttagaacccctggaaattttgaaatagaaatgggaaaaagttttggagagtttgttgatacttttggtaatggaattaaagatgacaaacaagtaaaagcatatattcctggaggtgcttcagcgccatggtttactggagatcaactcgatataaaaatgacaatagacgatgttgctaatgc

SEQ ID NO: 221777 - DNA, 493 bp, Unknown
  Bacterial polypeptide expressing nucleotide sequence isolated from the Sargasso Sea
atgggtttactggaaaataagtttcaagataatgtagttgttgcctcacttgacaagattttgggttgggcaagatcaacatctccatggtactttcaatttgggcttgcttgctgcgccatcgaaatgatggcatctgctgcaagcagacatgatctagagagaattggtatgatgccacgctcttcgccaagacaggcagatgtaatgatagttgctggtactgttacactaaagatggctctacgtgtgaaaaagttatatgaacagatggctgatccaaaatatgttatttctatgggaagttgtgcaactagtggaggcccttattggcagcacggttatcatgtattaaagggagttgatttagttgttcctgttgatgtttatgtaccgggttgtcctcctagaccagaagccttaattgaaggcttattgaagctacaagaaacaattcaaacggaacgccctctcactagaaagcttgcatgac

SEQ ID NO: 221778 - DNA, 715 bp, Unknown
  Bacterial polypeptide expressing nucleotide sequence isolated from the Sargasso Sea
atgtataaattaaaagtaaatgatgtagaagttgaagtcgaagaaggacttacagttcttcaagcttgtgaaaaagcaggagttgaaattccaagattttgttatcatgaaaaattatcaattgctggtaattgcagaatgtgcctagtggaaatggagaaatcaccaaaaccgatagcatcatgtgcaatgccagcagctgatggaatggttataaaaacaaatacaccaaaaattgaaaaatctagaaaaggtgtaatggagtttttattagctaatcatccattagattgtccagtctgtgatcaagggggtgaatgtgatcttcaagatcaatctatgtattatggaattgataaatccagatttaaagaaaataaaagatctgtaccagataaaaatatgggtccgctgataaaaactcaaatgacaagatgtattcattgtacaagatgtgtgagatttgccactgaaatcgcaggtgtccccgagttaggagctattggaagaggtgaagatatgcaaataaccacttatctggaacaatcagtacaatctgaattatcagggaatgttattgatttatgtcctgtaggtgcattgacatcaaagccttatgtttttgaagctagaccatgggagttaaaaaaaacagagactgtggatgttatggacgcagttggatcaaacattagggttgatacttatgattggg

SEQ ID NO: 221779 - DNA, 401 bp, Unknown
  Bacterial polypeptide expressing nucleotide sequence isolated from the Sargasso Sea
aaataaaacaggattaggaacagcaggaattgtagtaataaataacgaccaagatatcatcaaatgcatggcaagaattgcaagattttataaacatgaaagttgtggtcagtgtactccatgcagggaaggatctggttggatgtggagaatgttagagagaatggccaaaggagaggcatctagagaagaagtggatatgttaatggatgtcactaagcaaattgaaggtcatacaatctgtgcatttggagaaggatcttcatggccagttcaaggtttacttagacattttaaaaaagaaattgaagaaagaaataactttaatccattagtaaataggggtcaaaaaaatccctacttggttgatcaacacttattagaaaaagaaaatgcttaag

SEQ ID NO: 221780 - DNA, 709 bp, Unknown
  Bacterial polypeptide expressing nucleotide sequence isolated from the Sargasso Sea
cggcttatatggttgtccaacaatagttaacaatgttgagacaattgcagttgtgccaactattttaagaaggggtggaaaatggttcgcatcaattggaaagtcaaaaaatacaggtacaaaaatattttgtatttctggtaatgtaaattcaccttgcaatgttgaggaggaaatggggatacctctaaaagatttaatagaaaaacatgctggtggagtagtcggtggatgggacaaccttcaagctgtgataccaggtggttcgtcaatgcctctattgtcaaaagaaatttgcgataccataacaatggattttgactctttgattgaaaacaaaagtggattaggtacagctggaatagtagttattaataaagatcaagacattgttgcttgtatggcaagaatagcgagattttacaaacatgaaagttgcggtcagtgcactccttgtagagaaggggctggatggatgtggagaatattagatagagttgtaaaaagaaaagctacctttagtgatattaatttattatcagatgttacaaaacagatagaaggtcatactatttgtgcgtttggggagggatctgcatggccagtacaaggtttattaagacattttagaaaagaagttgaaagtcgttgcagagacgagccactaattaaaaagaaaataaataatccatatttagttgatcaacat

SEQ ID NO: 221781 - DNA, 649 bp, Unknown
  Bacterial polypeptide expressing nucleotide sequence isolated from the Sargasso Sea
tgcctctctttgggagagaaaaaaaatacaggcacaaaaatattttgtatatctgcggaatgtaaatactccgtgtaatgtcgaggaagaaatgaatattccattaaaagaattaattgaagttcatgctggtggagttgttggaggttgggataatcttcaagcagttatccctggtggttcgtcaatgccattaataccaaaagaaaaatgtgaaacattaactatggattttgactcacttatggctgagaaaagtggcttaggaacagcaggtattgttgttatcaataaagatcaagacattattaagtgcatggcaagaattgctagattttataaacacgaaagttgtggtcaatgtactccttgtagagaaggatcaggttggatgtggagaatgcttgagagaatggcaaaaggtgatgcaacaaaagatgaagttgatatgctaggtgatgttacaaatcaaatagcaggacatacaatttgtgcttttggagaaggatcttcatggccggttcaaggacttttaaggcattttaaaaaagaaattgagaagagaaataatttagatcctattgttcagaaaaaaaataatattccttacttagttgatcaacacttactggataaaaaaaatgcttaa

SEQ ID NO: 221782 - DNA, 587 bp, Unknown
  Bacterial polypeptide expressing nucleotide sequence isolated from the Sargasso Sea
tttaggaagtgccaacaatacaggtacaaaaatttttagcatctctggacacgtaaataacccatgtaatgtagaagaagaaatgggcataccactgagagatctcattgaaaaacatgcaggtggagtaattggtggttgggaaaatttattagctgtaattcctggaggcgcaagtgtgcctttattgcctaagtctgtttgtgatactgttaaaatggattttgacagcctaaaagaagttcaaagtggattaggaactgcggctgttattgtaatgaataaatcaacagatattgttgaggcaatagccagactatcacatttttataagcatgaaagttgtggtcaatgtacaccttgcagagaaggtactggatggatgtacagaatgatggaaaaaatgattcatggaaatgttgaacatcaagatattgataaacttttagatgtgactaaacaaattgaaggtcatactatttgtgccttaggtgatgctgctgcttggcctattcaaggtttgtttagacactttagacctgaaattgaaaaaagaattaaagaaagaaatagaagagtagcctagt

SEQ ID NO: 221783 - DNA, 719 bp, Unknown
  Bacterial polypeptide expressing nucleotide sequence isolated from the Sargasso Sea
atatggatgtccaacaattgtaaataatgttgaaacaatagcagttgttccaactattttgagaagaggtggtaaatggttttcttcactaggtagatctaaaaatactggtactaaaatttattgtatttcaggaaatgtcaataatccatgtaatgttgaagaagaaatgggtattccattaaaagatttaatcgaaaaacatgctgggggagtaattggtggatgggataatcttaaagctgttattcctggtggttcatcaatgcctttactaccaaaacaaatttgtgaaacaattaaaatggattttgatgaatgtgtagaaaacaaaactggacttggtactgctggcatagtcgttataaataaagaccaagatataattaaatgtatggctagaattgcaagattttataagcatgaaagttgtggtcaatgcactccttgcagagaaggttctggatggatgtggagaatgctagaaagaatggctaaaggcgaagcttcaagagacgaggttgatatgcttatggatgttacaaaacaaattgagggtcatacaatttgtgcttttggtgaaggttcagcttggccagtacaaggtttgcttagacattttaaaaaagaagtagcaaaaagaaataattttaatccattagtagataaaaatagaaatattccttacctagtggatcaacatttgttggataagtgat

SEQ ID NO: 221784 - DNA, 689 bp, Unknown
  Bacterial polypeptide expressing nucleotide sequence isolated from the Sargasso Sea
cgcagtagttccgactattctgagacgtggtggaaaatggtttgcatctttaggtagaccaaaaaacactggtacaaaaattttttgtatttctggaaacgtaaattcaccttgtaatattgaggaagaaatgggcattccacttaaagagctgataaacacttatgcaggaggagtcgtaggtggctgggacaatttgcaagcagttattcctggtggatcgtcaatgccattattaccaaaaaaaatttgtgagacgataaaaatggattttgactcattaattgaaaatcaaagtggtttaggaactgctggaatagtagttataaataaggatcaagacattgtttcttgtatggcaagaatagctagattttacaagcatgaaagttgcggtcagtgtactccatgtagagaaggttcaggctggatgtggagaatattaaatagagctacaaaaggtgagacgacactgagcgatattgatctattagaggacgttacaaaacaaattgaaggtcatactatttgtgcgtttggcgaaggatcagcttggccagtacaaggactattaagacattttagaaaagaagttgataaaaaatgtagtaatgaccctctcataaaaaagaaaaaagatgtaccgtatttaattgaccaacacttattagaaaaaaagaatgcctaaa

SEQ ID NO: 221785 - DNA, 526 bp, Unknown
  Bacterial polypeptide expressing nucleotide sequence isolated from the Sargasso Sea
tcatgctggtggagtagttggaggttgggagaatttactagctgttataccaggtggctcttcaatgccattaataccaaaagaaagatgtgaaaatttaaaaatggattttgatgcatgtgttgaagaaaaaagtgggctaggtacagcaggtatagtcgtaattaataaagatcaggacataataaaatgtatggcaaggatagcaagattttataaacatgagagttgtggacaatgtacaccttgtagagaaggatcgggttggatgtggagaatgcttgagagaatggcaaaaggagacgcaacaagggatgaagtagatatgttaagtgatgttacaaatcaaatagctggacatacaatttgtgcatttggcgaaggttcttcttggcctgtccaaggattacttagacattttaaaaaagaaattttgaaaagaaatagcttagatcctattattcagaaaaaaaataatattccatatttagttgatcaacatttattagaaaaaaaaaatgcttaa

SEQ ID NO: 221786 - DNA, 431 bp, Unknown
  Bacterial polypeptide expressing nucleotide sequence isolated from the Sargasso Sea
aaatttaactatggatttcgactcgttaatgtcagagaaaagtggattaggaactgcaggtgtagtcgtaattaataaggatcaagatattattaaatgtatggctagaattgcgagattttataaacatgaaagttgtggtcaatgtactccttgtagagaaggaacaggatggatgtggagaatgcttgagaggatgtcaaaaggtgaagcaactagagacgaagttgatatgttaggagatgtaacaaatcaaatagcaggacacacaatttgtgcatttggagaaggctcttcttggccagttcaaggtttattaagacattttaaaaaagaaatcaaagaaagaaataaatttgatccaatagtaaaagaaaataaaaatattccttatttagttgaccaacatttattagataaaaatgcttaaa

SEQ ID NO: 221787 - DNA, 446 bp, Unknown
  Bacterial polypeptide expressing nucleotide sequence isolated from the Sargasso Sea
agaaatttgtgacaatatgaaaatggattttgatgcatgtgtagaaaataagacaggattaggaacagctggaattgttgtcatcaataatgatcaagatatcattaagtgcatggcaagaatagctagattttataaacatgaaagttgtggtcagtgcacaccttgcagagaaggttctggttggatgtggagaatgttagaaagaatggctgcaggtgaggcaactccagacgaagtggatatgctctttgatgtaactaaacaaattgaaggtcatacaatttgtgcttttggagaaggatcctcttggccagttcaaggattaataagacattttaaagatgaaatattagaaagaaataaatttgatccagtagtaaaaaaacaaaaaaatattccatacttggtggatcaacatttgttagaaaaagaaaatgcctaaa

SEQ ID NO: 221788 - DNA, 355 bp, Unknown
  Bacterial polypeptide expressing nucleotide sequence isolated from the Sargasso Sea
tataaacaaagatcaagatataattaaatgtatggcaagaatagcaagattttataaacatgaaagttgtggacaatgtacaccatgtagagaaggttcaggttggatgtggagaatgcttgagagaatggccaaaggtgaagcatcaagagatgaagttgatatgttaatggatgttacaaaacaaatagaaggacatacaatttgtgcatttggagaaggatctgcttggccagttcaaggcttactaagacattttaaaaaagaagttgcaaaacgaaataattttaatccattagtaaatactagtaagaaaattccttacttggtagatcaacacttactagaaaaataa

SEQ ID NO: 221789 - DNA, 571 bp, Unknown
  Bacterial polypeptide expressing nucleotide sequence isolated from the Sargasso Sea
aatgcttaaagatcaagatagaatttttcaaaatttatataatgatttaggatcagatattacttcatcccaaaagagaggtgattgggttaatactaaagaacttactgaaaaaggtagagactggattataagtgaaattaaagactctcagctaaggggaagaggtggtgcaggttttccgacaggattaaaatggtcttttgcaccaaaagaaattggatctaggccccattatttagtcataaatgcagatgagtcagaacctggcacttgtaaagatagagatatattaagatttgagccacacaaattaatagagggatgtttaatagcctcttatgcagttcaagcccatgtttgttatatttatattagaggagaatattttattgatggacaaaaacttcaagttgcaattgatgaagcttataaaaaaaatttgataggtaaaaattctgctggtacaggatgggatttagatatttatattcattatggtgcaggagcttatatttgtggagaagaaactgcattacttgaaagtttagagggtaaaaagggtcaacca

SEQ ID NO: 221790 - DNA, 988 bp, Unknown
  Bacterial polypeptide expressing nucleotide sequence isolated from the Sargasso Sea
aaaaatataatcgacggtatgaaagtttcagtgccacaagggtctacggtatacaaagctgtgaaagcagcaggcgctgaaattccaagattttgttatcatgaaaaattatctgtagcaggaaattgcaggatgtgtttggtagaaatggaaagatctccaaaacctatagcttcttgtgcaatgccagcttctgatggaatgattattaaaacatcttctgagatggttgaaaaggcaagaaaaggtgttatggaatttctattaattaaccatcctttggattgtcctatttgcgatcaaggcggtgagtgtgatctgcaagatcaagcactatattttggtaaaggtgaaactcgttttgaaaattctaaaagagctgtttctgacaaaaacatgggccctttaatcaaaacaacaatgacaaggtgtattcattgtacaagatgtgtaagatttgcaaatgaagttgcaggggtagaggaccttggagcaacaggtagaggagaaaatgttgaaatttcaacatatttagaaaaggctgtaacttcagaattatcaggaaatttggttgatttgtgcccagttggtgctttaacttctaaaccttaccagtttgttgctcgaccttgggagcttacaaaaacagaatcagttgatgtaatggacgctataggctcaaatataagaattgatagtcgtgatggaaaagttttaagaatattgccaaaaaacaacgaaagtattaatgaagagtggatatctgataaatcaagatatgcaatcgatggtttatctaaacaacgtttagataccccttttgttaaaataaataacaaattacaaagagtttcgtgggatgaagcatttgaagttataaattctaaaattagcaagatttcaaatgaaaattgtgttggtattattggtaatcaagttgataatgaagcaatatttgctctaaaagaattattaaaaaacttaatta

SEQ ID NO: 221791 - DNA, 616 bp, Unknown
  Bacterial polypeptide expressing nucleotide sequence isolated from the Sargasso Sea
aatgcctaaattaaaagtaaacgatattgatattgaagttgaagatggtctaacggtactccaagcttgtgagcaagctggagctgaaataccaagattttgttatcatgaaaaactttccatagctgggaattgtcgtatgtgtttggttgaaatggaaaaatctccaaaaccaatagcgtcatgtgcaatgcctgcagctgaaggtatggttattaaaacaaatacagaaaaagttgaaaaagcaagaaaaggtgtgatggagtttttactggctaaccatcctttggattgtcctgtttgtgatcaaggtggtgagtgtgatttacaggatcaatctatgttttatggaattgataaatcaagatttaaagagaacaaaagatatgtacctgaaaaatacatgggaccgttaataaaaacccaaatgacaagatgtattcattgtactagatgtatcagatttgccacagaagtagcaggtgtaccagagttaggtgcaattggccgaggagaaaacatggaaatcacaacttatttggagaaatcaatggattccgaaatgtcagcaaatgtaatagatttatgtccggtaggtgcattaacctctaaacct

SEQ ID NO: 221792 - DNA, 366 bp, Unknown
  Bacterial polypeptide expressing nucleotide sequence isolated from the Sargasso Sea
gcattgtcgttataaataaagatcaagatataattaaatgtatggcaagaatagcaaggttttacaaacatgagagctgcggacaatgcacaccatgtagagaaggatcaggatggatgtggagaatgcttgagagaatggcaaaaggtgaagcatcaagagatgaagttgatatgttaatggatgttacaaaacaaatagaaggacatacaatttgtgcatttggagaaggatctgcttggccagtacaaggtttgctcagacattttaaaaaagaagtggctaaaagaaataattttaatcctttgataaataaaaataaaaaaataccttatctagtggatcaacatttattggaaaaataat

SEQ ID NO: 221793 - DNA, 433 bp, Unknown
  Bacterial polypeptide expressing nucleotide sequence isolated from the Sargasso Sea
gactttgattcattagttgaaaataaaagtggtttagggactgcaggggtaattgttataaataaagatcaagatattattaaatgtatggctagaatagccagattttataaacatgaaagctgcggacagtgtacaccttgtagagaaggctcaggttggatgtggagaattttagagaggatggcaaaaggagaagcatccaaagatgaagttaacatgctttcagatgtttctaaacaaattgaaggtcatactatttgtgcttttggggaaggttcagcctggcctgtacaaggtttattgagacattttaaaaaagaaatcattgagagaaataattttgacccattggttaaaaataacaaaaatattccatatttaattgatcaacatatattagaggaagataccaaaaatgttaaaagttaaa

SEQ ID NO: 221794 - DNA, 415 bp, Unknown
  Bacterial polypeptide expressing nucleotide sequence isolated from the Sargasso Sea
gatgcatgtgttgaaaacaaaacaggattaggaacagctggaatagtggttatcaataatgatcaagatattataaagtgtatggcaagaatagctagattttataaacatgaaagttgtggtcaatgtacaccatgtagagaaggatcaggatggatgtggagaatgctagaaagaatggcagctggtgaggcaacaccagatgaagtagatatgctatttgatgtaaccaaacaaatagaaggccatacgatatgtgcttttggagaaggttcatcttggcctgttcaaggattaatcagacattttaaaaaagaaatactagaaagaaataaatttgatccagtgatcaaaaaacaaaaaaacattccatatttgatagatcaacacttattagaaaaagaaaatgcctaaa

SEQ ID NO: 221795 - DNA, 691 bp, Unknown
  Bacterial polypeptide expressing nucleotide sequence isolated from the Sargasso Sea
atagctgtagttccaacaattttaagaagaggtggaaaatggtttgcatcactaggaaagccaaaaaatactggaacaaaaatattttgcatttctggaaatgtaaactcaccatgtaatgtcgaagaagaaatgggcattcctttgaaagaattgattgaaaaacatgcaggaggagtagtcggaggttgggaaaatctgcaagccgtgatacctggaggttcatcaatgcctttgttgccgaaaaaaatatgcgatacaataacgatggactttgactctttgattgaaaataaaagtggccttggaactgctggtattgttgttatcaataaagaccaagatattgttgcatgtatggcgaggatagcaaggttttacaaacatgaaagttgtggtcaatgcactccatgtcgagaaggagcaggatggatgtggagaatacttgatagggttgtaaaaagaaaagccacatttaatgatattgaattattgtctgacgttacaaaacagatcgaaggtcatactatctgtgcatttggagagggctctgcttggccagttcaaggtttgctaagacattttagagaagaaatagagagtcgttgtagggaagaacctcttattaaaaaaaaatcaaacaacccatatctggtagatcaacatcttttggagaagagaaatgcctaaa

SEQ ID NO: 221796 - DNA, 634 bp, Unknown
  Bacterial polypeptide expressing nucleotide sequence isolated from the Sargasso Sea
aatgcctaaattaaaagttaacgatattgatattgaagttgaagatggcctaactgtactccaagcttgtgaacaagctggggcagaaataccaagattttgttaccatgaaaaactttctatagctgggaattgtcgtatgtgtttggttgaaatggaaaaatcacctaaacctatagcatcatgtgcaatgcctgcagctgaaggtatgattattaaaacaaatacagaaaaagttgaaaaagcaagaaaaggtgtgatggagtttttgctagccaaccatcctttagattgtccagtttgtgatcaaggtggtgagtgtgatttacaggatcaatctatgttttatggaattgataaatcacgatttaaagagaataaaagatatgtacctgagaaatacatgggtccattaataaaaacccaaatgacaagatgtattcattgtactagatgtattagatttgccacagaggtatcgggtgtgccagaattaggtgcgattggacgtggagaaaatatggaaattactacatatttagagaaatccatggaatctgaaatgtcagcaaatgtaatagatttatgtccagttggcgcattaacttctaaaccttatgtgttcgaagcaaga

SEQ ID NO: 221797 - DNA, 739 bp, Unknown
  Bacterial polypeptide expressing nucleotide sequence isolated from the Sargasso Sea
atgcctaaaattactattaatggtaaagaagtagaatttgataaagggatgactgtattacaggcatgcgagctagccaatgttgaaataccaagattttgttatcatgaaaaactttctatagctggaaactgcagaatgtgtcttgttgaaatggaaaaatctacaaaacccatagcttcttgtgcgatgcctgcagctgaaggaatgaatattaaaactaatactgagtttgttgaaaaagctagaaaaggtgtaatggaatttttattagcgaaccatcctttagattgtccggtttgtgatcagggtggtgaatgtgatttacaggatcaatctctttactatggagtggataaatctagatttttagaaaataaaagatttgtaaatgaaaaatatatggggcctttgataaaaactcagatgacgaggtgcatccattgcactagatgtataagatttgctacagaagttgctggagttcctgaattaggagctataggtagaggcgaagacatggaaatcacaacttatctagagaaatcaatggaatcagaattatctgctaatgtcattgatctgtgtcctgtaggagcacttacttcaaaaccctatgcttttgaagcaagaccatgggaacttaaaaagactgaaagtatagatgtaatggatgcagttggatcaaatattagagtggatacttatggctgggaagtaaaaagaattttgccataga

SEQ ID NO: 221798 - DNA, 932 bp, Unknown
  Bacterial polypeptide expressing nucleotide sequence isolated from the Sargasso Sea
aatgcctaaaataaatataaacggtaaagaaatagaatttgagccaggcatgactattcttcaggcatgtgaaattgctggagcagagataccaagattttgctatcatgaaagactatcaatcgctggaaactgtagaatgtgtttagtagagatggataaatctcggaaacctattgcgtcatgtgccatgccagcagctgaaggcatgaacattaaaactaatactgaaatggttgaaaaagctagaaagggtgtaatggaattccttttagccaatcatccgttagattgcccagtatgcgatcaaggtggtgagtgtgatctacaagatcaatctctttattacggagtagataaatctagattttctgagaataaaagacatgtaagtgaaaaatatatgggtcctttaataaaaactcaaatgactagatgtattcattgtactagatgtgtgagatttgctaccgaagttgcaggcgtgccagaaataggcgcgataggcagaggtgaaaacatggagataacaacttacttagaaaaatcaatggagtctgaattatcagggaatgtaattgatttatgtccggtaggggctttaacttcaaaaccatatgcgttctccgctagaccttgggaattaaaaaaaactgagagtattgacgtgttagatgcagttggttcaaatataagagtagacacgtatgggtgggaagtaaaaagaattctcccaagattaaatgaggatattaatgaagaatggatttcagataaaacaagatattcatgtgacgggttattaaaacaaagacttgataccccgtatgttaagaaaaataataaattagtcaaatgtagttgggatgaggcgttagatgtaataattaaaaagttcaatgaaactgaaaattcaaatattgctggtcata

SEQ ID NO: 221799 - DNA, 769 bp, Unknown
  Bacterial polypeptide expressing nucleotide sequence isolated from the Sargasso Sea
aatgcctaaattaaaagtaaatgacattgaagttgaggtagaagacggtttaacagttctacaggcgtgcgaaaaagctggtgcagaaattcctaggttttgttatcacgaaaaattatcaatagcaggtaactgtcgaatgtgtttagttgaaatggaaaagtctcctaaaccaattgcttcttgtgcaatgccagctgcagagggaatgaatattaaaaccaacactccttttgttgaaaaggctagaaaaggggttatggaatttttattagctaaccatcctttagattgcccggtgtgtgaccaaggtggtgagtgtgaccttcaagaccagtctatgttttatggagtagataaatcaagatttaaagagaacaaaagagctgtaccagaaaaatatatgggaccattaattaagacacaaatgacaagatgtatacattgtacgcgatgtgtaaggtttgcaactgaagttgctggagtgtctgagttaggagcaattggtagaggagaagatatgcaaattacaacttatttggagcagtcaatgcaatcagagttgtcggcaaatgtaatagatctttgtccagttggtgctttaacttcaaaaccctatgtttttgaggcaagaccatgggaacttaaaaaaaccgagactgttgatgtgatggacgctgttggatcaaatgtaagagtagatacgtatgattgggaggttaaaagagttttaccgctaattaacgaggatataaatgaagagtggatt

SEQ ID NO: 221800 - DNA, 364 bp, Unknown
  Bacterial polypeptide expressing nucleotide sequence isolated from the Sargasso Sea
cataaacaaagatcaagatatagtttcatgtatggctagaatagctagattttataaacatgagagctgcggtcaatgtaccccttgtcgagaaggagcgggttggatgtggagaatacttgacagagtagaaaaaagaaaagctacatttagtgatattgaattactatcagatgtaacaaagcaaatagagggtcatactatttgtgcgtttggagagggctctgcttggccagttcaaggattattaagacatttcagaaaagaaattgaaagtcgatgtagagaagaacctttaattaaaaagaaaactaataatccttatttagttgaccaacatcttttggagaataaaaatgcctaa

SEQ ID NO: 221801 - DNA, 505 bp, Unknown
  Bacterial polypeptide expressing nucleotide sequence isolated from the Sargasso Sea
gggtggaaaaatttaaaagcagtgatacctggagggtcatcaatgcccatgctgccaaaagaaacatgtgaaactataaaaatggatttcgattcattagcacaggagaagagcggactaggcactgctggtgttgttgttataaataaagatgaggatataatctcatgtatggcaagaattgctcgattttacaaacatgaaagttgtggtcagtgcactccatgtagagagggctctggttggatgtggcgaatgctagaaagaatgaaacgaaatgaagcttcaagagaagaaattgaaatgttagaagatgttacaaaacaaattgaaggtcatacaatatgcgcttttggagagggttcagcttggccagttcaaggtttattaagacatttcaaaaaagaaattattaaaagaaataattttaatccattagtaaaaacaaataaaaatattccatatttagtagaccaacatttgctggataaagaaaatgcttaaa

SEQ ID NO: 221802 - DNA, 580 bp, Unknown
  Bacterial polypeptide expressing nucleotide sequence isolated from the Sargasso Sea
cttggaagaaaaaacaataccgggttcaaaaattttctgcatttctggtcatgtaaataaaccctgtaatgttgaagaggaattaggagttcctttgaaatttttggttcagaaatatgcgggtgatgttattggtggttggaataatcttcaagcaattattccaggaggttcttcagtacctcttttgcctaaagctttatgtgaagatgttttaatggattttgattcactaaaagaagctggaacaggtcttggtacaggtggtataattgtaattaacaaacaaactgatattgtttccgccatagcaaggctatcggagttttataagcatgaatcgtgcggtcagtgcacaccttgtagagaaggaacaggatggttaatgagagttatgaaaaggttagctaactatgattgctcgatagaggatttggatatgcttgaagaggtaactcatcagattgaagggcatacaatatgtgcattaggtgacgcggcagcttggcctattcaagggttattaaaacacttcaaaaaagatatcattagtagaattcaaagaaaaaatgtagcataa

SEQ ID NO: 221803 - DNA, 864 bp, Unknown
  Bacterial polypeptide expressing nucleotide sequence isolated from the Sargasso Sea
ataaagaaattgaagtagaagatggccttacagttctacaagcttgcgagcaagcaggatttgaaattcctagattctgctatcatgagaaattgtcaatagcaggaaactgcagaatgtgtttagttgaaatcgaaaaaaatccaaaacctatagcatcttgtgcaatgccagcaaccgaaggtatgaatattaaaacaaatactagtttggttgagaaagcaagaaaaggtgtgatggaatttttattagtaaaccacccattagattgtcccgtatgtgatcaaggaggggagtgtgatttacaagatcaatcaatgttttatggagtagataagtctagatttaaagagaacaaaagatatgtacctgaaaaatatatgggtcctttaataaaaactcaaatgacaagatgtatacattgtacaagatgcgtaagatttgcaacagaagttgcaggtgtgactgaactaggtgcaattggaagaggtgaagacatgcaaatcactacatatttagaaaaagctatggagtcagagttatcagctaatgtaattgatctttgccctgttggagcacttacgtctaaaccatatgtttttgaagctagaccatgggaattaaaaaaaactgagtctatcgatgtaatggatgcggtgggatcaaatatcagaattgatacatatggttgggaagtaaaaagaatacttccaagaattaatgaagatattaatgaggaatggatttcagataaaacaagatatgcatgcgatggattgaaaaatcaaagattagacactccatttatcaaagatggaaataaatttaataaaatttcatggaatgaagcatatgatatttgaa

SEQ ID NO: 221804 - DNA, 754 bp, Unknown
  Bacterial polypeptide expressing nucleotide sequence isolated from the Sargasso Sea
tgttatcacgaaaagctttctatagccggtaactgtagaatgtgtcttgtagaaatagaaaaatctgcaaaacccattgcttcatgcgcgatgccagctaccgaaggaatgaatataaaaacaaacacatccaaggtagaaaaagcaagaaaaggtgtaatggagtttttattagctaatcaccctttagattgcccagtttgtgaccaagggggtgaatgtgatttgcaagatcaatcaatgttttatggaatagacaaatctagatataaagaaaataagagatatgtgcctgaaaaatatatgggtccacttattaaaactcaaatgactcgatgcatacactgcacaagatgcataaggtttgccaccgaagttgcaggagttcctgaattaggagcaataggtagaggagaggatatgcaaataactacttatttagaaaaatccatggagtcagaattgtcagctaatgtaattgatttatgcccagtaggagcattaacttcaaaaccgtacgtttttgaagcaaggccatgggaacttaaaaaaacagaaaccatagatgtaatggatgcagtaggatcaaatattagagttgatacttatggttgggaggtaaaaagaattttacctagaattaatgaggatattaacgaagaatggatttcagataaatcacgttatgcatgtgatggactacaaaaccaaagattagacataccgtatattaaaaaggatggagttttgaaaa

SEQ ID NO: 221805 - DNA, 607 bp, Unknown
  Bacterial polypeptide expressing nucleotide sequence isolated from the Sargasso Sea
aatgactaaagagaaaaaaaaacttaacctaaattttggacctcaacatccagcagcacatggtgttttaagattaattttacagttagatggcgaaattgttgaaaaagctgatccacatattggtttacttcatagaggaactgaaaaacttattgaaaacaaaacttatatgcaagctgttccttattttgatagacttgattatgtagcaccaatgaatcaagagcatgcatttgctttagcaattgaaaaaattttaaaaataaaagtacctcttagagctcaatacataagagtaattttttgtgaaattggaagaatacttagtcatattttaaatgtaactacacaagccatggatgttggtgccttaacaccaactttatggggttttgaagaaagagaaactttaatgggtttttatgaaaaggtttctggttcacgtttacatgcaaattattttagagctggaggtgttcatcaagatttacccaaaggactagatgaggaaatttcaaaattttgtgaaaaatttccatcaataattgatgatttggaaaaactattaacagataatagaatttttaaacaaaagaaatgttga

SEQ ID NO: 221806 - DNA, 257 bp, Unknown
  Bacterial polypeptide expressing nucleotide sequence isolated from the Sargasso Sea
acttacaaataagatggccccggctctaagaaaagtttatgaccaaatgcccgaaccaagatatgtaatatctatggggagctgcgcaaacggaggaggctattatcattattcatattcagtagttagaggctgtgataaaattgttccagtagacatatacatacctggttgtccaccatctgctgaagccttattatatggaattcttcaacttcaaaaaaaaataagaagagaaggaagtctaacaagataat

SEQ ID NO: 221807 - DNA, 417 bp, Unknown
  Bacterial polypeptide expressing nucleotide sequence isolated from the Sargasso Sea
ttgacgcattaattgaaaataaaagcggtttagggaccgctgggatagtcgtaatcaataaagatcaagatataatttcttgcatggctaggattgctagattttataaacatgaaagctgcggtcaatgtacaccttgtcgagaaggagcaggatggatgtggagaatacttgatagagtagaaaaaagaaaagcaacttttagtgatattgaactattatctgatgttacaaaacaaatagagggtcacacaatttgtgcatttggcgagggttctgcctggccagtccagggtttattaagacattttagaaaagaaattgaaagcagatgcagagaggaacctttgattaaaaagaaaactaacaacccttatttagttgaccagcatcttttggagaacaagaatgcctaaa

SEQ ID NO: 221808 - DNA, 750 bp, Unknown
  Bacterial polypeptide expressing nucleotide sequence isolated from the Sargasso Sea
tagttggattatatggctgtccaactatagttaataatgttgaaacagtttcggttgttcctacaattttgagaaaaggttataaatggtttgcatcattagggaaacccaaaaatactggtactaaaattttttgtatatcgggaaacgtaaacaaaccttgtaatgttgaagaggaaatgggcattcctttaaaagatttaattaatacccacgctggtggagtagtaggtggatgggaaaatttacaagcagtcatacctggtggttcttctatgcccttattaaataaagaaatttcagaaaagataaatatggattttgactcattagtcgaaaataaaagtgggttaggaactgctggaatagtagttattaataaagatcaagatattattaaatgctttgcaagaatagctcgattttataaacatgaaagttgtggtcaatgtactccttgtagggaaggttcaggctggatgtggagaattttagaaagaatggctaaaggcgaagcatcaagagaagaagtagaaatgttgtttgatgtcacaaaacaaatagaaggtcatactatttgtgcttttggtgaaggatctgcttggccggtgcaaggacttttaaaaaattttaaaaaagagattattaaaagaaataactttgatccattaattaagacaaataaaaatatcccgtacctagtagatcaacacttattagaaaaagataatgcccaaaataaaagttaat

SEQ ID NO: 221809 - DNA, 667 bp, Unknown
  Bacterial polypeptide expressing nucleotide sequence isolated from the Sargasso Sea
atgattaaactaaaaattaataataatgaaattgaagttgaagagggattaactgttttgcaagcttgtgaaaaagctggcgttgaaatacctagattttgttatcacgaaaaactttcaatagcaggtaattgtagaatgtgtctagtagaaattgaaaaatctcctaagccaattgcttcatgtgctatgccagcttcagagggaatggtaataaaaacaaatacacctttcgttgaaaaatctagaaaaggagtgatggaatttttattagccaatcaccctttagattgtcctgtttgtgatcaaggaggagaatgtgatcttcaagatcaatctatgttttatggtattgataaatcaagattcaaagaaaataaaagatatgttccagaaaaatatatgggaccattaattaaaacacaaatgacaaggtgcatacattgcacgagatgtataaggtttgcaactgaagtagctggagttcctgagttaggtgcaattgggagaggtgaagatatgcagataacaacttatttagaaaagtctatgcaatcagaactttcagcaaatgttatagatttatgtccagttggagcgcttacatccaaaccatatgtatttgaagctcgaccttgggagttaaaaaaaactgaaactatagatg

SEQ ID NO: 221810 - DNA, 460 bp, Unknown
  Bacterial polypeptide expressing nucleotide sequence isolated from the Sargasso Sea
atgccaaaagaaattaaaaaactaaatttaaattttggaccacaacatccagcagcacatggtgttttgagattaattttgcaattagatggagaagttgttgaaaaagctgatccacatattggattattgcatagaggtacagaaaaacttatagaaaataaaacttatatgcaagctgtaccttattttgatagacttgattatgtagcgccaatgaaccaagaacatgcatttgcattggcaattgaaaaaattttaaaaattgatgtaccaattagagcgcaatatttaagagtaattttttgtgagattggaagaatactaagccacattttaaatgtaaccacacaagcaatggatgtaggtgcattaacgccaaccctgtggggatttgaagaaagagaaacactaatgggcttttatgaaaaagtttcaggttcacgtcttcatgcaaatt

SEQ ID NO: 221811 - DNA, 463 bp, Unknown
  Bacterial polypeptide expressing nucleotide sequence isolated from the Sargasso Sea
aatgccattaataccgaaagaaagatgtgaaactttaaaaatggactttgatgcttgtgttgaagaaaaaagtggacttggtacagcaggtattgtggttattaacaaagatcaagacataattaaatgtatggcaaggattgcaagattttacaaacatgagagttgtggtcaatgtacaccttgtagagaaggttctggttggatgtggagaatgcttgagagaatggcaaaaggtgatgcaactaaggatgagatagatatgttaggtgatgttacaaatcaaattgcaggacatactatttgtgcttttggagaaggctcatcatggccagttcaaggattgcttagacattttaaaaaagaaattgagaaaagaaacaatttagatcctattgttcaaaagaaaaacaatattccatatttagtagatcaacatttattggataaaaaaaatgcttaa

SEQ ID NO: 221812 - DNA, 845 bp, Unknown
  Bacterial polypeptide expressing nucleotide sequence isolated from the Sargasso Sea
ctgcaagcttgtgaaaaggctgggggctgaaataccaagattttgctatcatgaaaaattatcaatagcaggaaattgcaggatgtgtcttgttgagatagaaaaatctccaaaacctgtagcttcttgtgcaatgcccgctgctgagggcatggttgtaaaaacaaatactcctaaaatagagaaatctagaaaaggagtaatggaatttttattagcgaatcatcctttagattgtcctgtttgtgatcaaggtggtgaatgtgaccttcaagatcagtccatgttctacggaatagataaatctagatttaaagaaaataaaagagcagttccagataaaaatatgggtcctttaattaaaacccaaatgaccagatgtatccattgtactagatgtatcagatttgcaacagaaattgctggagttcctgaacttggtgcaattggcagaggcgaggatatgcaaattactacctacttagaaaaatcaattcaatctgaactttctggaaatgtaatagatctttgtcctgttggagctctcacttcaaaaccttatgtatttgaagcaagaccctgggagttaaaaaaaacagagaccatagatgtaatggatgctgttggatccaacataagagtagatacatacgactgggaggtaaaaagagttctaccaataattaatgaagatataaatgaggaatggatatcagataaaacaagatatgcttgcgatggtttgttaaatcaaagactagatacgccattcattaaatataataataaatttgaaatagcgtcttgggatgaagtttttaaaattataaaatcaaaaatacaaa

SEQ ID NO: 221813 - DNA, 493 bp, Unknown
  Bacterial polypeptide expressing nucleotide sequence isolated from the Sargasso Sea
atgggagtacttgaaaataaatttaatgataacattgtcgtaggctctcttgataaatttttaagctggtctaggtctacatctccgtggtttttccaattcgggttggcatgttgcgctattgagatgatggctacagctgcagctcgtcacgatcttgaaagaattgggatgatgcctcgatcatcacccagacaagcggatgtaatgatagtcgctggaactgttactatgaaaatggctttgcgagtaaaaaagctttacgaacaaatggctaatccaaaatatgttatttctatgggtagttgcgctactagtggtggaccctattggcaacatggatatcatgttcttaagggagttgatcttgtagttccagttgatgtttatgttccaggttgtccaccaagacctgaagcacttattgaaggcttattaaagctccagcagcttatttctgatgaaagacccctcacacgtaaacttgcatgaa

SEQ ID NO: 221814 - DNA, 251 bp, Unknown
  Bacterial polypeptide expressing nucleotide sequence isolated from the Sargasso Sea
aaataagatggctccagctttgagaaaagtttacgatcaaatgccagaacctagatatgtagtgtcaatgggaagctgtgcaaacggaggaggttactaccattactcttactctgttgtaagaggctgcgataaaatagtgccagttgatatttatgttccaggatgtcctccatcagcagaggcattgttatacggtatacttcaacttcaaaaaaaaattagaagacaaggtacaattaaaagataat

SEQ ID NO: 221815 - DNA, 871 bp, Unknown
  Bacterial polypeptide expressing nucleotide sequence isolated from the Sargasso Sea
tatgacagttatgcaagcttgtgagcttgctggtgttgagattcctcgcttttgttatcatgacaaactatcgatagctggtaattgtagaatgtgtttagtggaaatggaaaaatctccaaaaccaatagcatcttgtgcgatgcctgcaggagaaggaatggttattaaaactaatactgatcttgtcaaaaaagcaagacgaggtgttatggaatttcttcttataaatcatcctctagattgccctatatgtgatcaagggggggaatgtgatttgcaagatcaagctctctactatggttttgacaaatctagatatgaagaaaataaaagagcagttaaaaataaaaatatgggacctttggttagtactataatgacaagatgtattcattgcactagatgtgtaagatttgcatcagaagttgcaggggtagatgatttaggtttgcttggtaggggagaaaatgcagaaattacaacatatttagaaaaaacaattgattcagaattatctgggaatgtaatagatctatgtccagtaggggccttaactagcaaaccctatgcttttaaatctagaccttgggaattaactaaaactgaaacacatgatgtttttgacgcaattggttctagtataagagttgatactattggcaataatgttttaagggttttgcctagatcaaatgaagaaataaatgaagagtggataagtgataaaacaagatttgcaattgatggtctttcaaaacaaagattagacaaagtttttattaaaaaagaaaataaattgtcagttgacacttgggacaatgctctaaaagaaatagctaaacaaataaataaaagactcccagagaac

SEQ ID NO: 221816 - DNA, 424 bp, Unknown
  Bacterial polypeptide expressing nucleotide sequence isolated from the Sargasso Sea
gatggattttgactctttaattaatgcaaagagtggccttggtactgcaggcgttgttgttatcaacaaagatcaagacattattaaatgtatgacaagaatagcaaaattttacaaacatgaaagttgtggtcaatgtaccccatgtagagagggatcaggttggatgtggcgaattttagagagaatatctaaaagagaagctacaaaagaagatgttaatttattatcagaagttacaaaacaaattgaaggacacacaatctgtgcatttggagagggctctgcttggccggttcaaggacttttaagacattttagaaaagagatagacaaaagatgtttttctgaacctttaattaagaaaaaaagaaaaataccttatctcgttgatcaacatttattagagactaaagatgcctaa

SEQ ID NO: 221817 - DNA, 244 bp, Unknown
  Bacterial polypeptide expressing nucleotide sequence isolated from the Sargasso Sea
aatggctccagctcttagaaaggtatatgatcaaatgccagaacctagatatgtaatatccatgggaagttgcgccaatggaggtggttattatcattattcatattctgttgtaaggggttgtgatagaattgttccagttgatatttatgttccaggttgtccaccttcagcagaagctcttctttatggaattttacaacttcaaaaaaaaataagaaatcgcggatccatagaaagataa

SEQ ID NO: 221818 - DNA, 752 bp, Unknown
  Bacterial polypeptide expressing nucleotide sequence isolated from the Sargasso Sea
acctttcccagctttgataggtctatatggatgtcctacaataataaataatgttgaaacaattgcagtggttccaactattttaagaagaggagccaaatggtttgcatctttaggtagagaaaaaaatactggaaccaaaattttttgtatttctggaaatgtaaacaatccttgtaatgttgaggaagaaatgagtattcctttgaaagatttaattgaagtacatgctggtggagtaattggtggatgggacaatttacaggctgtaatacctggaggttcttcaatgccattaataccaaaagaaagatgtgaaactttaaaaatggactttgatgcttgtgttgaggaaaaaagtggacttggtacggcaggtattgtggttattaacaaagatcaagacataattaaatgtatggcaagaatcgcaagattttataaacatgagagttgtggccaatgtacaccttgtagagaaggttctggatggatgtggagaatgcttgagagaatggcaaaaggtgatgcaaccaaagacgaagtagatatgctaggtgatgttacaaatcagatcgcaggacatactatttgtgcttttggagaaggttcatcatggccagtgcagggattgcttagacactttaaaaaagaaattgagaaaagaaacaatttggatcctattgtacagaagaaaaataatattccatatttagtagatcaacatttattggataaaaaaaatgcttaaa
